United States Patent Application Publication US 2005/0196754 A1 - sequence listing, part 12

SEQ ID NO: 23334 - DNA, 1800 bp, Homo sapiens
  SIMILAR (775)..(1230): 1001254mologous to Homo sapiens brain ryanodine receptor,accession number AB001025,Smith-Waterman Score=787.
atgattggagcagaggatgtgatggagagcgtgctgctggcaggtgaagttagagaggctatggctacatcacatttgtttctctctctcactctgaacgcttctgagaagtttcaaaggaaggcagcacaaggaggtggccacaggaccctgttatacggccatgcagttctcctgaggcactctttcagcggaatgtatctaacatgcttgactacatcaagatcccagacagacaaacttgcctttgatgtaggtctacgggaacatgccacaggtgttgtcgaccttgctggaaattacaaagaggaggttcacacggaatccaacagaagggtcccctgttcctgtctggctagttctctgaatgcacttctggctcagaaaccccttcagagttgtaaacaaaggtccgaaggagagaaagttcgaattggcgatgacctcatcctcgtcagcgtgtcctctgaaagataccttctgaataattcctcaccccagaataaagtgtcccactttgaagctgcttctagatcaggtggagaaatctcccacaggctgtatagaaagaaccagatgacacatctctcagtatcaaatggtaacatacaagtggatgcctcctttatgcaaacactctggaatgtacatcctacgtgctcaggaagtagcatcgaagaaggatacctacttggtgggcatgtagtacgtcttttccatggtcatgatgaatgtttgacgataccatctacagaccagaatgattcccagcacagctggagtggcagtaacatcagatggggccaggctttccgactccggcatctcaccacaggccactacctggccttgacagaagaccaaggccttatactgcaagaccgggcaaagtcagacaccaagtccacagctttctctttccgggcatcaaaggaactcaaggagaaattagactccagtcacaagcgagacatagaaggcatgggagttccagaaatcaagtatggagattctgtctgctttgtgcagcatatagccagtggtctgtgggtgacctacaaagcacaagacgccaaaacttcccgcctgggacctctaaaaagaaaggtcatactccatcaggaaggccacatggatgatggattaacactgcagagatgccagcgtgaggagtcccaggctgctcggatcatccggaacactacagccttattcagccagtttgtcagtcacataattgcaagtaaaacacttctcagcaaatgcaaaagaaatgaaatcataacagtctcagaccacagcaaaatcaaattagaactcaagaaactcgctcaaaatcacacaactacatgggaagtgaacaacctgctcctgaatgactcctgggtaaataatgaaattaaggcagaaatcaagaagttctttgaaaccatgttggaagttcaggccaggtcaatcaggcaagagaaagaaataaagggtattcacacaggaagagaggaagtcaaactgtctctgtttgcagatgacatgatcctgtatctagaaaaccccatcatctcaatccaaaagcttcttaagctgataagcaacttcagcaaagtctcaggatacaaaatcaatgtgcaaaaatcacaagcattcctaaacaccaacagcgaacaagtggagagccaaatcatgaatgaattcccattaatacttgctacaaagagaataaaatacctaggaatacagctaacaagggaagtgaaggacttcttcaaggagaacttaaaaaacactcgtcaaagaaattag

SEQ ID NO: 23335 - DNA, 4278 bp, Homo sapiens
  SIMILAR (1)..(1908): 961254mologous to Homo sapiens ryanodine receptor 3,accession number AJ001515,Smith-Waterman Score=3190.
atggttgacacactggtagaatcatctaccaatgtagaaatgatcttgaaattctttgacatgttcttgaaacttaaagacttaaccagctcagacaccttcaaagaatatgacccagatggtaaaggaattatctccaaaaaagaattccagaaggccatggaagggcaaaaacagtacacgcagtcagagattgactttctcctgtcgtgtgcagaagctgatgagaatgacatgtttaattacgttgattttgtagaccggttccatgagccagccaaggacatagggtttaatgtggctgtgttattgacaaatctttctgaacacatgccaaacgattcccgcctgaagtgtctgttggacccagcagaaagtgtgctaaattacttcgaaccctacctaggacgcatcgagatcatgggtggggccaagaagattgagcgtgtttattttgagatcagtgaatccagtcgcactcagtgggagaagccccaggtgaaggaatctaagcgacagttcatttttgatgttgtcaatgaaggtggggagcaggaaaagatggagctgtttgtgaacttctgtgaggacaccatctttgaaatgcagttagcatctcagatctctgaatccgattcagctgacaggccagaagaggaggaagaagatgaagattcttcttacgtgttagaaattgcgggtgatttattaagaagacggaggaatgtcaccgacttcctgaagagagcacccctgaagaacctcaggaagcagtacaggaacgtgaaaaagatgactgcgaaggagctggtgaaggtgctcttctcctttttctggatgctgttcgtggggctattccagttgctcttcaccatcctgggaggaatctttcagatcctctggagcacagtgtttggagggggcctggtagaaggggcaaagaacatcagagtgaccaagatcctgggtgacatgcctgacccaacccaatttggtatccatgatgacactatggaggctgagagggcagaggtgatggagccaggtatcaccactgaactagtacacttcataaagggggagaagggagatacagatatcatgtcagacctctttggactccacccaaagaaagagggcagcttaaagcatgggcctgaagtgggtttgggtgacctctcagaaattattggcaaggatgaaccccctacattagagagtactgtacagaagaagaggaaagctcaggcagcagaaatgaaagcagcaaatgaagcagaaggaaaagtagaatccgagaaggcagacatggaagatggagagaaggaagacaaagacaaagaagaggagcaagctgagtacctgtggacagaagtgacaaaaaagaagaagcggcggtgtggtcagaaggttgagaagccggaagctttcacagccaatttctttaaagggctggaaatctatcagaccaagttactgcattacctggccaggaatttctacaacctgaggttccttgctctgtttgtagccttcgctatcaacttcatcctgcttttttataaggtcactgaagaacctttagaagaagagacagaggatgttgcaaacctatggaattcctttaatgacgaggaagaggaagaagcgatggtattctttgtccttcaggagagcaccgggtatatggcaccaaccctgcgtgccctggccatcatccataccatcatctctctagtctgtgtggtgggctactactgcctgaaggtgcctttggtggttttcaaaagggaaaaagaaatcgccaggaagctggagtttgatggcctatatatcaccgaacagccatctgaagatgacatcaaggggcagtgggaccgcttggtgatcaacacaccgcaacgccctgcccttggagaatgtctggcctcgctggcagctgccataccagtggcattcctggagcccacccttaatcgctacaatccactctcggtcttcaacaccaaaacccccagggagaggtctagtaagtatctcccctcaaaggtcatcaacccatttcatgtgctgagaggagaggagccacacaggcagggagcagcagccctgcagcactgtggctttcttggtctgagaggagccaggagtgcctctccagagtggtatcagaaggtgcacatccacagtaataacccagttatactcttcaagtccatggagaggcgtgcttctaaagatgctgatgacacatttttgtcctcatggaagataagacatagaaaagcaccaaaaggaagagaaagtgtacaagaaagaatatttcttagcaaacatattgacacgctagttgtctgggttttaaaagatattggtccacccctgacatccaaggaggagagatttttagccttctatccaccagaaggctctagtgatagcaacaaaagtcatcactacggaaaggctaatagtgcttcactgggcctattccatagcatagagactgctgggatccattgctttgcaactgcacatcctgtccaggtcacctctgaacacctcagtctcatcctgggcaacattctgaaaatcatcaacaacaacctgggcatcgatgaggcctcctggatgaagcgcattgcagtgtatgcacagcccatcatcagcaaagccaggcccgacctgctgagaagccacttcatcccaactctggagaagctgaagaaaaaggctgtcaagacggtgcaggaggaggagcagttgaaagccgatggcaaaggggacaccccaggaggcagaactcctcatcctggacgagttcgcggtcctctgcagagatctctatgccttctaccccatgctgatccgctacgtggacaacaacagccaaattcagctgtcagatatcaaccaagaataggaaggaagttgcatttaatgagaggtgaggttttgcaaaggaggagcggtaccttgagcaacacttcacttaccaaagagggaaattctgtgtctaacgagagcggcaagtttgcagaacaggctgaagcagaaaagaaagcaattcagaaagtcacagagattaaaggactcacgctttgtatcccccaccccaatgtcccttacactgtgaaacagagagcacagagtggcattctagggagatgcactatgttcctagcaaagaatcctctggtccacactcaggaacatgtgtggttcacactgccttggagaatcatgaaaggtgctctgtcccagggatatgggagttttgtctacaatccggattggggctgcctcctttctttcagagatggcctgcccagagaggaggaatgtagaaaggcagtctggctacagcagctttgccgtgctgtgttcgaacttcctggcagctttgtttatactgtgaggggaaaacggcctactcaagtctcagtaatggcagacacccctcccccaaccaagcccgagtgtcccaggtcgacttcagaccgttgggctggcagcaagaatttcaagccagtggatcttcacttgttgggctccatgggtgtgggatccgctgagcaagtctacttggcttcctggcttcagcctcctttccaggggtgtgaacagttctgtctcgctggtattccaggtgccactgggaattcagcattttatgtggatagtgagttattggttcgagcccttcaagagctgcctctctgcctccgactcaacgttgctgccgaactggtccagggtacagttcctttagaggttcctcaggtgaaaccaaagagaactgatgatggcaagggattagggatgcagttaaaggggcccttggggcctggaggaagggggcccatctttgagctgaaatctgtggctgctggctgccctgtgttgctgggcaaagacaacccaagcccgggtccttcaagggattctcagaaacccacttccccactgcagtcagcaggagaccatttggaagaagaactagatctgttgcttaatttagatgcacctataaaagagggagataacatcttaccagatcagacgtctcaggacctgaaatccaaggaagatggggaggtggtccaagaggaagaaggtatggctttcattttattccccgtgaatcttgattctggtgttttttcaagaacagccccgcccgcatcacatccgcacacatccctctgggtgtctgacattgatccagtgttgtccactgacatctatttctgtgctcacgtctctgcttccccctga

SEQ ID NO: 23336 - DNA, 1851 bp, Homo sapiens
  SIMILAR (73)..(729): 951254mologous to Homo sapiens ryanodine receptor 3,accession number AJ001515,Smith-Waterman Score=1048.
atgatatgcaagaagagcagagtgcttccatatcaagcagcttatgtctcgcagcatggcagtgcctgccaaccttcctcacacctcccctctgttggttctctcagcagcacgggggacgatgaagaggaagaagaaatcgtgcatatgggcaatgcaattatgtcattttattcggcccttatagatctactgggccgctgtgctcctgaaatgcacctcatccagacaggaaagggggaagccatccgcatcaggtccatcctgcgctccctggtccccacagaagacctggttgggatcatcagcatccccttgaaactgccctccctcaacaaagatgggtcggtcagtgagccagatatggcggccaatttctgccctgaccacaaggcacctatggtgctgttcttggaccgcgtttatggcattaaggatcaaacttttctgctccacttgctggaggttggatttttacctgacctaagagcttctgcctctctagatacagtttccctaagcaccacagaggctgcgcttgcactaaataggtatatatgttctgctgtgctcccgctcctcacaagatgtgcccctctctttgccggaacagaacactgcacctctctgattgattccacactgcagacaatatacaggctatccaagggacgttccctcaccaaagcacaaagggacactatagaagaatgtttgcttgccatttgcaaatgtgaaactgctgtaaagtcactggggtgtgagagaggggagagggagcgggcacggggagtgggggcaaggaaacaacgggtagtaattgacgagagaaaatcttcagacccacgacttgcagcccaccatcctctccccatatcagcatcccccaaagatcttccagaattacaagcaaagcttctgacgaatcactatgaacagtgttggaagtattactgcctgccttcaggatgggggagctacgggctagctgtggaagaagagctgcacctaacggagaagcttttctgggggatttttgactcgctctcccataagaaatatgacccagatcttttccgaatggccctgccttgtctcagtgctatagctggggccttgccaccagattatttagataccagaatcacagccacgttggagaaacagatctcagtggatgcggatggcaactttgacccaaaacctattaacaccatgaatttttccttgcctgaaaaattggaatacatcgtcaccaagtatgctgagcattcacatgataaatgggcctgtgacaaggcaaagtgggaagactgtgccaaggatatccaggattcctgtgggcagccagttaaggattggggccatttctcagctgcagcctacgagaataaaatacctaggaatccaaattacaagggatgtgaaggacctcttcaaggagaactacaaaccactgctcaacaaactaaaagaggacacaaacaaatggaggaacgttccatgcccacgggtaggaagaatcagtattgtgaaaatggccatactgcccaagaaattaattcacgatggattaaagacttaactgttagacctaaaaccataaaaaccctagaagaaaacctaggcaataccattcaggacataggcatgggcaaggacttcatggctaaaatgccaaaagcaatggcaacaaaagccaaaatagatgaatgggatctaattaaaccaaagagcttctgcacagcaaaagaaactaccatcagagtgaacaggcaacctacagaatcggagaaaatttttgcaatctacccatctgacaaagggctaatatccagaatctacaaataa

SEQ ID NO: 23337 - DNA, 15820 bp, Homo sapiens
  SIMILAR (263)..(14452): 981254mologous to Homo sapiens ryanodine receptor 3,accession number AJ001515,Smith-Waterman Score=24298.
  misc_feature (1)...(15820): n = a,t,c or g
tttcgtcgagaggggtgggcggactgcttggttggcgttggcgctctgcagtgcagtggagtgttagcccagctccctatatggtcggggattagcttggcgctgctgaggctgaggctgagccaggagctggaggaggaggtggaggacgaggacgaaaaggaggaggagaaagagcgcagcagcagtcagcgcacgccgagcggctgccgggggaagcagaggcgccggaggctggggcaccgccgacgcctcgggagccatggccgaagggggagaaggaggcgaggacgagatccagtttctgaggactgaggatgaagtggtactccagtgcatcgccaccattcataaggagcagaggaagttctgcctggcagccgagggacttgggaatcgcctgtgcttcttggaacccacttcagaagccaagtacattcctccagatctctgcgtctgcaattttgtgctggaacagtccctatctgtcagagccctgcaggaaatgcttgccaacacaggtgaaaatggcggcgaaggggcagcacaaggaggtggccacaggaccctgttatacggccatgcagttctcctgaggcactctttcagcggaatgtatctaacatgcttgactacatcaagatcccagacagacaaacttgcctttgatgtaggtctacgggaacatgccacaggagaagcctgttggtggactatacatcctgcttccaaacagaggtccgaaggagagaaagttcgaattggcgatgacctcatcctcgtcagcgtgtcctctgaaagataccttcatctctcagtatcaaatggtaacatacaagtggatgcctcctttatgcaaacactctggaatgtacatcctacgtgctcaggaagtagcatcgaagaaggatacctacttggtgggcatgtagtacgtcttttccatggtcatgatgaatgtttgacgataccatctacagaccagaatgattcccagcacaggaggatattctacgaagctgggggagctgggactcgagccaggtctctttggagagtggaaccccttcggataagctggagtggcagtaacatcagatggggccaggctttccgactccggcatctcaccacaggccactacctggccttgacagaagaccaaggccttatactgcaagaccgggcaaagtcagacaccaagtccacagctttctctttccgggcatcaaaggaactcaaggagaaattagactccagtcacaagcgagacatagaaggcatgggagttccagaaatcaagtatggagattctgtctgctttgtgcagcatatagccagtggtctgtgggtgacctacaaagcacaagacgccaaaacttcccgcctgggacctctaaaaagaaaggtcatactccatcaggaaggccacatggatgatggattaacactgcagagatgccaacgtgaggagtcccaggctgctcggatcatccggaacactacagccttattcagccagtttgtcagtggaaacaatcgcacagctgcccccatcaccctgcctatagaagaagtcctgcagaccctacaggacttgatcgcctacttccagcccccagaggaggagatgcgacatgaagacaagcagaacaagctccgctcactcaaaaacagacaaaatcttttcaaggaagagggaatgttggcccttgtcttaaattgcattgaccgcttaaatgtctacaatagcgtagcacactttgcagggattgcaagggaagagagtggcatggcctggaaagaaattctgaacctcctctacaaattgctggctgctctcattcgcggaaacagaaacaattgcgctcaattctccaataaccttgattggctcatcagtaaattggacagactagaatcttcctcaggtatcttggaagttttgcactgcatcttaactgaaagcccagaagccttaaatctgatagcggagggccacatcaagtcgatcatctccctgttggataagcacgggcggaatcacaaggttctggatatcctgtgctccctctgtctctgcaatggggttgcagtgagagccaaccagaatctgatctgtgacaacttgctgccccggagaaacctactcctgcagacacgactgattaacgatgtaaccagtatccggccaaacatcttcctgggagtcgcggagggctcagcccagtacaagaagtggtacttcgagctgattatcgaccaggtggaccccttcctaacagcagagcccacacatctgcgggtgggctgggcctcttcttcaggctatgccccatacccaggaggtggagaaggatggggaggcaatggtgttggtgacgacctgtactcctatggctttgatggacttcacctttggtcaggccggatacccagagctgtggcttccatcaaccagcacctcctgagatcggatgacgtgggtaagctgctgcctggacctcgggggtgcccagcatctcattccgcatcaatgggcagcccgtgcaggggatgtttggagaacttcaacacagacgggctcttcttccctgtgatgagcttttcagcaggtgtcaaagtacgtttcctgatgggtggacgtcatggagagtttaagttcctgcctccctctggctatgccccttgctatgaagccttacttccaaaagagaagatgagattggagcctgtcaaagaatataaacgtgatgctgatggcattagagatctcttgggtaccacccagttcctctcccaagcctctttcatcccatgccccgtagacaccagtcaggttattttgccacctcacctagaaaagatccgagacagactagctgaaaacatccatgagctttggggaatgaataaaatagaacttggctggactttcggcaagatacgagatgacaataaaagacaacacccttgccttgtggagttttcaaagctcccagaaactgagaagaactataacctgcaaatgtcaactgaaaccttaaaaaccctcttgaccctgggttgccacattgctcatgttaacccagctgctgaggaggatctcaagaaggtcaaactgcccaaaaactatatgatgtccaacggctataagccagcccctttggatttgtctgatgtgaagctgttacctcctcaagaaattttagtggataagcttgcagaaaatgcacacaatgtttgggcaaaagacagaataaaacaaggatggacctatggcatccaacaggatttgaagaacaaaagaaatccccgtctggtgccatatgcattactggatgagcgtaccaagaagtcaaacagggacagcctgcgggaagctgtgcgcacttttgttggttacgggtataacattgagccatcagaccaagaactagctgactcggctgtggagaaggtcagcatagacaagatccgatttttccgggtagagcgatcttatccagtgagatctggaaagtggtattttgagtttgaagtggtgactggaggagacatgcgagtcggctgggcgaggccaggctgtcgacctgatgtcgagctgggggccgatgaccaagcctttgtgtttgaaggcaacaggggccagcgttggcatcaaggaagtgggtattttgggcgtacctggcagccaggggatgtggtcggatgtatgattaacctggatgatgcttcaatgatcttcacactgaatggggagctgctgatcaccaacaaaggctctgaacttgccttcgctgactacgagattgagaatggcttcgtgcccatctgctgtctgggtctatctcagatcggccgcatgaatctcgggacagatgccagtaccttcaagttttataccatgtgcggtctccaagagggctttgagccttttgctgtcaacatgaacagagatgttgctatgtggttcagcaagcgcctcccgacgtttgtcaacgtgccaaaggatcatccacacatagaggtcatgaggattgatggcaccatggacagccctccgtgtctcaaggtgacgcataagacatttggcacacagaatagcaatgccgacatgatctattgccgcttgagcatgcctgtcgagtgccactcctccttcagtcacagcccctgtctggacagtgaagctttccagaaaaggaaacagatgcaagaaatactctctcatacaacaacacagtgctactacgccatccgcatctttggtggacaggatccatcctgtgtctgggtcggatgggtgactccagactatcacttgtacagtgaaaagtttgacctgaataaaaactgcacagtgactgtcaccctaggggatgaaagaggccgggtccatgaaagtgtgaaacgcagcaactgctacatggtctggggtggagacattgtagccagttcccagagatcaaatcggagcaacgtggacctggagatcggctgtctcgtggatctggccatgggcatgttgtccttctcagccaatggaaaggaactgggcacctgctaccaggtggagcctaataccaaagtgtttccagcagtcttcctgcagcctacaagtacttctttgtttcagtttgaacttggaaagctgaagaacgcaatgcccctgtcagcggccatattcaggagtgaagaggagaacccagtcccacagtgtccacctcggctggacgtccaaaccatccagcccgtgctctggagccgcatgcccaacagcttcctgaaggtggagaccgagcgtgtgagcgagcgccacggctgggtggtgcagtgcctggagcccctgcagatgatggcgctccacatccccgaggagaacaggtgtgtggatatcctggagctctgtgagcaggaggacctgatgcggttccattaccacacgctgaggctctacagcgcggtgtgcgccctgggaaacagccgcgtggcctacgccctgtgcagccacgtggacctctcccagctcttctatgccattgacaacaagtacctccccggcctccttcgatctggtttctatgacctgctcatcagcatccacctggccagcgccaaggagaggaagctgatgatgaagaacgagtacatcatccccattaccagcaccaccaggaatatctgcctcttcccggacgagtccaagaggcatggactgcctggggtgggcctgagaacatgtctcaagcccgggttcaggttctccaccccttgctttgttgtgactggtgaggatcaccaaaagcagagccccgagattcccttggagagtctcaggacgaaggctctgagtatgctgacagaggcagtgcagtgcagcggggcccacatccgagaccctgtaggggggtctgtggagttccagtttgtgcctgtgctgaaactcattggaaccctgctggtcatgggcgtgtttgatgatgatgatgttcggcagatcctcctcctgattgatccctctgtgtttggggagcatagtgcggggacagaggagggagcagaaaaggaggaagtgacccaggtggaggagaaggctgtggaggctggggagaaggccggcaaggaggctcctgtcaaaggcttgttgcagactcgattacccgaatccgtcaagctgcagatgtgtgagctcctcagctatctctgcgactgtgagctgcagcaccgagtggaggccattgtggcatttggtgacatttatgtctccaagctgcaggcaaatcagaagttccgctacaatgagctcatgcaggccctgaacatgtctgcggccctgactgcccggaagaccaaggagttccgctcacccccacaggagcagatcaacatgctgcttaactttcaactgggagagaactgcccctgcccagaggagattcgggaggagctgtatgatttccatgaggaccttctccttcactgtggggttcctttggaagaagaggaagaggaggaggaggacacctcctggacaggaaaactctgtgccttggtttacaaaatcaaaggcccacccaagccagagaaggagcagccgacggaggaggaggagagatgccccacaacattgaaggaactcatctcacagacgatgatctgctgggcccaggaggaccagatccaggattcagagctggtccgaatgatgttcaacctcctccggaggcagtatgacagcattggggagctgctgcaggcgctgcggaagacctacaccatcagccacacctctgtaagcgacaccatcaacctgctggctgccctgggccaaatccgctccctcctcagtgtcaggatgggcaaggaagaggagttgctcatgatcaatgggctgggagacataatgaacaacaaggtgttttaccagcatcccaacctcatgagagtcctgggcatgcacgagacggtgatggaggtgatggtgaacgtgttgggtacagagaaatctcagattgcatttccaaagatggttgctagctgctgccgtttcctttgctatttctgtcgaattagccggcaaaatcagaaggccatgtttgagcatctgagttatcttctggagaatagcagtgttggcctagcctccccgtcgatgaggggatccaccccgctggatgtggcagcttcctctgtgatggacaacaatgagttagcgctgagcttagaggaaccagacctcgagaaggtggtgacctacttggcaggctgtggcctacagagctgccccatgcttctggccaaaggataccctgatgtcggctggaaccccattgaaggggaacgctacctgtccttcctgaggtttgctgtcttcgtgaacagtgagagtgtggaagaaaacgccagcgttgtggtcaagctgctcatcagacgcccagagtgcttcggcccggccctgcggggtgaggggggaaacggactcttggcagccatgcagggtgccattaagatctctgagaacccagcgctcgacctcccctctcaaggatacaaaagagaagtcagcacggaggacgatgaagaggaagaagaaatcgtgcatatgggcaatgcaattatgtcattttattcggcccttatagatctactgggccgctgtgctcctgaaatgcacctcatccagacaggaaagggggaagccatccgcatcaggtccatcctgcgctccctggtccccacagaagacctggttgggatcatcagcatccccttgaaactgccctccctcaacaaagatgggtcggtcagtgagccagatatggcgggcaatttctgccctgaccacaaggcacctatggtgctgttcttggaccgcgtttatggcattaaggatcaaacttttctgctccacttgctggaggttggatttttacctgacctaagagcttctgcctctctagatacagtttccctaagcaccacagaggctgcgcttgcactaaataggtatatatgttctgctgtgctcccgctcctcacaagatgtgcccctctctttggcggaacagaacactgcacctctctgattgattccacactgcagacaatatacaggctatccaagggacgttccctcaccaaagcacaaagggacactatagaagaatgtttgcttgccatttgcaatcacttgaggccttccatgttacagcaactcctgcgacgcctcgtttttgatgtgccgcaactcaatgaatactgcaaaatgcctctcaagcttctgacgaatcactatgaacagtgttggaagtattactgcctgccttcaggatgggggagctacgggctagctgtggaagaagagctgcacctaacggagaagcttttctgggggattattgactcgctctcccataagaaatatgacccagatcttttccgaatggccctgccttgtctcagtgctatagctggggccttgccaccagattatttagattccagaatcacagccacgttggagaaacagatctcagtggatgcggatggcaactttgacccaaaacctattaacaccatgaatttttccttgcctgaaaaattggaatacatcgtcaccaagtatgctgagcattcacatgataaatgggcctgtgacaagagtcagagtggatggaaatatgggatttccctggatgaaaatgtgaagacccacccactgataaggcctttcaagacattaacggagaaggagaaggaaatttatcgctggcctgcgcgagagtccctgaaaaccatgctggctgtgggctggactgtggagaggaccaaagagggagaagctttggttcaacagcgggaaaatgagaagcttcgaagtgtgtcccaggccaaccagggcaacagctacagtcctgctcccctcgacctctcaaacgttgtgctctccagagagctccagggaatggtggaggtcgtggctgagaactatcacaatatctgggccaagaagaagaagctggagctggagagcaaaggtggtggcagccaccctcttctggtaccatatgacaccttgactgccaaggaaaagttcaaggaccgggagaaggcacaggacctgtttaagttcctccaagtgaatggcatcatagtttccaggggtatgaaggatatggagctggatgcctcctccatggagaagaggtttggctataagttcttgaagaagatcctgaaatacgttgattctgctcaagaatttattgcccatttagaagccattgtcagcagtgggaaaactgaaaagtctccccgtgaccaggagatcaaattctttgccaaagttctcctcccgctggttgaccagtacttcaccagtcattgcctctacttcttgtcatcccctctgaagccccttagcagcagcggatatgcctcccataaggagaaagaaatggtggccggcctgttctgcaaacttgccgctctcgttagacacagaatttccctctttggtagtgattctactacaatggtgagctgtcttcacatcttagctcagacacttgacacaaggactgtcatgaagtcaggctcagagctggtgaaggctgggttacgagcattctttgaaaatgctgcagaagatttggagaagacttcagaaaacctgaaacttgggaagttcacccattcccgaacgcagattaaaggcgtttctcagaatattaactacactacagtggctctgctccccatcctgacgtccatctttgagcacgtcactcagcatcagtttggaatggatctactcttgggtgatgtgcagatttcatgctaccacatactgtgcagcctctactcccttgggacgggaaagaacatttatgttgaaaggcaacgccctgcccttggagaatgtctggcctcgctggcagctgccataccagtggcattcctggagcccacccttaatcgctacaatccactctcggtcttcaacaccaaaacccccagggagaggtctattctggggatgccagacacggtagaagacatgtgtcctgacatcccccagctggaaggcctgatgaaggaaatcaacgacctggccgagtcaggggcccggtacacagagatgccccatgtcatcgaggtgatcttacccatgctctgcaactacttgtcctactggtgggagcggggtcctgagaacctgccccccagcacagggccatgctgcaccaaggtcacctctgaacacctcagtctcatcctgggcaacattctgaaaatcatcaacaacaacctgggcatcgatgaggcctcctggatgaagcgcattgcagtgtatgcacagcccatcatcagcaaagccaggcccgacctgctgagaagccacttcatcccaactctggagaagctgaagaaaaaggctgtcaagacggtgcaggaggaggagcagttgaaagccgatggcaaaggggacacccaggaggcagaactcctcatcctggacgagttcgcggtcctctgcagagatctctatgccttctaccccatgctgatccgctacgtggacaacaacagatctaactggctgaaaagtcctgatgctgattctgaccagctcttccgcatggtggcagaagtcttcattctgtggtgtaaatctcataacttcaagagagaagagcaaaattttgtgattcagaatgaaattaataatttggcatttttaactggagacagcaaaagcaagatgtcaaaagccatgcaagtaaagtctggaggacaagaccaggagcggaagaagacaaagcggcggggagacttgtattccatccagacctccctcatcgtggctgcactcaagaaaatgctgcccattggtttgaatatgtgtactccaggcgaccaggagctgatctccctcgcaaaatcgcgatacagccatagggacacagatgaagaggtcagagaacatctgcggaacaacttgcacttgcaggaaaagtctgatgacccagctgtaaaatggcaactgaacctctacaaggatgttctgaagagtgaagaacctttcaatccggaaaagacagtggagcgtgtgcagagaatttcagcagctgtcttccacctggaacaggtggaacagcctttgaggtccaagaaggccgtctggcacaaactgttatcaaagcaacggaaacgggcagtggtggcctgtttcaggatggcccctctctacaacctgcccaggcaccgctctattaacctcttcctccatggctatcagagattttggatagaaacagaggagtattcctttgaagagaaactagtacaggatttggctaaatctccaaaggtggaagaggaggaggaggaagagacagaaaaacaacctgacccactacatcagatcattctctattttagccgcaacgctctcacggagaggagagttgtgtttattagatttccctttaatttgattgtctgtcttctcccttccctgctccatgaaatccagagttgtcaaagtggtgaggatgaagaagaagatgaagacaaggaaaaaacattcgaagagaaagagatggagaagcaaaaaaccctctatcagcaagctcggctgcatgagcgtggtgctgcagagatggtccttcagatgataagcgctagcaaaggtgagatgagccccatggtggttgagacgctgaagctggggatcgccattctgaacggaggcaatgctggtgtgcaacagaaaatgctagattacctaaaggagaaaaaggatgctggattctttcaaagccttcctggtcttatgcagtcttgcagcgtccttgatttgaatgcatctgagaggcagaataaagctgaaggcctggggatggtgactgaagaaggaacactcattgttcgggaacgtggtgaaaaagtactccagaatgacgagttcacgcgtgatctctttagattcctacagttactttgtgagggacataacagtgactttcagaacttcctgcggactcagatgggcaacaccaccaccgtgaatgtcatcatcagcactgtggactaccttctgcgtctgcaggaatcaatcagtgatttctactggtattattcagggaaggacatcattgatgaatctggacagcacaatttttccaaagctctggcagtcaccaagcagattttcaattctcttacagaatacatccagggcccttgcattggtaatcaacagagcctggctcacagcaggctgtgggacgcagtggttggcttcctccatgtctttgctaatatgcagatgaaactctctcaggattccagtcagatcgagctgctgaaggaactcttggatctccttcaggacatggtggtgatgcttctgtccctcctggaagggaatgtggtaaatggcaccattggcaagcagatggttgacacactggtagaatcatctaccaatgtagaaatgatcttgaaattctttgacatgttcttgaaacttaaagacttaaccagctcagacaccttcaaagaatatgacccagatggtaaaggaattatctccaaaaaagaattccagaaggccatggaagggcaaaaacagtacacgcagtcagagattgactttctcctgtcgtgtgcagaagctgatgagaatgacatgtttaattacgttgattttgtagaccggttccatgagccagccaaggacatagggtttaatgtggctgtgttattgacaaatctttctgaacacatgccaaacgattcccgcctgaagtgtctgttggacccagcagaaagtgtgctaaattacttcggaccctacctaggacgcatcgagatcatgggtggggccaagaagattgagcgtgtttattttgagatcagtgaatccagtcgcactcagtgggagaagccccaggtgaaggaatctaagcgacagttcatttttgatgttgtcaatgaaggtggggagcaggaaaagatggggctgtttgtgaacttctgtgaggacaccatctttgaaatgcagttagcatctcagatctctgaatccgattcagctgacaggccagaagaggaggaagaagatgaagattcttcttacgtgttagaaattgcgggtgaagaggaagaagacgggtctcttgagccggcctctgcatttgctatggcctgtgcctctgtgaagaggaatgtcaccgacttcctgaagagagcaaccctgaagaacctcaggaagcagtacaggaacgtgaaaaagatgactgcgaaggagctggtgaaggtgctcttctcctttttctggatgctgttcgtggggctattccagttgctcttcaccatcctgggaggaatctttcagatcctctggagcacagtgtttggagggggcctggtagaaggggcaaagaacatcagagtgaccaagatcctgggtgacatgcctgacccaacccaatttggtatccatgatgacactatggaggctgagagggcagaggtgatggagccaggtatcaccactgaactagtacacttcataaagggggagaagggagatacagatatcatgtcagacctctttggactccacccaaagaaagagggcagcttaaagcatgggcctgaagtgggtttgggtgacctctcagaaattattggcaaggatgaaccccctacattagagagtactgtacagaagaagaggaaagctcaggcagcagaaatgaaagcagcaaatgaagcagaaggaaaagtagaatccgagaaggcagacatggaagatggagagaaggaagacaaagacaaagaagaggagcaagctgagtacctgtggacagaagtgacaaaaaagaagaagcggcggtgtggtcagaaggttgagaagccggaagctttcacagccaatttctttaaagggctggaaatctatcagaccaagttactgcattacctggccaggaatttctacaacctgaggttccttgctctgtttgtagccttcgctatcaacttcatcctgcttttttataaggtcactgaagaacctttagaagaagagacagaggatgttgcaaacctatggaattcctttaatgacgaggaagaggaagaagcgatggtattctttgtccttcaggagagcaccgggtatatggcaccaaccctgcgtgccctggccatcatccataccatcatctctctagtctgtgtggtgggctactactgcctgaaggtgcctttggtggttttcaaaagggaaaaagaaatcgccaggaagctggagtttgatggcctatatatcaccgaacagccatctgaagatgacatcaaggggcagtgggaccccttggtgatcaacacaccatcttttcctaataactactgggacaagtttgtaaagagaaaggtgatcaacaagtatggagatctctacggagcagaacgcattgctgaacttctgggtttggacaaaaatgctcttgactttagcccagtagaagagaccaaagcagaagcggcttctctggtgtcatggctaagttccttagacatgaagtaccatatctggaagcttggagttgtttttactgacaactcctttctctaccttgcctggtatacaaccatgtcagtcctgggccactacaataacttcttctttgctgctcacctattggacatcgcaatgggcttcaagacactgaggaccattctgtcatctgtaactcacaatggcaaacagttggttctgactgtcggtctcctggccgtggtggtttatctctatactgtggtggctttcaacttcttccgcaagttctacaacaaaagcgaagacgatgacgagcccgatatgaagtgcgacgacatgatgacgtgttaccttttccacatgtacgtgggtagtgagagcaggaggtggcattggtgatgaaattgaagaccctgctggtgatccttatgaaatgtatcgcattgtctttgacattacctttttcttcttcgtcattgtcatcttgctggccatcattcaagattgctttgtctttgtatttaacattccaggtcttattattgatgctttcggagagctaagagaccagcaggaacaagtacgagaagatatggagactaaatgtttcatctgtgggattggcaatgactactttgacacaacccctcatggttttgaaacacatacattacaagagcacaacttagccaactacttgttctttctgatgtatttgattaataaagatgaaacagagcacacgggtcaggaatcttatgtctggaagatgtaccaagaaaggtgttgggatttcttcccagccggtgactgctttcgtaaacaatatgaagatcagcttggataaatctgaatcaaaganngaagcgcgacaattctggacagtcaacttcccatgaaataaagtccccttttttacagttctgcaacatatctgaaatgtgacattttctaaatgcctcccttaaaaaaaaaactgctgaaaatctgtgctattttagaaattgatttaggctttttgtgcctaatgggacatacactgtgggagagaacctgtcaaaatgtcgaaaaaggaaggcgaagaatcaagtaatctctaggcaaatgccttcaagttttccagttctgaggtaactagttcagtttgttgggatggaagcatgaaggaaagggctagagaagtatgaaatctcgaatgtgtaataccctgaaaatttaaaccactggaatgtcatcatggtatcccaacttgtgactcatagggtctgaactcactccaaaagataataactgccagtctaatttttcccatggtacttgctagtgactgtatccagaaaagctttaagcagttaaagaaacagaaaaaaaccgacactttgtcgacactgaaatatcgattaagtgccttaaaacctctttagacatagctatgcaagttttttatgtttgtgttccagaaggacagttccattcattagttgtgatcttccgtcttactttatgaaactgcacttgaaggttattcatacaagtttttttagtaacagctgtcagtcaactgctgttattagaagaaaagtactgtactgaaaattcagaaaaaaaaatctcaaccttatgccaaaatggagtaatgctttatggtcccttgtaagtagtggagctgctctgtttaggtgaatctcctcaaatacaatgaagtgcccactgcaataaagtaatacgtaccaataaaaa

SEQ ID NO: 23338 - DNA, 1957 bp, Homo sapiens
  SIMILAR (95)..(277): 731254mologous to Homo sapiens unnamed protein product,accession number AK022118,Smith-Waterman Score=221.
atggcctccgcgggcagcaccgctcggcgggcgggctccggaagctggcactcagaaaggggagaagggagaggtgctcggccgcagccaactccaagtggctccatgcagcaggcgaacaaagtctccttgaaggccacctggactgacgcggagtccaagcagcccagccccagcaaggagtccgaccagacggcaatcgaccagacggcgatcgggagctactaccagctgttcgcagcggctgtgggcaacgtggaatggctgcgattctgtctgaaccagagcctcagggaaatccccaccgacgacaagggcttcactgccatccacttcgccgcccaatggggcaagcttgcatgcctgcaggtcctggtagaggagtacaagtttcccgtggacctgctgaccaacaatagccagacacccctgcacctcgtcatccacagggacaacaccaccgtggccctcccctgcatctactacctgctggagaaaggcgcagacctcaatgctcagacatgcaacggctccacgcccctgcacctggcagcccgtgacggcttgctggactgtgtgaaggtcctggtgcagagtggcgccaacgtccatgcccaagatgccatgggctacaaacccattgacttctgcaaaatatggaaccaccgtgcctgtgcccggttcttgaaggatgccatgtggaaaaaggacaagaaggactttgcccgtgagatgacgaaaatgaagatgttcaagagccagctgaccctcatggagcacaactacctgattgagtatcaaaaagagcacaaaattctcagagaagctgctatcagaaagtggctccacggcaagctgcacccaggccactctctggtctccaataccaagcaagcccgggccaccgccctctccaagaccccagagcaacgggaatcgcagcgttccaggagcttccacccctctgtggatgcacgcctgcaatgcattccacagcccacggagatgcccaagcccatctacaggaagcccacggtcaagcggccccacaatgtggaatgttagcaacaaccccgccagaccccccaccacccagatcagccactcgcagggcatccgcctgggcgtgcatccaagaccccattccggagcacgacttcagcagcttcctggaggtgaggcctgatgggcaacggcggtgcgcggctgcacacagtggacggccactgggtggcgcccgtgccgcggctgccttttgaggtgctgctgcgcatgctgtacccacgtgtatggccatacagaatgaaggtgccccagggcttttaccccatcagcatgagggaagtgcccaggaagcggcacctgggtgacaacaccttctggaccgacactctggccatgaacctgcgtgacacattcgatgaagccttcctggcagctgtgcgatctcatcaaggactccccaccctgccctccccacaaaccaacccataaagttattatggctacctctccccctgaggcagcccagtgaaggctgaagtgtggcaattcacgttgtgggtggcgaggaaagggggaggggctcctatgggcttcccactcccaagctcgaggagtcacccttcccaatcaaaagcccagaccccaggcctcccttttctctgcaaataaatctcttggcacccccccccccgccgccaggaaatccaagttaggttgagagtggggggtcagacactattcttccccttggcattgtaaaagttgtcacattttggcacccccactgccctcccagccctaagggcccaggcttccaggatggaaggaccccctgggaaattttgtttcttgttcagattaagcccttcctgctgcaggctctaagctgagacccagaatggggtggagggcaactaatatgtccccctggcatgggcttccctgctaaaaa

SEQ ID NO: 23339 - DNA, 1282 bp, Homo sapiens
  SIMILAR (40)..(1098): 471254mologous to Mus musculus lysosomal acid phosphatase,accession number X57199,Smith-Waterman Score=803.
atggccggcctggggttttggggccaccctgctggacctctcctgctgctgctgctgctggtgctgccaccccgggccctgccagaaggacccctggtgttcgtggctctggtattccgccatggcgaccgggccccgctggcctcctaccccatggacccacacaaggaggtggcctccaccctgtggccacgaggcctgggccagctgaccacggagggggtccgccagcagctggagctgggccgcttcctgaggagccgctacgaggccttcctgagtccggagtaccggcgggaggaggtgtacatccgcagcacggactttgaccgcacgctggagagtgcccaggccaaccttgccgggctgtttcccgaggctgctccagggagccccgaggcccgctggaggccgatcccggtgcacacggtgcccgtggctgaggataagctgctgaggttccccatgcgcagctgtccccgataccacgagctgctgcgggaggccaccgaggccgccgagtaccaggaggccctggagggctggacgggcttcctgagtcgcctggagaacttcacgggactgtcgctggttggagagccactgcgcagggcatggaaggttctggacaccctcatgtgccagcaagcccacggtcttccactaccagcctgggcctccccagatgtcctgcggactcttgcccagatctcggctttggatattggagcccacgtgggcccaccccgggcagcagagaaggcccagctgacaggggggatcctgctgaatgctatccttgcaaacttctcccgggtccagcgcctggggctgcccctcaagatggtcatgtactcagctcatgacagcaccctgctggccctccagggggccctgggcctctatgatggacacaccccgccatatgctgcctgcctcggctttgagttccggaagcacctggggaatcccgccaaagatggagggaatgtcaccgtctccctcttctaccgcaatgactccgcccacctgcccctgcctctcagcctccccgggtgcccggcccccctgtccactaggccgcttctaccagctgactgccccggcccggcctcccgcccatggggtcacctgccatggcccctatgaggctgccatccccccagctccagtggtgcccctgctggccggagctgtagctgtgctggtggcactcagcttggggctgggcctgctggcctggagaccagggtgcctgcgggccttggggggccccgtgtga

SEQ ID NO: 23340 - DNA, 1137 bp, Homo sapiens
  SIMILAR (238)..(663): 361254mologous to Ascaris suum collagen,accession number J04657,Smith-Waterman Score=178.
atcccaacactttgggaggctgaggcaagatgattgcttgagcccaggtggggtccccctcctgcccagggcagccccggagatggaggcctccagggtgagtgtcagactcagactcccctgtgggaatgagcagtgggttgggaatcggggaagtgggattctggtcggggccagggtgggggtcaagagcagatgtggagctgccagtctgatatgctttaccccccagaccaagtcggtgcttgggggcttcccgggcccaccggccccaagggagatgccggcagtcggggcccaatggggatgagaggcccaccaggtgagtgcccgcaatgctgccccacagctcctctggccatcccctccaccaggtgggcccttccctgctcctggccaccagggcctcctggcccccctgggcccccagcccctgttgggccaccccatgcccggatctcccagcatggtgagtccccctgggatcccagcaggtggaggtgggggtggagtagccatcagcacagtgcccgctaccatcaagacccggcggcaggaagtgagtcctgaactcccaaggccacaggcccggcccctcctccaggccctgacgtgcgtccttggcttcttcgccctccagggcccatgggtaagttgagtccaggccaggggtaaagggtgaagttggtagatggcagagggaatagggtttgtggctatcctctcacccatgtgtctgtccatctttccatctatgcatacatccatacatctatccctgcaggatcccttagtcccagattcctcctgtgactccatccctgccttctcagccctacatgctcaagagagtattccctccccttcctgcagcagcaggctcagctggagctcctggccagacgggtcaccctcctggaagccatcatctggccaggtaatggcagggcgggcaggcaggggcagcctcttccaggaagggcctggaaaaggcctgggcatgcagaaggacatgcaaccaactaccggatcgtggcccccaggagccgggacgagagaggctgagggtggtggcggcccctgaggcagaccaggccaggcttcccctcctacctggactcggccagctgcctccag

SEQ ID NO: 23341 - DNA, 1137 bp, Homo sapiens
  SIMILAR (240)..(665): 371254mologous to Ascaris suum collagen,accession number J04657,Smith-Waterman Score=191.
taatcccaacactttgggaggctgaggcaagatgattgcttgagcccatctggggtccccctcctgcccagggcagccccggagatggaggcctccagggtgagtgtcagactcagactcccctgtgggaatgagcagtgggttgggaatcggggaagtgggattctggctggggccagggtgggggtcaagagcagatgtggagctgccagtctgatatgctttaccccccagaccaagtcggtgcttgggggcttcccgggcccaccggccccaagggagatgccggcagtcggggcccaatggggatgagaggcccaccaggtgagtgcccgcaatgctgccccacagctcctctggccatcccctccaccaggtgggcccttccctgctctgggccaccagggcctcctggcccccctgggcccccagcccctgttgggccaccccatgcccggatctcccagcatggtgagtccccctgggatcccagcaggtggaggtgggggtggagtagccatcagcacagtgcccgctaccaaaaagacccggcggcaggaagtgagtcctgaactcccaaggccacaggcccggcccctcctccaggccctgacgtgcgtccttggcttctaggccctccagggcccatgggtaagttgagtccaggccaggggtaaagggtgaagttggtagatggcagagggaatagggtttgtggctatactctcacccatgtgtctgtccatctttccatctatgcatacatccatacattcatccctgcaggatcccttagtcccagattcctcctgtgactccctccctgccttctcagccctacatgctcaagagagtattccctccgcttcctgcagcagcaggctcagctggagctcctggccagacgggtcaccctcctggaagccatcatctggccaggtaatggcagggcgggcaggcaggggcagcctcttccaggaagggcctggaaaaggcctgggcatgcagacggacatgcaaccaactaccggatcgtggcccccaggagccgggacgagagaggctgagggtggtggcggcccctgaggcagaccaggccaggcttcccctcctacctggactcggccagctgcctcc

SEQ ID NO: 23342 - DNA, 972 bp, Homo sapiens
  SIMILAR (246)..(398): 331254mologous to Sus scrofa protamine 2 precursor,accession number X16558,Smith-Waterman Score=54.
gaagagatgtgtcctcttgaggagccactcatcagtgtcccggggccgggccagccctgccagtctcagattacagagctgctgagtggttagcttgggaatttggaggccgaggactgtggagaggctttgcagggcctacagactccgaaatggcaggtgcgggtctatgtgggcacgcgcatttctcaagggaggtctgtgacttataaacattgaactgtgatccagaggacaggactccacagtgtgggcccaggggaccctcaacaagggctcagggaagcaaagttaggaacaatggtcaggctggtgctccttccaactcccaggagaacaacagaagtgaggacaggcccagagagggagctgtctatggtcctagaagccattctggggtccttgttagagacagcctgcgaccacagacaaacaccgccctcctccaagccccaggcagaagcagcaggctgcgagaggggaccagtgctggccaaccttgcagccccgtctcagactggggcccagagctgggggcaggcgctgctgcagggatatagagagatcttccagcagctcggtctgtggaaggaaatgcaaaagaaagaaaagaaagcgtggaatgtgccagagcagacacaagcacgggtgcaggaggccacaggaagggccccgctgcaacgatgggagggcgctatgctcaccaaggccacaaaccacgcctgggcccctgagcacagcctgaaccagccaaagcccaagccccgccaagagtactgctgggtgaaacagatgaatgacataaataaactacctggaagcaaagaggaggaagacaaggtggaaacccaggaggccttggggcctgatgtcagaacaggctcgtggtcacctccacccatgcaatgtccaaaggaagttgcacagtcagtcgcagggtcaaaggatgtggaccaacacacagaggagtga

SEQ ID NO: 23343 - DNA, 2436 bp, Homo sapiens
  SIMILAR (1858)..(2058): 1001254mologous to Homo sapiens ubiquitin-conjugating enzyme UbcH6,accession number X92963,Smith-Waterman Score=329.
atggcatggccaactgttgctcaggtgagagaagcttcatttgggctaatgtttctggatgaagaacctggttcagctcggttgccattttctcctccctcaattgcccaactggagccaagtgccatcctgactccccagacacctggtgccttgatctccatcaccctactttacaaaggactttgtgtggtatctcgatcagaatgggagcctgtgaaaacaaggaggcactttattaattcttataatgacctgcttcctgcctgcaggctgaagaagagctcagagttccgacaagctaagtttgattctgtgacaagctggctctgggcattaggtccacgaggaaatgacatgtgcagcagtgtcagcctccaaaacttccacctggccttgatcaccccaggtctccagacacttgtgcgtattcagcttgggatgcaacccagctgctggcttctgaggcatctcagtaactatggagacaggaatataaacatcatctccctggaggcctttcggttttcagatgacacaaatcctcagcagctgttgtcaccatcaagaggctctatgccactgtgcctagaaaaaagtttccttctcaacagtgtagcaactcagctcaagcagagaaacacaaattgccaggtgcacggccaatcttcggtgcaatctagtggctctctggctgttagagcccttgacgagagagggattcacagcaagaagctggctcttcagaatgcaatggctcctacaggagggaacagaaccggagcctctagaaatcattgtgtgagtacagggctaggcactgtggacacagaggggcaggttagtaggctcctgggcctgccatctgaggatgttctcctcatctcactactgggtttgggggatgaggatcaaggaagctcctcgaaatattcacaatctaatgaagaaatattcattgaggaagagctctatggcctgggaggaggaaaagaaaaacaacaacaacctttgtatacaaatatgccagcccaacttggttctcttgtatttggctgcagatcaagaacaaactttcaagtggcatttcgagagaatccaggaaagcagtttcaatctggaaatttgctctccttaaatatttcaaaaacacatttagaagatgaaattgtgaaattggccttgaaaactttattttcgctttcctcaattcaaagggacaattgtggaaggaaagaactgagctgcttgccagacccagcgcactcctttttctctggacagctgctgctttgcagagggtcgtgggaggagttatttttagcacacgcagccaacagagctcagcaggcccgtggaggcgctaacatgtcccccagttcatctccttctgcaaaggtgcatttgaagcatgaaaaaataaaaaataaaaaatacgtgcggacccaaagaggtgatgatttagaagccagtgctgaaattgtaggcatcccacaggccaaagctttgtctgagatgagagaaagcctgatcctgagcctggcagtcctccagaaacagtgcatctcagagatccttgaactaacatccagtcatgcaaaacgatatcttatagtctctcgtctctccaggaggaaggtcacgcctcaaggattccttgtgaatccaggtagcatcagtgactatacttccacagacttgagaacccatgtggaggaggatgaatggagagcggaagcgagagagagacacgagtggccaggcccagccgcagccgcagcagcagccgccgcggcggcacggaggagccagacacaaagagaggggctgtttgcggggtggggtggggggttcgctatgtcggatgacgattcgagggccagcaccagctcctcctcatcttcgtcttccaaccagcaaaccgagaaagaaacaaacacccccaagaagaaggagagtaaagtcagcatgagcaaaaactccaaactcctctccaccagcgccaagagaattcagaaggagctggcggacatcactttagaccctccacctaattgcagatgctccaagttagcactttgtatacttccacgtagtttctgtgaatttacattgtgtttttctggcattccaatacctcctcgaattggtggtaatggtaatgagatgtcagttcagaagtcccaggctgctcatcatggttcacaatggaaagagatccttttcttgcaacagtggagtgttacatacctcgtccagaaaatagtggaaattgctggggaaattgctgtcacattttacagctgtccattgctggcagtctttctgagttggcacccaagcagttttggcaattttgaccttcctgcaatcacagagaagctctggacgtcagtgtggcaaaaaagatgtgatctctgctgcaggctcgattga

SEQ ID NO: 23344 - DNA, 1572 bp, Homo sapiens
  SIMILAR (600)..(800): 981254mologous to Mus musculus ubiquitin-conjugating enzyme UbcM3,accession number X92665,Smith-Waterman Score=351.
aattcccgggtcgacgatttcgtgtgcgagcgtgtgtggctgggggaagccattgcctgtttaatagttgctgttgctgcacttccgcttctctcccagcgagagagagacacgagtggccaggcccagccgcagccgcagcagcagccgccgcggcggcacggaggagccagacacaaagagaggggctgtttgcggggtggggtggggggttcgctatgtcggatgacgattcgagggccagcaccagctcctcctcatcttcgtcttccaaccagcaaaccgagaaagaaacaaacacccccaagaagaaggagagtaaagtcagcatgagcaaaaactccaaactccttttcgcccagggccaagggaattcagaaggagcttggcggacatcactttagaccctccacctaattgcagtgctggtcccaaaggcgataacatctatgaatggagatcaaccattctagggcctccaggatccgtgtatgagggtggtgtattctttctcgatatcacttttacaccagaatatcccttcaagcctccaaaggttacatttcggacaagaatctatcattgtaatattaacagtcaaaggtgttatttgcttggacatattgaaagataattggagtccagcactaaccatttctaaagtcctcctttctatctgctcacttcttacagactgtaatcctgccgaccccttggtgggaagtattgccactcagtatatgaccaacagagcagaacatgacagaatggccagacagtggaccaagagatacgctacataaattggggtttcacaattcttacattatttgtctggtccacagaagagagctgcttatggttttggaagggggtcagggatgggtggggagttgggtaaagagtagggtatttctataacagatattattcagtcttatttcctaagattttgttgtaacttaaggtatcttgctacagtagacagaattggtaatagcaacttttaaaattgtcattacgttctgcaatattagctgaaatgtagtaccagaaaagaatgtaccatttggacatttcgggttcagttgcttgtagtccggtaaatttaaaacgggcttaaatttggtaccaggttaccacatatggcccatttatgtaaaagtccctctaagacctacatacttttttgtttaaaaccaaaattgggaatttgttttccctttcttgggaaggggaaccattgatatttaacaggagtttttaggaggttgtcatcctcatatatatataaaatgggacaccgtgggctattaaaacacccttataaggagatgagtagttgcgtttttatttttattatggcccattctactttggtttaaaaaaggtctgaatcaggacttgtgaaaacctgtagtgaaataccttaagctgttaactaactgtaaggccgtggaataggagttgctcagtggattggttctatgttgtggactacttaagtctgcatttgttactgtgctaataaacaatattaaaaaccacctaataaacaaaaaaaaaaaaaaa

SEQ ID NO: 23345 - DNA, 1842 bp, Homo sapiens
  SIMILAR (549)..(641): 801254mologous to Homo sapiens clk2; putative,accession number L29218,Smith-Waterman Score=140.
atggaatctactggtgaagatgttgtggacactgttgaaatgacaacaaaggatttagaatattatgtaaactttattgacaaggcagcagtaggatttgtgtggactgactccaattttgaaagaagttctaccaatgaggaagcggcggcacgtgcttccagccgccctgcacctaccctgggtcagaacgacgcagctgcgcggcaaccagagagggcggcggggtcttctgtgttggaagatgagcccgccagaggcataccctcggccttaactcgctgcaggcgctggaagaagggctctggcgtcttgttcccgaccctccgagtttttgaaaacgccaatactggaaacaggccgacagttaaggagaggcgggcgggactgaagcagagcccgagaacggggctggaggtcccagggtcccgggttggtgggggtggagcagcacttcatcgccgcgggggtgctgggactccggccgcagtgccgccgccatcatggacttcctgtgggacaagcgcacgggcctggccgccagaaagatgcctcatcctcgaaggtaccattcctcagagcgaggcagccgggggagttactgtgaacactatcggagccgaaaacaagcaacgaagaagccgttcctggtcaagtagtagtgaccggacacgacggcgccggcgagaggacagctaccatgtccggaggaggtgcagccggacatttagccgctcgtcttcgcagcacagcagccggaaagccaagagtgtagaggacgacactgagggccacctcatctaccatgtcggggactggctacaagagcgatatgaaatcgtcagcaccttaggaaaggggaccttcggccgagttgtacaatgtgttgaccatcgcaggcgtggggctcgagttgccctgaagatcattaagaatgtggagaagtataaggaagcagctcgacttgagatcaaagtgctggagaaaatcaacgagaaagaccctggcaagaacctctgtgtccagatgtttgactggttcgactaccatggccacatgtgtatctccttggagcttctgggccttagcaccttcgatttcctcaaagacaacaaccacctgccctaccccatccaccaagtgcaccacatggcctcccagctgtgccaggctgtcaagttcctccatgataacaagctgacacatacagacctcaagcctgaaaatattctgtttgtgaattcagactatgagctcacctacaacctagagaagaagcgacatgagcgcagtgtgaagagcacagctgtgcgggtgggagactttggcagtgccacctttgaccatgagcaccatagcaccattgtctccactcgccattaccgagcaccagaagtcatccttgagttgggttggtcacagccttgtgatgtgtggagtataggctgcatcatctttgagtactatgtgggcttcaccctcttccagacccatgacaacagacagcatctagccacgatggaaaggatcttgggtcctatcccttcccggatgatccgaaagacaagaaaacagaaatatttttaccggggtcgcctggattgggatgagaacacatcagctggacgctatgttcgtgagaactgcaaaccgctgcggcagtatctgacctcagaggcagaggaagaccaccagctcttcgatctgattgaaagcatgctagagtatgaaccagctcagcggctgaccttgggtgaagcccttcagcatcctttcttctcccgcctttgggctgagccacccaacaagttgtgggactccagtcaggatatcagtccgtga

SEQ ID NO: 23346 - DNA, 1248 bp, Homo sapiens
  SIMILAR (246)..(791): 401254mologous to Homo sapiens phenylalkylamine binding protein,accession number Z37986,Smith-Waterman Score=215.
ggggatgagcccgaactagggatgtgacagagcgcgagacccagcctaaagagagcccggagccagcgtgggaggccgctgccgtcgcgcgccttggtttttctgttccttttttttttttttttttttaacttcctgcctatacacacgcagccatcagcccacaaagacatgactaccaacgcgggccccttgcacccatacgggcctcagcacctaaagactggacaactttgtacctaatggaccgccccacctgggcatatactgggctgggcctcttctctgtcacagggggtcttaggtcgtggaccacatgggctgttgttcagggtcgtgctgcgggttgtcccattggggactttgggcgggcgactgttccctgttgctgggttttgcagtgtgtggggttcattcacctggtgatcgaggggctggttccgttctctaactacgaaagaccttgctttggagaccaaagccttcttaatctcaaactctgggaaagagtatggccaaggggagacagcccgattacatcctgggggtgacaaatttcacagtgttgcattgggaaccatcacaagctttgcctgtgggggaaccattcagcctgtgggtggtgatcgcctcttctcctacagcatccccttccgcttcattcttacagcttgtggtctctgtggggccagatctatgggggatgtgttctaatttcctgaaagagcacccccgacgggattccaagcacggaaaacctgggcccacccctctcctacttcctggattttcctttgtcttccatgaaatgcccctgtggctggtgcctgcccctggaagtcccttgtgccttgatgcctgtgaaagcaccctcaactcatgccccagagcacgcctggaatgccaagggcccacaaaagcccaagagcaagaagaactgaggagtggtggccccaggctcgaacactggcccgagagggagctctctgcactgcccagaaagagtctagtcctgctcccacagtttggagggacaaagtctaattgatctgtcacactcaggctcgatgggcaggcacaagaaggggaataaaggggctgtgtgaaggcactgctgggagccattagaacacagatacaagagaagccaggaggtctatgatggtgacgatttttaaaatcaggaaataaaagatcttgactccgaaaaaaaaaaaaaaaaaaaaaaaaaaaaagtcgtatcgatgt

SEQ ID NO: 23347 - DNA, 1389 bp, Homo sapiens
  SIMILAR (301)..(534): 781254mologous to unidentified cloning vector beta- galactosidase alpha-peptide,accession number M77169,Smith-Waterman Score=301.
atgtggagaaatttgaaacttcctagagacttgttgaatggttttgaccaaaatgctgatagtgatatggacaatgaagtccaggctgaggtggtcacagatggagatgaggaacttattgggaactggagtaaaggtcactcgtgctatattttagcaaagagattggcagcatttttcccctgccctaaagatctatggaaatttgaacttgagagagatgatttagggtatctggcggaagaaatttctagcagtgaagcattcaagagcgtgagctatgagaaagcgcacgcttggaatcctctagagtcgacctgcaggcatgcaagcttggcactggccgtcgttttacaacgtcgtgactgggaaaacccttggcgttacccaactgtaatcgccttgcagcacatccccctttcgccagctgggcgtaatagcgaagaggcccgcaccgatcgcccttcccaacagttgcgcagcctgaatggcgaatggcgcctgatgcggtattttctccttacgcatctgtgcgaaacgctggtgaaagtaaaagatgctgaagatcagttgggtgcacgagtttgtgtgctggagaggcaaatatttgacttccttggatatcagtgggcacctatcctggcaaattttgtacatattattatcgtcattcttggtttgtttggaactattcaatatagacctcgttacataacaggaatcctctctttcccaaagcaccaggagtccctttctctgaagttcacttgtctaactgaggcagaaagagacactgatgctctgttacatctggaaaatgcctgtagggagtctactgctactcagagaatccaaggcttctttctgaaggacaagaagagaaagaagcagcagccacagcagcagaaacagcagcagtgggccaaggtacagctcgggccatggcttcagagggtgcaagccccaagccttggcagcttccatggggtgttgagcctacgggtgcacagaagtaaagaattgaggttcaggaactgctgcctagatttcagaggatgtatggaaatgcctggatgtccaggtagaggtgtcctgcaggcgcagaaccctcgtggggaacctctgctagggcagtgcagaagggaaatgtgtggtggaagcccctacattgtccccactggggcactgcctagtggagctgtgagaagaaggccaccatcctccagaccccacaatggtagacccactgacagcttgcactgtgtacctggaaaagctgcagacactcaacaccagcccctgaaagcggctaggagggctgctgtaccctgcaaagccacagggtcagagctgcccaagaatgagaacccacctattgtatcagtatga

SEQ ID NO: 23348 - DNA, 735 bp, Homo sapiens
  SIMILAR (371)..(222): 541254mologous to Homo sapiens Human secreted protein, SEQ ID NO: 7678,accession number G03597,Smith-Waterman Score=123.
tctctccgctcaccccgactgcaacgtctggaaatccctccaaagccagcagccccggagggctcgggtccctggtatccacggcgtcgagtcttccagccggagagaaaaactcacctaggaccggacctgggcctcgccgcgctgggagctggcattcccaattcaggaccagacacggtggaggggccctacaacttgtgtgggagacaagggagatggggtgggctcatcatctcgctggcttcagaaatgaaactgcagactctccagacaagtgttacaactgctaaggcgacgcttctggagttgttcgttcctctcggtgggctcgtggcttcgctggcttcagaagtgagactacagatcttcccgcgtggtgggcatctccaaagcgccaaatgtggcttgttactccatttctctcttcccacatcaaggtctggtagaaggaaggccaaccgccccatggccgttaccgttctactcgtcctcatccgggactgcgctgaccttctggccgttaaagccgttatccactgttatcaggaccagtggcctctgcgcggttcttcccgacccgcaaacacgccgccacccaaagcctctgtgtcccggcggccacccggtcaccgaggtgtgaggagaggttccccgctgcttcaagtcggggcccgacgggttggagccgaggccccggctctgctggagctccagagcccgagtctttcttaa

SEQ ID NO: 23349 - DNA, 234 bp, Homo sapiens
  SIMILAR (130)..(234): 1001254mologous to Homo sapiens KIAA1170 protein,accession number AB032996,Smith-Waterman Score=195.
aagtcagaatcaagcttgctggtagaagagcaggtcctcagagtacagagaggcttctgtagggtctatgtccatggccctatcaaccagggtatttttccactttcatacattcgaagacatctttgggaagctggagacaacagccagttctgctggaggaacctcttttcctgcatcaacctcctgaggctgctcaataaactgaccaaatggaaacattcccggaccatg

SEQ ID NO: 23350 - DNA, 270 bp, Homo sapiens
  SIMILAR (4)..(144): 511254mologous to Homo sapiens Human secreted protein clone pt332_1 protein sequence SEQ ID NO:12,accession number Y94903,Smith -Waterman Score=127.
atgctgaacttgcagggcaaggaatggctggagttggaagaagatgcccaaaaggcctatataatgggactcttggaccggctagaggtggtcagtagggaacggcggctgaaggtggcccgggctgttctctacctggcccaagatggagagaagttttgccccaagagggactgtaccaacaactcacctatattcaatttaaatgatacagatgatgagatttgggactttagagctgatgagacttcactgacattttggacttga

SEQ ID NO: 23351 - DNA, 3336 bp, Homo sapiens; identical to SEQ ID NO: 12018
  SIMILAR (1606)..(2742): 601254mologous to Homo sapiens Human secreted protein clone pt332_1 protein sequence SEQ ID NO:12,accession number Y94903,Smith -Waterman Score=1144.

SEQ ID NO: 23352 - DNA, 2664 bp, Homo sapiens
  SIMILAR (235)..(1842): 601254mologous to Homo sapiens Human secreted protein clone pt332_1 protein sequence SEQ ID NO:12,accession number Y94903,Smith -Waterman Score=1634.
atggaggaccccgccgcgcctgggaccgggggcccgcccgcaaatggcaatggcaacggcggcggcaaagggaagcaggcggcgcccaagggccgcgaagcgttccgaagccagcggcgggagtcagaggtgaggagcccggaaagcttcggctggggcccggagacgcccgccggcgggaagcggcggctgaggactccttttacctgccagtacatcccctattaccacagtacccagggctctgtggactgtcccactctggagtttgagtatggagatgcagatgggcatgcagccgagttgtcagaattgtatagttacactgagaacctggaattcaccaataacaggaggtgctttgaagaagatttcaagactcaagtgcagggcaaggaatggctggagttggaagaagatgcccaaaaggcctatataatgggactcttggaccggctagaggtggtcagtagggaacggcggctgaaggtggcccgggctgttctctacctggcccaaggtacttttggggaatgtgattcagaggtcgatgtgctacactggtccaggtacaactgcttcctgctgtatcagatggggaccttctccaccttcctggagctactccacatggaaattgacaacagccaggcctgtagcagtgcccttcggaaaccagctgtctccatagctgatagcacagagctcagggtgctgctgagtgttatgtacctaatggtggaaaatattcgcctggagcgagagacagacccctgtgggtggagaacagcccgggagaccttccgcactgaattaagcttctccatgcataatgaggagccttttgcccttttactcttctccatggttaccaagttctgcagtggcctggctcctcacttccccataaagaaggtcctgctcctgctctggaaggtggtcatgtttaccctcggtggatttgagcatctgcagactctcaaagtacagaagcgggcagaattgggcctgcctccactggctgaagacagtatccaggtggtgaagagcatgcgtgctgcctccccgccctcttacactcttgacctgggagagtctcagctggcacccccaccctccaagctgcgaggccgccgtggctctcgaaggcaactcctcactaagcaggacagcctggacatctacaatgaaagggatctcttcaagactgaggagcccgccacagaggaggaagaggagtctgctggtgatggagaacgaaccttggatggagagctagacctgctagagcaggaccctctggtgccacctccaccctcacaggcacccctctctgctgagcgggtggcttttcccaagggcctgccctgggccccaaaggtcagacagaaggacattgagcacttcttggagatgagcaggaacaagttcatcggattcaccctggggcaggacacagatacattggttggattacccaggcccatccatgagagtgtgaagaccctaaagcagcacaagtatatctccatcgcagatgtgcagatcaagaatgaagaggagctggagaagtgccctatgtctttgggggaagaggtggtaccagagacgccatgtgaaatcctctaccagggaatgctgtacagccttccgcagtatatgctcagaactctggatctggagggtgacaccagtgccagcgactggctgcccagcatcactgttctccagagcatgaagctgggcatcgatgtgaacaggcacaaggagattattgtaaagagtatctctaccctgcttctgctactcctcaaacacttcaaactcaaccatatctaccagaagtcagaatcaagcttgctggtagaagagcaggtcctcagagtacagagaggcttctgtagggtctatgtccatggccctatcaaccagggtatttttccactttcatacattcgaagacatctttggatacagccaattcctgctgttgccatttacctaaagcctgtccttatctctgcatcttacagcatctcagtcctggattatccttgctgtaccatccaggatttgccggagcttactactgaaagtctggaagctggagacaacagccagttctgctggaggaacctcttttcctgcatcaacctcctgaggctgctcaataaactgaccaaatggaaacattcccggaccatgatgctggtagtgtttaaatcggcaccaatcttaaagcgggccctcaaggtcaaacaggccatgctgcaactttatgtcctaaagctactaaagttacagaccaagtacctggggcgccaatggaggaaaagcaacatgaaaaccatgtcagccatttaccagaaagtgcgtcaccgcatgaacgatgactgggcttacgggaatgacatcgatgccagaccatgggacttccaagcagaagaatgtaccttgagggccaacattgaggcttttaacagccgtcgctatgacagaccccaggactctgagttttcacctgtggataactgcttgcagagcgtactggggcagaggttggatctgcctgaagatttccactattcatatgagctctggctcgagagagagatcaatgctaaggctttcttccgtgcaaaggctgaagatccatttggttga

SEQ ID NO: 23353 - DNA, 433 bp, Homo sapiens
  SIMILAR (9)..(347): 991254mologous to Homo sapiens transcription factor IIIC90,accession number AF142328,Smith-Waterman Score=573.
  misc_feature (1)...(433): n = a,t,c or g
tttcgtgcgaggcgggcgggaaggagccagcagcggactcggccccggggcccagcgctgcattccgcctcatggtgactcggcgggagccggccgtgaagctgcagtatgcggtgagcggcctggaaccgctggcttggtccgaggaccaccgcgtgtctgtgtccacggcccgcagcatcgctgtgctggagctcatctgcgacgtgcacaacccgggccaggacctggttatccaccgcacctcggtgcccgcaccgctcaacagctgtctcctcaaagttggctcaaaaacagaagttgctgagtgcaaggagaaattcgccgcctccaaggaccccacggtgctgattggacatatctcaaagaagatgaacaaacagactttccctgagcactgtagtttgtgtaaagagatcttgccattcacagn

SEQ ID NO: 23354 - DNA, 2631 bp, Homo sapiens
  SIMILAR (1846)..(2337): 811254mologous to Homo sapiens transcription factor IIIC90,accession number AF142328,Smith-Waterman Score=672.
gagagaagatgaacacggccgaccaggcccgggtggggcccgcggacgacgggcctgcgccgtctggggaggaggagggagaggggggcggcgaggcgggcgggaaggagccagcagcggacgcggccccggggcccagcgctgcattccgcctcatggtgactcggcgggagccggccgtgaagctgcagtatgcggtgagcggcctggaaccgctggcttggtccgaggaccaccgcgtgtctgtgtccacggcccgcagcatcgctgtgctggagctcatctgcgacgtgcacaacccgggccaggacctggttatccaccgcacctcggtgcccgcaccgctcaacagctgtctcctcaaagttggctcaaaaacagaagttgctgagtgcaaggagaaattcgccgcctccaaggaccccacggtcagtcagactttcatgttggatagggtgttcaaccctgaggggaaggctttaccaccaatgagaggattcaagtacaccagctggtctcccatgggttgcgatgctaatggcaggtgcctcttggcagcactgaccatggacaatcgcctgaccatccaggcaaatctcaacagactgcagtgggtccagctggttgacctgactgagatctatggagaacgtctttatgagaccagttacaggctctctaaaaatgaggccccggaaggaaatctcggggattttgctgagtttcagaggagacacagcatgcagaccccagtcagaatggagtggtcgggcatctgtaccacccagcaggtcaagcataacaacgaaagccgggacgttggcagtgtgctcctggctgtcctctttgaaaacggtaatatcgccgtgtggcagtttcagctgccgtttgtaggaaaagaatccatctcttcatgcaacacaattgagtcaggaatcacctctcccagtgtattgttttggtgggaatatgagcacaataatcgaaaaatgagtggccttattgtggggagtgcttttggacccataaaaattcttcctgtcaatctcaaagcagtcaaaggctatttcactttaaggcagcctgttatcttgtggaaagaaatggaccagttacctgtgcacagtatcaaatgtgtgccactttatcatccttaccagaagtgtagttgcagcttagtagtggctgcaagaggctcttatgtattttggcgtcttcttctgatctccaaagcagggctgaatcttcacaattcccatgtcacaggccttcactcactgccaattgtctccatgactgcagacaaacagaatggaacagtctatacttgctccagtgacggaaaggtgaggcaggtgattccgattttcacagatgttgcattgaagtttgaacaccagttgattaaactctcagatgtgtttggctcagtgaggactcacgggatagcagtgaagccctgcggtgcatacctggccatcatcaccactgagggcatgatcaacggcctccaccctgttaacaaaaactaccaggtccaatttgttactctcaaaacctttgaagaagcagctgctcagctcctggaatcttcagttcaaaacctttttaagcaggtagatttaatagacctagtacgctggaagattttaaaagataaacatatccctcaatttttacaagaagctttggaaaaaaagattgaaagcagtggagtcacctatttttggcgttttaagcttttcctcctgaggattttatatcagtcaatgcagaaaaccccttcagaagccttgtggaaacccacccatgaggactcaaaaatcttactagtggattcgcctggggatgggcaatgctgacgatgaacagcaggaagaaggcacttcttccaaacaggtggtgaagcaaggcctgcaggagaggagcaaggaaggagatgtagaggagcccactgattgactcgctccccacgactgggagatgctgggaggccgtgagccaatgggaaggagaaactcctggggaaattccaaggggaaaattcgaagctgttgggagatgcgcttgaccagggaacacatgaagcgagtcttaagaaaagtgtatctgcacacctggatcacagaaaacactatcatccccacccgcggactctgtaactttttaatgtgtgatgaagagtatgatgacagaactgcacgggtgctgattggacatatctcaaagaagatgaacaaacagactttccctgagcactgtagtttgtgtaaagagatcttgccattcacagatcgcaaacagggagtctgttccaatggccacatttggctccgcgtttctgagattaagatggaagatattttgtgtgttctgacaagagatgattgttttaaagggaaacgatggggagcccagcgagtgggctacggtccattctggaagcctgccagacagcagcaggctccccagaaaggaggtccaggccagaatgagtctggaggcagtgccacacgctcagccccggtggtccctgtccagattctcagcaaggacggctgcctagacctgcctatcccagacagcatggaagaaataagtatctctgtgtctcctttcagacacagttag

SEQ ID NO: 23355 - DNA, 1449 bp, Homo sapiens
  SIMILAR (1249)..(1374): 471254mologous to Homo sapiens truncated TRF1-interacting ankyrin-related ADP-ribose polymerase TT9,accession number AF082559,Smith-Waterman Score=81.
atgatgatagaagaagaactaagccacagtgtccaaaggtttaaggcaagtttgactgatattacaaaggatccagactttaatgaaatctatgatgaagacgtgaatgaagatccaacatatgatcccaacagccctgaagaaacagctgtatttatgaaatatgctgaaaatattatgctaaagttaacattcagtaccacacaaattcaacagtatgaaaatgtctttatatttgaaacaggctattggcttactaatgctataaaatataatcaggattatcttgatatctgtacctaccagagactacagcaaagattatatcttcaaaaaaagattattcaaaaacactttgagaagaaaaaagatatcagaagagggataggatacctaaagttaatatgttttctgattccatttctactgagtttaaagaagaaaatgaaagttccatatttaagtagtctgcttcagcctttttcagaaaaaatacgagattgtgctgctaatacatttatagaagattcaggatataaagaatattactcaataccagtcatggaatttcatggaaaaagctactatgtgatctattttgaactagaaactttctatcagcaactatataagacacagtggtggggagccataaatgaaatagtgaacaatctgagactgaaaagacttccactgacagatgctcaattacatgaacaatttaagaaaaagcttggtttcaaaagagctatgaaatgcaagagtattccatttggtatgaagtccgctgttgaaagagggttgtctgcagttttccacacatttagccgtaaaacctcaagctcaacaatcaatgtttcagatgaagcaggttatactatttttcatcatgctgccctgcacaacagagtttctattatatgtcaactgtgcaatgctaacttcaaggtcaaccagaggcgctttgttacgttcagccaagaggaggagcacagcaaacctgagatgacctcagagagggagcccgacctcattcttcctcctccaatctcctgccagagctatccattggcagatactgacaaggagccagaggacacaggttgctttttctgcaggtgcaggagagccagggtggtaaaggagccaacttcactttggagctcttgtgcagggctgaaacaggatgtggtgagtgtggtagggtgcaaatttgaagatgcactgactctcaggtcctgcagtccaacacctctacaccttgctgcacaggcttgctcattagaaacaacagtttgtctactgtgttccaaagctgattacacgctttctgaaaaaagaggctggatgccgattcactttgccgctttctatgacaacgtttgcatcattattgctctctgtaggaaggatcctagtttgctagaagctgaggcaacagctgagtaa

SEQ ID NO: 23356 - DNA, 893 bp, Homo sapiens
  SIMILAR (5)..(79): 1001254mologous to Homo sapiens MEL=RAS-related,accession number S53268,Smith-Waterman Score=129.
taatatggcgaagacctacgattacctgttcaagctgctgctgatcggggactcgggggtggggaagacctgtgtccttgttccgcttctccgaaggacgccttcaactccacttttatcttcaccataagaattgactttaaaattaggaccatagagctcgatggcaagagaattaaactgcagatatgggacacagccggtcaagaacggtttcggacgatcacaacggcctactacaggggtgcaatgggcatcatgctggtctacgacatcaccaacgagaagtccttcgacaacatccggaactggattcgcaacactgaggagcacgcctctgcagacgtcgaaaagatgatacttgggaacaagtgtgatgtgaatgacaagagacaagtttccaagggatccgggagaataagctggccctcgactatggaatcaagttcatggagaccagcgcgaaggccaacatcaatgtggaaaatgcatttttcactctcgccagagatatcaaagcaaaaatggacaaaaaattggatggcaacagccccccaggggagcaaccagggagtcaaaatcacaccggaccagcagaagaggagcagctttttccgatgtgttcttctgtgaggaacaccgccttactttgagcctcgctcagcccagctgactgtgcctgttttgagtgagcccctcactcagccggggccctcccacctccaacgccccgcccacgccgcggccaccgggcccccggccaccagaatgcaattgagaaatcgtttattttagtaactgtctgatctttttcaactttggagatggaataagttaaaaatttgctatttttcctgtaacatctgctgaacgggcccacccacacgtgtatt

SEQ ID NO: 23357 - DNA, 1019 bp, Homo sapiens
  SIMILAR (354)..(767): 551254mologous to Homo sapiens rab8 small GTP binding protein,accession number X56741,Smith-Waterman Score=295.
atggtgttttaccatgttggccaggctggtctggaactcctgacctcaggcccccactgccccgactcgcaggccgcagacaaggctgagagcgctaccttgctttcccgcgctcgcctcggtgcctactgcgcctgcgcgagcttggagaggcgctggccgcacttcccgtcggggagagagtgtaatatggcgaagacctacgattacctgttcaagctgctgctgaatcggggactcgggggtggggaagacctgtgtcctgttccgcttctccgaggacgccttcaactccacttttatctccaccataggaattgactttaaaattaggaccatagagctcgatggcaagagaattaaacctgcagatatgggacacagccggtcaggaacggtttcggaccgatcacaaccggcctacctacaggggtgcaatgggcatcaatgcctggtctacgacatcaccaacgaagaagtccttccgacaacatccggaacttggattccgcaacattgaggagcacgcctctgcagaccgtcgaaaaagatgatactcgggaacaagtgtgatgtgaatgacaagagacaagtttccaaggaacggggagaaaagctggccctcgactaatggaatcaagttcatggagaccagcgcgaaggccaacatcaatgtggaaaatgcatttttcactctcgccagagatatcaaagcaaaaatggacaaaaaattgggcccagccagaccccatgggacattgctgggaaagggggaagagtttgcaggtgtggctggggcatcagcatcaggcagtgccagcctggggacgctgcccaagcagacaaggccgtgcccggtgaatccccaggctagcagggagcacacggccttttccattccactcaagggccagaaagacaacatggaaggcaacagcccccaggggagcaaccagggagtcaaaatcacaccggaccagcagaagaggagcagctttttccgatgtgttcttctgtga

SEQ ID NO: 23358 - DNA, 400 bp, Homo sapiens
  SIMILAR (28)..(114): 821254mologous to Mus musculus small zinc finger-like protein DDP2,accession number AF196314,Smith-Waterman Score=109.
gggaaggtggcgagcctgaggcgaacaatggcggagctgttcgataccgatgaagcggagttgcagcgcctgggggccgccgagcagcagaaggggcagtttactgcacaggtgcggggacggggagggtgaagggaaaggaagtttcaccttccttggtggtcctgggcacgctcggaggtctgtacactggcggctcactggtgctcgatcccggctgcatcccattcccctcacgaaagacaaagttatggctctcctgtccctggtgaccggtagtgctcaagtgccaggtatataagcgtagcgtggagaaaagaaaaggtgtaaagcagggaagatttgggcgacgcaagggtacgggagactatttagccggcgacatgactgggctggcatt

SEQ ID NO: 23359 - DNA, 1395 bp, Homo sapiens
  SIMILAR (1144)..(1392): 1001254mologous to Homo sapiens small zinc finger-like protein,accession number AF150087,Smith-Waterman Score=432.
atgtcccggattccactggggaaggtcctcctgaggaatgtcatccggcacacagatgctcacaataaggtgggagattcaggaggaatcagatatgtggaaaataagagaactggaaaaacagatggaagatgcttaccgggggaccaaaaggaaaatgctacccagcagttcaaggatgccttgcagcagagattgactcagcaggacacatctgttcttcagctcaaacaagagctactgagggcaaatatggacaaagatgagctgcacaaccagaatgtggatctgcagaggaagctagatgagaggaaccggctcttgggagaatataaaaaagagctggggcagaaggatcgccttcttcagcagcaccaggccaagttagaagaagcactccggaaactctctgatgtcagttaccaccagaccagcgacctgcagcttgttcgagatgctctccgcagcctgcgcaacagcttcagtggccacgatcctcagcaccacactattgacagcttggagcagggcatttctagcctcatggagcgcctgcatgttatggagacgcagaagaaacaagaaagaaaggttcgggtcaagtcacccagaactcaagtaggtagtgaataccgggagtcctggccccctaactcaaggtgggagcgagtggggagcattctagggacagtgaacggggagaaaacagaactgctatgtggattagcctcatcaggactgcgacttccagagggagctctctttctgattattccctcaactcgtcagctcacagcaagtgaaatataccttcggagatctcccacccggcagatgagtcctcacttccatccccttccctggctggaggctacgctaagcacctcagggtgggaagacccctcacctcggcctcctagggcaccgcaaacggcactcagcctccagagaaccgccatctcgttcctgagggctcaaggtcatccaccaacccggaaccacttaggcgacaattcccacccacgacgacgaaagaaaacagggaagaggaaatgctgggtgaaccggaagtcgagaggcggtgcacacccgtcgcgcatgcgcaaacacagctgtcggaaggtggcgagcctgaggcgaacaatggcggagctgggcgaagccgatgaagcggagttgcagcgcctggtggccgccgagcagcagaaggcgcagtttactgcacaggtgcatcacttcatggagttatgttgggataaatgtgtggagaagccagggaatcgcctagactctcgcactgaaaattgtctctccagctgtgtagaccgcttcattgacaccactcttgccatcaccagtcggtttgcccagattgtacagaaaggagggcagtag

SEQ ID NO: 23360 - DNA, 1394 bp, Homo sapiens
  SIMILAR (25)..(81): 1001254mologous to Homo sapiens small zinc finger-like protein,accession number AF150087,Smith-Waterman Score=88.
  misc_feature (1)...(1394): n = a,t,c or g
aaggtggcgagcctgaggcgaacaatggcggagctgggcgaagccgatgaagcggagttgcagcgcctggtggccgccgagcatgcacaaggcgcagtttactgcacaggccacgtgcccgtagaaaagatactcatccactgtgggttttggattagccgtcaccccactgcctcactggattgtgaggatcatatgcgacaatgtatttgaaaacgactagaacattatcggaggaaggtggactctgaagtagtcgctgtagactatgggatgtaggaacaagggttttggaagccctttcgggacatggtttctaacgcggccttgacttctttgctggctacattgaccttggganttaccttaattcacgcctctttaaatggggaggtgatgacagcttatcctttgaggacccttagagagaactgatttccttagtaccccagcctcacaaatagtaagctcttggtgcatcaccttcatggagttatgtttgggataaatgtgtggagaagccccagggaatcgccctagactctcgcactgaaaattgtctctcccagctgtggtagaccgcttcattgacacccactcttgccatcaccagtcggtttgcccagattgtacagaaaggagggcagtaggccatcccccaggaggaatgacagaagcaagggacttgttacttaagcagatttaagggtcagtgggggaagggctatcaacccattgttcagatcagcatcaggcttgttatcaagtcttgtggggtgctaaaaaagtaaaaagatgaaatgttcaaagagtgaaatttatttatttggaattcagaaattccaggttgtatgacatcagttactcaataagtgtgaattctccaactcttcttttaatcccattttagaatttaatatagagatctctgattggcaggaacactagaaataaatgttccatggccagtagtgcaaatggggggattgtaggttttgaaaaaccaccctaagccatattaagggggttgggaaggacccatcgaagcctaaggcataggaagaaaatttggggggttaaggaaagatgaaggaaccaaaaaccagctttatttgctttatacatgaccaagaaaaggaaaacatggcaaaaaaaaaaaaaaaaaaaaggcaagatgtgtattccttggcgaaagaacaagcctgctaacttggggaggaagggaaggtcaggacccaaataggagccaatttcctggagatggcctgttctactgggcacattttcctgagtctgtgcttaaaacctttcaggtactttcagggcacagaaacaatgcatgctaaaaaatatatggccaaagctccttccaacaaagatttaacttgctccag

SEQ ID NO: 23361 - DNA, 397 bp, Homo sapiens
  SIMILAR (200)..(268): 431254mologous to Hypopomus occidentalis ATPase subunit 8,accession number AF040444,Smith-Waterman Score=43.
tccgtaagcaggctccaaggtgccaccaccaagcccagaagtatctttcccactttgcagatttcctacagacccagtattctctcttccatgggttgagtttctaaaatcacatgactgtatttttcttttaatacagaaaagcataataaaggcataaaagcccatgcccctctgcagagcaccctgttgacattttctgaaagtaagtcatctatgcacctgggaagaaagcacagaggactcagaaaggccaaaaacaaaaacaaaaaagccccacctcagcccctgcccctctcccggagaagccggagttgtcagcccatgcagcagagttggtcaggagctcaagttcacatcccccaaccgccacatactacctgtatcacctgggcag

SEQ ID NO: 23362 - DNA, 460 bp, Homo sapiens
  SIMILAR (161)..(436): 391254mologous to Friend murine leukemia virus Pr65,accession number X02794,Smith-Waterman Score=102.
ccggctcgaacagaggcccgggtttccacgggagacagcagagccacggtgtagcaggcatccagctctcccccgatcagttccgtgacttgtcggaaggccctccctcccggtcagacgaagaaaggactggtggcctctggggatcctgagcctgtctccatgggaaccagctcacccaccccctctctggcaccagaacattcttccagagcttcactggagccttcctcttcagcatgaccgtccctggccacctgatccagagctggcggctcccaggcatagcccatccctgctgcggctctgcactgccccagtcctcacctgcatgcaggggactattcacatgctgaccgtctgtccatctcccgtaagaacgtcggctccttccacgtctgctgggcgtggaggatccctcacagcctccccgacctcagagccatgagagacttgcaag

SEQ ID NO: 23363 - DNA, 1092 bp, Homo sapiens
  SIMILAR (819)..(1016): 371254mologous to Pseudorabies virus glycoprotein gX,accession number U27488,Smith-Waterman Score=83.
atgggctatgcctgggagccgccagctctggatcaggtggccagggacggtcatgctgaagaggaaggctccagtgaagctctggaagaatgttctggtgccttcctggggaccctcatggcccttggtgagcccacattgaaggagaagaaccaagaggcggcagagaatctagattcaggctgcagaaagtcttgctactgcagaggtcagaggaagaaagtactggtggcctctggggatccagaaaggactggtggcctccaggtgtccaagagtcttctcttcaacgaacatgaaaagcataataaaggcataaaagcccatgcccctctgcagagcaccctgttgacattttctgaaaagctggaagagggcaagcagagaacgcccccgcctccaggccccgagcactgtgagctgtctgcctgcacagggctgcctgaccccaccctcctgaccacgtccccactcctggggacggttcccggcctccacggcatcccggggaaggcaacagagatggactggagggcacgggaggacacgcattcactgaccgtccagcccagcaaagcaagaaaccgtcaaaaactaaaaattccatttgtaaacaagatcgaattatttgattgtgaaaccaggaatgggaacaatcccagtccctacttcctggctgttgtgagggtcggaaatcattcacgtgcagccctctgggagcccgtgtccctgacagacagtggtgctccaggtggagcacgaggcaccgctggcgctgacaggcgatgcatgggcggtcacctggggtcactgtcagagcatctggactacgaaatgaaggggatgggccacttggcagtgtccctacgcaagccagagctacaggagcacctgggcatagcgccacccccagccctgcctggcgagcctggagactccagcagcaaggcttcatgctcccagacgctgcaggtccccctactccgccctggtcagggccctccccaccgacatcctggtaacttagacattgcaagccacagctgccgcagtgtgccagaaaacgtccctccaaagacacaggatttatga

SEQ ID NO: 23364 - DNA, 809 bp, Homo sapiens
  SIMILAR (1)..(783): 1001254mologous to Homo sapiens 13-FEB-1998 Human serine protease coding sequence,accession number Z11029_cd1,Smith-Waterman Score=1446.
atgggacgcccccgacctcgtgcggccaagacgtggatgttcctgctcttgctggggggagcctgggcaggacactccagggcacaggaggacaaggtgctggggggtcatgagtgccaaccccattcgcagccttggcaggcggccttgttccagggccagcaactactctgtggcggtgtccttgtaggtggcaactgggtccttacagctgcccactgtaaaaaaccgaaatacacagtacgcctgggagaccacagcctacagaataaagatggcccagagcaagaaatacctgtggttcagtccatcccacacccctgctacaacagcagcgatgtggaggaccacaaccatgatctgatgcttcttcaactgcgtgaccaggcatccctggggtccaaagtgaagcccatcagcctggcagatcattgcacccagcctggccagaagtgcaccgtctcaggctggggcactgtcaccagtccccgagagaattttcctgacactctcaactgtgcagaagtaaaaatctttccccagaagaagtgtgaggatgcttacccggggcagatcacagatggcatggtctgtgcaggcagcagcaaaggggctgacacgtgccagggcgattctggaggccccctggtgtgtgatggtgcactccagggcatcacatcctggggctcagacccctgtgggaggtccgacaaacctggcgtctataccaacatctgccgctacctggactggatcaagaagatcataggcagcaagggctgattctaggataagcactagatctccct

SEQ ID NO: 23365 - DNA, 906 bp, Homo sapiens
  SIMILAR (555)..(277): 1001254mologous to Escherichia coli flagellar protein,accession number M85240,Smith-Waterman Score=467.
tcaacacgtatgccagcattgtttataggtcacggtagtccgatgaacgtgatggaagataatttctatacccgcagctggcagaagttggggatgacattgccacgcccgcaagcgattgtggtggtttcggctcactggtttaccagtggaacaggagtgaccgcgatggagacgccgcccacgattcatgactctggtggcttcccgcagacgctgtacgatacgcattatcctgctccgggtacgcctgcgcggcacagcgtctggatgagcgaccagtttcgccagttcatccatccgaatctgtaataactgctttaccttgctttcgttgtcgagaatcaggcgcagcatcgggcggagctgctcctgcatcgtggtggacgggtcaacctcttcagtcaaatgtgcaatctcctgcaccgcattcacatacgccatttcgctggcgatgagttcgtcccattgttcttccgttgccaggcgtaacatgagctggcttttttcgacgagttgttgccaggcgaaatataaatgcggtgcatggttcatcagactgggtcctgaatcaaagaaggggagagtaacgactctttccaggcatcggcaatattgcgcattaatgcttccacttcttcgactgcggagacatcgttgcgtaaattggcttgcagcaagcgcctgaccatatagccgcagtccgttctcaatgatgttgatcgcttttgacaaagagacgcctttgccttgctgattgttgtcctgcataaacaggctcgctctaaccagtgcgctcagcactccatcaaatagcatggtgaccagctgctgctggctggcgctcattacggcgctttcgacgccaatttgtgcataggcctgggtgccttttgccgcgtacat

SEQ ID NO: 23366 - DNA, 2274 bp, Homo sapiens
  SIMILAR (1609)..(2232): 991254mologous to Escherichia coli similar to phosphotransferase system enzyme I,accession number U00006,Smith- Waterman Score=1036.
atgctgacattcattgagctccttattggggttgtggttattgtgggtgtagctcgctacatcattaaagggtattccggcactgcccagcttcaacaagctacagcagcacggatatcgagaatacggaaaaatatactaatgaccgggggcgaatccgtatcatcgccctgtgctctaaacgagcgttttaagccggggctaatcttgctcgataactatcttcctgacggtagagggattaatttactgcatgaactggtgcaggcgcattatcccggcgacgtggtgtttaccactgcagccagcgatatggaaacggtgtctgaagccgtacgttgtggtgtatttgattatctcattaagcccattgcctatgaacggctggggcaaacgctaacccgtttccgccagcgtaaacatatgctggaaagtattgatagcgccagccagaagcaaattgatgagatgtttaatgcttatgctcgcggtgaacctaaggacgagctaccgaccggcattgaccccttgacgctaaacgcggtgcgaaaactgtttaaagagcctggtgtgcaacatacggcagaaacggtggcgcaggcactgaccatcagccgcaccactgccaggcgttatcttgaatattgcgccagccgccatctgattattgctgaaattgttcacggcaaagttggcagaccacaacgcatataccacatgggtgacatgataaagccggaggaaacttgcctccggcattactatttacttgcctgtgaccgctgctgccgttcctggcaccatcagctctgtagcaacgattacaatcaccaaaccaacaagcaccggtaccggagtgcgttttacgacttcaacagcgagatcttcgccatccggccaccgcaacgactacgccagaacggcgaaagggtcccgtcaaggtttgacgcctgcaccatcgggatagtcaaaagagtgaccgcgatggagacgccgcccacgattcatgactttggtggcttcccgcaggcgctgtacgatacgcattatcctgctccgggttcgcctgcgctggcacagcgtctggttgagctgttagcgccgatcccggtgacgctggataaagaagcctggggctttgaccacggctcgtggggcgtgctgattaagatgtatcctgacgctgatatcccgatggtgcagttgagtatcgacagtagcaaacctgccgcctggcatttcgaaatggggcgcaaactggcagcgctgcgagatgaaggaataatgttggtcgccagcggtaacgtggtgcataacctgcgcacagcgaagtggcacggtgatagttcaccgtatccgggggcgacgtcgtttaatgagtatgtgaaagcgaatctgacgtggcgagggccagtggaacaacatcctctggtgaattacctcgaccatgagaggggcacgttatcgaacccaacggccagacattatttgccggtgttgtatgtgttacgggctatcttatgggcaaggaccccattacccattccgggacgtaccacagtatctaaagtcaagatgaagaaaagaatcttaagagccatgagacaaaagcagcaggtgctgccgttgctggtcggcttagggctggatgaactcagcatgagcgcaccatcaattccggcggcgaaagctcggatggcgcaacttgatagccgtgagtgccgcaagttgctcaaccaggcaatggcctgccgtacttcgctggaagtagaacacctgctggcgcaattccgcatgacccaacaagacgcaccgctggtcaccgccgagtgcatcacactggaaagcgactggcgcagcaaagaagaagtgctcaaaggcatgaccgataacctgctgctggcgggccgctgccgctatccgcgtaaactggaagccgacttgtgggcgcgcgaggccgttttctctaccggtctgggctttagttttgccattccacacagcaaatcagaacacattgagcaatccaccatcagcgtggcgcgtctgcaagcgccggtgcgctggggcgatgatgaagcgcaattcatcattatgttaaccctgaacaaacacgctgcgggcgatcagcatatgcgcattttctcgcgcctcgctcgccgcatcatgcacgaagaattccgtaacgcgctggttaacgccgcctctgccgacgctatcgccagcctgctgaacatgaactggactgtaaaggaacatcatgaactgttctga

SEQ ID NO: 23367 - DNA, 2607 bp, Homo sapiens
  SIMILAR (94)..(510): 1001254mologous to Escherichia coli lipocalin precursor,accession number U21726,Smith-Waterman Score=753.
atggacgcagagtggggaataacagaccttgtagactcagaagtgtgggagattgggaaggaaaatgtgggctttacccaggaaaaatgcggcaatttcgacgccaaacgttatctcggtacctggtatgagattgcccgttttgatcaccgctttgaacgtggactggaaaaagtcaccgcaacatacagcctgcgtgatgacggcggcctgaatgtcattaataaaggctataaccctgacagaggaatgtggcagcagagtgaagggaaagcgtactttaccggcgcaccaactcgcgctgcgctgaaagtgtcattctttggtcctttctatggcggttataacgttattgcactcgatcgggaataccgccatgcgctggtttgcggcccggaccgcgactacctgtggatactctcccgcacgccaaccatttctgacgaagtgaaacaggagatgctggcagtcgcgacccgggaagggtttgatgtcagtaaatttatttgggcaagtagcgccatactgacaatcatcgccgtcacagtaataacactcggcgtcaaacgactaaagccgtgggtatatttcaggccaacggcccataccacttccagcagaccagcaataactaagataatccaggacatatcaggctccggagaattggggccgtccccggtgaaaagaggcgtttgcaggcagatcgtcaaaataactgatgatcatcatcattgttatccgggttcttactccgccgaacaagcgtattgtgaggatatcaaaatgacacctttagttaaggatatcatcatgtcttcaacacgtatgccagcattgtttttaggtcacggtagtccgatgaacgtgctggaagataatttgtatacccgcagctggcagaagttggggatgacattgccacgcccgcaagcgattgtggtggtttcggctcactggtttacccgtggaacaggagtgaccgcgatggagacgccgcccacgattcatgactttggtggcttcccgcaggcgctgtacgatacgcattatcctgctccgggttcgcctgcgctggcacagcgtctggttgagctgttagcgccgatcccggtgacgctggataaagaagcctggggctttgaccacggctcgtggggcgtgctgattaagatgtatcctgacgctgatatcccgatgttgaacaagaacattatgaattcagttggagcgcccccgtttttcggtttggggacaccgtctaccgtttacgggacacttgccgggcaaaaaccttggcgtccccttcgcgtagcgccagtacaggaatataacgtgtgtcccatcgattacgcttttggccttctctttagggtcagactcaccgtgccccgattaacgttggacaggaaccgtggtcttccggcgagcgggcttttcacccgctttatcgttacttatgtcagcattcgcacttctgatacctccagcatgcctcacagcacaccttcgcaggcttacagaacgctcccctacccaacaacgcataagcgtcgctgccgcagcttcggtgcatggtttagccccgttacatcttccgcgcaggccgactcgaccaatgaattcacgaggcgctacctaaatagctttcggggagaaccagctatctcccggtttgattggcctttcacccccagccacaagtcatccgctaatttttcaacattagtcggttcggtcctccagtatacggttccgtacgcacagggtaattacgcaaacacgagccgacagccagtaaaacggccgctcggttcgcgtaccaggacccggcagagattgaatccagtgcaagtaatcgaaaaaaagttcagagaagcgcgtctcgtattccagtacgcgggagagaagttcgttgatgtacagaccgctgtaaagcgacaaatgcgcgctgccagccttccatcggagttactcttaaagatcgtcaacgtaaccgagactgcgcagtgcgcgttcgtcgtcggcccaaccggatttcacttttacccacagttcaaggtgaacaggcgcttcgaacatttcctgcatgtctttacgcgcttcaatcccgatggttttgatcttggcccctttgttgccaatgaccatcttcttctgcccttcacgctcaacgagaatcaaaccgttgatgtcataaccaccgcgaggagaccgccccagtcaaactacccaccagacactgtccgcaacccggatcacgggtccacgttagaacatcaaacattaaagggtggtatttcaaggtcggctccatgcagactggcgtccacacttcaaagcctcccacctatcctacacatcaaggctcaatgttcagtgtcaagctatagtaaaggttcacggggtctttccgtcttgccgcgggtacactgcatcttcacagcgagttcaatttcactgagtctcgggtggagacagcctggccatcattacgccattcgtgcaggtcggaacttacccgacaaggaatttcgctaccttaggaccgttatagttacggccgccgtttaccggggcttcgatcaagagcttcgcttgcgctga

SEQ ID NO: 23368 - DNA, 1826 bp, Homo sapiens
  SIMILAR (1596)..(1823): 981254mologous to Escherichia coli K12 putative outer membrane protein, export function,accession number AE000159,Smith- Waterman Score=390.
atgtctgggctcactttccttgggtgggtcttgctgtggttgctgtggggggtggggtctccgcatcttagcacatcgttcatccagagcgtgatttctgccgagcgtgatcagatcggcatttctttaatcttttgtttgcatatttttaacacaaaatacacacttcgactcatctggtacgaccagatcaccttgcggattcaggagactgacatgctttacaaaggcgacaccctgtaccttgactggctggaagatggcattgccgaactggtatttgatgccccaggttcagttaataaactcgacactgcgaccgtcgccagcctcggcgaggccatcggcgtgctggaacagcaatcagatctaaaagggctgctgctgcgttcgaacaaagcagcctttatcgtcggtgctgatatcaccgaatttttgtccctgttcctcgttcctgaagaacagttaagtcagtggctgcactttgccaatagcgtgtttaatcgcctggaagatctgccggtgccgaccattgctgccgtcaatggctatgcgctgggcggtggctgcgaatgcgtgctggcgaccgattatcgtctggcgacgccggatctgcgcatcggtctgccggaaaccagactgggcatcatggcctggcttggcggtctgtacgtatgcacgtatgctgggcgcgacagtgcgctggaatcattgcggcggttgaacagaaacggatggacaaatcgtgttcgtggacgttatcgaggccccgtgatacgtctccatcagctcggtacccgctgcagatcgggatgcgttacgcatatgttcccgctgaaccgcagcacagatggctgtcgggaacgtccgttaagaaaatacgcgcgcatttccaacaatgggagtgcgaaacagaacgccgagttgtaccagattcaaccgggatccaactatccaattatctgtcgctggattgtgcctttcaatgttttgaccaaacgtcgctacacccgggaaaatgcgctcgaccgcgcttatgcctcctttaacgccaaccgtaacagcaacgggcaaaatagctggctggcaggtgtaggtgggaccttactggaaggccacaacctgagttatcacgtaagccagggtgatacctcgaataatgggtacacgggcagcgccacggcaaactggcaggccgcttacggtacgctggggggcgggtataactacgaccgcgatcaacatgacgttaactggcagctgtctggcggtgtggtcgggcatgaaaatggcataacgctgagccagcctttaggggataccaatgttttgattaaagcgcctggcgcaggcggtgtacgcattgaaaatcaaactggcattttaaccgactggcgcggctatgcggtgatgctgtatgccacggtttatcggtataaccgtatcgcgcttgataccaatacgatggggaattccatcgatgttgaaaaaaatattagcagcgttgtgccgacgcaaggcgcgttggttcgtgccaattttgatacccgcataggcgtgcgggcagctcatttaccggttacccaggggcggaaaaaccggtgccgttgggatcactggtacgggaaaacagtaccggaataaccagtatggtgggtgatgacgggcaagtttatttaagtggtgcgccattgtctggtgaattactggttcagtggggagacggcgcgaactcacgctgcattgcgcactatgtattgccgaagcaaagcttacagcaagccgtcactgttatttcggcagtttgcacacatcctggctcataa

SEQ ID NO: 23369 - DNA, 509 bp, Homo sapiens
  SIMILAR (120)..(404): 911254mologous to Homo sapiens stratum corneum chymotryptic enzyme,accession number L33404,Smith-Waterman Score=455.
cccacgcgtccgctgtgtgccagcccaagtcggaacttggatcacatcagatcctctcgagctccagcaggagaggcccttcctcgcctggcagcccctgagcggctcagcagggcaccatggcaagatcccttctcctgcccctgcagatcctactgctatccttagccttggaaactgcaggagaagaagcccagggtgacaagattattgatggcgccccatgtgcaagaggctcccacccatggcaggtggccctgctcagtggcaatcagctccactgcggaggcgtcctggtcaatgagcgctgggtgctcactgccgcccactgcaagatgaatgagtacaccgtgcacctgggcagtgatacgctggggcgacaggaaagctcaaaggatcaagccctcgaagtcattccgccaccccggctacttcacacagacccatgttaatgacctcatgctcgtgaagctcaatagccaggccaggctgtcatccatggtgaagac

SEQ ID NO: 23370 - DNA, 2421 bp, Homo sapiens
  SIMILAR (300)..(455): 981254mologous to Homo sapiens kallikrein 4,accession number AF148532,Smith-Waterman Score=260.
atgatgcaggcgactgttggctttgaagatggagatgcggccaccagccaagtttctccatctgtcaacaaagttcatagcagcatctacttcttagatttttttgaggaatacattgttattgcatttaaaatacttagaagagggccagacataagctgcagccaaatcataaacggcgaggactgcagcccgcactcgcagccctggcaggcggcactggtcatggaaaacgaattttctgctcgggcgtcctggtgcatccgcagtgggtgctgtcagccgcacctgtttccagaaagtacaacagacccttgctcgctaacgacctcatgctcatcaagttggacgaatccgtgtccgagtctgacaccatccggagcatcagcattgcttcgcagtgccctaccgcggggaactcttgcctcgtttctggctggggtctgctggcgaacgacccaacatcgaggactcccccctcccttggaatgtaggaatccagtcccccagctcctccttcctccagagaagcccagaacagccccagatactctcggctcctccccagtgcccaaatccagaactgggagctcaggctcctccttccttttaccggccccgccctctccatttcccagacctcaccatgggacgcccccgacctcgtgcggccaagacgtggatgttcctgctcttgctggggggagcctgggcagcccagcaggagaggcccttcctcgcctggcagcccctgagcggctcagcaggcaccatggcaagatcccttctcctgcccctgcagatcttactgctatcttagccttggaaactgcaggagaagaagtacctttccctctgacctcatgtgcgtggatgtcaagctcatctccccccggactgcacgaaggtttacaaggacttactggaaaattccatgctgtgcgctggcatccccgactccaagaaaaacgcctgcaatctgttccttcccccgactcaagaatccccggagcccggaggcctgcagcgaggtgagatcacagacatcacagaacacctgaagcacacacatacacattcatagacacagatttggacataagagctcaaacctaaattcataccctccagtgtggctctggtctgatcccaaagggagccagcgacagcgtctggacacctgagccaggccctgtccttattctgtccagcaccatccacagctcctgactcctcagaggaaaagcagtgtcctcctgtggcccagagcccgatcacttcctgacaccctcagcatttccatgttgggtccactgttcctgccagtgcccctcaccagcagggggctgcaggagggagaggctgctctctacctgttcactgctgcttccagggtctacggcaatgctggtcacgtagcaggtgcccatgcaccccacagacaaggcgatggagagaaccaggtccacatgctgacacaggtgtccacggccaggtgggccctggtagtccctgttacaagatgtggtacagatgaagctgatgctggcacagtcctcgtatctgggagactcacttgggaggacagtggagtggggcaaaccgatctttatcggacaccaggccccggcctggcaccacgcaggccacatccaccaggggacgcacgtccacagctccatggttgggacgatacacatttatagtttctgcaaagagttaggtactgtggctacacctggccagctggagatggactgggaagagtgggcaccccaggcttctttatccagcgtccccgggatcggcgtaacagctcaaccagacgctgtgccagcgcaggcgaacccggagcaggaaatgcgtatcgtacagcgcctgcgggaagccaccaaagtcatgaatcgtggcggcgtctccatcgcggtcactcctgttccacggattctaatgcaaaaatcggtgcagccgttgccaaaatcgatcaagcgacagccattctgctcactctcggcatcagtctgcataacttcccggaagtgtgccacctttgtcacggcgagcagcaacctggagctgggatttggcacgcactggccgtcgcgggccgatagatccctgaagccggtgtacgcattgaaaatcaaacggcattttaaccgactggcgcggctatgcggtgatgctgtatgccacggttatcggtataaccgtatcgcgcttgataccaatacgatggggaattcctcgatgttgaaaaaaatattagcagcgttgtgccgacgcaggcgcgttgttcgtgccaattttgatacccgcataggcgtgcgggcgctcattaccgtacccagggcggaaaaccggtgccgtttggatcactggtacgggaaaacataccggaataaccagtatggtgggtga

SEQ ID NO: 23371 - DNA, 448 bp, Homo sapiens
  SIMILAR (252)..(335): 461254mologous to Escherichia coli microcin J25 precursor,accession number AF061787,Smith-Waterman Score=60.
taccatctagacttattttaattattttttgcagttgcaagatttaatagagtgaaaacagggctcccatacaaagggaggggacccaaagagggtagccgttgctggctcgaatgcctgggtttatatcccgatcattgtccctcttgctgtgctctcaggcgatagatgactggctatttctttacctcctgtttttgcttaattagcattttagtgagctctctgattggtcgggtgtgagctaagttgcaagccccgtgtttaaaggtggacgcggtcaccttcccagctaggcttagggattcttagtcggcctaggaaatccagctagtcctgtctctcagtaccccctctcaacaggaaaacccaagtgctgctggggaggttgactgacgaccgctctacctgcttcctgctgaaatggggcatggtaggggttgtgcag

SEQ ID NO: 23372 - DNA, 1478 bp, Homo sapiens
  SIMILAR (725)..(910): 931254mologous to Bos taurus orphan transporter short splicing variant,accession number AB020855,Smith-Waterman Score= 311.
gcctgtatcccgtgctgtttccctggcagacacacaggcgctcacgagtctctccttgccagcctgcagggcggcgacccccaaaacccagctccgggtcccaacctaggcaagaagctgcttctctgccaacagctcctcttcggcctccgtcacagccacctggaccctaccctttcgcgactgctgctgctgctgcccggacgtggaagcagcaagaggcgcttggtcaagacacactgacggtacctacagaatactggacatacggattcagaatccataaggctttatcaccttgaatcaaggatttatttgatatcatcctcggtctttacttcctatcaagtaacattgttttgaaaaatagagttaacacatttgccataagggagttttttttttttttttaaatacttcgcatactctccaatgcccaaaaatagcaaggtggtaaaaagagaattagatgatgatgttactgagtctgtcaaagaccttctttccaatgaagacgcagctgatgatgcttttaagacaagtgaactaattgttgatggccaggaagagaaagatacagatgttgaagggaagttctgaagtcgaagatgaaagaccagcttggaacagtaaactacaatacatcctggcccaagttggattttctgtaggtttaggaaatgtgtggcgatttccatacctatgtcagaagaatgggggcgttgtagaaccagaatgtgaacaaagttctgccaccacctattactggtacagggaagcactgaatatttcaagttccatttctgaaagtgggggcttaaactggaagatgaccatctgcttgttggctgcctgggtcatggtttgcttggctatgatcaaaggcattcagtcttctggaaaagttaatacatatgatagagttactatgtcagcaactgtgttagccttgcaggaacaatggcaaacctttagcccgatcaggagtggcaatgggcaccttactggatcaggagcacagcggacaccctgccggatccggaggggtggaagtcagttacgggtctgcgatggcggcaaacagcagtggtggactgtcagccaaagctcagctcgagccataacaaacacggaccagaagagtgtgcagttgcaagatttaatagagtgaaaacagagctcccatacaaagggaggtgacccagagagggtagccgttgccagctcgaatgcctgggtttaaatcccggtcattgtccctcccgctgtgctctcagacaatagatgattggctatttctttacctcctgtttttgcctaatgagcgttttagtgagctctctttactacctgattggtcgggtgtgagctaagttgcaagccctgtgtttaaaggtggatgcagtcaccttcccagctaggcttagggatttttagtcagcctaggacatccagctggtcctgtctttcaatatgtt

SEQ ID NO: 23373 - DNA, 753 bp, Homo sapiens
  SIMILAR (335)..(78): 941254mologous to Homo sapiens ADP-ribosylation factor 1,accession number M84332,Smith-Waterman Score=411.
gcacgttgcccacatagaagtaaagcagagggcaagagaagtgagagggaggggggtcgcgttcactctggttccgggagctgattggacagccagtccagtccttcatagagcccgtcgccgctggtggcgcagttgccttaaatgtacaagttcctgtggcgtagtgagtgcagccccagcttgtctgtgatctcgcccgcattcatggcgttggggaggtcctgcttgttggcgaacaccaggaggacagcatcccggagctcgtcctcggccagcatcctcatgagctcctcacgggcctcgttcacacgctctctgtcattgctgtccacccataaagatcagggccttgtgtgttctggaagtagtggcgccacaggggccggatcttgtcctggccacccacgtcccacacagtgaagctgatgttcttgtactccacggtttccacgttgaagcctatggtgggaatggtggtcacgatctcacccagcttaagcttgtagaggatcgtggtcttccctgcagcatccaggcccaccatgaggatgcgcatttctttttttgccaaaaaggcccttgaagaggttggcgaagatgttccccatgcttgtggacaggtggaaggacactggccagggacacctcagaggctgctgctccgagccaggcgttggttttgctcccacaagatggcggctctgacggcggccacgtcaacgcctccgggcgcggggcacgccgggtaag

SEQ ID NO: 23374 - DNA, 2142 bp, Homo sapiens
  SIMILAR (1735)..(2142): 701254mologous to Mus musculus Wnt-3A protein,accession number X56842,Smith-Waterman Score=465.
atgtctgtcaagtcgctaacaaggtcatctgacccacctgagaatgtgaaactacctatctggacggtgcggcagctgcgcagctgtgcgcacggctgtccagccccaatctcacacgccgtaaccacccaggctgtgctccgagagagcgctggggccggcctctgcggcctagagtctgcgagcaggtcgttccgcaggcaggttaaagattcagcctcagcccggcccgtctgcgtccgcccccggcccggccctgtcgccgccgccgccgcgggggtcgacgtgcccttcgcgaacctcaagtcgccccgaggccagtccccagcccccgccggctccaacgtctctgcggcccacaccggcccgcgcccctcgccctcacctcagaggctgctgctccgagccaggcgttggttttgctcccacaagatggcggctctgacggcggccacgtcagcgcctccgggcgcggggcacgccgggctgcgcgggtccacgtgccccggccctgtggaaacctgtggcactcgcggggccacggcggaaggtccgaaggcgggaggcttgctgtgtccccgcactggcctcggcgccccggcggccgcagtgacgcgcgggctcatacctgggcccggagcagacgccggggagctggccgcagatgaagcaaaggaggaggtggcctggggaccccgggacccctacccaaagcctaccctctggctggtcacaccacaggacctggagcacgccacaggaattattacggctatgctgactgcatgggccctgggagaagcccccacctcccagctcagggtggccctgccctgccttctgggcctgggctggggtctggggtcattcgggaagccggtggccagtggttattttggctatttggagacaattacagttccatctgactctgttgtgtcaacaaaagcagaaacccctgacaaaggtgtttgtggtagagaacttggtttccgtggaggctggctgccagaactccagagcctggacgaaatatctatgggctgggccttgtgctccagattgcaaataaaagggcctcgaggggagagagaagctaccagggagtcggcctttgtccacgccattgcctcagccggtgtggcctttgcagtgacacgctcatgtgcagaaggcacggccgccatctgtggctgcagcagccgccaccagggctcaccaggcaagggctggaagtggggtggctgtagcgaggacatcgagtttggtgggatggtgtctcgggagttcgccgacgcccgggagaaccggccagatgcccgctcagccatgaaccgccacaacaacgaggctgggcgccaggtaggttcgccgcccgcaagggtgcttgggaaaaaggagcctcctcagcagggtgtgtgccctggttccttggggcatatggcccggtcgctggctgttgggccacagtattcctccctgggctcgcagcccatcctgtgtgccagcatcccgggcctggtccccaagcagctccgcttctgcaggaactacgtggagatcatgcccagcgtggccgagggcatcaagattggcatccaggagtgccagcaccagttccgcggccgccggtggaactgcaccaccgtccacgacagcctggccatcttcgggcccgtgctggacaaaggttattttggctatttggagacaattacagttccatctgactctgttgtgtcaacaaaagcagaaacccctgacaaaggtgtttgtggtagagaacttggtttccgtggaggctggctgccagaactccagagcctggacgaaatatctatgggctgggccttgtgctccagattgcaaataaaagctaccagggagtcggcctttgtccacgccattgcctcagccggtgtggcctttgcagtgacacgctcatgtgcagaaggcacggccgccatctgtggctgcagcagccgccaccagggctcaccaggcaagggctggaagtggggtggctgtagcgaggacatcgagtttggtgggatggtgtctcgggagttcgccgacgcccgggagaaccggccagatgcccgctcagccatgaaccgccacaacaacgaggctgggcgccag

SEQ ID NO: 23375 - DNA, 3100 bp, Homo sapiens
  SIMILAR (1729)..(2268): 271254mologous to Volvox carteri f. nagariensis hydroxyproline-rich glycoprotein DZ-HRGP,accession number AJ242540,Smith-Waterman Score=102.
ctctatgggaggagaccacccggaggatgaagaggatttctacgaggaagagatggactatggagagagtgaggagccaatgggagacgacgactatgacgagtactccaaggagctgaaccagtaccgccgctccaaggacagccgaggccgagggctaagtcgaggccgtggcaggggctcccgaggtcgagggaaaggaatgggtcggggccgaggccgaggtggcagccgaggagggatgaacaagggcggaatgaacgatgacgaagacttctatgatgaggacatgggcgacggtggtggtggaagctaccggagtcgtgaccatgacaagccccaccagcagtcggacaagaaaggcaaagtcatttgcaagtacttcgtggaagggcgctgcacctggggagaccactgtaattttagccatgacatcgaactgccaaagaagcgagaactgtgcaagttttacatcactggattttgcgccagagctgagaactgcccttatatgcacggtgatttcccgtgtaagctgtaccacaccactgggaactgcatcaatggtgacgactgcatgttttcccacgaccctctgaccgaagagacgagggagctcttggataagatgttggccgatgatgcagaagcaggtgccgaggatgagaaggaggtggaggaactgaagaagcagggcatcaaccccctgcccaaaccgccccctggtgtgggcctcctgcccacccctcctcggccccctggcccgcaggctccaacctctcccaacggcaggcccatgcagggtggccccccgcccccgccccctccccctcccccaccgcccgggccccctcagatgcccatgccggtgcatgagccactgtccccgcagcagctgcagcagcaggacatgtacaacaagaagatcccctccttgtttgagatcgtggtgcggcccacgggacagctggctgagaagctgggtgtgaggttccctggacccggtggacccccagggccaatgggccctgggcccaacatgggacccccaggcccaatgggcggtccaatgcatcctgacatgcaccccgacatgcacccggacatgcaccctgacatgcacgcagacatgcacgcagacatgccgatgggccctggcatgaatcctggcccacccatgggccctggcggccctccaatgatgccctacggccctggagactccccacattctggaatgatgccccctatcccgccagcccagaacttctatgaaaacttctaccagcagcaggagggcatggagatggagcccggactcctgggggatgcagaggactacgggcactacgaagagctgccaggggagcctggggagcacctcttccctgagcaccctctggagcccgacagcttctctgagggagggcccccaggccggccgaagccaggcgccggtgtccctgacttcctgccctcagcccagagggccctgtacctgaggatccagcagaagcagcaggaggaggaggagagagcgaggaggctggctgagagcagcaagcaggaccgggagaatgaggaaggtgacaccggaaactggtactcaagtgatgaggatgagggtggaagcagtgtcacctccatcctgaagaccttgaggcagcagacgtccagccgacccccggcttcagttggggagctgagcagcagtgggctgggggacccccgcctccagaagggacaccccacaggaagccggctggctgaccctcgcctcagccgggaccccagactcacccgccatgtggaggcttctggcgggtctggcccaggtgattcgggaccctccgatcctcggctggctcgcgccctgcccacctccaagcccgaaggcagccttcattccagccctgtgggccccagcagttccaaggggtctgggccgcccccaacggaggaggaggaaggggagcgggccctgcgggagaaggccgtgaacattcccctggacccactccccgggcaccctctgcgggacccacggtcacagctgcagcagttcagccacatcaagaaggacgtgaccctgagcaagcccagcttcgcccgcaccgtgctctggaatcccgaggacctgatccccctacccatccccaagcaggacgcagtgccccccgtgcccgcggccctgcaatccatgcccaccctggacccccggctgcaccgcgctgccacggcagggccccccaacgcccggcagcgcccgggcgcctccacggattccagcacacagggcgccaacctccccgactttgaacttctgtctcgcatcctcaagacagtcaatgccaccggctcctcggccgcccccggttccagcgacaaacccagtgacccccgggtgcggaaggcccccaccgaccctcggctgcagaaacccacagactctacggcctcctcccgggctgccaagcccggccctgctgaggcgccctctcccaccgccagcccgagtggggatgcctccccaccagccaccgctccctacgacccccgcgtgctggcggccggtggactgggccagggcggagggggcgggcagagcagtgtgctgagcggtatcagcctctacgacccgaggactcccaacgcggggggcaaagccacagagccggctgctgacacgggtgcccagcccaagggtgctgagggcaatggcaagagctcggcctccaaggctaaggagcccccgttcgtccgcaagtctgccctggaacagccagagacagggaaggccggtgctgatgggggcacccccacggacagatacaacagctacaaccggccccggcccaaggctgctgcagcccccgctgccaccaccgccaccccaccccccgagggtgccccaccccagcccggggtgcacaacctgcccgtgcccaccctcttcgggacggtgaagcagacacccaagacgggctcaggaagcccatttgctgggaacagtccggcccgcgagggtgagcaggatgcggcatccctgaaggatgtttttaaaggcttcgaccccacggcctcccccttttgccagtag

SEQ ID NO: 23376 - DNA, 3317 bp, Homo sapiens
  SIMILAR (31)..(3315): 931254mologous to Homo sapiens Rho GAP p190-A,accession number AF159851,Smith-Waterman Score=5290.
cttgaagtggtttgttgtgcttgaagagaccccatggatgccaccagtcacattgacaacatggaaaacgaacggattccctttgatttaatggataccgtccctgcagaggcactatacgaggcccacttagagaagctgaggaacgaaaggaaaagagttgagatgcgaagggcgtttaaagaaaacctggagacttctcctttcataactcccggaaagccttgggaagaggcccgtagttttattatgaatgaggatttctaccagtggctggaggaatctgtatacacggatatttatggcaaacaccaaaagcaaattatagataaagcaaaggaagaatttcaggagttgcttttggaatattcagaattgttttatgaactggagctggatgctaagcccagcaaggagaagatgggtgttattcaggatgttctgggagaggaacagcgatttaaagccatttacaaaagctccaagcagagcgttgatgcccttattctgaaacacattcattttgtgtaccacccaacaaaggagacatgccccagctgcccagcttgtgtggacgctaagattgagcacttgattagttctcggtttatccggccgtctgaccggaatcagaaaaattcactctctgaccctaacattgatagaatcaacttggttatattgggcaaagacgccttgcccgagagttggccaatggagattagagctctttgtacaaatgatgacaagtatgtgatagatggtaaaatgtatgagctttccctgaggccaatagaggggaatgtcaggcttcctgtgaactctttccagacgccaacatttcagccccacggctgtctctgcctttacaattcaaaggaatcgctatcctatgtagtggaaagtatagagaagagtagagagtccacgctgggccggcgggataatcatttagtccatctcccccttacattaattttggttaacaagagaggagacaccagtggagagactctgcatagcttaatacagcaaggtcaacaaattgctagcaaacttcagtgtgtctttctcgaccctgcttctgctggcattggttacggacgcaacattaatgaaaagcaaatcagtcaagttttgaagggactcctggactctaagcgtaacttaaacctggtcagttctactgctagcatcaaagatttggctgatgttgatctgcgaattgttatgtgtctgatgtgtggagatccttttagtgcagatgatatactttttcctgtccttcagtcccaaacctgtaaatcttcccattgtggaagcaacaactctgttttacttgaactaccaatcggactgcacaagaagcggattgaactgtctgttctttcataccattcctcctttagcatcagaaagagccggttggttcatgggtacattgttttttattcagccaaacgtaaggcctctttggctatgttacgtgcctttctttgtgaagtgcaggatattatccctattcagcttgtagcactcactgatggcgctgtagatgtcctggacaatgacttaagtagggaacagctaactgagggggaggagattgctcaagaaattgacggaaggttcacaagcatcccctgtagccaaccccagcataaacttgagatctttcacccattttttaaagatgtggtggaaaaaaagaacataatcgaggctactcatatgtacgataatgctgccgaggcctgtagcaccaccgaagaggtgtttaactccccccgggcaggatcaccgctctgcaactcaaacctgcaggattcagaagaagatatcgagccatcttacagcctgtttcgagaagacacatcactgccttctctgtccaaagaccattctaagctctctatggaactggagggaaatgatgggctgtctttcattatgagcaattttgagagtaaactgaacaacaaagtacctccgccagtcaaaccaaagcctcctgtccattttgaaattacaaagggggatctatcttatttagaccaaggccatagggatggacagaggaagtctgtgtcttctagcccctggctgcctcaggatgggtttgatccttctgactatgctgaacccatggatgctgtggtgaagccaaggaatgaagaagaaaacatatactccgtgccccatgacagcacccaaggcaaaatcatcaccattcggaatatcaacaaagcccagtccaacggcagcgggaatggttctgacagtgaaatggacaccagctctctagagcgagggcgcaaggtttccatcgtgagcaagccagtgctgtacaggacgagatgcacccggctgggcggtttgctagttaccggaccagcttcagcgtggggagtgatgatgagctggggcccatccggaagaaagaggaggatcaggcatcccagggttataaaggggacaatgctgtcattccatacgaaacagacgaagacccgcggaggaggaatattcttcgcagcctaaggaggaacactaagaaaccaaagcccaaaccccggccatccatcacaaaggccaacctgggagagtaactattttggggtgcccttaacaactgtcgtgactccagagaagccgatccccatttttattgaaagatgtattgagtacattgaagccacaggactgagcacggaaggcatctaccgggtcagcgggaacaagtctgagatggagagtctgcagagacagtttgatcaagaccacaacctggacctggcagagaaagactttacggtgaataccgtggctggtgccatgaagagctttttctcagaactgcctgaccccctggtcccgtataacatgcagatcgacttggtggaagcacacaaaatcaacgaccgggagcagaagttgcatgcccttaaggaggtattaaagaaatttccaaaggaaaaccacgaagtcttcaagtatgtcatctctcacctaaacaaggtcagccacaacaacaaggtgaatctcatgaccagcgagaacctctccatctgcttctggcccaccttgatgagacctgatttcagcactatggacgccctcacagccacgcgcacctaccagacaatcattgaactctttatccagcagtgccccttcttcttctacaatcggcccatcaccgagccccccggcgccaggcccagctccccctctgccgtggcttccaccgtccccttcctcacttccacgcctgtcacaagtcagccgtcgcccccacagtcacctccaccctcaaa

SEQ ID NO: 23377 - DNA, 3097 bp, Homo sapiens
  SIMILAR (2206)..(2949): 871254mologous to Homo sapiens neuronal PAS domain protein 1 (NPAS1),accession number AB054002,Smith-Waterman Score=1148.
gactgagcacggaaggcatctaccgggtcagcgggaacaagtctgagatggagagtctgcagagacagtttgatcaagaccacaacctggacctggcagagaaagactttacggtgaataccgtggctggtgccatgaagagctttttctcagaactgcctgaccccctggtcccgtataacatgcagatcgacttggtggaagcacacagagcccgagcccccgggcccattagcaatcatctgcgctttaacaggcctctcttcaccacccccacagccgccagctgtgaggtcgctgccatctccttcgtgagaccctcctgtggttcttctgagccctggagtccacgaaggaaacatgggggcatctttccctgcacagagaaatctgtcttagccagctgggctccagaaatcaacgaccgggagcagaagttgcatgcccttaaggaggtattaaagaaatttccaaaggaaaaccacgaagtcttcaagtatgtcatctctcacctaaacaaggtcagccacaacaacaaggtgaatctcatgaccagcgagaacctctccatctgcttctggcccaccttgatgagacctgatttcagcactatggacgccctcacagccacgcgcacctaccagacaatcattgaactctttatccagcagtgccccttcttcttctacaatcggcccatcaccgagccccccggcgccaggcccagctccccctctgccgtggcttccaccgtccccttcctcacttccacgcctgtcacaagtcagcccgtcgcccccacagtcgtctccacccaccccccagtccgcaatgcagccactggtttcctcccagcgttaagccgaacacacgctacttgtgtgctttctaaacacgagcctcacaaccaccagcacccacgttgagagctttggggggcagcttcgcggctcccagataggccaccccaggaggcccaacaagatgccttatgcgtggtccattccccaggatccccccctcaagccagagagagaccctgggggcccccttggggtgtctctctcccttccagtcaaccagtatggagagagtgaggagccaatgggagacgacgactatgacgagtactccaaggagctgaaccagtaccgccgctccaaggacagccgaggccgagggctaagtcgaggccgtggcaggggctcccgaggtcgagggaaaggaatgggtcggggccgaggccgaggtggcagccgaggagggatgaacaagggcggaatgaacgatgacgaagacttctatgacgaggacatgggcgacggtggtggtggaagctaccggagtcgtgaccatgacaagccccaccagcagtcggacaagaaaggcaaagtcatttgcaagtacttcgtggaagggcgctgcacctggctgtaccacaccactgggaactgcatcaatggtgacgactgcatgttttcccacgaccctctgaccgaagagacgagggagctcttggataaggtggagatgacgggcagcagcgtcttcgactacattcaccctggggaccactcagaggtgctggagcaactggggctgcggacgccgacgcccggccccccaaccccgccctccgtctcctcttcctcctcctcttcctcttcgcttgcagatacccccgagatcgaggccagcctcaccaaggtgcccccctcctccctggtccaggagcgctccttctttgtccgcatgaaatccacgctcaccaagagggggctgcacgtcaaggcctcagggtacaaggtcatccacgtgactgggcgccttcgggcccacgccctgggccttgtggccctcgggcacacgttgcccccggcccccctggctgagctgccactccatggacacatgatcgtcttccgtctcagcctgggtctcaccatccttgcttgtgagagcagagtcagcgaccacatggacctggggccctcagagctggtgggccgcagctgctaccagtttgtccacggacaggacgccacgaggatccgccagagccacgtggactgtgagacccacctccacccaccaagcctgcctaccaccccccagacccgagcatcccactccctggtccctggaagtccttcttcagggctgcccacagtccctcctgctgcacctacagctccagggactccgtttagcattggaagagcagcaaggagactgagtgatgcctcaggattgctggacaagggtcaggtgatgactggttactaccgttggctgcagcgtgccgggggcttcgtgtggctgcagtctgtggccacagtggctgggagcgggaagagccccggggagcaccatgtgctttgggtcagccacgtgctcagccaagccgagggtggccaaactcctttggatgccttccagcttccagccagcgtggcctgtgaggaggcatccagcccggggccagagcccacagagccggagcctccgacggaagggaagcaggctgccccagcggagaacgaggccccccagacccagggcaaacgcatcaaagtggagcccggcccgagggaaaccaaaggctccgaggacagtggcgacgaggatccctccagccacccggccacaccgaggcccgagttcacctctgtcatccgggcaggggtcctgaagcaggatccggtgcggccatggggcctggcgcctcccggggaccccccgcccaccctcctgcacgcgggcttcctgccgccggtggtgcggggcctgtgcacacccggcaccatccgctacggccccgcggagctgggcctggtgtacccgcacctgcagaggctgggtccgggccaccgcgctcccggaggccttttacccgcccctgggcctgccctacccggggcccgcgggcaccaggctgccgcggaagggggactgaggacttggcagagctgccggcgccggaccctgcgacaaaccggggtcccccaggacagttaggcccgctctgcccgtagccctgagaattaaacgccggctctccctgcaaaaaaaaaaaaaaaaaaaaaaaaaaaaaaaa

SEQ ID NO: 23378 - DNA, 2214 bp, Homo sapiens
  SIMILAR (1489)..(2193): 371254mologous to Bos taurus aralkyl acyl-CoA:amino acid N- acyltransferase,accession number AJ223301,Smith-Waterman Score=415.
atgaagaaggagaaagaaaatcagttttttacagattttccacctgcgttacaaagcacccaaaacctttcagcttctgggaagtggaaggccatgccttccaggcatgcactgaggtctctggggcatgttacacacatctatctccacacacggttgaagcccctccagattctaacacttccagaatcctctccccagaaagctctcctcaatcagccagtgtctgcagagtccttggcaaaggggttgctgggagttatgactaaagatggggacatgagggtggaaagatacccctttcccatgacaatcctaattagcacacaggatgtgggggctttccaaggaagcagagagactctgctcaaacagctgttcactggggagggcctttccgagtcatcttctctacgtcctccccagcacaccggcctctccaggctcctcggttgcactcttgggaaagccgagccagaattccagaaacaatggccccctccccacctgtcactgacggaggcagaaactcttcccgggtcatcgattaagcaaggaccgagcaaagagaggcagttttgctctcccttgggcagcacccccactccccaccccccaaggccccatcctggaggctcccttcctggctctgacctggaaaggcagtgtgtagcagaggcattcgccaatgccgcggcgtccaggttcccacacccaggacccagctgcggggaggcatcccacacaggagacgcagaggcagtgagatcgggggtgaggggacgtgtggcaagccccagcgtgcctgaagcaaaacagggtcaggcttctctgattctgggcctcttcacaatgctggttcctccccaaaactctggcatcttttccatagctcttcccacaggaagagcttatttcttcaaggaggccccctgggcagtcctggccagcctggatcttccgcatcctgctactgaaaacctggagttggtagggtcaggcatgctgaaaggtacaggggaaagtgatgctgaagtaaagctcttcagtcactgccctacaacagaaaaaggacaacccagtcaagtacccccaaacacagattccacctttgccctttccaatgtgggaaaggggctgagacgtttctgtcacaagggtggttttccaaatgctgtagagatttactctgaaatagaaaagattgtgtcagaagcagaatctgaagtggagcttctagtatccccaggagcactgagtaaacacagaaggtacctgcaggatccacttgtgtccattgatctctcagagcagctgaggatcaaaggtgtatggctctctgtttcacatcaatcacgggaaccccttcaacatggaagtgttggtggactcctggcccgagtatcagatggttattatccgacctcaaaaacagtgagaggagaagaaaaagttcaagggaatgatctgacctttcaccatcctacacaggagatgactgatgacatggattcatacactaatgtatatcgtgtattctccaaagaccctcaaaaatcacaagaagttttgaaaaattctgagatcataaactggaaacagaaactccaaatccaaggttttcaagaaagtttaggtgaggggataagagcagctgcattttcaaattcagtgaaggtagagcattcgagagcactcctctttgttacggaagatatcctgaagctctatgccaccaataaaagcaagcttggaagctgggctgagacaggccacccagatgacgaattggagagcgagactccgaactttaagtatgcccagctgaatgtgtcttattctgggctggtaaatgacaactggaagctagggatgaataagaggagcctgcgttacatcaagcgctgcctaggagccctgccagcagcctgtatgctgggcccagagggggtcccggtctcatgggtaaccatggacccttcttgtgaaataggaatgggctacagtgtggaaaaataccgaaggagaggcaatgggacacggctgatcatgcgatgcatgaagtatctgtgtcagaagaatattccattttacggctctgtgctggaagaaaatcaaggcgtcatcagaaagactagtgcactaggtttccttgaggcctcctgtcagtggcaccaatggaactgctacccacagaatcttgttccattgtag

SEQ ID NO: 23379 - DNA, 858 bp, Homo sapiens
  SIMILAR (714)..(379): 231254mologous to Canis familiaris triadin,accession number AF165916,Smith-Waterman Score=96.
tcaccgtggggcctctgatcttcctcttttggtcaaggcagcacaattcagaagaatcttgccagggaagactggtaaatggacgtcaacgtgatgcctatggctcctggtggatttagatacctcctggtgcttattgatatctttaccagttgcacgggggcttttccatgccagactgtttctgcttccagagttgtctctggcctgcagttctgtgcttcctagcttgatccgttcctctccaggaatctcctctccctccccccccgacccaccaagctgactgttgaagtccttgtggtgctcagggaggatgggtgacactcgctgttgcttcagcttcatcttgagcccacacagcatctccactacccaggtctcctcaggctcaggggcgagctccttctccggctcctcctcagattcatctgaccactccttcttccttttccagccaagggacctacatggggggctgggatctaccccaggggctgatgatcccaacacttcatcatccaccacctcctggagggagtaccccgaggtggtccgctggggactctgctcattctgggggtgaggttgacggctggtcgtgatctttcccttaatctgtcccctcttacggaacctagtctccgttctgtccatggccttcttctggacagcgatcctttcacgggatcgcctccggatgggagccggatgggatcccggacggatcgtctcgctgggagccatgcgggaaaccgcaagagtcagaaacaggcgttgaaggcaggcagcattttccaaaacagctgtgtctcgggagctgccgggctgtagcgtctccccgagtcgcgcgcgcat

SEQ ID NO: 23380 - DNA, 3585 bp, Homo sapiens
  SIMILAR (1678)..(3582): 971254mologous to Homo sapiens similar to KIAA0618 and nuclear envelope protein POM 121; alternatively spliced product; similar to PID:g3327050 and P52591 (PID:g1709213),accession number AC006014,Smith-Waterman Score=3126.
atgtctccggcggctgcggcggctggagcaggcgagcggcggcggcccatagcgagtgtcagggacggccggggccggggctgcggcgggccggccagggcggtgctcctgggcctgtcgctggttggcctcttactgtacctcgtgccggctgcggctgcactggcctggctgaccgtgggggctaccgcggcctggtggggactgagccgcgagccccgaggttcgcgccccttgtcctccttcgttcggaaggcgcgtcatcggcgccccttgtcctccttcgttcggaaggcgcgtcatcggcgaacactgttcgcttcgcctctggccaagtcgacagccaacggaaacctcctagagccgcggaccctgctcgaaggacctgaccctgcggaactgctactcatgggcagttacctgggcaagcccgggccgccgcagcccgccgccgctccggagggccaggacctgcgggataggcctggccgccgcccacctgcccgcccggcgccgcgctccccaccgccgcgctccccaccgccgcgctcccccccgccctccccgccgacccatcgcgctcaccacgtttacccctctctgcccactcctcttctccgaccctccaggaggccttccccacgggattgtgggactttaccaaatcggtttgtaataacacctagaagacgctatccgatccatcaggcccagtattcctgtctgggggtacttcccaccgtgtgctggaatggttatcacaagaaggctgtgctgtcccctcgcaactccaggatggtgtgtagcccagtgactgtgaggatcgcccctcctgacagaagattttcgcgttctgcgataccagagcagataatcagctcaacactgtcctcaccatcaagtaacgccccagacccatgtgcaaaggagacagtactgagtgccctcaaagagaaggagaagaaaaggacagtggaggaagaagaccaaatattccttgatggccaggaaaataaaagaaggcgccatgatagcagtggcagtggacattcagcatttgagcccctggtggccaatggagtccccgcttcttttgtgcctaagcctgggtctctgaagagaggcctcaattctcagagctcagatgaccacttgaataagagatcccgaagctcttccatgagctccttgacaggcgcttacgcaagtggcatccctagctccagccgcaatgccattaccagttcctacagctccactcgaggcatctcacagcatgagggatcgggtgcaagcacagaggccatgcagagtggagagcagagagagtcaagtcagcgggcagtcgccttcaggttcttgactcgagctgaccccctagctgcagatacaaccccaaggaagaaacaaaactcgaattctcagtctacacctggcagctctgggcagcgtaagcggaaagttcagctgctgccttctcggcgaggggaacagctgaccttgcctccacctccccagcttggctattcgatcactgccgaggacctagacttagagaagaaggcttcattacagtggttcaaccaggccttggaggacaagagcgcacttcgagggctgctggtgttcccggcccaggccttcacggcactgcgcgcgcacacctctttatcagacgaatctgctggagcagcaaccactgaggccctctcacctccaaagacacccagcctcctacccccgctgggtttatcacagtcagggccgccagggctgctccccagcccctcctttgactccaaacccccgaccactttgctggggctgatccctgctccatccatggtaccagccactgacaccaaggcacctccaacccttcaggcagagacggctaccaaaccccaagccacatctgccccgtcccccgcccccaagcaaagcttcctgtttggaacacagaacacctcaccttccagccctgccgcccctgctgcatcttcagcacctcccatgttcaagcccattttcacggctccacccaagagtgagaaggaaggccccacaccgcctggcccttcagtcacagccacagcgccctccagctcctccctccccacgaccaccagcaccacagccccgaccttccagcctgtctttagcagcatggggccacctgcatctgtgcccttgcctgctcccttcttcaagcagacaactactcccgccactgctcccaccacaactgccccgctcttcactggcctggccagcgccacctctgctgtggctcccatcacctctgccagtccatccacagactctgcttcgaagcctgcgtttggctttggcataaacagtgtgagcagcagcagtgtgagtaccacgaccagcaccgccactgccgcctcacagcctttcctcttcggggcgccccaggcctctgctgccagcttcaccccggccatgggctccatattccagtttggcaaacctcctgccttgcccacaaccaccacagtcaccaccttcagccagtccctgcacactgccgtgccaacggccaccagcagcagcgctgccgactttagtggttttggcagcaccctcgccacctccgccccggccaccagcagccagcccactctgacgttcagtaacacgagcacccccacgttcaacattccctttggctcaagcgccaagtccccgctcccatcatatccgggagccaacccccagcccgcatttggggccgctgaggggcagccaccgggggccgccaagccggcccttgcccccagctttggcagctctttcacttttggaaactctgcagccccggctgctgcacccacacctgcacctccgtccatgatcaaggtcgtgcctgcgtacgtgcctacgcccatccatcctatctttggcggtgccacgcactcggcgtttgggttgaaagccacggcttcggccttcggcgctcccgccagctcacagcccgcctttggcggctccactgctgtcttcttcggtgcagccaccagctccggctttggagccaccacccagaccgccagcagcgggagcagcagctcggtgtttggcagcacaacaccatcacccttcacgtttgggggttcggcagcccccgctggcagtgggagctttgggatcaatgtggccaccccaggctccagcaccaccaccggagctttcagctttggagcaggacagagtgggagcacagccacctccacccccttcgcagggggcttaggtcagaacgccctgggcaccaccggccagagcacaccgtttgccttcaacgtgagcagcacaactgagagcaaacctgtgtttggaggcaccgccacccccacctttggtctgaacacccctgcgcctggagtgggcacatcaggcagcagcctctcctttggggcatcctcagcacccgcccaaggctttgttggtgttgcacctttcggatcggcggccctttcattttccattggtgcgggatccaagaccccaggggctcgacagcgactgcaggcccgaaggcagcacacccgcaaaaagtag

SEQ ID NO: 23381 - DNA, 4257 bp, Homo sapiens
  SIMILAR (2233)..(4254): 951254mologous to Homo sapiens similar to KIAA0618 and nuclear envelope protein POM 121; alternatively spliced product; similar to PID:g3327050 and P52591 (PID:g1709213),accession number AC006014,Smith-Waterman Score=3254.
tttgactttttaaacagctttatgaagatataattcacaaaccatacagttgatagggtggtgcaaccgccaacacaatctaattttaaactatgtttatgctgctacgagaaagcctatacccataagcagtcattttctattccccacccccaaacccactacttagccctaggcaaccacttatctactttctcagaccgataactttagcataggtataaatcgatcacagagcctcaaaatccacccgatatctgggccatgatgtgaaatttggtaggtaatcgtcccacgttatcaacttgtaaagtagaaatggaagtggggaggaaaactcagccgccagtggcgtttgtgaaaagcacctggtaacaggctgtgctggaggggagttcagcccctacaaaagatcacggattatgaattacataagcataggtctcgggcccttttattttggacgcgatcctttcacgggatcgcctccggatgggagccggatgggatcccggacgggatcgtctcgctgggagccatgcaggaaaccgcaagagtcagaaacaggcgttgaaggcaggcagcattttccaaaacagctgtgtctcgggagctgccgggctgtagcgtctccccgagtcgcgcgcgcatgacgtggcgggcgccgatgagcgaccgtggccggtgcacgctgggatatttaagtctcctgcggccggagccgcgatgtctccggcggctgcggcggctggagcaggcgagcggcggcggccgatagcgagtgtcagggacggccggggccggggctgcggcgggccggccggggcggcgcttctcggcctgtcgctggtcggcctcctactgtacctcgtgcctgctgcggctgcgctggcctggctggccgtggggactaccgcggcctggtggggactgagccgcgagccccgaggttcgcgccccttgtcctccttcgttcagaaggcgcgacatcggcgaacactgttcgcttcgcctccggccaagtcgacagccaacggaaacctcctagagccgcggaccctgctcgaaggacctgaccctgccgaactgctcctcatgggcagttacctgggcaagcccgggccgccgcagcccgcccccgctccggagggccaggacctgcggaataggcctggccgccgcccacccgcccgcccggcgccgcgctccacaccgccctccccgccgacccatcgcgttcaccacttttacccctctctccccactcctcttctccgaccctccgggaggccttccccacgggatcgtgggactttaccagatcggtttgtaataacacctcgaagacgctatccgatccatcagacccagtattcctgtccgggggtacttcccacagtgtgctggaatggttatcacaagaaggctgtgctgtcccctcgcaactccaggatggtgtgtagcccagtgactgtgaggatcgcccctcctgacagaagattttcacgttctgcgataccagagcagataatcagctcaacactgtcgtcaccatcaagtaatgccccagacccatgtgcaaaggagactgtactgagtgccctcaaagagaagaagaagaaaaggacagtggaggaagaagaccaaatattccttgatggccaggaaaataaaagaaggcgccatgatagcagtggcagtggacattcagcatttgagcccctggtggccagtggagtccccgcttcttttgtgcctaagcctgggtctctgaagagaggcctcaattctcagagctcagatgaccacttgaataagagatcccgaagctcttccatgagctccttgacaggcgcttacacaagtggcatccctagctccagccgcaatgccattaccagttcctacagctccactcgaggcatctcacagcccagcctcatcccgctcccagacaccggagaggccagcaaagaaaataaggtattcggcattctcctgcagttttcatttgctacgtggacagaagggggtgaggaaagagaagaagagctgtgtcatcattccagttcttcaactccattggcagcagacaaggagtcccagggagaaaaggctgcagatacaaccccaaggaagaaacaaaactcgaattctcagtctacacctggcagctctgggcagcgtaagcggaaagttcagctgctgccttctcggcgaggggaacagctgaccttgcctccacctccccagcttggctattcgatcactgccgaggacctagacttagagaagaaggcttcattacagtggttcaaccaggccttggaggacaagagtgaatctgctggagcagcaaccactgaggccctctcacctccaaagacacccagcctcctacccccgctgggtttatcacagtcagggccgccagggctgctccccagcccctcctttgactccaaacccccgaccactttgctggggctgatccctgctccatccatggtaccagccactgacaccaaggcacctccaacccttcaagcagagacggctaccaaaccccaagccacatctgccccgtcccccgcccccaagcaaagcttcctgtttggaacacagaacacctcaccttccagccctgccgcccctgctgcatcttcagcatctcccatgttcaagcccattttcacggctccacccaagagtgagaaggaaggccccacaccgcctggcccttcagtcacagccacagcgccctccagctcctccctccccacgaccaccagcaccacagccccgaccttccagcctgtctttagcagcatggggccacctgcatctgtgcccttgcctgctcccttcttcaagcagacaactactcccgccactgctcccaccacaactgccccgctcttcactggcctggccagcgccacctctgctgtggctcccatcacctctgccagtccatccacagactctgcttcgaagcctgcgtttggctttggcataaacagtgtgagcagcagcagtgtgagtaccacgaccagcaccgccactgccgcctcacagcctttcctcttcggggcgccccaggcctctgctgccagcttcaccccggccatgggctccatattccagtttggcaaacctcctgccttgcccacaaccaccacagtcaccaccttcagccagtccctgcccactgccgtgccaacggccaccagcagcagcgctgccgactttagtggttttggcagcaccctcgccacctccgccccggccaccagcagccagcccactctgacgttcagtaacacgagcacccccacgttcaacattccctttggctcaagcgccaagtccccgctcccatcatatccgggagccaacccccagcccgcatttggggccgctgaggggcagccaccgggggccgccaagccagcccttacccccagctttggcagctctttcacttttggaaactctgcagccccggccccggctactgcacccacacctgcacctgcgtccacgatcaagatcgtgcctgcgcacgtgcctacgcccatccagcctacctttggcggtgccacgcactcggcgtttggattgaaagccacggcttccgccttcggcgctcccgccagctcacagcccgcctttggcggctccactgctgtcttctccttcggtgcagccaccagctccggctttggagccaccacccagaccgccagcagcgggagcagcagctcggtgtttggcagcacaacaccatcacccttcacgtttgggggttcggcagcccccgctggcagtgggagctttgggatcaacgtggccaccccaggctccagcgccaccaccggagctttcagctttggagcaggacagagtgggagcacagccacctccacccccttcacagggggcttaggtcagaacgccctgggcaccaccggccagagcacaccgtttgccttcaacgtgggcagcacaactgagagcaaacctgtgtttggaggcaccgccacccccacctttggtcagaacacccctgcgcctggagtgggcacatcgggcagcagcctctcctttggggcatcttcagcacccgcccaaggctttgttggtgttggaccgttcggatcggcggccccttcattttccattggtgcgggatccaagaccccaggggctcgacagcgactgcaggcccgaaggcagcacacccgcaaaaagtag

SEQ ID NO: 23382 - DNA, 402 bp, Homo sapiens
  SIMILAR (181)..(246): 541254mologous to Homo sapiens ribosomal protein homologous to yeast S24,accession number X62691,Smith-Waterman Score=60.
aaggtgcacatgaatggcctgcgatatgctctatacattatggggcctgcccttacgagaggctgccaccaggtgcttattatgctatgctgcgaagtaatagaacggatcttgacttgatgatgaaggaagcttactttggcgaagtggatatcatggacgacctccctactgagaaatattagcgctaacgtcacaggcaggctatacaagtgtggggtgatcaaccacacagttgacctgcgccgtatgaaaacggaaaatggcagaataatctgcttccatcccgccagtttggtttcattgtactgacaacctcagctggcatcatggaccatgaagaagcaagacgaaaacacacaggagggaaaatcctgggattctttttctagggatgtaata

SEQ ID NO: 23383 - DNA, 408 bp, Homo sapiens
  SIMILAR (230)..(349): 781254mologous to Homo sapiens ribosomal protein homologous to yeast S24,accession number X62691,Smith-Waterman Score=159.
agtagtctttgggaatgggaagcagtgaaggaagggctgtgtgattgtgtggctgggctctctggatttggctctttgggttgcaggagtcatggctcatacgctacatgaggcaccagctcatgtaggcactgtcagttcctatgtgccccacaggaaagcgcccttaaccactgatgagtgttgatgtttttctgcactagaaggcactatgttgaactattaaacttaccagcactttctttttccactccatagtttcattgtactgacaacctcagctggcatcatggaccatgaagaagcaagacgaaaacacacaggagggaaaatcctgggattctttttctagggatgtaatacatatatttacaaataaaatgcctcatggaaaaaaaaaaaaaaaaa

SEQ ID NO: 23384 - DNA, 576 bp, Homo sapiens
  SIMILAR (21)..(242): 981254mologous to Rattus norvegicus ribosomal protein S15a,accession number X77953,Smith-Waterman Score=366.
catctttccgcgccgccacaatggtgcgcatgaatgtcctggcagatgctctcaagagtatcaacaatgccgaaaagagaggcaaacgccaggtgcttattaggccgtgctccaaagtcatcgtccggtttctcactgtgatgatgaagcatggttacattggcgaatttgaaatcattgatgaccacagagctgggaaaattgttgtgaacctcacaggcaggctaaacaaggttggagtgcagtggcgcgatcttggctactgcaacctctgtctcccaggttcaagcgattcttctgcctcagcctccctagtagctgagattacagtgtggggtgatcagccccagatttgacgtgcaactcaaagacctggaaaaatggcagaataatctgcttccatcccgccagtttggtttcattgtactgacaacctcagctggcatcatggaccatgaagaagcaagacgaaaacacacaggagggaaaatcctgggattctttttctagggatgtaatacatatatttacaaataaaatgcctcatggacaaaaaaaaaaaaaaaaaaaatttca

SEQ ID NO: 23385 - DNA, 877 bp, Homo sapiens
  SIMILAR (354)..(626): 461254mologous to Homo sapiens ribosomal protein homologous to yeast S24,accession number X62691,Smith-Waterman Score=136.
aaaggactcttgagatcttctcagagctctttgagaggaaagattggattattgcacttctttggcacaaagtagtctttgggaatgggaagcagtgaaggaagggtcaaggggaaaatagtttctttcagaattgcaaggtggattgttttgggtattgtctcccaattcttatatgttaggttgtaaaaattagttctgatacagagcaactgtcttccccccaactttttggagaagcagtcactgaggtgatgggagagtgaagaattgagtaggctagagcacagaggtttagctctcaagttgatgtcttttatttaatccagtcagttatcttttgtaggttagcattggccgaatttgaaatcattgatgacccacagagcctgggaaaattgttgtgaaccctcacaggcaggcttaaacaagtctgggggtgatcagccccagattttgacgtgcaactcaaaagaccctggaaaaaatggcatgaaataatcctgcttccaatcccgccaagtttggtttcaattgtactgacaacctcagctgggcttcatgggaccatgaaggaaggcaagaccgaaaacacacaggagggaaaatcctggggattcttttatatagggatgtaatacatatatttacataattaaatgcctcatggactctggtgcttccacttggtcgttttgagcctttacagcagtgtaaccacagcttctgcggcagcatgcagttgcttcgtttatcggtgaatgccaatccctgaagtgagtaatacaccccagggaaaaaaattttatgaaaccccaatgtgcttaaaaaaacaatgcccccctggttgtttcccaaacccgggttttttgacatt

SEQ ID NO: 23386 - DNA, 402 bp, Homo sapiens; identical to SEQ ID NO: 23382
  SIMILAR (181)..(246): 541254mologous to Homo sapiens ribosomal protein homologous to yeast S24,accession number X62691,Smith-Waterman Score=60.

SEQ ID NO: 23387 - DNA, 384 bp, Homo sapiens
  SIMILAR (114)..(368): 891254mologous to Homo sapiens ribosomal protein homologous to yeast S24,accession number X62691,Smith-Waterman Score=388.
gtggactctttttaagcctgtaacactcacccgtgaaggtcccgccagcttcattccctcaaagttagcgagacccacaaaccccatcggcaggaaaaactccctaactcagttacattggcaaatttgaaatcattgatgatcacagagctgggaaaattgttgtgaacctcacaggcgggctaaacaagtgtggagtgatcagcctcagatttgatgtgcaactcaaagatctagaaaaatggcagaataatctgcttccatcctgccagtttggtttcattgcactgacaacctcggctggcatcatggaccataaggaagcaagatgaaaacacacagcagggaaaatcctggaattctttttctagggatgtaatacat

SEQ ID NO: 23388 - DNA, 433 bp, Homo sapiens
  SIMILAR (255)..(374): 781254mologous to Homo sapiens ribosomal protein homologous to yeast S24,accession number X62691,Smith-Waterman Score=159.
aaggagttcccagcctttgttttcagtgcagtttgtttcatggtgtaggcagaagtcagggctgtgtgattgtgtggctgggctctctggatttggctctttgggttgcaggagtcatggctcatacgctacatgaggcaccagctcatgtaggcactgtcagttcctatgtgccccacaggaaagcgcccttaaccactgatgagtgttgatgtttttctgcactagaaggcactatgttgaactattaaacttaccagcactttctttttccactccatagtttcattgtactgacaacctcagctggcatcatggaccatgaagaagcaagacgaaaacacacaggagggaaaatcctgggattctttttctagggatgtaatacatatatttacaaataaaatgcctcatggaaaaaaaaaaaaaaaaa

SEQ ID NO: 23389 - DNA, 586 bp, Homo sapiens
  SIMILAR (337)..(390): 881254mologous to Homo sapiens Similar to ribosomal protein S15a,accession number BC001697,Smith-Waterman Score=82.
cccacgcgtccgctttccgcgccgccacaatggtgcgcatgaatgtcctggcagatgctctcaagagtatcaacaatgccgaaaagagaggcaaacgccaggtgcttattaggccgtgctccaaagtcatcgtccggtttctcactgtgatgatgaagcatggttacattggcgaatttgaaatcattgatgaccacagagctgggaaaattgttgtgaacctcacaggcaggctaaacaaggttggagtgcagtggcgcgatcttggctactgcaacctctgtctcccaggttcaagcgattcttctgcctcagcctccctagtagctgagattacagtgtggggtgatcagccccagatttgacgtgcaactcaaagacctggaaaaattggcagaataatctgcttccatcccgccagtttggtttcattgtactgacaacctcagctggcatcatggaccatgaagaagcaagacgaaaacacacaggagggaaaatcctgggattctttttctagggatgtaatacatatatttacaaataaaatgcctcatggacaaaaaaaaaaaaaaaaaaaatttca

SEQ ID NO: 23390 - DNA, 889 bp, Homo sapiens
  SIMILAR (415)..(633): 451254mologous to Rattus norvegicus ribosomal protein S15a,accession number X77953,Smith-Waterman Score=91.
aaaggactcttgagatcttctcagagctctttgagaggaaagattggattattgcacttctttggcacaaagtagtctttgggaatgggaagcagtgaaggaagggtcaaggggaaaatagtttctttcagaattgcaaggtggattgttttgggtattgtctcccaattcttatatgttaggttgtaaaaattagttctgatacagagcaactgtcttccccccaactttttggagaagcagtcactgaggtgatgggagagtgaagaattgagtaggctagagcacagaggtttagctctcaagttgatgtcttttatttaatccagtcagttatcttttgtaggttagcattggcggaattttgaaatccattgatgacccaccagagcttgggaaaatttgttgtgaaccctcacagggcaggcttaaacaagtgtgggggtgatcagcccccagattttgacggtgcaactccaaagaccctggaaaaaatgggcaggattaatcttgcttcccatcccggcaggttttgggtttcaattgtactgacaacctcagctggcattcatggaccatgaagaagcaagaccgaaaacccccaggaggggaaaatcctggggattctttttcttaggggatgttaattacatattattttacaaattaaaatgcctcatggactctggtgcttccacttggtcgttttgagcctttacagcagtgtaaccacagcttctgcggcagcatgcagttgcttcgtttatcggtgaatgccaatccctgaagtgagtaatacaccccagggaaaaaaattttatgaaaccccaatgtgcttaaaaaaacaatgcccccctggttgtttcccaaacccgggttttttgacatt

SEQ ID NO: 23391 - DNA, 567 bp, Homo sapiens
  SIMILAR (250)..(564): 811254mologous to Homo sapiens MLN 70, S100 C,accession number X80201,Smith-Waterman Score=428.
atgggcatccccatcccaatcatccctcaccacccccaggctcgggtcgcgtccccccaggctttgatggacaagtggccatggaaagcatcctcagctgccccagggttctgccatcacccatccactaaatggtccagggaccctgggagatttcagatttccgaggttagcctggaaggaaatagcttatactgtacagctgaagcatggcaaaggaagcaatctccatcaacaggagtctgtgggctggccctgcaaaaatctccagccctgcagagactgagcatcgagtccctgatttctcttttccagaagtatgtgggaaagggtggttataactgcactctctccaagacggagttcctaagcttcatgaatgcagaactggctgccttcacaaagaaccagaaggaccccggggtccttcaccgcatgatgaagaaactgggcaccaacaatgacgggcagctagatttctcagaatttcttaatctgattggcggcctagctatggcttgccatgactccttcctcaaggctgtcccttcccagaagcggacctga

SEQ ID NO: 23392 - DNA, 407 bp, Homo sapiens
  SIMILAR (4)..(354): 421254mologous to Homo sapiens FLJ00092 protein,accession number AK024490,Smith-Waterman Score=221.
tttcgtgagaagcagagccaggagctgagccagtatggagcgatgggggccggacagtcttttaacagccagtttctgcagcatggaggtccccgggggcctagtgtccccgctggcatgaaccctactggcataggaggggtaatgggcccctctggcctctcccccttggctatgaaccccacccgggcagcaggaatgacacccttgtatgcagggcagcgtctgccccaacatgggtatcctgggcctccccaggcccagccactgccccgacagggggtcaagagaacctactctgaggtgtatccagggcagcagtatctgcaaggagcctacccggtccattccgggctatcccagtttcccacttggcaggaaaccccacgccacccatgaacccccac

SEQ ID NO: 23393 - DNA, 544 bp, Homo sapiens
  SIMILAR (150)..(452): 371254mologous to Helicoverpa armigera nuclear polyhedrosis virus basic DNA-binding protein BDBP,accession number AF197913,Smith-Waterman Score=94.
cctctagtccagcgtggtggaattcgtcacttcccagagattgcagaggtgtgtcctgcctaccatctgcctgtccagcttgggggtccgggtcaccatttcctccagtcctgggccccatccttgagggccttcccagccagccagcaggagaggcaagaactgggggaacacaggaacctaggggaggaggggagcgctgggcatcctcaggctggcggccaaggcctgcccctggaggcactagaggagggcatctgtctgtgggagcccagaggctgcagggaggaggaggagggaggtatctggtgtgagcgttgcccctgcgacatttgggaccacacaggtgggcttccttattccctgacaaagcctctgtttccagctcttccgccctctctggatgagggaacagaagtggaggaaacaaaagaagcagcagcacgcacagtcctgtcgctgggtgcggagacagcctggcaaagtcccactcagccatggcctgatgcaggccccaggccctcctttcttgggtgtcaaatga

SEQ ID NO: 23394 - DNA, 801 bp, Homo sapiens
  SIMILAR (1)..(609): 721254mologous to Homo sapiens HRIHFB2007,accession number AB015330,Smith-Waterman Score=736.
gactatgaggagatcaccatcgaccccacgtgcagctggaagccagtgcccgtgaagcctgacatgcacatcaaggaggagccggatgggccagcactgaagcgctgccgcaccgtgagccccgcccacgtgctcatgcccagcgtgatggagatgatcgccgccctgggccccggcgctgccccctttgcccccctgcagcccccctcagtccctgcccccagcgactaccctggccagggttccagcttcctggggcctggaactttccctgagtccttcccacccaccacgcccagcaccccaacccttgctgagttcaccccgggaccaccccccatctgctaccagtctgacattcccagcagcctcctgacttcagagaagtctaccgcctgcctctccaagccagaaggcaccagcaggtcacctggaccccactcacaatcctgggacaccaggactacacacctccaaccttggggcccctccaggtccccagctgcaccattcaaaccctcccccagcgtcccggcagtccttgggccaagcgagcttaggacctacgggtgaactggccttcagtcctgccacaggcgtgatggggccccccagcatgtctggagccggggaggccccagaaccagctctggacctgctcccggaactgaccaaccctgatgagctactgtcctacttgggcccacccgacctccctacgaacaacaatgacgacctgctttctctgtttgagaacaactgatcctgtggttaccccaagcccggcggggacacgctcac

SEQ ID NO: 23395 - DNA, 3268 bp, Homo sapiens
  SIMILAR (2112)..(2678): 981254mologous to Homo sapiens HRIHFB2007,accession number AB015330,Smith-Waterman Score=1026.
atggagcggcgcgggccgggggccgccacggcgaggggccgggccaggccgggcggagggccttctgtggggttactggctactggctcctctctaaaccccagtttccacggggtagctaggattgtccctggctttataaggatagccaggcctcgtgatggttcattcgcatatgagtctgtgccttggcaacaaagcgccactcagccggctggatcgctgtctgtggtcactactgtgtggggagttggcaacgcgacacagagccaggttttggggaaccccatgggccctgcagggagtccctctggcagctccatgatgcctggtgtggcagggggcagctccgccttgacctccccacagtgcctgggacagcaggcgtttgctgaaggcggcgccaacaagggctacgtgcagcaaggcgtgtacagccgcgggggctaccctggggcccccggcttcaccaccgggtatgcaggcggcccggggggcctgggcctcccctcacatgctgcaagaccctccactgacttcacgcaagcggcagctgctgcagctgtggctgctgcggcagccactgccaccgccacagccacagccaccgtggctgctctccaggagaagcagagccaggagctgagccagtatggagcgatgggggccggacagtcttttaacagccagtttctgcagcatggaggtccccgggggcctagtgtccccgctggcatgaaccctactggcataggaggggtaatgggcccctctggcctctcccccttggctatgaaccccacccgggcagcaggaatgacacccttgtatgcagggcagcgtctgccccaacatgggtatcctgggcctccccaggcccagccactgccccgacagggggtcaagagaacctactctgaggtgtatccagggcagcagtatctgcaaggaggccagtatgcacccagcaccgcccagtttgcgcccagccctgggcagccccctgccccctccccttcctaccctgggcacaggctgcccctgcagcagggcatgacccagtccctgtccgtgcctggccccacgggactgcattataagcccacagagcagttcaacgggcagggcgccagcttcaacgggggcagcgtcacgtacagccaacctggcctgagtgggcctacccgttccatcccgggctatcccagttccccactgccagggaaccccacgccacccatgaccccaagcagcagcgtcccttacatgtcaccaaaccaagaggtcaagataacccaacttgcctgatctcaagcccaacctcaactccttgcactcatcgccctctggaagcgggccttgtgacgagttgcggctgaccttccctgtgcgcgatggggtggtcctggagcccttccgcctgcagcacaacctgggctgtaagcaaccatgtcttccagctgcgagactcagtctacaagaccctgataatgaggcctgacctggagctgcaattcaagtgctaccaccacgaggaccggcagatgaacaccaactggccagcctcggtgcaggtcagcgtcaatgccacgccgctcaccatcgagcgtggcgacaacaagacctcgcacaagccactctacctgaagcatgtgtgccagccaggccgcaacaccatccagatcaccgtcaccgcctgctgctgctcccacctcttcgtgctgcagctagtgcaccgcccatccgtccgctcggtgctgcagggcctcctcaaaaagcgcctcctgcctgctgagcactgcatcaccaagataaagcggaacttcagcagcggcaccatccctggcacccctgggcccaacggagaggacggggtggagcagacagctatcaaggtgtccctgaagtgccccatcaccttccgcaggatccagctccctgcccgaggtcatgactgtcgccacatacagtgctttgacctggagtcgtacctgcagctcaactgtgagcgggggacttggaggtgtcctgtgtgcaacaagacagctttgctggagggcctggaggtggaccagtacatgctgggcatcctgatttacattcagaactctgactatgaggagatcaccatcgaccccacgtgcagctggaagccagtgcccgtgaagcctgacatgcacatcaaggaggagccggatgggccagcactgaagcgctgccgcaccgtgagccccgcccacgtgctcatgcccagcgtgatggagatgatcgccgccctgggccccggcgctgccccctttgcccccctgcagcccccctcagtccctgcccccagcgactaccctggccagggttccagcttcctggggcctggaactttccctgagtccttcccacccaccacgcccagcaccccaacccttgctgagttcaccccgggaccaccccccatctcctaccagtctgacattcccagcagcctcctgacttcagagaagtctaccgcctgcctcccaagccagatggcaccagcaggtcacctggaccccactcacaatcctgggacaccaggactacacacctccaaccttggggcccctccaggtccccagctgcaccattcaaaccctcccccagcgtcccggcagtccttgggccaagcgagcttaggacctacggctcttccgccctctctggatgaggggaacagaagtggagggaaccaaaggaagcagcagcaacgcacagtcctgtcgctgggtgcggagacagcctggcaaagtcccgactcgagccatggcctggatgcaggccccaggccctacctttttttggggtgtcaaatgactgtgtcctggacatctgatgcaccaccgtgcccgtgcctgttgcaaacgtgatgctcccgggtgcagtggagaaactaggagactgggacaagcaaaaggcttggaaatcaacccagaagcccatcctcagaagactggagaaatgattgaggaatgcatgggcaccgtggccctgtgctccatcacaaacacctctcagaaacaacgtgggatgaaaaagcaagacagttcatacagtatgatgccatttttataaagctcaaaaccaaatatgtgtggaattcatacccaggtgctaaagtcatcagggagggcagggagtcagtacaacacagtgctcaccgtggggaggggacggagctgtgcttagggaagagcagagatgctggaggttttgaacctcagggtcagtggtggct

SEQ ID NO: 23396 - DNA, 580 bp, Homo sapiens
  SIMILAR (477)..(64): 351254mologous to Canis familiaris type I procollagen pro- alpha 2 chain,accession number AF035120,Smith-Waterman Score=135.
tcagagcagctccagaaggagtgtggattccgagaagctgtagggccaggagctgtagagaggaccccggtacatctgaaagccgggaaatggtgcgtgtgctggccgggagtggtgcgatgggggaggggctgcctggaactggcgggacccgggcctccctgtgggcgactccggggtctgggaccgagtcctcctagagctgctcggccctcggtccccgcggccgctggatgtgggtgggccggcagccgggactccgggcgtcctgtcccgtccctgcccgtcgactgcggccttggccccgaagcccttttgtgcagctccgcgcccgcagcccgacgccccagcttgtgcgggggccacgggagggtcatgcgcggatttcgactcgggtgtggatttcgtccgtaggaggagcagcggtctgtggggcccacagcctccactttctcctttgccttgcgtggccttaggtcttgtttgtaatttggtatcttgttgccacaaggagtctgtttttccagtcagagaatgtctgtttttacatgaatgtgcgtcagttgctgcatgtaaactc

SEQ ID NO: 23397 - DNA, 508 bp, Homo sapiens
  SIMILAR (4)..(147): 351254mologous to Homo sapiens Human secreted protein clone yb219_1 protein sequence SEQ ID NO:110,accession number Y73444,Smith-Waterman Score=71.
cggccgctggatgtgggtgggccggcagccgggactccgggcgtcctgtcccgtccctgcccgtcgactgcggccttggccccgaagcccttttgtgcagctccgcgcccgcagcccgacgccccagcttgtgcgggggccacgggagggtcatgcgcggatttcgactcgggtgtggatttcgtccgtaggaggagcagcggtctgtggggcccacagcctccactttctcctgttaaaaattatactgaggtacgttaacaaaaagttcatttgaggaaacagccattcacgaatgagaaacacccggtcctggcttgtggtttgtcaacggaaaaaaaacagactatgtaaaatacagaagtgtattcagagccgagtaggagagaccttggccgagggaaacacaaccccaagcagcctggagtaagtggtccggaggcggctcaggacagtttggttttattcatttcagagagacaggaattgcagggaaaatgatggatca

SEQ ID NO: 23398 - DNA, 2097 bp, Homo sapiens
  SIMILAR (1232)..(1888): 451254mologous to Homo sapiens gonadotropin inducible transcription repressor-2,accession number AB021642,Smith-Waterman Score=462.
cggccgctggatgtgggtgggccggcagccgggactccgggcgtcctgtcccgtccctgcccgtcgactgcggccttggccccgaagcccttttgtgcagctccgcgcccgcagcccgacgccccagcttgtgcgggggccacgggagggtcatgcgcggatttcgactcgggtgtggatttcgtccgtaggaggagcagcggtctgtggggcccacagcctccactttttcctgttaaaaattatactgagatgtttcaggacccagtggcttttaaggatgtggctgtgaacttcacccaggaggagtgggctttgctggatatttcccagaagaatctctacagggaagtgatgctggatactttctggaacctgacctctataggaaaaaagtggaaagaccagaacattgaatatgagtaccaaaaccccaggagaaacttcaggagtgtcacagaagagaaagtcaatgagattaaagaagacagtcattgtggagagacttttaccccagttccagatgacaggctgaacttccagaagaagaaagcttctcctgaagtaaaatcatgtgacagctttgtgtgtggagaagttggcctaggtaactcatcttttaatatgaacatcagaggtgacattggacacaaggcatatgagtatcaggaatatggaccaaagccatgtaagtgtcaacaacctaaaaaagccttcagataccgcccctcctttagaacacaagaaagggatcacactggagagaaaccctatgctttgttaaagaatgatgggaaaaaaccattattttaccattcaagcattcaaagacacatggtagtgcacagtggggatggaccttataaatgtaagttttgtgggaaagcattccattgtctcagtttatatcttatccatgaaagaactcacactggagagaaaccgtatgaatgtaaacaatgtggtaaatcttttagttattctgctacccatcgaatacatgaaagaactcacattggagaaaagccttatgaatgtcaggaatgtgggaaagcattccatagtcccagatcctgtcacagacatgaaaggagtcacatgggagagaaggcttatcaatgtaaggaatgtggaaaagcattcatgtgtccccgttatgttcgtagacatgaaaggacccactctaggaaaaaactttatgaatgtaagcagtgtgggaaagcattatcctctcttacaagttttcaaacacacataaggaatgcactctggagaaagaccttatgaatgtaagacatgtgggaaaggcttttattctgccaagtcatttcaaagacatgaaaaaactcacagtggagagaaaccgtataaatgcaagcaatgtggtaaagccttcactcgttccggttcctttcgatatcatgaaaggactcacactggagagaaaccctatgagtgtaagcaatgtgggaaagcgcatgaaaggactcacacaggagaaaaaccctatgaatgtaaactatatgggaaagcattatctcgccttataagctttcgaagacacatgagaatgcacactggagagaggcctcataaatgtaagatatgtgggaaagccttttacttctcccagttcatttcaaaggcatgaaagaagtcacactggagagaaaccctacaaatgcaagcaatgtgggaaagccttcacttgtttccacttcgtttcaatatcatgaaaggactcacactggagagaaacccgatgggtgtaagcaatgtgggaaagccttcagatctgccaagtacattcgaatacatggaaggactcacactggtgagaaaccctatgaatgtaagcaatgtgggaaagcatttcattgtgtcagctcctttcatagacatgaaaggactcacgctggagaaaaaccttatgaatgtaagcattgtgggaaagccttcacttgttccatatatattagaatacatgaaagaattcacactggagagaaaccttaccaatgtaaggaatgtgggaaagccttcattcgttccagttactgtcgaaaacatgaaagaactcacactattaatatatga

SEQ ID NO: 23399 - DNA, 1656 bp, Homo sapiens
  SIMILAR (1283)..(1489): 1001254mologous to Homo sapiens FLJ20689,accession number AC016526,Smith-Waterman Score=349.
agtcggcccaaaaagcggcggccgttggaggtggctgcggcagctgatgtggcctcatggatgagctggtacacgacttaacctcagccttggagcagacatctgagcagaataagcttggtgaactgtgggaggagatggcgctgagcccccgacagcagaggcggcagcttcggaaacgccgaggtcggaagcgtcgttctgacttcactcacctggcagagcatacctgctgctacagcgaggcctctgagtcaagtctggatgaggccactaaggactgtcgagaagtggctccggtgaccaattttagtgactctgatgacacaatggtagccaaacgacacccagctctcaatgccattgtcaagagtaagcaacattcttggcatgaatctgactcctttactgaaaatgcaccttgtcgaccactcaggcgcaggcgggaaggtgaagcgagtgacatcagaggtggctgctagccttcagcagaagctgaaggtgtcagattggagctatgagagaggctgcaggttcaagtctgctaagaagcagcgtctgtcccgctggaaggagaatactccctggacctcatcaggccacggattgtgtgaatcagcagaaaataggactttcctaagcaaaacaggaaggaaagaaaggatggagtgtgaaacagatgaacaaaaacagggctctgatgagaacatgtcagaatgtgaaaccagcagtgtgtgtagcagcagtgacactgggctctttaccaatgatgaagggcgacaaggtgatgacgaacagagtgattggttctatgaaggagaatgtgtcccaggattcactgtccctaatcttctgcccaagtgggctcctgatcattgttctgaagtagaaagaatggattctggattggataaattttcagattccacattccttttaccttctcggccagctcaaagagggtaccatactcgcttgaatcgtctacctggagctgcagctcgatgcctcagaaaggggcgaagaaggctggttgggaaggagaccagcataaacactttggggactgagaggataagccatatcattagtgaccctcggcagaaagatttctggttaccatcagctgggaaaagagaacgaaatcagttcaatcccctgtctcccctttactccctggatgttcttgccgatgcttctcaccgaaggtgttcaccagcacactgctctgccagacaggcaaatgtacactggggaccaccatgttcacgtgacatcaagcaggaagcggaaaccagtggccacagcatctttgtctagccccagtgcagttcacatggatgcagtggagccaaccacaccagcatcacaagcccccaaatcacccagctctgagtggttggtgaggacctctgcagcagagaaagccacagacgcaactactgctacattttttaaaatgccacaagaaaagagccctggatacagctagagagcaggacttcaccctccaggagctgactgggtgttgctgaagcaaatgttggactttgtgttagatagtcttgcatatcttaatcgacattcccagtcctttcaccaccagaaccaactcctctttcaaacacagcagtggattctttctctcagaaaaaa

SEQ ID NO: 23400 - DNA, 403 bp, Homo sapiens
  SIMILAR (237)..(371): 971254mologous to Homo sapiens Human secreted protein, SEQ ID NO: 5401,accession number G01320,Smith-Waterman Score=227.
cgaaggggacgccgggaacagggccagctgaggggcccacggacatagggcacccacaataggcgtgtgtctgctgtgtgtttgtgttcggccgtcctgcttctctgcttccacacgtacacatgcccctgtgttactttggttcatcttctgtactctgtcagttttctgctggtcagaacatctgtgactgtgacagagctgtccaggattgcagtggataggaatttcttcacatggctcctggagaagtgaccatcacagttcgcctcatccgttcctttgaacatcgcaatttcaaacctgtagtgtatcacggagtgaatttggaccaaactgtaaaggaatttatcgtatttctaaagcaagatgcactaaagattattcatcaagcacataaatc

SEQ ID NO: 23401 - DNA, 679 bp, Homo sapiens
  SIMILAR (56)..(88): 721254mologous to Homo sapiens Human secreted protein, SEQ ID NO: 5401,accession number G01320,Smith-Waterman Score=42.
cgggaacaggaatttcttcacatggctcctggagaagtgaccatcacagttcgccctcatccgttccttggaacatcgccaatttcaaacctgtagtgtatcacggagtgaatttggaccaaactgtaaaggaatttatcgtatttctaaagcaagatatccctttaaggaccaacctgccaccaccattcagaaattataaatatgatgcactaaagattattcatcaagcacataaatcaaagacaaatgaacttgtgttgagtttggaagatgacgaaagactcctgctgaaagaagacagcactctgaaagcagctggaatcgccagtgaaactgaaattggcatctttctgtgaagaagattataggaactacaaagctaatcccatttcatcctggtgaaaacatctcgagggcttcctttttgcatacctgtattaagctctttattccactgctgagtttttgaaattgacaaacaaatcttaaaaaattaatcccaggctatactctttgagctaaaatctgtttatttctttctcttcaggtctttctttccttctctctttctttttctttgttgttgtaaaataatatattatgagaaaaacatttgatctttttaaagggaaataaattgttattaaaaattattgtggaaaaaaaaaaaaaaaaa

SEQ ID NO: 23402 - DNA, 241 bp, Homo sapiens
  SIMILAR (2)..(154): 961254mologous to Homo sapiens 214K23.1,accession number Z74739,Smith-Waterman Score=239.
gcaaatgttgaatgataagaaacaagctcatatccagttggaaattatgaaggccatggaatctgctgaacaaaaggaacaaggtttatcaagggatgtcacaaccgtgtggaagttgcgtattgtaagctattcaaaaaaagaaaaagattcagaattaccagccacggggagcgccttcacttcatccaaatttttagatccagactttcagccatcttgtgttgaggtggacctataa

SEQ ID NO: 23403 - DNA, 336 bp, Homo sapiens
  SIMILAR (243)..(142): 1001254mologous to Homo sapiens transcription factor 12,accession number AF271617,Smith-Waterman Score=188.
ttatatgttgacagcaacaggaaatgttactgctttcctattagttttagctgtttctgaacattcatcatgcacagcaccactctcaactgttacctgttgcgatgattggttatcaacagttccaaatgcttcaaataccatcagatttgagttcatgaaaggtgttggggacaagccttcatgggctcctaatcgactgtcattcaagtgatcactgtaatgagggctgtctgtaaaaccccctgtaatcccatcactttgagagactgaggtgggaggctgacttgaggccaggagttcaagaccagcctgggcaacataagagacccccat

SEQ ID NO: 23404 - DNA, 1344 bp, Homo sapiens
  SIMILAR (1)..(462): 1001254mologous to Homo sapiens 214K23.1,accession number Z74739,Smith-Waterman Score=772.
atggagaagacatcatctggattatacatatttcgcaatgaaagagaggaagaaaaggaagcagcaaaatatgtggaggcccaacaaaagagactagaagccttattcactaaaattcaggaggaatttgaagaacatgaagaaaacacaacaaaaccatatttaccatcacgtgcactaacaagacagcaagttcgtgctttgcaagatggtgcagagctttatgaagcagtgaagaatgcagcagacccagcttaccttgagggttatttcagtgaagagcagttaagagccttgaataatcacaggcaaatgttgaatgataagaaacaagctcagatccagttggaaattaggaaggccatggaatctgctgaacaaaaggaacaaggtttatcaagggatgtcacaaccgtgtggaagttgcgtattgtaagctattcaaaaaaagaaaaagattcagacccctctgaggagccgattaaatctatggacttctccccaaaaaaatggcacaaaataacccccaaaattttacatacaatttcagaatatggaccttggactacgatctcagaactaaaatgtcttcagttatcacttaaagctcccgaaagcaaaagcatttactttgaaaaaaattgtgagttaccagtggaaaatagaggacatgatcatttaggaagaaaacaaggaacttgggagcaacagagtattggaaggattgcctgtgaggatactgaaatttccaggaaacatgaccatcgtgatgacagaatgacagtgtatatatttatgggggagcctgtgcttgttatggggactgacacagatcagctcttggccccaaggcaaggtgtgtgggagaagaaaaaactggcagaaacccagacttacctggacaaggtagagaacatttgcaagaagttttcaagtcctttctgtcacagaatggaatgtccagagatggactgtgaggaagaacgggccttgctggaatgtggagggaagaattatgaacaggccaaggcctgctttgaaaaggatctggcagtggctgctgaaaaccctgaactcaacactgggtatgaaatcaccgcctgtcgcctggatggctttaaattagcaacgggggatcacaagtcattttctttgcctaccctaaggcaggctgtcaggctaaatgtagatgatagatatagtaaggttcttcttgccctgaagctttgggatgaaggacaggaagctgaaggagaaaagtactttgaaggagctctggccagtacgtccatgcagacctttgtctttggatatgtctttggatatgtcttctcttcttactga

SEQ ID NO: 23405 - DNA, 1680 bp, Homo sapiens
  SIMILAR (715)..(1518): 981254mologous to Homo sapiens BRCA2 cancer susceptibility gene protein encoded by exon 11,accession number W25049,Smith- Waterman Score=1353.
atgacaccaccgcaacactgtgaaagtccattgtcgccctcccatgaaggcaaactgttcctggctgtctggaaaagaagtcccagttccattgtcaagcggtccatcaagtctgtgacagacagcacagctgccaagctgtgcaaaacatccacccccagaatgcattcaggcactggggagagatacacaatgcataagcagagagccaagcggctgatggcaaggtgcaaagatacaggtgcttcagttccatctccacactcacaggggacctgtccactgccacccatgtctccactggagcccatccatgcagcacagctgccaccagttaccacagcccatgatgcagccacattgccgacctgggagtcttgtgggctgaagacccattcatctcattctgccgaggactacaccaaatgtcaggttcagggtcaggttccagcccatgctgaggtccaaaaggaaggggtgaatgggtcacgaatggctgaaaagaacactcgggggaccgtagcagttgaatatggttttattcagcagctctttcatcagcagctcactcacactagctcctcatcagcagctctctcacagcagctctcttacactgtctacctttatctcagctatctgctccagctttgcagctcctgccactcccacacacagctgcattccctgggctacaaggttggctctcccttacaggtattgttaaaaagtaacgaacattcagaccagctcacaaaagaagaaaatactgctatacgtactccagaacatttaatatcccaaaaaggcttttcatataatgtggtaaattcatctgctttctctggatttagtacagcaagtggaaagcaagtttccattttagaaagttccttacacaaagttaagggagtgttagaggaatttgatttaatcagaactgagcatagtcttcactattcacctacgtctagacaaaatgtatcaaaaatacttcctcgtgttgataagagaaacccagagcactgtgtaaactcagaaatggaaaaaacctgcagtaaagaatttaaattatcaaataacttaaatgttgaaggtggttcttcagaaaataatcactctattaaagtttctccatatctctctcaatttcaacaagacaaacaacagttggtattaggaaccaaagtctcacttgttgagaacattcatgttttgggaaaagaacaggcttcacctaaaaacgtaaaaatggaaattggtaaaactgaaactttttctgatgttcctgtgaaaacaaatatagaagtttgttctacttactccaaagattcagaaaactactttgaaacagaagcagtagaaattgctaaagcttttatggaagatgatgaactgacagattctaaactgccaagtcatgccacacattctctttttacatgtcccgaaaatgaggaaatggttttgtcaaattcaagaattggaaaaagaagaggagagccccttatcttagtggccatcagtattgtagacaaacacatacctgtttatgagaacacgcagagggaacttggcctcctactgctgctttcagagagattcgaggcagagtggatgtttttgcaagatacagactgcctggctgtggaaagacgcgttgcctttgtttcttcttaa

SEQ ID NO: 23406 - DNA, 1509 bp, Homo sapiens
  SIMILAR (751)..(1272): 971254mologous to unidentified cloning vector 29kD protein essential for the replication of mini F plasmid,accession number AB015619,Smith-Waterman Score=879.
atggagcccagtgatgaggctgctgatatagttcacacagaaggagagagtttgatctgggacagaagcgctaggtatggagaggaggaaggaaatatttctgctaacagtactcggcgtgctcgctggtataccaaacttgtattctttcgtgaccatagaccttttcctgtgcccttatcatcgcttttcagtgatggagaaaatgttggttgtgttgatgtaattattcaaagagcataccctatacagctgctgaatatgtacagggaactgagtgacataaagacacacatgaagaaagccagtgcagtcattgcagctgaccctctctattcagacggcgcgtggtcagagcccactttcacgtccagtgaagcagccatacagtccatgctggagtgcatgaagaacaacgaactcggcaaagctttgcggcagatcagagagtgcagaacaccagaagaattgcataacttttcattaaattctgaatcacattctgacataagaaagaacaaaatgcacattctaagttatgaggacacacacatagttacacacaaaatactgaaagagagtgtcccagttggtactggaaatcaaatagtgaccttacaggcacaacccgaacgtgatgaaaagatcaaagaacctactctattgggttttcatacagctagcgggaaaaaagttaaaatctcaaagtgtgacaatctaaaaacttgtcacacttcacatgtatctgtcatggcggaaacagcggttatctatcacaagaaatgtaaaaatagcccgcgtatcgtacagtcaaacgacctcactgaggcggcatatagtctctcccgggatcaaaaacgtatgctgtatctgttcgttgaccagatcagaaaatctgatggcaccctacaggaacatgacggtatctgcgagatccatgttgctaaatatgctgaaatattcggattgacctctgcgaaagccagtaaggatatacggcaggcattgaagagtttcgcggggaagaaagtggttttttatcgccctgaagaggatgccggcgatgaaaaaggctatgaatcttttccttggtttatcaaacgtgcgcacagtccatccagagggctttacagtgtacatatcaacccatatctcattcccttctttatcgggttacagaaccggtttacgcagtttcggcttagtgaaacaaaagaaatcaccaatccgtatgccatgcgtttatacgaatccctgtgtcagtatcgaaggacagtgtgaaaatgatccaaaaagcacaaaagtttcagatataaaagaagaggtcttggctgcagcatgtcacccagtacaacattcaaaagtggaatacagtgatactgactttcaatcccagaaaagtcttttatatgatcatgaaaatgccagcactcttatattaactcctactttcaaggatgttctgtcaaacctagtcatgatttctataggcaaagaatcatacaaaat

SEQ ID NO: 23407 - DNA, 7120 bp, Homo sapiens
  SIMILAR (1885)..(6180): 871254mologous to Homo sapiens Human BRCA2 (omi4) protein,accession number Y04357,Smith-Waterman Score=6199.
atggaggaaaactcattagaattcttaagtgatcttacaccgggagatcaggacccatctcagagtgaagaggaagacattgaaaagaccagaagagaatcagaatatcccttcattgatggtctacaaaatgaagtcggagattttgtgactggatataaagaaaaaagatggaaaaataaagatcctaaagacagtttccaaaacgttatgtctatagttgaattagacaacacaccaaagaattacctctctaaggaaggtgataacttgtttgtaagtttgttactgaggccaaatgaaatctccgttacttgtccaatactgactcaaaacctttcctgtgtaacaactgatgactgctctggcatgaaggtagaaaagcatattagaaataggcataccatagcattagacacccaggacctttctgcggaaacttcatgcttatttatgaagaagagagaaatagtagataaaaatctctcacatgaacccattctgtgccatcaacatggaatcagaatgtcagataaagttttaagagaggaacaagtgtatacaactaaaatcaatcactgggcttttttcacaaccaatttatctgatgaagatttacagctgggctctgacagacagccctattttggtagctggcctgcaggacctcataagtttatatgtgaacagagaccaaagaaagatagagcatgtaagttggctggtcctgacagcagggggcaatggattcaaatgatcttcacttcggtggcagcatcagaaccaggaaacaatccagaaatattgacagacaaactactgataggaaatgaagatttttcacctccacctgaaactatggattcattcatagaaacaaacctcttcagaagctgcttacctcaaccggatataccaaagaatgccttagaatcaacaaaaaataagaaaaggaggaagaaaaggattttcaatttggtaccaaattttgacttattaggacagagtcgtatcggtgtaaaagaaagggagaaatgtgacctgttaacaaaaaaccatggactaaaaattactttgggagaagaaaaagatagaatttcagaaaggaacagtgaagaggagaataaacaaaaacttatgacctttgatcatcatccattgtggttttaccttgatattatcaaagctacccctttaaatattgatggacagcgttattctcattgcctgtcatttaacagactaaggtgctctgcatctttatacaaaaattatattccttcttttgtgctacataatttatctagtatttggaagccatcttttacaaacaagaaactgtttttgactttcgaatctcagacaagagtaggtaataaactaaatgatgcagggtttatttctccagaaattttacatagtcatcctgatacttcgtgctctttgggagtcacttctgattttcactttttaaatgaaaggtttgatagaaagctgaaaagatgggaagaacctaaggaattaccagctgaggacagccaagacttaacaagcactgactaccgttcccttgagctaccattatcacaagggtttgcctttcaattagtaaagctttttggatctccaggcgttccaatggatttaggaccaataagtcttaattggtttgaagaactttcttcagaagctccaccctataattctgaacctgcagaagaatctgaacataaaaacaacaattacgaaccaaacctatttaaaactccacaaaggaaaccatcttataatcagctggcttcaactccaataatattcaaagagcaagggctgactctgccgctgtaccaatctcctgtaaaagaattagataaattcaaattagacttaggtttattgcattcttctgtgaaaagaagctgttcacagaatgattctgaagaaccaactttgtccttaactagctcttttgggacaattctgaggaaatgttctagaaatgaaacatgttctaataatacagtaatctctcaggatcttgattataaagaagcaaaatgtaataaggaaaaactacagttatttattaccccagaagctgattctctgtcatgcctgcaggaaggacagtgtgaaaatgatccaaaaagcaaaaaagtttcagatataaaagaagaggtcttggctgcagcatgtcacccagtacaacattcaaaagtggaatacagtgatactgactttcaatcccagaaaagtcttttatatgatcatgaaaatgccagcactcttattttaactcctacttccaaggatgttctgtcaaacctagtcatgatttctagaggcaaagaatcatacaaaatgtcagacaagctcaaaggtaacaattatgaatctgatgttgaattaaccaaaaatattcccatggaaaagaatcaagatgtatgtgctttaaatgaaaattataaaaacgttgagctgttgccacctgaaaaatacatgagagtagcatcaccttcaagaaaggtacaattcaaccaaaacacaaatctaagagtaatccaaaaaaatcaagaagaaactacttcaatttcaaaaataactgtcaatccagactctgaagaacttttctcagacaatgagaataattttgtcttccaagtagctaatgaaaggaataatcttgctttaggaaatactaaggaacttcatgaaacagacttgacttgtgtaaacgaacccattttcaagaactctaccatggttttatatggagacacaggtgataaacaagcaacccaagtgtcaattaaaaaagatttggtttatgttcttgcagaggagaacaaaaatagtgtaaagcagcatataaaaatgactctaggtcaagatttaaaatcggacatctccttgaatatagataaaataccagaaaaaaataatgattacatgaacaaatgggcaggactcttaggtccaatttcaaatcacagttttggaggtagcttcagaacagcttcaaataaggaaatcaagctctctgaacataacattaagaagagcaaaatgttcttcaaagatattgaagaacaatatcctactagtttagcttgtgttgaaattgtaaataccttggcattagataatcaaaagaaactgagcaagcctcagtcaattaatactgtatctgcacatttacagagtagtgtagttgtttctgattgtaaaaatagtcatataacccctcagatgttattttccaagcaggattttaattcaaaccataatttaacacctagccaaaaggcagaaattacagaactttctactatattagaagaatcaggaagtcagtttgaatttactcagtttagaaaaccaagctacatattgcagaagagtacatttgaagtgcctgaaaaccagatgactatcttaaagaccacttctgaggaatgcagagatgctgatcttcatgtcataatgaatgccccatcgattggtcaggtagacagcagcaagcaatttgaaggtacagttgaaattaaacggaagtttgctggcctgttgaaaaatgactgtaacaaaagtgcttctggttatttaacagatgaaaatgaagtggggtttaggggcttttattctgctcatggcacaaaactgaatgtttctactgaagctctgcaaaaagctgtgaaactgtttagtgatattgagaatattagtgaggaaacttctgcagaggtacatccaataagtttatcttcaagtaaatgtcatgattctgttgtttcaatgtttaagatagaaaatcataatgataaaactgtaagtgaaaaaaataataaatgccaactgatattacaaaataatattgaaatgactactggcacttttgttgaagaaattactgaaaattacaagagaaatactgaaaatgaagataacaaatatactgctgccagtagaaattctcataacttagaatttgatggcagtgattcaagtaaaaatgatactgtttgtattcataaagatgaaacggacttgctatttactgatcagcacaacatatgtcttaaattatctggccagtttatgaaggagggaaacactcagattaaagaagatttgtcagatttaacttttttggaagttgcgaaagctcaagaagcatgtcatggtaatacttcaaataaagaacagttaactgctactaaaacggagcaaaatataaaagattttgagacttctgatacattttttcagactgcaagtgggaaaaatattagtgtcgccaaagagtcatttaataaaattgtaaatttctttgatcagaaaccagaagaattgcataacttttccttaaattctgaattacattctgacataagaaagaacaaaatggacattctaagttatgaggaaacagacatagttaaacacaaaatactgaaagaaagtgtcccagttggtactggaaatcaactagtgaccttccagggacaacccgaacgtgatgaaaagatcaaagaacctactctgttgggttttcatacagctagcgggaaaaaagttaaaattgcaaaggaatctttggacaaagtgaaaaacctttttgatgaaaaagagcaaggtactagtgaaatcaccagttttagccatcaatgggcaaagaccctaaagtacagagaggcctgtaaagaccttgaattagcatgtgagaccattgagatcacagctgccccaaagtgtaaagaaatgcagaattctctcaataatgataaaaaccttgtttctattgagactgtggtgccacctaagctcttaagtgataatttatgtagacaaactgaaaatctcaaaacatcaaaaagtatctttttgaaagttaaagtacatgaaaatgtagaaaaagaaacagcaaaaagtcctgcaacttgttacacaaatcagtccccttattcagtcattgaaaattcagccttagctttttacacaagttgtagtagaaaaacttctgtgagtcagacttcattacttgaagcaaaaaaatggcttagagaaggaatatttgatggtcaaccagaaagaataaatactgcagattatgtaggaaattatttgtatgaaaataattcaaacagtactatagctgaaaatgacaaaaatcatctctccgaaaaacaagatacttatttaagtaacagtagcatgtctaacagctattcctaccattctgatgaggtatataatgattcaggatatctctcaaaaaataaacttgattctggtattgagccagtattgaagaatgttgaagatcaaaaaaacactagtttttccaaagtaatatccaatgtaaaagatgcaaatgcatacccacaaactgtaaatgaagatatttgcgttgaggaacttgtgactagctcttcaccctgcaaaaataaaaatgcagccattaaattgtccatatctaatagtaataattttgaggtttcagatgaaattttatttcagatttaccagccacgggagccccttcacttcagcaaatttttagatccagactttcagccatcttgttctgaggtggacctaataggatttgtcgtttctgttgtgaaaaaaacagtcagaaatgaagaagcatctgaaactgtatttcctcatgatactactgctaatgtgaaaagctatttttccaatcatgatgaaagtctgaagaaaaatgatagatttatcgcttctgtgacagacagtgaaaacacaaatcaaagagaagctgcaagtcatggatttggaaaaacatcagggaattcatttaaagtaaatagctgcaaagaccacattggaaagtcaatgccaaatgtcctagaagatgaagtatatgaaacagttgtagatacctctgaagaagatagtttttcattatgtttttctaaatgtagaacaaaaaatctacaaaaagtaagaactagcaagactaggaaaaaaattttccatgaagcaaacgctgatgaatgtgaaaaatctaaaaaccaagtgaaagaaaaatactcatttgtatctgaagtggaaccaaatgatactgatccattagattcaaatgtagcacatcagaagccctttgagagtggaagtgacaaaatctccaaggaagttgtaccgtctttggcctgtgaatggtctcaactaaccctttcaggtctaaatggagcccagatggagaaaatacccctattgcatatttcttcatgtgaccaaaatatttcagaaaaagacctattagacacagagaacaaaagaaagaaagattttcttacttcagagaattctttgccacgtattttctagcctaccaaatccagaggagccattaaatgaggaaacagtggtaaataagagagatgaagagcagcatcttgattctcatacagactgcattctgcagtaaaagcaggcaatatctggaactttcccagtggcttcttcatttcagggtatcaaaaagtctatattcagaataagagaatcacctaaagagactttcaatgcaagtttttcaggtcatatgactgatccaaactttaaaaaagaaactgaagcctctgaaagtggactggaaatacatactgtttgctcacagaaggaggactccttatgtccaaatttaattgataatggaagctggccagccaccaccacacagaattctgtagctttgaagaatgcaggtttaatatccactttgaaaaagaaaacaaataagtttatttatgctatacatgatgaaacatcttataaaggaaaaaaaataccgaaagaccaaaaatcagaactaattaactgttcagcccagtttgaagcaaatgcttttgaagcaccacttacatttgcaaatgctgattcagttcacttagcaactaaactgtatgtttacaaagtgattttatctccctatgagaagactttagtgaatagctcagtgaatagtagagttgaaaatgtcactgaaacaataaaggacttagcaatttataaaaccactgtcaccgattccacctggagtggatgccatggtgcgggtgcagatccccttcaggaccaaggcatgtga

SEQ ID NO: 23408 - DNA, 11007 bp, Homo sapiens
  SIMILAR (672)..(8432): 991254mologous to Homo sapiens 214K23.1,accession number Z74739,Smith-Waterman Score=13331.
ggtggcgcgagcttctgaaactaggcggcagaggcggagccgctgtggcactgctgcgcctctgctgcgcctcgggtgtcttttgcggcggtgggtcgccgccgggagaagcgtgaggggacagatttgtgaccggcgcggtttttgtcagcttactccggccaaaaaagaactgcacctctggagcggacttatttaccaagcattggaggaatatcgtaggtaaaaatgcctattggatccaaagagaggccaacattttttgaaatttttaagacacgctgcaacaaagcagatttaggaccaataagtcttaattggtttgaagaactttcttcagaagctccaccctataattctgaacctgcagaagaatctgaacataaaaacaacaattacgaaccaaacctatttaaaactccacaaaggaaaccatcttataatcagctggcttcaactccaataatattcaaagagcaagggctgactctgccgctgtaccaatctcctgtaaaagaattagataaattcaaattagacttaggaaggaatgttcccaatagtagacataaaagtcttcgcacagtgaaaactaaaatggatcaagcagatgatgtttcctgtccacttctaaattcttgtcttagtggaaagtcctgttgttctacaattgtacacatgtaacaccacaaagagataagtcagtggtatgtgggagtttgtttcatacaccaaagtttgtgaagggtcgtcagacaccaaaacatatttctgaaagtctaggagctgaggtggatcctgatatgtcttggtcaagttctttagctacaccacccacccttagttctactgtgctcatagtcagaaatgaagaagcatctgaaactgtatttcctcatgatactactgctaatgtgaaaagctatttttccaatcatgatgaaagtctgaagaaaaatgatagatttatcgcttctgtgacagacagtgaaaacacaaatcaaagagaagctgcaagtcatggatttggaaaaacatcagggaattcatttaaagtaaatagctgcaaagaccacattggaaagtcaatgccaaatgtcctagaagatgaagtatatgaaacagttgtagatacctctgaagaagatagtttttcattatgtttttctaaatgtagaacaaaaaatctacaaaaagtaagaactagcaagactaggaaaaaaattttccatgaagcaaacgctgatgaatgtgaaaaatctaaaaaccaagtgaaagaaaaatactcatttgtatctgaagtggaaccaaatgatactgatccattagattcaaatgtagcacatcagaagccctttgagagtggaagtgacaaaatctccaaggaagttgtaccgtctttggcctgtgaatggtctcaactaaccctttcaggtctaaatggagcccagatggagaaaatacccctattgcatatttcttcatgtgaccaaaatatttcagaaaaagacctattagacacagagaacaaaagaaagaaagattttcttacttcagagaattctttgccacgtatttctagcctaccaaaatcagagaagccattaaatgaggaaacagtggtaaataagagagatgaagagcagcatcttgaatctcatacagactgcattcttgcagtaaagcaggcaatatctggaacttctccagtggcttcttcatttcagggtatcaaaaagtctatattcagaataagagaatcacctaaagagactttcaatgcaagtttttcaggtcatatgactgatccaaactttaaaaaagaaactgaagcctctgaaagtggactggaaatacatactgtttgctcacagaaggaggactccttatgtccaaatttaattgataatggaagctggccagccaccaccacacagaattctgtagctttgaagaatgcaggtttaatatccactttgaaaaagaaaacaaataagtttatttatgctatacatgatgaaacattttataaaggaaaaaaaataccgaaagaccaaaaatcagaactaattaactgttcagcccagtttgaagcaaatgcttttgaagcaccacttacatttgcaaatgctgattcaggtttattgcattcttctgtgaaaagaagctgttcacagaatgattctgaagaaccaactttgtccttaactagctcttttgggacaattctgaggaaatgttctagaaatgaaacatgttctaataatacagtaatctctcaggatcttgattataaagaagcaaaatgtaataaggaaaaactacagttatttattaccccagaagctgattctctgtcatgcctgcaggaaggacagtgtgaaaatgatccaaaaagcaaaaaagtttcagatataaaagaagaggtcttggctgcagcatgtcacccagtacaacattcaaaagtggaatacagtgatactgactttcaatcccagaaaagtcttttatatgatcatgaaaatgccagcactcttattttaactcctacttccaaggatgttctgtcaaacctagtcatgatttctagaggcaaagaatcatacaaaatgtcagacaagctcaaaggtaacaattatgaatctgatgttgaattaaccaaaaatattcccatggaaaagaatcaagatgtatgtgctttaaatgaaaattataaaaacgttgagctgttgccacctgaaaaatacatgagagtagcatcaccttcaagaaaggtacaattcaaccaaaacacaaatctaagagtaatccaaaaaaatcaagaagaaactacttcaatttcaaaaataactgtcaatccagactctgaagaacttttctcagacaatgagaataattttgtcttccaagtagctaatgaaaggaataatcttgctttaggaaatactaaggaacttcatgaaacagacttgacttgtgtaaacgaacccattttcaagaactctaccatggttttatatggagacacaggtgataaacaagcaacccaagtgtcaattaaaaaagatttggtttatgttcttgcagaggagaacaaaaatagtgtaaagcagcatataaaaatgactctaggtcaagatttaaaatcggacatctccttgaatatagataaaataccagaaaaaaataatgattacatgaacaaatgggcaggactcttaggtccaatttcaaatcacagttttggaggtagcttcagaacagcttcaaataaggaaatcaagctctctgaacataacattaagaagagcaaaatgttcttcaaagatattgaagaacaatatcctactagtttagcttgtgttgaaattgtaaataccttggcattagataatcaaaagaaactgagcaagcctcagtcaattaatactgtatctgcacatttacagagtagtgtagttgtttctgattgtaaaaatagtcatataacccctcagatgttattttccaagcaggattttaattcaaaccataatttaacacctagccaaaaggcagaaattacagaactttctactatattagaagaatcaggaagtcagtttgaatttactcagtttagaaaaccaagctacatattgcagaagagtacatttgaagtgcctgaaaaccagatgactatcttaaagaccacttctgaggaatgcagagatgctgatcttcatgtcataatgaatgccccatcgattggtcaggtagacagcagcaagcaatttgaaggtacagttgaaattaaacggaagtttgctggcctgttgaaaaatgactgtaacaaaagtgcttctggttatttaacagatgaaaatgaagtggggtttaggggcttttattctgctcatggcacaaaactgaatgtttctactgaagctctgcaaaaagctgtgaaactgtttagtgatattgagaatattagtgaggaaacttctgcagaggtacatccaataagtttatcttcaagtaaatgtcatgattctgttgtttcaatgtttaagatagaaaatcataatgataaaactgtaagtgaaaaaaataataaatgccaactgatattacaaaataatattgaaatgactactggcacttttgttgaagaaattactgaaaattacaagagaaatactgaaaatgaagataacaaatatactgctgccagtagaaattctcataacttagaatttgatggcagtgattcaagtaaaaatgatactgtttgtattcataaagatgaaacggacttgctatttactgatcagcacaacatatgtcttaaattatctggccagtttatgaaggagggaaacactcagattaaagaagatttgtcagatttaacttttttggaagttgcgaaagctcaagaagcatgtcatggtaatacttcaaataaagaacagttaactgctactaaaacggagcaaaatataaaagattttgagacttctgatacattttttcagactgcaagtgggaaaaatattagtgtcgccaaagagtcatttaataaaattgtaaatttctttgatcagaaaccagaagaattgcataacttttccttaaattctgaattacattctgacataagaaagaacaaaatggacattctaagttatgaggaaacagacatagttaaacacaaaatactgaaagaaagtgtcccagttggtactggaaatcaactagtgaccttccagggacaacccgaacgtgatgaaaagatcaaagaacctactctgttgggttttcatacagctagcgggaaaaaagttaaaattgcaaaggaatctttggacaaagtgaaaaacctttttgatgaaaaagagcaaggtactagtgaaatcaccagttttagccatcaatgggcaaagaccctaaagtacagagaggcctgtaaagaccttgaattagcatgtgagaccattgagatcacagctgccccaaagtgtaaagaaatgcagaattctctcaataatgataaaaaccttgtttctattgagactgtggtgccacctaagctcttaagtgataatttatgtagacaaactgaaaatctcaaaacatcaaaaagtatctttttgaaagttaaagtacatgaaaatgtagaaaaagaaacagcaaaaagtcctgcaacttgttacacaaatcagtccccttattcagtcattgaaaattcagccttagctttttacacaagttgtagtagaaaaacttctgtgagtcagacttcattacttgaagcaaaaaaatggcttagagaaggaatatttgatggtcaaccagaaagaataaatactgcagattatgtaggaaattatttgtatgaaaataattcaaacagtactatagctgaaaatgacaaaaatcatctctccgaaaaacaagatacttatttaagtaacagtagcatgtctaacagctattcctaccattctgatgaggtatataatgattcaggatatctctcaaaaaataaacttgattctggtattgagccagtattgaagaatgttgaagatcaaaaaaacactagtttttccaaagtaatatccaatgtaaaagatgcaaatgcatacccacaaactgtaaatgaagatatttgcgttgaggaacttgtgactagctcttcaccctgcaaaaataaaaatgcagccattaaattgtccatatctaatagtaataattttgaggtagggccacctgcatttaggatagccagtggtaaaatcgtttgtgtttcacatgaaacaattaaaaaagtgaaagacatatttacagacagtttcagtaaagtaattaaggaaaacaacgagaataaatcaaaaatttgccaaacgaaaattatggcaggttgttacgaggcattggatgattcagaggatattcttcataactctctagataatgatgaatgtagcacgcattcacataaggtttttgctgacattcagagtgaagaaattttacaacataaccaaaatatgtctggattggagaaagtttctaaaatatcaccttgtgatgttagtttggaaacttcagatatatgtaaatgtagtatagggaagcttcataagtcagtctcatctgcaaatacttgtgggatttttagcacagcaagtggaaaatctgtccaggtatcagatgcttcattacaaaacgcaagacaagtgttttctgaaatagaagatagtaccaagcaagtcttttccaaagtattgtttaaaagtaacgaacattcagaccagctcacaagagaagaaaatactgctatacgtactccagaacatttaatatcccaaaaaggcttttcatataatgtggtaaattcatctgctttctctggatttagtacagcaagtggaaagcaagtttccattttagaaagttccttacacaaagttaagggagtgttagaggaatttgatttaatcagaactgagcatagtcttcactattcacctacgtctagacaaaatgtatcaaaaatacttcctcgtgttgataagagaaacccagagcactgtgtaaactcagaaatggaaaaaacctgcagtaaagaatttaaattatcaaataacttaaatgttgaaggtggttcttcagaaaataatcactctattaaagtttctccatatctctctcaatttcaacaagacaaacaacagttggtattaggaaccaaagtctcacttgttgagaacattcatgttttgggaaaagaacaggcttcacctaaaaacgtaaaaatggaaattggtaaaactgaaactttttctgatgttcctgtgaaaacaaatatagaagtttgttctacttactccaaagattcagaaaactactttgaaacagaagcagtagaaattgctaaagcttttatggaagatgatgaactgacagattctaaactgccaagtcatgccacacattctctttttacatgtcccgaaaatgaggaaatggttttgtcaaattcaagaattggaaaaagaagaggagagccccttatcttagtgggagaaccctcaatcaaaagaaacttattaaatgaatttgacaggataatagaaaatcaagaaaaatccttaaaggcttcaaaaagcactccagatggcacaataaaagatcgaagattgtttatgcatcatgtttctttagagccgattacctgtgtaccctttcgcacaactaaggaacgtcaagagatacagaatccaaattttaccgcacctggtcaagaatttctgtctaaatctcatttgtatgaacatctgactttggaaaaatcttcaagcaatttagcagtttcaggacatccattttatcaagtttctgctacaagaaatgaaaaaatgagacacttgattactacaggcagaccaaccaaagtctttgttccaccttttaaaactaaatcacattttcacagagttgaacagtgtgttaggaatattaacttggaggaaaacagacaaaagcaaaacattgatggacatggctctgatgatagtaaaaataagattaatgacaatgagattcatcagtttaacaaaaacaactccaatcaagcagcagctgtaactttcacaaagtgtgaagaagaacctttagatttaattacaagtcttcagaatgccagagatatacaggatatgcgaattaagaagaaacaaaggcaacgcgtctttccacagccaggcagtctgtatcttgcaaaaacatccactctgcctcgaatctctctgaaagcagcagtaggaggccaagttccctctgcgtgttctcataaacagctgtatacgtatggcgtttctaaacattgcataaaaattaacagcaaaaatgcagagtcttttcagtttcacactgaagattattttggtaaggaaagtttatggactggaaaaggaatacagttggctgatggtggatggctcataccctccaatgatggaaaggctggaaaagaagaattttatagggctctgtgtgacactccaggtgtggatccaaagcttatttctagaatttgggtttataatcactatagatggatcatatggaaactggcagctatggaatgtgcctttcctaaggaatttgctaatagatgcctaagcccagaaagggtgcttcttcaactaaaatacagatatgatacggaaattgatagaagcagaagatcggctataaaaaagataatggaaagggatgacacagctgcaaaaacacttgttctctgtgtttctgacataatttcattgagcgcaaatatatctgaaacttctagcaataaaactagtagtgcagatacccaaaaagtggccattattgaacttacagatgggtggtatgctgttaaggcccagttagatcccctcgcctcttagctgtcttaaagaatggcagactgacagttggtcagaagattattcttcatggagcagaactggtgggctctcatgatgcctgtacacctcttgaagcgccagaatctcttatgttaaagatttctgctaacagtactcggcctgctcgctggtataccaaacttggattctttcctgaccctagaccttttcttctgcccttatcatcgtttttcagtgatggaggaaatgttggttgtgttgatgtaattattcaaagagcataccttatacagtggatggagaagacatcatttggattatacatatttcgcaatgaaacagaggaagaaaaggaagcagcaaaatatgtggaggcccaacaaaagagactagaagccttattcactaaaattcaggaggaatttgaagaacatgaagaaaacacaacaaaaccatatttaccatcacgtgcactaacaagacagcaagttcgtgctttgcaagatggtgcagagctttatgaagcagtgaagaatgcagcagacccagcttaccttgagggttatttcagtgaagggccgtttagggccttggattatccccggccaaatgttgaatgataagaaacaagctcagatccagttggaaattaggaaggccatggaatctgctgaacaaaaggaacaaggtttatcaagggatgtcacaaccgtgtggaagttgcgtattgtaagctattcaaaaaaagaaaaagattcagttatactgagtatttggcgtccatcatcagatttatattctctgttaacagaaggaaagagatacagaatttatcatcttgcaacttcaaaatctaaaagtaaatctgaaagagctaacatacagttagcagcgacaaaaaaaactcagtatcaacaactaccggtttcagatgaaattttatttcagatttaccagccacgggagccccttcacttcagcaaatttttagatccagactttcagccatcttgttctgaggtggacctaataggatttgtcgtttctgttgtgaaaaaaacaggacttgcccctttcgtctatttgtcagacgaatgttacaatttactggcaataaagttttggatagaccttaatgaggacattattaagcctcatatgttaattgctgcaagcaacctccagtggcgaccagaatccaaatcaggccttcttactttatttgctggagatttttctgtgttttctgctagtccaaaagagggccactttcaagagacattcaacaaaatgaaaaatactgttgagaatattgacatactttgcaatgaagcagaaaacaagcttatgcatatactgcatgcaaatgatcccaagtggtccaccccaactaaagactgtacttcagggccgtacactgctcaaatcattcctggtacaggaaacaagcttctggtaagtatgtcttctcctaattgtgagattatattatcaaagtcctttattcactttgtatgggccaaaggaagtctgtttccacacctgtctcagcccagatgacttcaaagtcttgtaaaggggagaaagagattgatgaccaaaagaactgcaaaaagagaagagccttggatttcttgagtagactgcctttacctccacctgttagcccccatttgtacattggtttctcccggcgccacagaggccatttcagccaacaatggagttgtggcaccaaatacgaaacacccataaagaaaaaagaactgaattctcctcagatgactcgcatttaaaaaatacagtgaaattgctcttttggaaagaaattcactagctgacgaacaacttgccttgataaatacccaagctcttttgtctggttcaacacgagaaaaacaatttatatctgtcagagaatccactaggactgctcccaccaggtcagaagattatctcagactgaaacgacgttgtactacatctctgatcaaagagacaggagagttcccacggccactactgaagaatgtgagaaaaataagccggacacaattacaactaaaaaatatatctaagcatttgcaaaggcgacaataaattattgacgcttaacctttcccagtttataagactggaatataatttcaaaccacacattagtacttatgttgcacaatgagaaaagaaattagtttcaaatttacctcagcgtttgtgtatcgggcaaaaatcgttttgcccgattccgtattggtatacttttgcttcagttgcatatcttaaaactaaatgtaatttattaactaatcaagaaaaacatctttggctgagctcggtggctcatgcctgtaatcccaacactttgagaagctgaggtgggaggagtgcttgaggccaggagttcaagaccagcctgggcaacatagggagacccccatctttacgaagaaaaaaaaaaaggggaaaagaaaatcttttaaatctttggatttgatcactacaagtattattttacaatcaacaaaatggtcatccaaactcaaacttgagaaaatatcttgctttcaaattgacacta

SEQ ID NO: 23409 - DNA, 732 bp, Homo sapiens
  SIMILAR (101)..(622): 971254mologous to Homo sapiens GB11_HUMAN; GUANINE NUCLEOTIDE -BINDING PROTEIN G(Y),ALPHA SUBUNIT; ALPHA-11,accession number AC005262,Smith-Waterman Score=880.
  misc_feature (1)...(732): n = a,t,c or g
agctatcagattctgcaaagtactacctgtcngacgttgacngcatcgcccctttgagctacctgcccacccagcagtacgtgctgcgggtcagcgtgccaccaccggcatcatcgagtaccctttcgacctgtagaacatcatcttccggatggtggatgtggggggccagcggtcggagcggaggaagtggatccactgctttgagaacgtgacatccatcatgtttctcgtcgccctcagcgaatacgaccaagtcctggtggagtcggacaacgagaaccggatggaggagagcaaagccctgttccggaccatcatcacctacccctggttccagaactcctccgtcatcctcttcctcaacaagaaggacctgctggaggacaagatcctgtactcgcacctggtggactacttccccgagttcgatggtccccagcgggacgcccaggcggcgcgggagttcatcctgaagatgtcgttggacctgaaccccgacagcgacaagatcatctactcacacttcacgtgtgccaccgacacggagaacatccgcttcgtgttcgcggccgtgaaggacaccatcctgcagctcaacctcaaggagtacaacctgttatcaggggatgtacatctctccctccgtacacttcgcgcaccttctcaccttttgtcaacggcaaaggcagcctttttctggccttgacttatggcacgcttttttctaaa

SEQ ID NO: 23410 - DNA, 1977 bp, Homo sapiens
  SIMILAR (1501)..(1974): 1001254mologous to Homo sapiens GB11_HUMAN; GUANINE NUCLEOTIDE-BINDING PROTEIN G(Y),ALPHA SUBUNIT; ALPHA-11,accession number AC005262,Smith-Waterman Score=819.
atgactctggagtccatgatggcgtgttgcctgagcgatgaggtgaaggagtccaagcggatcaacgccgagatcgagaagcagctgcggcgggacaagcgcgacgcccggcgcgagctcaagctgctgctgctcgaacccccgccgccatccctgcatgcacccggtcttctgtgcctgcactttggacttgagattgacacggggttcaaggacgaagtctgccgacaggcgctttcaggacagcactggtgggtgggtcttcgggccacctgcagggcctgggagcagtgtggtgtccggatcagggactgtggggccaggtccacactgtgggatgagtgcagcccccacggctgtggtggggctgggtccacgctgtgggatgaatgcagcccccagggactgtggggccgggtggagatgtccaggccagtgcccacaactgggttagatgggctgcacaaggctggggaccagtctcccaggctgtcggggggcttcagtaatggctgtgggaagacccagcacgtggggccctgtggctctggccttgctcccgacagcggtgccttcttgctgtgtcctcatgcggacgggatccctcctggaaccatcagtgccctcatgaaagagccccccaagagctccgtggcggaagaagctgatcccgcctcccaacaccactgtcttaggggcacgggcgagagcgggaagagcacgttcatcaagcagatgcgcatcatccacggcgccggctactcggaggaggacaagcgcggcttcaccaagctcgtctaccagaacatcttcaccgccatgcaggccatgatccgggccatggagacgctcaagatcctctacaagtacgagcagaacaaggccaatgcgctcctgatccgggaggtggacgtggagaaggtgaccaccttcgagcatcagtacgtcagtgccatcaagaccctgtgggaggacccgggcatccaggaatgctacgaccgcaggcgcgagtaccagctctccgactctgccaagtactacctgaccgacgttgaccgcatcgccaccttgggctacctgcccacccagcaggacgtgctgcgggtccgcgtgcccaccaccggcatcatcgagtaccctttcgacctggagaacatcatcttccggtaccgcccgggccacagcaggcggggagggggcactgagaggctcatttgcccgccgcctctgtccaccacacgctggcagagggccggccaggtgctgtgggatgcagctggaggccttgaaggccggtgggatcgtcccagaggataccggcaactctgccctctgcagccgtcactggagggtccctgcagggagcaactgtggcatcagtgtttactcctgcgagtgacgcttggtgaacatctgtgtccctggcccagtgaggggaaaggcttctgtgctcagggtgacatccagatgccagatgtagggtccctgggcacccatcgcaggatggtggatgtggggggccagcggtcggagcggaggaagtggatccactgctttgagaacgtgacatccatcatgtttctcgtcgccctcagcgaatacgaccaagtcctggtggagtcggacaacgagaaccggatggaggagagcaaagccctgttccggaccatcatcacctacccctggttccagaactcctccgtcatcctcttcctcaacaagaaggacctgctggaggacaagatcctgtactcgcacctggtggactacttccccgagttcgatggtccccagcgggacgcccaggcggcgcgggagttcatcctgaagatgttcgtggacctgaaccccgacagcgacaagatcatctactcacacttcacgtgtgccaccgacacggagaacatccgcttcgtgttcgcggccgtgaaggacaccatcctgcagctcaacctcaaggagtacaacctggtctga

SEQ ID NO: 23411 - DNA, 1622 bp, Homo sapiens
  SIMILAR (187)..(858): 471254mologous to Homo sapiens GB11_HUMAN; GUANINE NUCLEOTIDE -BINDING PROTEIN G(Y),ALPHA SUBUNIT; ALPHA-11,accession number AC005262,Smith-Waterman Score=332.
gccctcggccccgggccggcccgccccgcctcggccgccgcctggcgagccgccgggtccccgctcggccggtggccgaggccggagggccgcggcgggcggcggccgaggcggctccggccagggccgggccgggggccggggggcggcggcgggcaggcggccgcgtcggccggggccgggacgatgactctggagtccaatgaatggcgtgttgcctgaggcgatgaggtgaaggagtccaagcggatcaacgccgagatcgagaaggcagctgcggcggagacaaggcgcgacgcccggcgcgagcttcaaggctgctgctgctcggcacgggcgagagcgggaagagcacgttcatcaaggcagatgcgcatcatccacggcgccggctactcggaggaggacaagcgcggcttcaccaagctcgtctaccagaacatcttcaccgccatgcaggccatgatccgggccatgggagacgcttcaagatcctctacaaagtacggagcagaacaagggccaatgcgcttcctgatccggggaggtgggacgttggagaaggtgaccacctttggagcattcagttacgttcagttgccattaaaggacctttttgggagggacccgggcatccaggaattgcttacgaacggcagccgcgaagttaccagctctccgactctgccaagtactacctgaccgacgttgaccgcatcgccaccttgggctacctgcccacccagcaaggacgtgcctgcggggtcccgcgtgcccaccacctggcatcatcgagtaccctttcgacctggagaacatcatctttccggatggttgatgtggggggcccagcggtctggagcggaggaagtggatccactgctttgagaacgtgacatccatcatgtttctcgtcgccctcagcgaatacgaccaagtcctggtggagtcggacaacgagaaccggatggaggagagcaaagccctgttccggaccatcatcacctacccctggtttccagaactcctccgtcatcctcttcctcaacaagaaggacctgctggaggacaagattcctgtactcgcacctggtggactactttccccgaagttcgatgggtccccagcggggacgccaaggcggcgcgggagttcatcctgaagatgttcgtggacctgaacccgaacagcgacaagatcatctaacttcacacttcacgtgtccccaccgacaccggagaacatcccgcttcgtgttcccggccgtgaaggacaccatcctgcagctcaacctcgaggagtacaaacctggtctgagcgccccaggcccagggagacgggatggagacacggggcaggaccttccttccacggagcctgcggctgcccgggcgggtggcgctgccgagtccgggccggggcctctgcccgcgggaggagattttttttttttcatatttttaacaaatggtttttatttcacagttatcaggggatgtacatctctccctccgtacacttcgcgcaccttctcaccttttgtcaacggcaaaggcagcctttttctggccttgacttatggctcgcttttttctaaaaaaaaaaaaaaaaagaaagaaag

SEQ ID NO: 23412 - DNA, 401 bp, Homo sapiens
  SIMILAR (28)..(87): 1001254mologous to Homo sapiens Human secreted protein clone pv6_1 protein sequence SEQ ID NO:50,accession number Y94922,Smith- Waterman Score=101.
aagaaggttcctgggagactgtcagaaatgagtttttcactgaacttcaccctgccggcgaacacaacgtcctctcctgtcacaggactgtgggccctctcttggattagcggcgggcataccattgctggtggccacagccctgctggtggctttactatttactttgattcaccgaagaagaagcagcattgaggccatggaggaaagtgacagaccatgtgaaatttcagaaattgatgacaatcccaagatatctgagaatcctaggagatcacccacacatgagaagaatacgatgggagcacaagaggcccacatatatgtgaagactgtagcaggaagcgaggaacctgtgcatgaccgttaccgtcctactatagaaatggaaagaaggaggg

SEQ ID NO: 23413 - DNA, 1074 bp, Homo sapiens
  SIMILAR (667)..(1071): 881254mologous to Homo sapiens Human secreted protein clone pv6_1 protein sequence SEQ ID NO:50,accession number Y94922,Smith- Waterman Score=614.
atgatagaaaaagagagaaaaagaaagaaagagaaaaagagacaaagaaaaagaaagaatgaaagaagaaagaacaaaaaaggagaaagaaaggaagaaagaaagaaaggaaagaaagagaagaaagacagaaagaaagacagacagaaagaaagaaagcaggctatagatcttcagcaaggtttatcttctatagctaacgctgtcctggccctctgccctgtctacctgctcatgcacaccgggggctttaaaaccatccacaggccggccactcccaaacggatgtcttcagccccagatcccctttatccagtcgcctacttggcacccacacttggacagcccctaggctactcaggtggctgcaggctgcagaagcccccaagctctcaggccagctgtggcttctttgctgagatggagctttgtcagttaactgttcctacaaatgaaagacacaagccaataaagccagtgagaaaggagcttaccaaaggcagtgtacgaagaaggttcctgggagactgtcagaaatgtcatgtgtttgctgcccttgtgaatgggacccctcagacaatagccttgcaggctgcctcttcatctgatcctggtcgaggacctgagtttttcactgaacttcaccctgccggcgaacacagtaagtacagcagcccccattcaccaggcaacgcagagaagaccagtgcagaatttacagactgtgggccctctcttggattagcggcgggcataccattgctggtggccacagccctgctggtggctttactatttactttgattcaccgaagaagaagcagcattgaggccatggaggaaagtgacagaccatgtgaaatttcagaaattgatgacaatcccaagatatctgagaatcctaggagatcacccacacatgagaagaatacgatgggagcacaagaggcccacatatatgtgaagactgtagcaggaagcgaggaacctgtgcatgaccgttaccgtcctactatagaaatggaaagaaggaggggattgtggtggcttgtgcccagactgagcctggaatga

SEQ ID NO: 23414 - DNA, 2121 bp, Homo sapiens
  SIMILAR (430)..(546): 821254mologous to Homo sapiens Human secreted protein clone pv6_1 protein sequence SEQ ID NO:50,accession number Y94922,Smith- Waterman Score=167.
tgcctctgcagctttgtcagttaactgttcctacaaatgaaagacacaagcccaataattttcgtgagaaaggagcttaccataaggcagtgtacgaagaaggttcctgggagactgtcagaaatgagtttttcacgtgaacttcaccctgccggcgaacacaacgtcctctcctgtcacaggtgggaaagaaacggactgtgggccctctcttggattagcggcgggcataccattgctggtggccacagccctgctggtggctttactatttactttgattcaccgaagaagaagcagcattgaggccatggaggaaagtgacagaccatgtgaaatttcagaaattgatgacaatcccaagatatctgagaatcctaggagatcacccacacatgagaagaatacgatgggagcacaagaggcccacatatattgtgaagactgtaacaagaaagcgaggaacctgtgcatgaccgttaccgtcctactatagaaatggaaagaaggaggggattgtggtggcttgtgcccagactgagcctgggaatgatgccaacctcaaatcaggggagccaccagacctggcaccttggaacagggttgaaaacccagggttttgtacttggagaggaaagatgccaagctgcttcttaatcaatccaaatttcatttacagctctggaacactttggggctgatttgtctctttagggggacatccccaacatggttaattccaactctcagatctttgggctttagttagaacatgtgactccccagagggggtccttagatcctattcctgctcccagtgggaattgctttttctttgtcattttggaaaaggggcttggtttatgagtgtctcgccttctcatctttttttttcatatcctttttctcaaaagagccatcagatctgactttcatgggaagtgttgctgaggtcagccgggtgcaagttgggatacaaatgaaacttatggcagggtgtgtgagaggaagcagttaattgtttctgaatatctcagggtaggaaccatgtggagccgcacattccctgaccacagggaagcacctggctcaatcatgtcacacagcagtggaaagaatacggactcataagtcacacctaccactgagcagctgtacgactttgagagaagttgtttaacattttcaagcctcagtttttgcttttttaaaggaggggaaatatttgcctcatgtcataattgaaaagattaaataagaaataaagggaagtgtctgctacttagttgccagtcaaaatgttagttctctctctctaccaccttcttcctacctcttcccatattgcttgcctgataaaacagctaatcaccagcatttgttccccatagtcacagggccacacaagggaacatttaggacaaactttctccatggcctatgatccaaattgttatctaaagatgattctaggtgttgctggtagtatgtgaatcttccaatctaggtgtgatcgtgtcctcatatgaatcaggaaaaggcagtttcttacaagttccgaattccaaatacagagactggtggtgttacatttaaccttaaagatgttaatgttgatggaaattcatgtttcatattaaaacaacactttgtctttacaatgaaacattttgcttaatttttaaagtaagacattatgatacctctgatggcagttcctcaaataactttaacttttgtgctttagggatagttgttaaagttacaacttcttttattttattttttaaaggcttcagattaaacaagagcccttaagcccacgcatagcattgccgcttcagcttgctgagggactgtctccaaggaggccaaatgggaaaaggagaggctacttcaagtgggtgttgggcccattgaggcctattggggcaaactattaaccgggttggccttattttggggtgggattactccaggagaggccaccctccagctttctcttatcccagtaactcctcttcccattttccaatccatccccagccatttttttttttcttctgtactcttcttttgccttcaatatgagtttcatttcctctgtgtctttgggcagac

SEQ ID NO: 23415 - DNA, 413 bp, Homo sapiens
  SIMILAR (123)..(191): 1001254mologous to Homo sapiens hMpv17,accession number X76538,Smith-Waterman Score=123.
  misc_feature (1)...(413): n = a,t,c or g
ggtnnnnnnnnnnnnnnnnnnnnnnnnnnnnnnnnnnnnnnnnnnnnnnnnnnnnnnnnnnnnnnnnnnnnnnnnnnnnnnnnnnnnnnnnnnnnnnnnnnnnnnctcggcgctcaggaagcatggcactctggcgggcataccagcgggccctggccgctcacccgtggaaagtacaggtcctgacagctgacttctggggaggaaggcagcactgctggccccatgccagtagctatacctgccgacccaggcctcctggactgaaggacacgcttcctgctcctcactccaagaagccacttcttgcccctctgccttctgcgcatgaaactcaaaagccacaaaacagctggtggagaggcggggtctgcaggaacaccagagaggccggactctgaccatggtgtccc

SEQ ID NO: 23416 - DNA, 146 bp, Homo sapiens
  SIMILAR (1)..(93): 1001254mologous to Homo sapiens hMpv17,accession number X76538,Smith-Waterman Score=165.
ggccctgtggtaggaggctggtacaaggttttggatcggttcatccctggcaccaccaaagtggatgcactgaagaagatgttgttggatcagctatggcctgctgtgcagttagccaacttctacctggtcccccttcattacag

SEQ ID NO: 23417 - DNA, 442 bp, Homo sapiens
  SIMILAR (258)..(440): 1001254mologous to Homo sapiens hMpv17,accession number X76538,Smith-Waterman Score=318.
tgggagggaggctcggcgctcaagaagcatggcactctggcgggcataccagcgggccctggccgctcacccgtggaaagtacaggtcctgacagctgacttctggggaggaaggcagcactgctggccccatgccagtagctatacctgccgacccaggcctcctggactgaaggacacgcttcctgctcctcactccaagaagccacttcttgcccctctgccttctgcgcatgaaactcaaaagccacaaaaggtccctgatgggcctgggtgacattatctcacagcagctggtggagaggcggggtctgcaggaacaccagagaggccggactctgaccatggtgtccctgggctgtggctttgtgggccctgtggtaggaggctggtacaaggttttggatcggttcatccctggcaccaccaaagtggatgcact

SEQ ID NO: 23418 - DNA, 1021 bp, Homo sapiens
  SIMILAR (33)..(191): 751254mologous to Mus musculus Mpv17,accession number M36411,Smith-Waterman Score=190.
ggcggcattcgaggttcggcgctcagggaagcatggcactctggcgggcataccaaacggaccctgtttcgctctcccgtggaaaagtacaggtcctgacagctgggtccctgatgggcctgggtgacattatctcacagcagctggtggagaggcggggtctgcaggaacaccagagaggccggactctcgagccatggtgtccctgggctgtggctttgtgggccctgtggtaggaggctggtacaaggttttggatcggttcatccctggcaccaccaaagtggatgcactgaagaagatgttgttggatcaggggggctttgccccgagttttctaggctgctttctcccactggtaggggcacttaatggactgtcagcccaggacaactggggccaaactacagcgggtgagctgggcaggattatcctgatgcccttatcaccaactactatctatggcctgctgtgcagtttagccaacttctacctggtcccccttcattacagggtgggccgttgtccaatgtgttgctgttatctggaactcctacctgtcctggaaggcacatcgggctctaagcctgcctcactccatcgtttccaccttgcaagtgatgcagcttgacccctggaacgggtcagacaaccctcctcaaaagtgggcatagcgagtttcccacgggggttgggttgccggtcaggagcttaagaggactagcaccctgcaaatgcccctcttcactctaaaatgtacactgactgctttagagcccttgattatagtcttaattcccaccacatactaaggcactccataaatatctgttgaaccttcatgaccttatcaacttttacacccaatatcccagcaaatgccactcatccccactcttcatagacacatttgttactctaaccctgcctaggcttcttgtagctccagctctttagagactcccggaaccctttatatggtgcctcagtaaatatgttattaaatatgtaatccggaaac

SEQ ID NO: 23419 - DNA, 1619 bp, Homo sapiens
  SIMILAR (536)..(1177): 351254mologous to Arabidopsis thaliana isomerase like protein,accession number AL161542,Smith-Waterman Score=228.
atgaaggccttggcggggcgaaggcggcttcccaggccgggaaagtctctggcggccgaacaagcccttgggcccaccacattgacccgggccgggctggacttgccaatttgcccagaactgcaaaaccccggcgtctgcgggtcgcagccaatcagcgccggcctcgcgttgccttcagccaatcagggtccacttcgcaccgtcagccaaccaatcaacgcgctcgcgctcaacttgttttgtccgcgagccccgactgccacgggccgggagacgggcctgggagcggcggcggcggcccgagagctgcgccgggagagctgtgccgcgagcctccgcctcttttttggcaccgcacagtggatccctggaggccgagcgccacgccgcccgggtacccggcagatcgcgaggtggaacgggccgtcgctgcgggggacagcgttccgaggcagttggtcctctccgggatgccgtaggcatcagctgaccggcccagcccacgtgactacaggggcacttgatgggaatcatggcagcatccaggccattgtcccgcttctgggagtggggaaagaacatcgtctgcgtggggaggaactacgcggaccacgtcagggagatgcgcagcgcgggtggttgagcgagcccgtgctgttcctgaagccgtccactggcgtacgcgcccagagggctcgcccaatcctcatgcccgcgtacactcgcaacctgcaccacgagctggagctgggcgttggtgattgggcaagcgctgccgcgcagtccccgagggctgcggccatggactacgtgggcgggctatgccctgtgcctgggatatgaccgcctgggacgtgcaggacgagtgcaagaaagaaggggcttgcctgggactctggcgaagagccttcacggcgtcctgcccggttcagcgcgtttcgttgcccaaggagaagatccctgacccttcacaagctgaaagctctgggcttcaaggtcaacggcgaactcagacaggagggtgagacatcctccatgatttttttccatcccctacatcatcagctatgtttctaagatcataaccttggaagaaggagatattatcttgactgggacgccaaagggagttggaccggttaaagaaaacgatgagatcgaggctggccatacacgggctggtcagtatgaccatttaaaagtggaaaaagcccagaatcattgagttaatttccttaacaagttttcgaaagagaaagggagcaagacaagagccaagcaacggctattaaatgtcacaatcctttaattagaaaccatttattggcccggacgcggtggctcacgccctgtaatcgcagcactttgggaggccgaggcgggcggctcacgacgtcaggagatccagacccatcttggctaacagggtgaaaccccgtctctactaaaaatacaaaaaattagccgggcgtggtggcgggcgcctgtagtcccagctactctggaggctgaggcaggagaatcaattgaacccgggaggcggagcttacagtgagctgagattgcgcccctgtactcctgggcaacagcgagactccgtctcaaaaaaaaaaaaa

SEQ ID NO: 23420 - DNA, 436 bp, Homo sapiens
  SIMILAR (318)..(371): 831254mologous to Rattus norvegicus zygin-related protein type I,accession number AF120109,Smith-Waterman Score=78.
agaaaatataatccccttggatttattctctgctttcagtctaaaggagaaaaagctccccaggattcctaaataacagagaagtttgtagtgtaggaagaatctagaagttgggatggagagaaatgtgggaaagtcttacttttaaagagacattccctaaagaggggtaagaagttctgaaacagtgacgtaccagtgaccatgaatgtttcagagaaggtcagatttgcagtgtgtgtcttagagaaaggctaaatctcaacccagaggaagcatgtcttctgtctcaagccccctgcatgctgtttgtcttgcagtatctgaacacagtcattccttacgagaagaaagcctctcctccctcagtgggaagacctgcagatgctggacaaacattctctttgccatgaaggaggataatgagaaggtgcct

SEQ ID NO: 23421 - DNA, 1679 bp, Homo sapiens
  SIMILAR (969)..(1241): 601254mologous to Homo sapiens zyginI,accession number U69139,Smith-Waterman Score=242.
acgagggtccggctgagccccgggatccgcctccctccgccaggacccgcacagataaactcatcctgaaagtcgctgttgttctcctgctgagcaagaatggaggccccactggtgagtctggatgaagagtttgaggaccttcgaccctcctgctcggaggacccggaggagaagccccagtgtttctatggttcatctccccaccatctcgaggacccctccctctccgagcttgagaatttttcttccgaaataatcagcttcaagtccatggaggacctcgtaaatgaatttgatgagaagctcaatgtctgctttcggaactacaacgccaagaccgagaacctagctcccgtgaagaaccagttacagatccaagaggaggaggagacccttcaggacgaggaggtttgggatgctctgacagacaattacatcccttcactctcagaagactggagggatccaaacatcgaggctctgaatggcaactgctctgacactgagatccatgagaaagaagaggaagagttcaatgagaagagtgaaaatgattccggtatcaacgaggagcctctgctcacagcagatcaggtaattgaggagattgaggaaatgatgcagaactccccagaccctgaggaagaagaggaggttctggaagaagaggatggaggagaaacttcctcccaggcagactcggtcctcctgcaggagatgcaggcattgacacagaccttcaacaacaactggtcctatgaagggctgaggcacatgtctgggtctgagctgaccgagctgctggaccaggtggagggtgccatccgtgacttctgggaaggagctggtgcagcagctggcccgccgggacgagctggagtttgagaaggaagtgaagaactcttttttccacggtgcttaattgaggttcagaacaagcagaagggagcagcgagaactgatgaaaaagaggcggaaagagaaagggctgagcctgcagagcagccggatagagaagggaaaccagatgccttctcaagcgcttcagcatggaaggcatctccaacattctgcagagtggcatccgccagacctttggctcctcaggaactgacaaacagtatctgaacacagtcattccttacgagaagaaaagcctatcctccctcagtggaagcacctgcagatgctgacaaacattctctttgcccatgaaggaggataatgagaaggtgccctactttgcctaaacggaactaacatttttaaaaagtgctcctgccccctaccctaaccttgcccctttggaagcagcctcgcctgcagggaggtcaactgagcaaagagtcattcccatcacagggactgcatgagacccatgtaaccctccgacatgtatttaaacgtgtatagcttaaccctggattaaacaccgagcaaggcgcgcggggtcctttgccgttggcttctagttgctagtaatcattggatgcatgatggggcagggcgggtgaatggtgcctccccctttgctggtgtcaggaagaaggggaaaggcagccgcttttaaccgctcatgtatgtagtctggctacagccctcaaaaacagcttatactcttaagactaattttgaaataaaaccttcatttaattaataaaaaaaaaaaaaaaaaa

SEQ ID NO: 23422 - DNA, 1171 bp, Homo sapiens
  SIMILAR (725)..(907): 981254mologous to Homo sapiens orphan neurotransmitter transporter v7-3,accession number AF265577,Smith-Waterman Score= 320.
gcctgtatcccgtgctgtttccctggcagacacacaggcgctcacgagtctctccttgccagcctgcagggcggcgacccccaaaacccagctccgggtcccaacctaggcaagaagctgcttctctgccaacagctcctcttcggcctccgtcacagccacctggaccctaccctttcgcgactgctgctgctgctgcccggacgtggaagcagcaagaggcgcttggtcaagacacactgacggtacctacagaatactggacatacggattcagaatccataaggctttatcaccttgaatcaaggatttatttgatatcatcctcggtctttacttcctatcaagtaacattgttttgaaaaatagagttaacacatttgccataagggagttttttttttttttttaaatacttcgcatactctccaatgcccaaaaatagcaaggtggtaaaaagagaattagatgatgatgttactgagtctgtcaaagaccttctttccaatgaagacgcagctgatgatgcttttaagacaagtgaactaattgttgatggccaggaagagaaagatacagatgttgaagggaagttctgaagtcgaagatgaaagaccagcttggaacagtaaactacaatacatcctggcccaagttggattttctgtaggtttaggaaatgtgtggcgatttccatacctatgtcagaagaatgggggcgttgtagaaccagaatgtgaacaaagttctgccaccacctattactggtacagggaagcactgaatatttcaagttccatttctgaaagtgggggcttaaactggaagatgaccatctgcttgttggctgcctgggtcatggtttgcttggctatgatcaaaggcattcagtcttctggaaaagttaatacatatgatagagttactatgtcagcaactgtgttagccttgcaggaacaatggcaaacctttagcccgatcaggagtggcaatgggcaccttactggatcaggagcacagcggacaccctgccggatccggaggggtggaagtcagttacgggtctgcgatggcggcaaacagcagtggtggactgtcagccaaagctcagctcgagccataacaaacacggaccagaagagtgtgcagttgcaagatttaatagagtga

SEQ ID NO: 23423 - DNA, 568 bp, Homo sapiens
  SIMILAR (61)..(561): 781254mologous to Homo sapiens hematopoietic PBX-interacting protein,accession number AF221521,Smith-Waterman Score=634.
ggcacgaggcaagagctggttcaggtggcagccacagcagcctcagggacctcagcaactatggcctcctgcccagactctgataatagctgggtgcttgctggctccgagagcctgccagtggagacactgggcccggcatccaggatggacccagaatctgagagagccctgcaggcccctcacagcccctccaagacagatgggaaagaattagctgggaccatggatggagaagggacgctcttccagactgaaagccctcagtctggcagcattctaacagaggagactgaggtcaagggcaccctggaaggtgatgtttgtggtgtggagcctcctggcccaggagacacagtagtccagggagacctgcaggagaccaccgtggtgacaggcctggggaccagacacacaaggacctggaaggccagagccctccacagagcctgccttcaacccccaaagcagcttggatcagggaggagggcccgctgctccagcagttgacgatgacacccgacgtggacatggaggggtctgcggagacggcggggccggggaggcc

SEQ ID NO: 23424 - DNA, 693 bp, Homo sapiens; identical to SEQ ID NO: 20790
  SIMILAR (223)..(423): 981254mologous to Homo sapiens Human secreted protein, SEQ ID NO: 5792,accession number G01711,Smith-Waterman Score=331.

SEQ ID NO: 23425 - DNA, 480 bp, Homo sapiens
  SIMILAR (109)..(480): 421254mologous to Caenorhabditis elegans weak similarity to regions of guanine-nucleotide releasing factors,accession number U58746,Smith-Waterman Score=269.
  misc_feature (1)...(480): n = a,t,c or g
nccttgatatcccctcgccangngcgggaattcgatcgcctcccggctgtagacaaggggcccatcctcaagaccaagccaccagccgcccagaaggacatcctgggcgtgtgctgcgaccccctggtgctggcccagcagctgactcacattgagctggacagggtcagcagcatttaccctgaggacttgatgcagatcgtcagccacatggactccttggacaaccacaggtgccgaggggacctgaccaagacctacagcctggaggcctatgacaactggttcaactgcctgagcatgctggtggccactgaggtgtgccgggtggtgaagaagaaacaccggacccgcatgttggagttcttcattgatgtggcccgggagtgcttcaacatcgggaacttcaactccatgatggccatcatctctggcatgaacctcagtcctgtggcaaggctgaagaaaacttggtccaag

SEQ ID NO: 23426 - DNA, 774 bp, Homo sapiens
  SIMILAR (282)..(214): 451254mologous to Homo sapiens Human secreted protein clone ch245_1 2nd protein sequence SEQ ID NO:180,accession number Y53060,Smith-Waterman Score=65.
tcaggagcctgggctgcgaggctccataggagggctggtggctgggaggtcgcgtccgcacacttctggaagtgagcctttgagtacgggctgtccaaagtttacattttcattttccatggcgcaggacagctgtccttcagaaagcacacggtcaatccacgtggaccgtctccctcgcaggaactccgcatccttgtccctctctgcattcccagtttccgcaggagccttgatcaatggggaagcctgggtgaggatgggccaggtcccaattcccaaagctccctgatttgatgttttggtatttgagatgaactctgagtatgaagctgtaccataatgcaggacgtcagttttggtgtgactggacatacttgcttcaataaaagaatacatcactcccctcccttgcctgctgtgtgtgtacagtgagggggtggccttgctgctggccggagacatgggtccccttatagcctccatgtttttcatctgatcacggctctcttgcagggccgtggtagcagacagagcaggcacctggttcattgtcagcacagtcagtgctcgctgtagactggccttggtgccgaggacgccaagcagcacttctggttcattgtcagcacagtcggtgcttgctatggactggccctggtgctgcggacgccaagcagcacttctgcaaaaggccacagcaccttttgggaaaagtgaagcaaaggcccccttctcaaaggaacacctggggtcctggtcaatacgaagcat

SEQ ID NO: 23427 - DNA, 3011 bp, Homo sapiens
  SIMILAR (1327)..(1650): 821254mologous to Homo sapiens Human GTPase associated protein-11,accession number Y99660,Smith-Waterman Score=474.
atgaagccgccgcgcgcccgcggccccgcccaggaagctccgccactggcagctgggtaccgattcatcaccgacgtgtttaaagtatccgtgtgtgtgcctccaaaaaccgtttgtggagacagcagagtgcccgaggcaggaaaccgctccggcctggaggcgcccctgcccggactcgtggactgcagcgctgtcccgctcggaagccgatcctgggagtccgagcggggccgcggggcctgcgtggcagccgagtcgagggcttcgggccgcggggctgtggagcgccccttggcgctgggccgccggcagccgcatggctggctgtctggggcactggggaaacaggcccagagggcttcagactcccctaggcttcacaagaactcccagctgcagggtgtggaaactatgccccagacgtccgttgtcttctccagcatccttgggcccagctgtagcggacaggtgcagcctggcatgggggagcgtggaggcggggccggtggcggctccggggacctcatcttccaagatggacacctcatctctgggtccctggaggccctgatggagcaccttgttcccacggtggactattaccccgataggacgtacatcttcacctttctcctgagctcccgggtctttatgccccctcatgacctgctggcccgcgtggggcagatctgcgtggagcagaagcagcagctggaagccgggcctgaaaaggccaagctgaagtctttctcagccaagatcgtgcagctcctgaaggagtggaccgaggccttcccctatgacttccaggatgagaaggccatggccgagctgaaagccatcacacaccgtgtcacccagtgtgatgaggagaatggcacagtgaagaaggccattgcccagatgacacagagcctgttgctgtccctgggctgcccggagccagctccagggaactgcgagagaagctccggccaccggctgtagacaaggggcccatcctcaagaccaagccaccagccgcccagaaggacatcctggggcgtgttctgcggacccctggtgctgggcccagcagcttgattcacatttgagctgggacagggtcagcagcatttaccctgaggactttgatgcagatcgtcagccacatggactccttggacaaccacaggttgccgaggggacctgaccaagacctacagcctggaggcctatgacaactggttcaactgcctgagcatgctggtggccactgaggtgtgccggctcctgctgtcccccggcagcgccatgctgaggtcacctgccaccttccaggtggtgaagaagaaacaccggacccgcatgttggagttcttcattgatgtggcccgggagtgcttcaacatcgggaacttcaactccatgatggccatcatctctggcatgaacctcagtcctgtggcaaggctgaagaaaacttggtccaaggtcaagacagccaagtttgatgtcttggagcatcacatggacccgtccagcaacttctgcaactaccgtacagccctgcagggggccacgcagaggtcccagatggccaacagcagccgtgaaaagatcgtcatccctgtgttcaacctcttcgttaaggacatctacttcctgccacaaaatccataccaaccacctgcccaacgggcacattaactttaagaaattctgggagatctccagacagatccatgagttcatgacatggacacaggtagagtgtcctttcgagaaggacaagaagattccagagttacctgctcacggcgccccatcctacagcgaggaagctctcttcgtcgccctcctttgaaagtgagggtcccgagaaccacatggaaaaagacagctggaagaccctcaggaccacccttctgaacagagcctgaggcggatgcagcccgcgacgccagaggaagcacgtgcactaactgggtttaaattttgactgatgtgggttgagaatgaggagcccctcactggttggggtccattttgtatataacttttatgagaaaaaaatggtaattatttcacgcatcaacctttggcacttacaaagttttttttgttgtattttaaataacagggcaaggccctgctttggggagggggaggggagagtatcatgggagatggtatccatgataacatcttattctaatgagatgtagagtattattttttactttttgattattaacatcttatgaaaaaaatattttaaaaaacccagccaaaaccaacgtgagccctgcctgctcggacgcctttccagccagtgtctctgacgtcggggttagtgccttaaagggtactgggggtctggtcttcctgctctgtggtttgggctgcggtgagtcccactccacctgggcgcctgccctcaggagcctgggctgcgaggctccataggagggctggtggctgggaggtcgcgtccgcacacttctggaagtgagcctttgagtacgggctgtccaaagtttacattttcattttcctttcagggatttgtggggtcagggaggggcagggggcacctggcagcatattttctgtgacaatgtgtccagcaaatcattcttcaactacattttagaaaggaggaaatctaaaataaggtaagggagggaagcatggagttgtcagttttctgggctgtgactgaaagacacactgagctgtgatgaagaaaaatacatggccgactccagggtggtgacatttagagctagtcttgaaacctatcatctacagaggggagggcagccaacagccctcttcccacctgggtaggcagcgccctaattggtattggaaacagaaaattcgccaggccatactgctggagcccattcagataaaactgcccaatactgagaggtgttttctacacccagctagaggagcacactccatttttccatggctgagattccggggggaaagcctgggccttactgaccatggcc

SEQ ID NO: 23428 - DNA, 825 bp, Homo sapiens
  SIMILAR (7)..(99): 391254mologous to Homo sapiens Amino acid sequence of salivary protein CON-2,accession number W50193,Smith-Waterman Score =64.
ttagcaccgagcagcagcgcaggagcgccagaagggcgggagcacacgggcccttccccacagccagcgcctccgcgggtcccacccctcgagggcggggccgaccgctctttccgggtttgcgagcggaagtggacgaatttgaatcctgtgggccgttgaatgtggctgctcgcggtcggcgtgccccgacgtacagcgggccgggaaaagtggcactgaggctctggaacttctgcccagctctccttggtgagtaaatggggaacgggaagacgcagaacgttccagagagagaagcaggaccgtggggtgggagagggtgtcaggaggccggacgtcgcagccggggcctcgcagtgcttttggggacgtctggtgctggggcccggcctggagactaagggaattcggggcactgggggcgtttgctggaccagcgctctcgacggttgcgcacgccagccagctctcagtgttgaggattcggaggcccttgaaggatttgttcaacaatgctgattcctgcacttcagatctcagattctgaatcagtaggtctggaggatggcattgaacagtctgcatatttaactgaaaggttagaaaatactgtgagttttcaaaacactgatttgatctttcatgattatgtagtgtgaacagtcccattatctgtttgcaaactggagacccaggaaagtcccgcagtgtagtttgaatgtctggagccaaacagctgatggtataggttccagtccggatctgaaggccctcctgcgtcaggtagaccccagtgtctcttgtttccttctttgtgttcat

SEQ ID NO: 23429 - DNA, 1389 bp, Homo sapiens
  SIMILAR (565)..(1386): 971254mologous to Homo sapiens KIAA1333 protein,accession number AB037754,Smith-Waterman Score=1408.
atgaatgaaagtaaacctggtgactcacagaaccttgcttgtgttttctgtcgaaaacatgatgactgtcctaataaatacggagaaaagaaaactaaggagaaatggaatctcactgtacattactactgtttgttgatgtcaagtggaatttggcagagaggcaaagaagaagaaggagtttatggttttctaatagaagatatcaggaaggaagtgaatagagcttctaaactggttcaagcaataaatgcgggagtgtttttctttaggtgtacaatatgcaataatagtgacatctttcagaaagagatgttgagaatgggaattcatattcctgaaaaagatgcttcctgggaattagaggaaaacgcttatcaagagcttctgcagcactatgagcgttgtgatgttcgaagatgtcgttgcaaagaagggcgagactataatgcacctgatagcaaatgggaaataaagcgctgtcagtgttgtggttccagtggcacacatttagcctgctcctcattacggtcatgggagcaaaattgggagtgtttggaatgtaggggtattatctacaattcagctctgaaagagaatctttactatgaagctggcaaaatgcttgccatttctttagttcacggtggtccttcacctggtttcttttctaaaaccttgtttaactgccttgtttatggaccagaaaatacccagccaattttagatgatgtttcagactttgatgtggcacagattataatcaggataaatactgcaacaactgtagctgacttaaagtcaataataaatgaatgctataactaccttgagttaattggatgtctcagacttataacgacattaagtgataaatatatgttagtaaaagacatacttggctaccatgtaattcagagagtccacacaccctttgaaagttttaagcagggtctgaaaacccttggtgttttggagaaaattcaggcttatccagaagcattttgtagcatcctgtgtcataaacctgagagtctttctgcaaaaatccttagtgagctttttacagtacacacattacctgatgtgaaagctttggggttttggaacagttacttacaggctgttgaagatggtaaatctacaacaacaatggaagacattcttatttttgcaactggttgcagttccattcctccagctggatttaaacccactccttcaattgagtgtctgcatgtggattttcctgttggaaacaagtgtaataactgtttagcaattcccatcaccaatacatataaagagtttcaagaaaatatggacttcaccataagaaacactctaagactagaaaaggaagaaagttctcattacattggacattaa

SEQ ID NO: 23430 - DNA, 1224 bp, Homo sapiens
  SIMILAR (272)..(940): 451254mologous to Homo sapiens Amino acid sequence of Smad3 interactor protein clone S3+1,accession number B07858,Smith- Waterman Score=401.
agcggaagtggacgaatttgaatcctgtgggccgttgaatgtggctgctcgcggtcggcgtgccccgacgtacagcgggccgggaaaagtggcactgaggctctggaacttctgcccagctctccttgtaaaatgaatgaaagtaaacctcggtgactcacagaaccttgcttgtgttttctgtcgaaaacatgatgactgtcctaataaatacggagaaaagaaaactaaggagaaatggaatctcactgtacattactactgtttgttgatgtcaagtggaatttggcagagaggcaaagaagaagaaggagtttatggctttctaatagaagatatcaggaaggaagtgaatagagcttctaaactgaaatgctgtgtttgcaagaaaaatggtgctttcattggatgtgttgcaccccgatgtaaacgaagttattcatttcccatgtggacttcagagagaatgtattttccagtttactggcaattttgcgtcattttgttgggaccatcgacctgttcaaataattacatctaataattatagagagtccttaccatggcaccatttgcttgggaatttatttgagcctattccaagttattaacatattacggagtccttgttgtaaggaacgcttggttttcataggagactgtttacaggtttcaagcattaatgcgggagtgtttttctttaggtgtacaatatgcaataatagtgacatctttcagaaacgagatgttgagaatgggaattcaatatccctgaaaaagatgcttcctgggaattagaggaaaacgcttttacaagagcttctgcagcactatgagccgttgtgatgttcgaagatgtccgttgccaaagaagggccgagacctataatgcaccctgatagcaaatgggaaataaagcgcctgtcagtgttgtggttcccagtggcacacatttagcctgctcctcattacggtcatgggagcaaaattgggagtgtttggaatgtaggggtattatctacaattcaggagagttccaaaaaagccaaaaaacatgtattacccaattctaataatgtggggattacagattgtttgttggaagagtcatcacctaaattacccagacagtcacctggatcccagagttaagatctactgaggcaaggctgcaattttagaagaaatgtatcaacactattaatagagttaggattccaaatt

SEQ ID NO: 23431 - DNA, 491 bp, Homo sapiens
  SIMILAR (86)..(490): 991254mologous to Homo sapiens Human secreted protein sequence encoded by gene 79 SEQ ID NO:202,accession number Y91529,Smith-Waterman Score=715.
  misc_feature (1)...(491): n = a,t,c or g
gagcgcggcggagccagacgctgaccacgttcctctcctcggtctcctccgcctccagctccgcgctgcccggcagccgggagccatgcgaccccagggccccgccgcctccccgcagcggctccgcggcctcctgctgctcctgctgctgcagctgcccgcgccgtcgagcgcctctgagatccccaaggggaagcaaaaggcgcagctccggcagagggaggtggtggacctgtataatggaatgtgcttacaagggccagcaggagtgcctggtcgagacgggagccctggggccaatggcattccgggtacacctgggatcccaggtcgggatggattcaaaggagaaaagggggaatgtctgagggaaagctttgaggagtcctggacacccaactacaagcagtgttcatggagttcattgaattatggcatagatcttgggaaaattgcggagtgtacatttacaaagatgcgttcanatagtg

SEQ ID NO: 23432 - DNA, 891 bp, Homo sapiens
  SIMILAR (652)..(825): 981254mologous to Homo sapiens Human PRO1755 (UNQ828) amino acid sequence SEQ ID NO:352,accession number Y99441,Smith-Waterman Score=318.
atggagagacttaaggtgtccagtcaaagttggaatcatgttgggcttgtgaaaaagatgaagccactgccagaaaagccacctgtggcagagaaggcagatgaggaatattttggcttctctcttatttctatcatccaatctttgattggctatgcccaactgaaggcctatgaaacaggagccttggaaatagcctgcagaggttggagcagagccagggaagctcaaagaatggatctgaaggcaaacagcaccaatacgtcccagaaggaggttactgaatttctcccttcactggctcatgttcacatgcacacaaatagccataaaatccaacagtgtggcatcttcacccacattcctaaacacctagattacaaggctgtttggattggtattaaatggttcagtggaagattggggcttggggtttcccatagaagggctaatattttgacagctggagaggaagcaagaacccgttctatgaaggaaaatcatcgaaaattatggagtattatctctagaaaaaacaccacaaagacatataatgtcatgaagttttatgatgcatgcacaaataattatgttattgacaatataatggaatgtgctcaccagggccagcaggagtgcctggtcgagacaggaagccctggggccaatggcattccgggtacacctgggatcccaggtcgggatggattcaaaggagaaaagggggaatgtctgagggaaagctttgaggagtcctggacacccaactacaagcagtgttcatggagttcattgaattatggcatagatcttgggaaaattgcgggcaggaattgttggcatatactggcaccagtgcccaacattgtttcactttattttggatcctaa

SEQ ID NO: 23433 - DNA, 2241 bp, Homo sapiens
  SIMILAR (843)..(1136): 901254mologous to Homo sapiens MAP kinase kinase 3b,accession number D87116,Smith-Waterman Score=474.
actcactatagggctcgagcggccgcccgggcaggtgtctgcccgcagccatgagcgtgctcggccccggtggagcccgcagtcctctagattagtctccaccgccgtccaggacccacttgcagcatggagtcgcccgcctcgagccagcccgccagcatgccccagtccaaaggaaaatccaagaggaagaaggatctacggatatcctgcatgtccaagccacccgcacccaaccccacacccccccggaacctggactcccggaccttcatcaccattggagacagaaactttgaggtggaggctgatgacttggtgaccatctcagaactgggccgtggagcctatggggtggtagagaaggtgcggcacgcccagagcggcaccatcatggccgtgaagcggatccgggccaccgtgaactcacaggagcagaagcggctgctcatggacctggacatcaacatgcgcacggtcgactgtttctacactgtcaccttctacggggcactattcagagagggagacgtgtggatctgcatggagctcatggacacatccttggacaagttctaccggaaggtgctggataaaaacatgacaattccagaggacatccttggggagattgctgtgtctatcgtgcgggccctggagcatctgcacagcaagctgtcggtgatccacagagatgtgaagccctccaatgtccttatcaacaaggagggccatgtgaagatgtgtgactttggcatcagtggctacttggtggactctgtggccaagacgatcaatgtccggatgcaaagtcaaacatgggcacgagagtctcaatctcagatctgaaccggaagggatgcgatgtcaagtcccacgtctggagcctgggcatcaccatgattgagatggccttcctgcggttcccttacgagtcctgggggaccccgttccagcagctgaagcaggtggtggagcacccgtccccccagctcccagccggccgtttctcccccgagtttgtggacttcactgctcagtgcctgaggaagaaccccgcagagcgtatgagctacctggagctgatggagcaccccttcttcaccttgcacaaaaccaaggagacggacattgcttgccttcgtgaaggagatcctgggagaagactcataggggctgggcctcggaccccactccggccctccagaagccccacagccccatctgcggggggaagttgcttcacccacaccataagctactgccatcctggcccgagggcatctgggaaggaaaccgagggggaatgctcccacctggctctgtggcgaagccattttgttccaagttgcaaaagaaagcagacaattgggggcttccaggcaagggcccttgttcgggccccaacagtgcctctccctgctgctcctaggacccgtcttcaagctgctgaaaatcctggcctgaagggggccttgattgcccctgggattgcttgttgcccctgcacaagaaggcttgcaagtgcctgggtgggattgggccaccgctttgcccagccttgattgcattccaagttgtatatttttttaatctctcgactgaatggactttgcacactttggcccagggtggccacacctctatcccggctttggtccggggttacaacaaagagggaataagttgtgtgaaataccccaaagactccccatgagggagatgcccatgagcccgcccaaggccttccccctggcaactggcaaaacagggcctctgcggagcacactggctcacccagtcctgccccgcccaccgttatcggtgtcattcaacctttcgtgtttttttctaatttatccctctgttgaattttttccttttgcctttatgggtttggccttgtttttccttgccatggtttggaagctgatcgccttctccccccaccccctagggtacccagcaggcagagccttgcccgtcgtgctcaggctggggtcccagtgggatggggcccaaagatctttttgctcaaaaaagtgcaggggggagccttcccagctcactctcccctgaggactggcttgacaggggctatgggtttgactttggtgttgtttttaaaaaaaagaaaatatatttttttgaaaaaacgactgcccatcccgggtcctttccctgatgggttggggcagttacctggttgctgttttaattaaaaaaaaaaaaaaaaaaagg

SEQ ID NO: 23434 - DNA, 269 bp, Homo sapiens
  SIMILAR (9)..(194): 931254mologous to Homo sapiens Human islet cell antigen 1851 cytoplasmic region,accession number W35302,Smith-Waterman Score= 282.
  misc_feature (1)...(269): n = a,t,c or g
cggnggcnacctacgtcctgatcgacatggttctcaacaagntggccaaaggtgctaaagagattgatatcgcagcgaccctggancacttgagggaccagagacccggcatggtccagacgaaggagcagtttgagttcgcgctgacagccgtggtgagcgaggtgaacgccatcctcaaggcccttccccagtgagcggcanacctcagtgaggccnccggacacaaggcacgtttggcatttctctttgagagagtttatcattgg

SEQ ID NO: 23435 - DNA, 699 bp, Homo sapiens
  SIMILAR (336)..(419): 391254mologous to Homo sapiens protein tyrosine phosphatase receptor pi,accession number U81561,Smith-Waterman Score=47.
atgggttctgcggtgtctttggcagcagggtctgcaggaacaggtgaatcagcattggctgacccaggatcccagtgcctgtggacgggattcacatggaaccacatctggaccctttacaagtctccagatgcactaccccagtactcagaggtggcagctgcacttcctcctggtgccaacaggaaggcgagcatgtttcgtgtgagcgggtcctgcatcagatgcacacgggatgctggttatattttgcaccagaaacgccaacctggtcgttcagtgaaaaagcaactggaaaggggaagcgatgacggccttagagtgcccaccctgagccaggcgattgtccctcaccaccacacccacccagatgcgggggtgtcgcgcaaacagcacaggtgcccgatgcacctgctcccgtgtgagctgggccagcacagcaggtcctacatggaggaccacctgaagaacaagaaccggctggagaaggagtgggaagcgctgtgcgcctaccaggcggagcccaacagctcgttcgtggcccagagggaggagaacgtgcccaagaaccgctccctggccgtgctgacctcccaaccaacaaggaaccagtgtcttcctttcctccagcacgggcctggggacatctgcaccccagtgagcatcagctctattgttctctgtcaccgagtgacttga

SEQ ID NO: 23436 - DNA, 3856 bp, Homo sapiens
  SIMILAR (13)..(2973): 981254mologous to Homo sapiens tyrosine phosphatase IA- 2beta,accession number U65065,Smith-Waterman Score=5047.
caggcggcggggatggggccgccgctcccgctgctgctgctgctactgctgctgctgccgccacgcgtcctgcctgccgccccttcgtccgtcccccgcggccggcagctcccggggcgtctgggctgcctgctcgaggagggcctctgcggagcgtccgaggcctgtgtgaacgatggagtgtttggaaggtgccagaaggttccggcaatggacttttaccgctacgaggtgtcgcccgtggccctgcagcgcctgcgcgtggcgttgcagaagctttccggcacaggtttcacgtggcaggatgactatactcagtatgtgatggaccaggaacttgcagacctcccgaaaacctacctgaggcgtcctgaagcatccagcccagccaggccctcaaaacacagcgttggcagcgagaggaggtacagtcgggagggcggtgctgccctggccaacgccctccgacgccacctgcccttcctggaggccctgtcccaggccccagcctcagacgtgctcgccaggacccatacggcgcaggacagaccccccgctgagggtgatgaccgcttctccgagagcatcctgacctatgtggcccacacgtctgcgctgacctaccctcccgggccccggacccagctccacgaggacctcctgccacggaccctcggccagctccagccagatgagctcagccctaaggtggacagtggtgtggacagacaccatctgatggcggccctcagtgcctatgctgcccagaggcccccagctccccccggggagggcagcctggagccacagtaccttctgcgtgcaccctcaagaatgcccaggcctttgctggcaccagccgccccccagaagtggccttcacctctgggagattccgaagacccctctagcacaggcgatggagcacggattcataccctcctgaaggacctgcagaggcagccggctgaggtgaggggcctgagtggcctggagctggacggcatggctgagctgatggctggcctgatgcaaggcgtggaccatggagtagctcgaggcagccctgggagagcggccctgggagagtctggagaacaggcggatggccccaaggccaccctccgtggagacagctttccagatgacggagtgcaggacgacgatgatagactttaccaagaggtccatcgtctgagtgccacactcgggggcctcctgcaggaccacgggtctcgactcttacctggagccctcccctttgcaaggcccctcgacatggagaggaagaagtccgagcaccctgagtcttccctgtcttcagaagaggagactgccggagtggagaacgtcaagagccagacgtattccaaagatctgctggggcagcagccgcattcggagcccggggccgctgcgtttggggagctccaaaaccagatgcctgggccctcgaaggaggagcagagccttccagcgggtgctcaggaggccctcagcgacggcctgcaattggaggtccagccttccgaggaagaggcgcggggctacatcgtgacagacagagaggttctcggaccagcagtgaccttcaaagtgagcgccaatgtccaaaacgtgaccactgaggatgtggagaaggccacagttgacaacaaagacaaactggaggaaacctctggactgaaaattcttcaaaccggagtcgggtcgaaaagcaaactcaagttcctgcctcctcaggcggagcaagaagactccaccaagttcatcgcgctcaccctggtctccctcgcctgcatcctgggcgtcctcctggcctctggcctcatctactgcctccgccatagctctcagcacaggctgaaggagaagctctcgggactagggggcgacccaggtgcagatgccactgccgcctaccaggagctgtgccgccagcgtatggccacgcggccaccagaccgacctgagggcccgcacacgtcacgcatcagcagcgtctcatcccagttcagcgacgggccgatccccagcccctccgcacgcagcagcgcctcatcctggtccgaggagcctgtgcagtccaacatggacatctccaccggccacatgatcctgtcctacatggaggaccacctgaagaacaagaaccggctggagaaggagtgggaagcgctgtgcgcctaccaggcggagcccaacagctcgttcgtggcccagagggaggagaacgtgcccaagaaccgctccctggccgtgctgacctatgaccactcccgggtcctgctgaaggcggagaacagccacagccactcagactacatcaacgctagccccatcatggatcacgacccgaggaaccccgcgtacatcgccacccagggaccgctgcccgccaccgtggctgacttttggcagatggtgtgggagagcggctgcgtggtgatcgtcatgctgacacccctcgcggagaacggcgtccggcagtgctaccactactggccggatgaaggctccaatctctaccacatctatgaggtgaacctggtctccgagcacatctggtgtgaggacttcctggtgaggagcttctatctgaagaacctgcagaccaacgagacgcgcaccgtgacgcagtttccactttcctgagttggtatgaccgaggagtcccttccttcctcaaggtccctcctggacttccgcagaaaagtaaacaagtgctacaggggccgttcttgtccaataattgttcattgcagtgacggtgcaggccggagcggcacctacgtcctgatcgacatggttctcaacaagatggccaaaggtgctaaagagattgatatcgcagcgaccctggagcacttgagggaccagagacccggcatggtccagacgaaggagcagtttgagttcgcgctgacagccgtggctgaggaggtgaacgccatcctcaaggcccttccccagtgagcggcagcctcaggggcctcgaggggagcccccaccccacggatgttgtcaggaatcatgatctgactttaattgtgtgtcttctattataactgcatagtaatagggcccttagctctcccgtagtcagcgcagtttagcagttaaaaggtattttttgtttaatcaaacaataataaagagagatttgtggaaaaatccagttacgggtggaggggaatcggttcatcaattttcacttgcttaaaaaaaatactttttcttaaagcacccgttcaccttcttggttgaagttgtgttaacaatgcagtagccagcacgttcgaggcggtttccaggaagagtgtgcttgtcatctgccactttcgggagggtggatccactgtgcaggagtggccggggaagctggcagcactcagtgaggccgcccggcacacaaggcacgtttggcatttctctttgagagagtttatcattgggagaagccgcggggacagaactgaacgtcctgcagcttcggggcaagtgagacaatcacagctcctcgctgcgtctccatcaacactgcgccgggtaccatggacggccccgtcagccacacctgtcagcccaagcagagtgattcaggggctccccgggggcagacacctgtgcaccccatgagtagtgcccacttgaggctggcactcccctgacctcacctttgcaaagttacagatgcaccccaacattgagatgtgtttttaatgttaaaatattgatttctacgttatgaaaacagatgcccccgtgaatgcttacctgtgagataaccacaaccaggaagaacaaatctgggcattgagcaagctatgagggtccccgggagcacacgaacccg

SEQ ID NO: 23437 - DNA, 4856 bp, Homo sapiens
  SIMILAR (58)..(1533): 991254mologous to Homo sapiens IAR/receptor-like protein- tyrosine phosphatase precursor,accession number AF007555,Smith- Waterman Score=2547.
gcctcccgccgcctcccgcgcggccatggactgagcgccgccggccaggccgcggggatggggccgccgctcccgctgctgctgctgctactgctgctgctgccgccacgcgtcctgcctgccgccccttcgtccgtcccccgcggccggcagctcccggggcgtctgggctgcctgctcgaggagggcctctgcggagcgtccgaggcctgtgtgaacgatggagtgtttggaaggtgccagaaggttccggcaatggacttttaccgctacgaggtgtcgcccgtggccctgcagcgcctgcgcgtggcgttgcagaagctttccggcacaggtttcacgtggcaggatgactatactcagtatgtgatggaccaggaacttgcagacctcccgaaaacctacctgaggcgtcctgaagcatccagcccagccaggccctcaaaacacagcgttggcagcgagaggaggtacagtcgggagggcggtgctgccctggccaacgccctccgacgccacctgcccttcctggaggccctgtcccaggccccagcctcagacgtgctcgccaggacccatacggcgcaggacagaccccccgctgagggtgatgaccgcttctccgagagcatcctgacctatgtggcccacacgtctgcgctgacctaccctcccgggtcccggacccagctccgcgaggacctcctgccgcggaccctcggccagctccagccagatgagctcagccctaaggtggacagtggtgtggacagacaccatctgatggcggccctcagtgcctatgctgcccagaggcccccagctccccccggggagggcagcctggagccacagtaccttctgcgtgcaccctcaagaatgcccaggcctttgctggcaccagccgccccccagaagtggccttcacctctgggagattccgaagacccctccagcacaggcgatggagcacggattcataccctcctgaaggacctgcagaggcagccggctgaggtgaggggcctgagtggcctggagctggacggcatggctgagctgatggctggcctgatgcaaggcgtggaccatggagtagctcgaggcagccctgggagagcggccctgggagagtctggagaacaggcggatggccccaaggccaccctccgtggagacagctttccagatgacggagtgcaggacgacgatgatagactttaccaagaggtccatcgtctgagtgccacactcgggggcctcctgcaggaccacgggtctcgactcttacctggagccctcccctttgcaaggcccctcgacatggagaggaagaagtccgagcaccctgagtcttccctgtcttcagaagaggagactgccggagtggagaacgtcaagagccagacgtattccaaagatctgctggggcagcagccgcattcggagcccggggccgctgcgtttggggagctccaaaaccagatgcctgggccctcgaaggaggagcagagccttccagcgggtcctcagcgcggccctcagcgacggcctgcaattggaggtccagccttccgaggaagaggcgcggggctacatcgtgacagacagagaccccctgcgccccgaggaaggaaggcggctggtggaggacgtcgcccgcctcctgcaggtgcccagcagcgcgttcgctgacgtggaggttctcggaccagcagtgaccttcaaagtgagcgccaatgtccaaaacgtgaccactgaggatgtggagaaggccacagttgacaacaaagacaaactggaggaaacctctggactgaaaattcttcaaaccggagtcgggtcgaaaagcaaactcaagttcctgcctcctcaggcggagcaagaagactccaccaagttcatcgcgctcaccctggtctccctcgcctgcatcctgggcgtcctcctggcctctggcctcatctactgcctccgccatagctctcagcacaggctgaaggagaagctctcgggactagggggcgacccaggtgcagatgccactgccgcctaccaggagctgtgccgccagcgtatggccacgcggccaccagaccgacctgagggcccgcacacgtcacgcatcagcagcgtctcatcccagttcagcgacgggccgatccccagcccctccgcacgcagcagcgcctcatcctggtccgaggagcctgtgcagtccaacatggacatctccaccggccacatgatcctgtcctacatggaggaccacctgaagaacaagaaccggctggagaaggagtgggaagcgctgtgcgcctaccaggcggagcccaacagctcgttcgtggcccagagggaggagaacgtgcccaagaaccgctccctggctgtgctgacctatgaccactcccgggtcctgctgaaggcggagaacagccacagccactcagactacatcaacgctagccccatcatggatcacgacccgaggaaccccgcgtacatcgccacccagggaccgctgcccgccaccgtggctgacttttggcagatggtgtgggagagcggctgcgtggtgatcgtcatgctgacacccctcgcggagaacggcgtccggcagtgctaccactactggccggatgaaggctccaatctctaccacatctatgaggtgaacctggtctccgagcacatctggtgtgaggacttcctggtgaggagcttctatctgaagaacctgcagaccaacgagacgcgcaccgtgacgcagttccacttcctgagttggtatgaccgaggagtcccttcctcctcaaggtccctcctggacttccgcagaaaagtaaacaaatgctacaggggccgttcttgtccgataattgttcattgcagtgacggtgcaggccggagcggcacctacgtcctgatccgacatggttctccacaagatggccactaggtgctaaagagattgatatcgcatcgaccctgcgagcacttgacggaccagagacccggcatggtccacacgaaggaccagtatgagttcgcgctgacagccgtggctacgagaggtgaacgcccatcctcaagcccctttccccagtgagcggcagcctcaggggcctcaggggagcccccaccccacggatgttgtcaggaatcatgatctgactttaattgtgtgtcttctattataactgcatagtaatagggcccttagctctcccgtagtcagcgcagtttagcagttaaaagtgtatttttgtttaatcaaacaataataaagagagatttgtgggaaaaatccagttacgggtgggagggggaatcggttcatcaattttcactttgcttaaaaaaaaatactttttctttaaaggcacccgttcaccttcttgggttggaagttgtgtttaacaatggcagtaggccaggcacgtttcgagggcggtttccaggggaggagtgtgcttgttcattctgccacttttcgggagggtgggatccactgttgcaggagtggccggggaagctggcagcactcagtgaggccgcccggcacacaaggcacgtttggcatttctctttgagagagtttatcattgggagaagccgcggggacagaactgaacgtcctgcagcttcggggcaagtgagacaatcacagctcctcgctgcgtctccatcaacactgcgccgggtaccatgggacggccccgtcaggccacacctgttcagcccaagcagagttgatttcagggggtttcccggggggcagacacctgtgcaccccatgagtagtgcccacttgaggctggcactcccctgacctcacctttgcaaagttacagatgcaccccaacattgagatgtgtttttaatgttaaaatattgatttctacgttatgaaaacagatgcccccgtgaatgcttacctgtgagataaccacaaccaggaagaacaaatctgggcattgagcaagctatgagggtcccccggggagcaacacgaacccctgccaggcccccgctggctccttccaggcacgtcccggacctgtgggggccccagagaaggggacattttcctcctggggagagaaggagatcagggcaactcggagagggctgcgagcatttccctcccgggagaggagatcagggcgacctgcacgcgctgcgtagagcctggaatgggaagtgagaaaccagccgaccggccctgcccctcttcccgggatcactttaatgaaccacgtgttttgacatcatgtaaacctaagcacgtagagatgattccggatttgacaaaataacatttgagtatccgattcgccatcaccccttacccccagaaattaggacaattcacttcattgacccaggatgatcaccatggaaaggcggccccagaggcaagctgtgtgggctgccagatttccttgtgtggggttcagcgtagaaaacggcacctcccatcccgccctttcccacagcattcctccatcttagatagatggtactctcccaaaaggcccctacccagagggaaacacggccctactgaagcggacagaatgatgcccaaaatattgccgtatgtctctacatggtattgtaatgaatatcctgcctttaatatagctatcatttgcttttcccaaaattacttctctctatctggaatttaattaatcgaaatgaatttatctgaatataggaagcatatgcctacttgtaatttgataaatccttatgtttgaagagaaacttccggtgtgagatatacaaatatattgaattgtgtcatagtaaacttctgatttcaccttcaaaaaaaaaaaaaaaaa

SEQ ID NO: 23438 - DNA, 1459 bp, Homo sapiens
  SIMILAR (400)..(717): 781254mologous to Mus musculus COP9 complex subunit 7b,accession number AF071317,Smith-Waterman Score=412.
atgcctctcacctcccaggatgtagatcagaaaacagctgcttgggtccccaccaaccgcgactctaccgtcccctctgatccctgggactgtaagcgccggccttggccactgctggtcctgcggcctctggcaccaggcaccaaggcgccgcctggcggtcagaatgggcgtggacggcagaagggaagtccgtgctctcgccggctgctccttgagccagcagggccactggggccagcttctgtgcggtgcattcgcacgaccacgccccagctattaataattaccactagcctgcgtttcccgagcctagaggcagctgttggctatgggagtaatacctgcattttcgctaatgcttgccagatggtttttataatgatcacatggccttatctacagtgtatcccctactccgtgttgctgaaagacctggagatgcggaatctccgggaactagaagaccttatcattgaggctgtctacactgacatcatccagggcaagctggaccagcgaaaccagctgctggaagtggatttctgcattggccgtgacatccgaaagaaggatatcaataatattgtcaagaccctgcatgaatggtgtgatggctgtgaagcaggctctactgggcatcgagcagcaagttctgagagccaaccagtacaaagagaaccacaaccgaaacttcagcagcaggtagaagcagaggatgtttacattttgcctcaaagtggtaacgactgtagaggacttagatttgtcagcagtcttattggaggagtgaggtgtgtgcatctgaaacacaaaggagatgcagtggtgtgggaggccatcgaagagggagaggcactgccaggcaagtacagattgaagggtggcagatcagtgtgggctgcagcagtcagggcagtttgtatggaccaggttaccaacatcaagaagacactcaaagccaccgcatcctcctcggctcaggagatggagcagcagctggctgaacgggagtgtccccctcacgctgagcagaggcagcccaccaagaagatgtccaaagtgaaaggtctggtctccagctcgccactagggccggctggggcagctggcactcaccaggcctgggtcaggtggggaggggacaccaagggcccatttcctcccctctctacctgcagtgagttccagacctgcccgtcccctcaccagcgcctccccaccctgttggtactgttccagaaaaactgttactccccctcacccactccctccttccccagttgttcccttcagactcaggggctccaccaatgccatcccaaaacagggtcagacactgcccagcttccctccaggaggttcttgtctctgtgtaaagggcttgtctccctcccagtttttcttttgctcccacgtcattttgtcaggctggttataaagccggagaaggctttaa

SEQ ID NO: 23439 - DNA, 396 bp, Homo sapiens; identical to SEQ ID NO: 16758
  SIMILAR (155)..(394): 861254mologous to Homo sapiens transcription initiation factor IA protein,accession number AJ272050,Smith-Waterman Score= 333.

SEQ ID NO: 23440 - DNA, 1017 bp, Homo sapiens
  SIMILAR (445)..(768): 951254mologous to Homo sapiens RRN3,accession number AF227156,Smith-Waterman Score=550.
atgcctgggatttcaaatatgcgtgcattagagaatgattttttcaattctcccccaagaaaaactgttcggtttggtggaactgtgacagaagtcttgctgaagtacaaaaagggtgaaacaaatgactttgagttgttgaagaaccagctgttagatccagacataaaggatgaccagatcatcaactggctgctagaattccgttcttctgtcatgtacttgacaaaagactttgagcaacttatcagtattatattggaatgttacgttcataacttactaaggattagtgtatattttccaaccttgaggcatgaaattctggagcttattattgaaaaactactcaagctggatgtgaatgcatcccggcagggtattgaagatgctgaagaaacagcaaatcaaacttgtggtgggacagattccacggaaggattgtttaatatgggattcgcagaggcatttttggaacatctttggaaaaacttgcaggatccaagtaatcctgccatcatcaggcaggctgctggaaattatattggaagctttttggcaagagctaaatttatttctcttattactgtaaaaccatgcctagatcttttggttaactggctgcacatataccttaataaccaggattcgggaacaaaggcattctgcgatgttgctctccatggaccattttactcagcctgccaagctgtgttctacacctttgtttttagacacaagcagcttttgagcggaaacctgaaagaagtctccctcatgacagagcatctggctggtgacgggaaaaggtgctccacagagcaccaccccaacatcacacgggcatctgctgacccacagctgactgcagatgaggaagctcagcctagggagttgagttggcagatgggcactgtgtccagccttgggaaaggacatcgcagactttgcatcctaagaactcataaccacaacggcaagaaactccacaaggacatccctgcacccagtgcctag

SEQ ID NO: 23441 - DNA, 469 bp, Homo sapiens
  SIMILAR (128)..(208): 731254mologous to Homo sapiens transcription initiation factor IA protein,accession number AJ272050,Smith-Waterman Score= 108.
  misc_feature (1)...(469): n = a,t,c or g
cgcaattgacatgtgaaagttagtgttccttttataatttcatctgatgttaaagtacggttaaaagtcttgctgttgatactaaacaggaaacaaaagcataacttaattctttccccttcttgttaagggtgaaacaaatgactttgagttgttgaagaaccagctgttagatccagacataaaggtaattaattttgtgtttgatcattagcaaaattattgccactttatacagacatagtttgctctttgggtcccattctgttctgcagaacttgctctctccatggtcctcccttactttaatctggtggttctcaaccaagggacagttttaccccctatgaagacatttggtgatggctgcagatattttttgtcacaactggggaggaaaagggttgctactgggcatctagtgggntgaatgacagagatgctgctaaacatctcacagtgcacaggg

SEQ ID NO: 23442 - DNA, 750 bp, Homo sapiens
  SIMILAR (157)..(384): 981254mologous to Bacteriophage S13 D gene,accession number M14428,Smith-Waterman Score=393.
atggggccctatcctcaggtgttggctggaacaaacaaccctcatccctcccgtgggagccccctttggacactctatgaccctggaccctcgggggacctgaacttgatgcgatgggaggctgtgcaggctcgcggcggcgcttttcggattccgaggctcattcaggcttctgccgttttggatttaaccgaagatgatttcgattttctgacgagtaacaaagtttggattgctactgaccgctctcgtgctcgtcgctgcgttgaggcttgcgtttatggtacgctggactttgtaggataccctcgctttcctgctcctgttgagtttattgctgccgtcattgcttattatgttcatcccgtcaacattcaaacggcggcaggaaatgggatgcttttttccttgggtgacaacggcaacccatccaccctggtgttgactgactttaacaaggttcacttcacagacattgagggcagaaaaaggaaatggcctaaaaaggcacccctcacttacaagtccctggttaatgaaatactcggcaaagtaaactacgaccaagggaacaatgtaccacagcagaccctggaaaaggcagaagatataagcggggggcctggaggtgagcaagccccacagggacataccccagccatcatccgaaccttgaacactgtccacctttcccgaagggagaggctggagctggagcctgcaggggaacagagagagaagggcagatga

SEQ ID NO: 23443 - DNA, 495 bp, Homo sapiens
  SIMILAR (352)..(411): 951254mologous to Homo sapiens transcription initiation factor IA protein,accession number AJ272050,Smith-Waterman Score= 97.
atgtggggtgtttgcatcactgagtatcacacagccttttcactcatggttagagacggagcagaaaggtggacagacaccccagcacaaagccgagtgaagaactctgaggaaggatgcgtgcttgggaatgatgcctcgaccctggtgcctgaagccgtgcctgggacgcgaccactcctagcgatactcggtgatggtcgctcaataggagccattccgacacgcttgcgaaccaatcagcaagtcgtgggtcccccaaagtgccgttccatggcgcaggtgcatcctattatgccgactttagtgaagccagctgtgaggccgcgctggcaaatggcatacacagcccgagtgatcattaaggaaggcgatgtagatgtttcagattctgatgatgaagatgatagttgcgctggcacgcgcaacttccgggacagaggctgtggctggaaggagctgggcatccggcctgaggcgcagcggtcgcgttag

SEQ ID NO: 23444 - DNA, 627 bp, Homo sapiens
  SIMILAR (41)..(223): 871254mologous to Homo sapiens transcription initiation factor IA protein,accession number AJ272050,Smith-Waterman Score= 283.
tttcatgaacttaatagcttgttaatcttggttccacaggatttcaaatatgcgtgcattagagaatgattttttcaattctcccccaagaaaaactgttcggtttggtggaactgtgacagaagtcttgctgaagtacaaaaagggtgaaacaaatgactttgagttgttgaagaaccagctgttagatccagacataaaggtaattaattttgtgtttgatcattagcaaaattattgccactttatacagacatagtttgctctttgggtcccattctgttctgcagaacttgctctctccatggtcctcccttactttaatctggtggttctcaaccagggacagttttaccccctagaagacatttggtgatggctgcagatatttttgtcacaactgggaggaaagggtgctactggcatctagtgggtgaatgacagagatgctgctaaacatctcacagtgcacagggcagcctcccataaccaagagtgatccagccccaaatgacaacagtgttgaggctgggaaaccctgctctaatgcttcctttctattagattactacctctttcctccatgctgcatgcaactcttttgtctctttaaagctaaaacaaacc

SEQ ID NO: 23445 - DNA, 3169 bp, Homo sapiens
  SIMILAR (1)..(252): 951254mologous to Homo sapiens RRN3,accession number AF227156,Smith-Waterman Score=403.
atggcggcaccgctgcttcacacgcgtttgccgggagatgcggccgcttcgccctctgcagtcaagatgctgggcgcgtcgaggactgggatttcaaatatgcgtgcattagagaatgattttttcaattctcccccaagaaaaactgttcagtttggtggaactgtgacagaagtcttgctgaagtacaaaacgggtgaaacaaatgactttgagttgttgaagaaccagctgttagatccagacataaaggtggtgtgccccgccatgccgatgatcctgagggaggggagggccattgtgggcgagtgtgcctttcatccccttcgtggctttcagttgtgctcaaaccagagtggcctcagcccgaaggttgctaagctgcctgcggtgggtcggcccgtggcctgccggcccacatacagccccagcctctgccacaacccccaacgcccagcgcagcttctggctcactcatctgctttgcaggacaccgtggtttctcatgccaatactggtggaaaaatttccatttgttcgaaaatcagagagaacactggaatgttacgttcataacttactaaggattagtgtatattttccaaccttgaggcatgaaattctggagcttattattgaaaaactactcaagttggatgtgaatgcatcccggcagggtattgaagatgctgaagaaacagcaaatcaaacttgtggtgggacagattccacggaaggattgtgtaatatggttagcagtttattaatgaaagtggagatgaagtttatcataatcaaagggtggaaacagctagtgctgctcatctttggattcgcagaggcatttttggaacctctttggaaaaaattgcaggatccaagtaatcctgccatcatcaggcaggctgctggaaattatattggaagctttttggcaagagctaaatttattcctcttattactgtaaaatcatgcctagatcttttggttaactggctgcacatataccttaataaccaggattcgggaacaaaggcattctgcgatgttgctctccatggaccattttactcagcctgccaagctgtgttctacacctttgtttttagacacaagcagcttttgagcggaaacctgaaagaaggcgtctggttcaaggtgtcctctcttctgagtctcagtgatagtaaaggattaggaaaaggcataaagagaccaataagcaacggcgaacagaggctcgtggtaacgcgtacagagatggtacatccctgtcctctcatcaaagtgattcctctcccttttgccaaacttccacagaagccaaataaacagtgtagacactccgtcactcgctacggccacggcggccactcggatcacactccgtcactcactgtggccacagtggccactcagatcacaccccgtcactcgggccacggcagccactgtgatcgcaacctgtcacttgctacagccacagcagccactctgatcacaccccatcacttgctatggccacgatggccccttggatcacactctgtcacttggtgtggccacggtggccactcggatcacactccatcacccactacggccacagcagtcactcggatcacatcccgtcacccactacggccacagcagtcactcggatcacatcccgtcactcactacagccatggcagccactctgattgcattcccgtcactcgctatgcccacggcggccactcagatcacactccatcacttgctatggccacggcagccactcagatggcactctgtcactcactatggccacggcagccacttggatacttggtcaataaaataagaagaaagcgttgtacggatggggtatcgccaagcggtaaggcaccggtttttgataccggcattccctggttcgaatccaggtaccccagccatcttcttcgagtaagcggttcaccgcccggttattggggtatcgccaagcgccaccaaattctgaatgtatcgaatatgttcggcaaattcaaaaccaatttgttggggtatcgccaagcggtaaggcaccggattctgattccggcattccgaggttcgaatcctcgtaccccagccaatttattcaagacgcttaccttgatttcaaatatgcgtgcattagagaatgattttttcaattctcccccaagaaaaactgttcagtttggtggaactgtgacagaagtcttgctgaagtacaaaacggcgattgaaaaacggctggaaaaactggcggttgatccacatcgcgaccgtgcgcagatgctgaaagtcgaaaacgtccagcaggcgtggcagcaatggatcaacaaactgccgcccgcacgtcgtgaggatgaagacgtgaaagagatccgttggatgatagaagagttgcgcgttagttacttcgctcaacaacttggcaagaactctcgggcagaatccatgctgtggtccttccataaagcggctatagaagcggcacgcaccaatatcattcaggcgcaaacccgcgtcgaagcggcacaagccactgaacggcgcattgccgcagatatcgatgacagcgaactgaaagccccgcgtgacggacgcgtgcagtatcgggttgccaagccaggcgaagtgctggcggcaggcggtcgggtgctgaatatggtcgatctcagcgacgtctatatgactttcttcctgccaaccgaacaggcgggcacgctgaaactgggcggtgaagcccggctgatcctcgatgccgcgccagatctgcgtattcctgcaaccatcagttttgtcgccagtgtcgcccagttcacgccaaaaaccgtcgaaaccagcgatgaacggctgaaactgatgttccgcgtcaaagcgcgtatcccaccggaattactccagcagcatctggaatatgtcaaaaccggtttgccgggcgtagcgtggtcattcctgtattccatcaaccagacaatctgcttgcggttggatagcattgaagccaaattgcaagccctggaggctacttgtaaatccttagaagaaaagctggatctggtcacgaacaagcagcacagccccatccaggttcccatggttgccggctcccctctcaggacaacccagatgtgcaacaaagtgcgatggtaa

SEQ ID NO: 23446 - DNA, 1276 bp, Homo sapiens
  SIMILAR (575)..(886): 891254mologous to Homo sapiens codes for a 184 aminoacid peptide (BCM),accession number Z14954,Smith-Waterman Score=473.
atggaagtggtcaacatgctggctctgatgtcagccatgaccagacttcggactcccatcgcctatacgaaatatggttccttttgtggcttgggaggccatggccagccctgcgatgccattgactggtgctgccatggccacgactgttgttacactcgagctgaggaggccggctgcagccccaagacagagcgctactcctggcagtgcgtcaatcagagcgtcctgtgcggtgacaacggcaaaccatcccaccctggtgttgactgactttaacaaggttcagttcacagagattgagggcagaaaaaggaaacggcctaaaaaggcccataaatatttaccaagtagatatcatgtgtcagacactgggaacataacagagaacaaaacaaaagttctctttcttcgtggaatttacattaaaacttcttatttctctgtatgttctcagcatctaactgagaaggtgctgagaacatacagagaaatggctgggcagtgctcccaaaatgaatattttgacagtttgttgcatgcttgcataccttgtcaacttcgatgttcttctaatactcctcctctaacatgtcagcgttattgtaatgcaagatcaggtctcctgggcatggctaacattgacctggaaaagagcaggactggtgatgaaattattcttccgagaggcctcgagtacacggtggaagaatgcacctgtgaagactgcatcaagagcaaaccgaaggtcgactctgaccattgctttccactcccagctatggaggaaggcgcaaccattcttgtcaccacgaaaacgaatgactattgcaagagcctgccagctgctttgagtgctacggagatagagaaatcaatttctgctagcctcagcaccgctctccacaccgggtccggcgacttggagctgcgccgcggtttacgttccgggtcggcgggcggggcctcgtcggcggccaggctctacttccggggcggggcggccggggcggggctcctgtctcccggcctgtctggagctcggcagccgcagaagcggcagcggcggcggcgcggcgcaggcaccggcccggggagaggcaccatgagcgcccatctggggaccgtcacttcgtccttcttcttcccagtccaaacttcttcctctcaccatcgagggggtggtgttgatggggatgctggaagtgagagggagaaaatggaaattaaagcaagtaatgaatgtatagtgcgtttctcaggacctggaacatag

SEQ ID NO: 23447 - DNA, 1260 bp, Homo sapiens
  SIMILAR (263)..(670): 701254mologous to Homo sapiens transcription initiation factor IA protein,accession number AJ272050,Smith-Waterman Score= 428.
atggctcctaagtcaggatgttatgtcctgaaaataggtgacaacggcaaaccatccaccctggtgttgactgactttaacaaggttcagttcacagagattgagggcagaaaaaggaaacggcctaaaaaggaggctgtggctggaaggagctgggcatccggcctgaggcgcagcggtcgcgttagttcggcccaatggcggcaccgctgcttcacacgttgtttgtcgggagatgcggccgcttcgtcctctgcagtcaagacgctgttcgcgtcgtaggactgggatttcaaatatgcgtgcattagagaatgattttttcaattctcccccaagaaaaactgttcggtttggtggaactgtgacagaagtcttgctgaagtacaaaaagggtgaaacaaatgactttgagttgttgaagaaccagctgttagatccagacataaaggatgacccagatcatcaactgggctgctagaattccgttcttctgtcatgtacttgaccaaaagactttgagccaacttatcagtattatattgagattgcctttggttgaatagaagtcaaaacagtagtggaagagtatttggcttttcttggtaatcttgtatcagcatagactgttttcctcagaccgtgtctcagcatgattgcttccccattttgtgcctccccgagtgatcattaaggaaggcgatgtagatgtttcagattctgatgatgaagatgataatcttcctgcaaattttgacacatatcacagagccttgcaaataatagcaagatatgtaccatcatgagtatacttttccttattttgaatgtttaattctcaagaaaattgtaatcaattagtaaaaattataaaatgttaatagtattaaagcttgagtcttacattgcattttttttttttgtatccacttgaggaaacattacattctacaaaaagtggcatttccattttctatttattctctttaattgtttttcaaagttcgtatgcagattctcccccaattttgtatggtggttggaattttgtttttatcttcaacagatatgctatccaaaatttttcagtgagaaacccctgggtgtgtttgtgtcatgccatatgaataaaaattgcacttctaagaaaagcttttcaggtttgtgggtttcttttggaggggtggatttctagttccctctgtctgttgattatttgttaacttaaaaaaatccaacttgattattttttcttctttt

SEQ ID NO: 23448 - DNA, 455 bp, Homo sapiens
  SIMILAR (191)..(448): 491254mologous to Homo sapiens gonadotropin inducible transcription repressor-4,accession number AB021644,Smith-Waterman Score=228.
  misc_feature (1)...(455): n = a,t,c or g
cttgtgcggnggannnagttctggctgctccagccccaggaaggacccaggacacccggaagccggaaatggacttagtggcctttgaggatgtggctgtgaacttcacgcaggaggagtgggctttgctgagtccttcccagaagaatctctacagagatgtgacgctggaaaccttcaggaacctggcctcggaatccaatggaaagaccaggacattgagaatctgtaccaaaacctggggattaagctaagaagtctggtggagagactctgtggacgtaaagaagggaatgaacacagagaaactttcagccagattcctgattgtcacctgaacaagaaaagtcaaactggagtgaaaccatgcaaatgcagcgtgtgtgggaaagtcttcctccgtcattcattcctggacaggcacatgagagctcatgctggacacaaacgatctg

SEQ ID NO: 23449 - DNA, 3707 bp, Homo sapiens; identical to SEQ ID NO: 13815
  SIMILAR (1501)..(1608): 911254mologous to Escherichia coli K12 putative reductase,accession number AE000288,Smith-Waterman Score=172.

SEQ ID NO: 23450 - DNA, 1975 bp, Homo sapiens
  SIMILAR (751)..(1629): 481254mologous to Homo sapiens gonadotropin inducible transcription repressor-4,accession number AB021644,Smith-Waterman Score=686.
atggtgaccgacaggaaggccgcagctgggacccacggcgaggctcgaccgtgctgggggtcgggctcgcgtgtacacacttaccggggtgcaggtgagcgcgcaatgcgcgtgcacagaccaatgccccgagaggacagtgagcgcgtgcgcgaggcagatggtggcaagcacgagcagcgcagcttcggggatctgcacccaactgctgccccagccccagcagccagcggctgcggcacccaaccaggccgggtaaagcagcccggcgaatggcagcaccgtgaggcgccgcaacagcgccaaccgccggtacggccacacggcagccaccagctcgtcaccgttcgctatgagcgccggcccggcggcaaggagcgcgcgcggctgcgcccgggcttgggctgcccgtcaggccggaccccgcaaggccgggccccgcagggcaccgcgttgcccaccgccgccgctgccgccatctttcctagcgccgcgctcacttccgggcagaggaacgcctcacttccgaagttttacttccggggcgggacctggggcaccagccagtcagaggcgctgtgcggcaaactgtccaatcagttcctcggggagcccctggtgccccggatacggctgattttgtcgtgtgggacctgttctggctgctccagccccaggaaggacccaggacacccggaagccggaaatggaccgtccagggacttcttccagctgccctcggaagaacgggactcagtggcctttgaggatgtggctgtgaacttcacccaggaggagtgggctttgctgagtccttcccagaagaatctctacagagatgtgacgctggaaaccttcaggaacctggcctcggtcggaatccaatggaaagaccaggacattgagaatctgtaccaaaacctggggattaagctaagaagtctggtggagagactctgtggacgtaaagaagggaatgaacacagagaaactttcagccagattcctgattgtcacctgaacaagaaaagtcaaactggagtgaaaccatgcaaatgcagcgtgtgtgggaaagtcttcctccgtcattcattcctggacaggcacatgagagctcatgctggacacaaacgatctgagtgtggtggggaatggagagagacgccccgtaaacagaaacaacatgggaaagcctccatttcccccagtagtggtgcacggcgcacagtaacaccaacttcgatgagaccttatgaaatccaaggtgtgcgggaaagccctttatttcttcccatttattttcaaatccatcaaagaactcccactgaaaaaaggtcctataaatgtagggaaatagtgagagccttcacagtttccagtttctttcgaaaacatggaaaaatgcatactggagaaaaacgctatgaatgtaaatactgtggaaaacctatcgattatcccagtttatttcaaattcatgttagaactcacactggagaaaaaccttacaaatgtaaacaatttggtaaagccttcatttccgcaggttaccttcggacacatgaaatcagatctcacgcgctggagaaatcccaccaatgtcaggaatgtgggaaaaaactcagttggttccagttcccttcacagacatgaaagaactcatagtggaggaaaactctacgaatgtcaaaaatgtgccaaagtctttagatgtcccacgtcccttcaagcacatgaaagagctcacactggagaaagaccttatgaatgtaataaatgtggtaaaaccttcaattatcccagttgttttcgaagacataaaaaaactcatagtggagaaaagccatatgaatgtacaaggtgtggtaaagcctttgggtggtgcagttccctccgaagacatgaaatgactcacactggagaaaaaccctttgattgtaaacagtgggtaaagtctttacttttcaaataaaat

SEQ ID NO: 23451 - DNA, 424 bp, Homo sapiens
  SIMILAR (73)..(123): 941254mologous to Human endogenous retrovirus tripartite fusion transcript PLA2L,accession number Z14310,Smith-Waterman Score=87.
  misc_feature (1)...(424): n = a,t,c or g
aggaattcnnnnnanacctcgnnnnnnnnnnnnnnnnnnnnnnnnnnnnnnnnnnnnnnnnnnnnnnnnnnntttggtgccgtgactcggatcgggggacctcccttgggagatcaatcccctgtcctcctgctctttgctccgtgagaaagatccacctacgacctcaggtcctcagaccaaccagcccaagaaacatctcaccaatttcaaatccggaacttgctacacatgccggaaatctggccactgggccaaggaacgcccgcagcccgggattcctcctaagccgcgtcccatctgtgtgggaccccactgaaaatcggactgttcaactcacctggcagccactcccagagctcctggaactctggcccaaggttctctgactgactccttcttggcttactggctgaagactgac

SEQ ID NO: 23452 - DNA, 522 bp, Homo sapiens; identical to SEQ ID NO: 638
  SIMILAR (337)..(468): 461254mologous to Human T-cell lymphotropic virus type 1 Gag,accession number S74562,Smith-Waterman Score=136.

SEQ ID NO: 23453 - DNA, 663 bp, Homo sapiens; identical to SEQ ID NO: 1392
  SIMILAR (70)..(192): 901254mologous to Homo sapiens calbindin D28K,accession number S46006,Smith-Waterman Score=204.

SEQ ID NO: 23454 - DNA, 516 bp, Homo sapiens; identical to SEQ ID NO: 641
  SIMILAR (514)..(449): 861254mologous to Homo sapiens Human secreted protein, SEQ ID NO: 5576,accession number G01495,Smith-Waterman Score=106.

SEQ ID NO: 23455 - DNA, 397 bp, Homo sapiens; identical to SEQ ID NO: 10178
  SIMILAR (212)..(343): 461254mologous to Human T-cell lymphotropic virus type 1 Gag,accession number S74562,Smith-Waterman Score=136.

SEQ ID NO: 23456 - DNA, 473 bp, Homo sapiens; identical to SEQ ID NO: 16183
  SIMILAR (11)..(151): 281254mologous to Bovine leukemia virus gag,accession number D00647,Smith-Waterman Score=37.

SEQ ID NO: 23457 - DNA, 1563 bp, Homo sapiens
  SIMILAR (1176)..(1373): 961254mologous to Homo sapiens platelet glycoprotein VI- 3,accession number AB043821,Smith-Waterman Score=355.
atggggtttcaccatgttggccaggctggtctggaactcccgaccccagggcccatcttctggctgctggtcaagagccccgagctggccgcccagcccagcacatacctggccgtggcggaggaactggcggatgtttccggaaagtacttcgatggactcaaacagaaggccccggcccccgaggctgaggatgaggaggtggcccggaggctttgggctgaaagtgcccgcctgataacctctggagcagatttgaaagccaggatggcgcctccagaccgaggacagctgtccgccatgcccgcagcttcctggcactacctgagccgggagacccaggactggcggccgccatgcccgcaccctcttgtcttgccctctcgctggctggtggtgatggagccggctgccatggtgagcggccctgtggagaagccagggaggaatggagacaatctggagaaacagaatcacaccaacaaccacgtgcggctgtgtctggggcgtgtgccagcgcagagtggaccgctccccaagccctccctccaggctctgcccagctccctggtgcccctggagaagccagtgaccctccggtgccagggacctccgggcgtggacctgtaccgcctggagaagctgagttccagcaggtaccaggatcaggcagtcctcttcatcccggccatgaagagaagtctggctggacgctaccgctgctcctaccagaacggaagcctctggtccctgcccagcgaccagctggagctcgttgccacgggagtttttgccaaaccctcgctctcagcccagcccggcccggcggtgtcgtcaggaggggacgtaaccctacagtgtcagactcggtatggctttgaccaatttgctctgtacaaggaaggggaccctgcgccctacaagaatcccgagagatggtacagggctagttttcccatcatcacggtgaccgccgcccacagcggaacctaccgatgctacagcttctccagcagggacccatacctgtggtcagcccccagcgaccccctggagcttgtggtcacaggaacctctgtgacccccagccggttaccaacagaaccaccttccccggtagcagagacttctaggagtatcaccgccagtccaaaggagtcagactctccagctggtcctgcccgccagtactacaccaagggcaacctggtccggatatgcctcggggctgtgatcctaataatcctggcggggtttctggcagaggactggcacagccggaggaagcgcctgcggcacaggggcagggctgtgcagaggccgcttccgcccctcccgcccctcccgctgacccggaaatcaaacgggggagcttgctacaagtgccagaaatctgaccaccaggccaaggaatgcctgcagcccaggattcctcctaagccgtgtcccatctgtgcgggaccccactggaaatcggactgttcaactcacctggcagccactcccagagcccctggaactctggcccaaggctctctgactccttctcggcttagcggctga

SEQ ID NO: 23458 - DNA, 462 bp, Homo sapiens
  SIMILAR (462)..(382): 811254mologous to Homo sapiens Human secreted protein, SEQ ID NO: 5576,accession number G01495,Smith-Waterman Score=99.
ctgggcaccaaggagcttcatcaagaaaagagccagaaaaacatctgagacccactgattgcagaacacgcctaaaaacgcatggtgggaagtgaacacaggaagtagctttataccacaaggaagagtactctgaagctggccctcttcttcagggacctttgaaggaaggataagaggccatggaaccgtggaagggagtcccacttggaagggtaaatacagaacaaatagccccattttctgaggcagaggggccaagagagattcattagggttcgaggaaagtaagaaaggctgcccaaggcttgaatgaaggaccgagggagctgttctggcagccactcccagagcccctggaactctggcccaaggctctctgactgactccttcccagatcttcttggcttagcggctgaagactgacacagcccgatcgcctcggaagccccatagaccat

SEQ ID NO: 23459 - DNA, 1764 bp, Homo sapiens; identical to SEQ ID NO: 1396
  SIMILAR (727)..(834): 581254mologous to Homo sapiens Human secreted protein fragment encoded from gene 42,accession number Y07785,Smith- Waterman Score=97.

SEQ ID NO: 23460 - DNA, 248 bp, Homo sapiens
  SIMILAR (248)..(132): 941254mologous to Homo sapiens Human secreted protein, SEQ ID NO: 5576,accession number G01495,Smith-Waterman Score=198.
cttagggcaaaggtgaggctgaagttgcctggaggtatgcgatgaacaaggaccagagaaaagcaaggcagcgagccctccggggagtcagttctgtgactgaagacactctcaacatttgcagactttgctggcagccactcccagagcccctggaactctggcccaaggctctctgactgactccttctcggcttagcggctgaagactgttgctgcccgatcgcctcggaagccccgtagaccat

SEQ ID NO: 23461 - DNA, 390 bp, Homo sapiens
ttaatataccaagcccctcaaagagccaaggttggtggtaagattgatgccgttgccggaggaacagggtccagctgcttgctctcgtggtccaatgatgagatacaggtgaatatccctcaacctctttctcctttcaatcttggcgccacacttcagtctctcccttatcttaatttcaattcctttcattttcaagtgtattgtcgcagagtaagttcggagataccctcggagattcactatgcggtgcgggtttcgatgcaggatatattttcggattagcgtgggtatatttatagccgcgggtaaaatgattattattctaattgcttggaacacgctttgcttttgctcatttactacatttctttccttctctgtcaccat

SEQ ID NO: 23462 - DNA, 324 bp, Homo sapiens
  SIMILAR (40)..(162): 921254mologous to Homo sapiens calbindin D28K,accession number S46006,Smith-Waterman Score=206.
tgtggcgcatgaaatttggtgccgtgactctgatcgggggacctcccttgggagatcaatcccccgtcctcctgctctttgctccgtgagaaagatccacctatgacctcaggtcctcagactgaccagcccaagaaacatctcaccaatttcaaatccggaccccactggaaatcggactgttcaactcacctggcagccactcccagagcccctggaactcttgcccaaggctctctgactgactccttcttggcttaacggctgaagactgacgctgcccgattgcctcggaagccccgtagaccatcacagatgccgagc

SEQ ID NO: 23463 - DNA, 495 bp, Homo sapiens
  SIMILAR (346)..(236): 891254mologous to Homo sapiens Human secreted protein, SEQ ID NO: 5576,accession number G01495,Smith-Waterman Score=181.
ttattccagggacagagtttctgcacacttggccttctggatctcagccacaaagaggaggtaaaaagttcttcgctcataaacatttgccacaaagcctttcaatttcaaatctggtaagcggcctctttttactcttctccaacctccctcactatccctcaaccactttctcctttcaatcttggcgtcacacttcaatctctcccttctcttaatttcaattcctttcattttctggcagccactcccagagcccctggaactctggcccaaggctctctgactgagtccttctcggcttagcagctgaagattgacgctgcccgatcgcctcggaagcccctttgcaccaaaaggaacatgtgctgtttgttgagctccatagagctcaacagtgtacacactgttaacactgacgttatagattagagggagatctgcccattgagactctctcaaagaagcaaaaggcttctttaaagaagaggtcat

SEQ ID NO: 23464 - DNA, 890 bp, Homo sapiens
  SIMILAR (148)..(177): 901254mologous to Homo sapiens calbindin D28K,accession number S46006,Smith-Waterman Score=45.
  misc_feature (1)...(890): n = a,t,c or g
ttgnnnnnnnnnnnnnnnnnnnnnnnnnnnnnnnnnnnnnnnnnnnnnnnnnnnnnnnnnnnnnnnnnnnnnnnnnnnnnnnnnnnnnnnnnnnnnnnnnnnnnnnnnnnnnnnnnnnnnnnnnnnnnnnnnnnnnnnnnntgggttatgaaatttggtgccgtgactcggatcaggggaccttcccttgggagatcaatcccccgtcctcctgctctttgctccgtgagaaagatccacctacgacctcaggtcctcagacggaccagaccaagaaacatctcaccaatttcaaatctggtaagcggcctctttttactctcttctccaccctccctcactatccctcaacctctttctcctttcaatcttggcgccacacttcaatctctcccttctcttaatttcaattcctttcattttctggtagagacaaaggagacacgttttatccgtggagccaaaattccggcgcctgtcacagactagggaaggcagcctttccttggtgtttaatcattgcagggacacctctctgattattcagccaggcttcagaggtgtcagaccacgcagggacgcctgacttggtccttcacccttagtggcaagtcccgcttttctgggggaaggggcaagtaccccaaccccttctctccttgtctctaccccttccctgcttttccggggacagggagcttgctacaagtgccagaaatctatctgaccaccaggccaaggaatgcctgcagcccaggattcctcctaagccgtgtcccatctttgcgggaccccactggaaatcggactgttcaactcacctggcagacactcccagagcccctggaactctggcccaaggctttctgaccgactccttctcggcttag

SEQ ID NO: 23465 - DNA, 677 bp, Homo sapiens
  SIMILAR (525)..(677): 921254mologous to Homo sapiens ribosomal protein L5,accession number U14966,Smith-Waterman Score=249.
aatttttggtagagatgaggtctcattctgtcatctaggctggggtccagtgagctgtgattgtgccactgcagccttgacctcctggactcacgtgtagtcctgtagctgggactacaggtgcatgccaccattaataattgccacctggctaattagtttttttatggagacaggtctcactgtgttgccttagctggtctcaaactcctgggctgaagtgatcctcccacttcagactcccaaagtgcttgagattacaggcatgaaccaccacacctggcctgatttttttcttgagtaagatggagttctgtagtgataattcacattgcataaggtgaaaattgggaatttgttaggaaaaggtgagttacatttagaagttaaagtgtttaccaacattgatttagtttagttccttttgagaatctggcttagaaggacaagataagttatggttgcattaatatagtagggcacatgaaatgaaaccaagtactgtttgctttcctttgtttcagatggaggagatgtataagaaagctcatgctgctatacgagagaatccagtctatgaaaagaagcccaagaaagaagttaaaaaagagaggtgggaccgtcccaaaatgtcccttgctcagaagaaggatcgggtagctcaaaagagggcagct

SEQ ID NO: 23466 - DNA, 1260 bp, Homo sapiens
  SIMILAR (67)..(789): 871254mologous to Homo sapiens MSTP030,accession number AF113210,Smith-Waterman Score=1159.
cctccctggcaccgctgggcctgcaggtctctgtcgagccgcggacgcgggtctctgttccgctggatggggtttgttaaagttgttaagaataaggcctactttaacagataccaagtgaaatttagaagacgacgagagggtaaaactgattactatgctcggaaacgcttggtgatacaggataaaaataaatacaacacacccaagtataggatgattgttcgtgtaactgacagagatatcatttgtcagattgcttatgcccgtatagagggggatatgatagtctgcgcggcatatgcacacgaactgccaaaatacggtgtgaaggttggcccgacaaattatgctgctgcatattgtactggcctgctgctggcccgcaggcttcttgataggtttggcatggacaagatctatgacggccaagtggaggtgactggcgataaatacaatgtggaaagtactgatggtcagccaggtgccttcacctgctgtatggatgcaggagttgtggatggaggcttgtctgtccctcacagcaccaaatgattccctggttatgattctgaaagcaaggaatttaatgcaggagtacaccagaagcacttcatgggccagaatgttgcagattacatgcgctacttaatggaagaagatgacgatgcttacaagaaacagttctctcaatacataaagaacagcgtaactccagacatgatggaggagatgtataagaaagctcatgctgctatacgagagaatccagtctatgaaaagaagcccgggagagcctgctccaggctggggcctggactcgaccggtctcaaaggggcccctgcagctccacactccagccgcctcccccgtcacctcctcacctcaccccaggcccagccaccccagtaaacggggagggagctgcctccaccccaccacccacccacccaccctcatccattcaggttctcacacacacgcccgtcaccgtcagccagcgccccagccggggatcaggactgggacatctttgggggccacttcgccttccaccagacctggttggccccctcagctgccctctgtacggccttgtaacatccttttccaaagtccaagcaactcaagacggggctcccagctatgaaggggccagctcgcggccacacaaggatgacctccttgcccacccaggctctgccttgaccaatccagaagccatgcggcctctgtgcgactccctgctcttctcccag

SEQ ID NO: 23467 - DNA, 1443 bp, Homo sapiens
  SIMILAR (865)..(1440): 871254mologous to Homo sapiens ribosomal protein L5,accession number U14966,Smith-Waterman Score=881.
atggtacactgtaagccttataagggaataaaaggatcagatagcaaaggagctatgagaattatacagcctttaccagcagtagccaagagaatattcttgctactgaattttgacagtgcctgttcaagggtccttacacactcgttaagaaaaactcttggtatgctactgggctctgttccaattgaacatctgaccatgaagcatcaagtgaacatgactttcttgggtgcaacaggagaagggacttggcagtggcaacggcagtgggtctttcatttgtttcttggagttccacttcagagaaatgcagccactgccaatcagaatgatcagctggggtccaagggcagcaagagcaataccatcacaatggcaatggcatacgggctgtcaattgcctatgggacttccaccccagagagacacagagccactgccaatgggaatgttcagccaagggtgaagcagctatgctgcaggcccaacctaaaggaagtgggggcaggggcttcagccgtggcaaaagctgcagggctgttggttacctgtgggaggtctaaaccagagaaagacagaaccgttaccagcctgagtactcaggtgagggtggattggctgcactgggatcccaggccaatggggtttgcctgctctccaactgagaacaacaattgctctattcctgaaaccctacaacctgaagctggaaaacttgatgtaaaattcacccttgcaatttttacacccttgtcttgtgccctatatgggccacacagaaaatttactaaaatccttcatgccataatcagagacattcaaactgcaaacaacgaggacatattaatgatttcctgctgcgtgctgctggcccacaggcttctcaatagatttggcgtggacaagatctatgaaggccaagtggaggtgactggcaatgaatacaatgtggaaagcattgatggccagccaggtgcctttacctgctatttggacacaggccttgccagaactaccactggcaataaagtttttggtgccctgaagggagctgtcaatggaagcttgtctgtccctcacagtaccaaacaattccctggttatgattctgaaagcaaggaatttaatgcagaagtacagaggaagcacatcatggaccagaatgttgcagagtacatacactacttaatggaagatgcttacaagaaagagttctctcaatacataaagaatagtgtaactccagacatgaaggaggagatgtataagaaagcttatgctgctatacgagagaatccagtctatgaaaagaaccccaagaaagaagttaaaaagaagaggtggaaccgtcccaaaatgtcccttgctcagaagaaagatggggtagctcaaaagaaggcaagcttcctcagagctcagatgcaggctgctgagagctaa

SEQ ID NO: 23468 - DNA, 1212 bp, Homo sapiens
  SIMILAR (949)..(1209): 871254mologous to Homo sapiens ribosomal protein L5,accession number U14966,Smith-Waterman Score=379.
atggagaggctaactggctcaaattctcacagctggaaagtagcagatctggccttcaaacccaagaaggctccagagtctgtgatcttaacctgtgcatgtactgagtctccaagagagaacaagctctttggaagcaataggggcctcaaccccgaaggcgaggggcgagatcagggactcggcgacgagggcgagcgcccccgggcttaccacgagcacggggaccccggcggccagcgagtagaggagcacggggggcacggcgctgctgtcctccgggcccgggtagggtttgcggtaggcgctgtcgtggcagaagaagccctgcacgttcacggtgaacgtgtccgtatactcgaagtagtacgccagcatcaccgtccctgccatgatcaccatctggaaatagagcatgctgctgaccattcgagaagcagcggcgctgggtcaatcccccaggctagcccggaggaggcgctgcgtgggcggacggggcggcagccggcgggacagcggcacctgtacccctcacagggcggacgctgtggggctggagaagctcctggcgggggtaaaatcaaaagggggggaggggaggcagtagagatggagcttccagaaactcttccgaggcaccagctgagaggtttaagaaacccgcacaacgcctgggaaaatggtgcgtggacgcgtcttccgagcgcaaagcccaccaaggcgcaaagtgccgatgcggcgcccagagtttcaaccgctgcttgtgagaggaggcattgcagattccaggcactgagcggtcccagccaccagggtaggaaaaaggactatttgcctcatctcgttctttattccctgaattccagggaactgcagggattcctcaggggtcgggataaaggagagggagaccaatgctggctcacagcacatgcatacaaaaattcatccgtccatggctatccacgcctatgcgtggaagatgaagatgcttacaagaaacagttctctcaatacataaagaacagtgtaactccagacatgatggaggagatgtataagaaagctcatgctgctgtaccagagaatccggtctatgaaaagaagcccaagaaagaagttaaaaagaagaggtggaaccgttccaaaatgtcccttgctcagaagaaggattgggtagctcaaaagaaggcaagcttcctcagagcttag

SEQ ID NO: 23469 - DNA, 1139 bp, Homo sapiens
  SIMILAR (1)..(273): 751254mologous to Homo sapiens MSTP030,accession number AF113210,Smith-Waterman Score=322.
  misc_feature (1)...(1139): n = a,t,c or g
atggggtttgttaaagttgttaagaataaggcctactttaagagataccaagtgaaatttagaagacgacgagagggtaaaactgattattatgctcggaaacgcttggtgatacaagataaaaataaatacaacacacccaaatacaggatgatagttcgtgtaacaaacagagattatcatttgtcagatcgctaatgccccgtatagagggggtatatgatagtctgcgcanccgtatgcacacgaactgccaaaaatatgggtgtgaagggttggcctgacaaattatgctgcagccatattgtactggcctgctggctgggcccgcaggcttcttccataggtttggcatggaccagatctatgaaaggccaagttggagttgactggtgatgaatacaatgtggaaagcattgatggtcagccagggtgccttcaccctgcctattgggatgccaggcccttgcccagaacctacccactggccattaaagtttttgggtgcccctgaaggggagcctgtggatggagggcttgtcctattccctccacagtaccaaaacgattccccctggttatgattcctgaaagcaagggaatttaatgcagaaagtaccatcggaagccacatccatgggcccagaatgttgccagattacatgcgcctaccttaatggaagaagatgaagatgccttacaaagaaacagttctctcaatacataaagaacagcgtaactccagacatgatggaggagatggtattagaaaagctcatgctgctatacgagagaatccaggtctatgaaaagaagcccaagaaagaagtttaaaagaaaaaggtggaaccgtcccaaaatgtcccttgctcagaagaaggatcgggtagctccaaagaaggcaagcttcctccagagctccaggagcgggctgctggagagcttaaccccagccattttcccatgatttttttcagatatcgctaactaaacttatgaacagcaactaannnnnnnnnnnnnnnnnnnnnnnnnggggcgcccgttttaaaggacccctgggggggcccaagtttaccggggcttgcaacgtcaaacctttttccctaaagggggccgaattaaaacccacctgggga

SEQ ID NO: 23470 - DNA, 886 bp, Homo sapiens
  SIMILAR (264)..(296): 1001254mologous to Homo sapiens U-snRNP-associated cyclophilin,accession number AF016371,Smith-Waterman Score=61.
gcaaattcaagtcctgttaaccccgtggtgttctttgatgtcagtattggcggtcaggaagttggccgcatgaagatcgagctctttgcagacgttgtgcctaagacggccgagaactttaggcagttctgcaccggagaattcaggtcagtttcagatgtgtttgacttctttgcctgctccagaggggtgttctggggctgcagtgagggtatcggtgaaccacctgctggccttgaatgattgctggtgacagtgatagaaggaaagatggggttccaataggatacaaaggaaagcaccttccaccagggtcataaaggatttcatgattcagggtggagattttgttaatggagatggtactggagtcgccagtatttaccgggggccatttgcagatgaaaattttaaacttagacactcagctccaggcctgctttccatggcgaacagtggtccaagtacaaatggctgtcagttctttatcacctgctctaagtgcgattggctggatgggaagcatgtggtgtttggaaaaatcatcgatggacttctagtgatgagaaagattgagaatgttcccacaggccccaacaataagcccaagctacctgtggtgatctcgcagtgtggggagatgtagtccagacaaagactgaatcagcacttcccaggagcctgcccacagctgtggctaacatcaggccttcccttcttcttggtggtgttcttgagtaagataatctggactggcccccgtctttgcttccctgcctgctgctgccccatttgatcaagagaccatggaagtgtcagagattcagaatccacgattgtctttaagttttcaactgtaaataaagtttttttgtatgcgtaaaaa

SEQ ID NO: 23471 - DNA, 1860 bp, Homo sapiens
  SIMILAR (773)..(1279): 891254mologous to Homo sapiens U-snRNP-associated cyclophilin,accession number AF016371,Smith-Waterman Score=768.
atggaggacgccgccgcgccggggcggaccgagggggtccttgaaaggcaaggagcgccgccagctgcaggccagggaggagccctggtggagctcaccccgacccccggcggcctggccctggtgagcccctaccacacccaccgggccggggaccccttagacctcgtggcgctcgcagagcaggtgcagaaggctgatgaattcatccgagcaaatgccaccaacaagctgacagtcatagctgagcaaatccaacatttgcaagaacaagccaggaaggtactggaagatgctcacagagatgccaacctgcaccatgtagcttgtaatatagtgaaaaaacctggcaacatttactatctctataaacgggagagtggtcagcagtatttttccatcatttctccaaaggaatgggggacaagttgtccacatgacttccttggtgcctacaaactacagcatgacttgtcctggactccgtatgaggacattgagaagcaagatgctaaaatcagcatgatggacacgttgctaagccaacctaatgaatccaaggctcagaaggaggaactcaccacttacatcacaccctcccaagcactactagccttggcagccatcttgaaaatgatgcccggcttacaagggagcccatggaatacagtgcgtctactgcacgttaccaccaccactcctacaaacaacccgaagggttcgccggaatcccacgctcccgacttctgcttccgggtcggagccatggcggttggcaaattcaagtcctgttaaccccgtggtgttctttgatgtcagtattggcggtcaggaagttggccgcatgaagatcgagctctttgcagacgttgtccctaacacggccgagaactttaggcagttctgcaccggagaattcaggaaagatggggttccaataggatacaaaggaagcaccttccacagggtcataaaggatttcatgattcagggtggagattttgttaatggagatggtactggagtcgccagtatttaccgggggccatttgcagatgaaaattttaaacttagacactcagctccaggcctgctttccatgctaacatggccggggaaacttactgcaggtatatttggtttccatcaggcgaacagtggtccaagtacaaatggctgtcagttctttatcacctgctctaagtgcgattggctggatgggaagcatgtggtgtttggaaaaatcatcgatggacttctagtgatgagaaagattgaggtgaatgccttgcatcttccagcctacatggactcatttcttacccgtaattaccactgcctgctctgcgctgggcagcatgctagctgcagagagggggacaaagaattgaaagatgtctcctttcaggagctcatggaaagtaagacattcccagaggtgatcactagtaatatgagtgacattgccaagtatgagaagagtacaagggagaaatccatcacttccagccagcacttcccaggagcctgcccacagctgtggctaacatcaggtgtgaatccattgctgatccctccacctcctcttccaggtctaagcccagacagtgggtgctcccacagcacttggttcatctctccactgtggcatttaatatactgtatcacaaatatgccttcccttcttcttggtggtgttcttgagtaagataatctggactggcccccgtctttgcttccctgcctgctgctgccccatttgatcaagagaccatggaagtgtcagagattcagaatccaagattgtctttaagttttcaactgtaaataaagtttttttgtatgcgtaaaaaaaaaaaa

SEQ ID NO: 23472 - DNA, 809 bp, Homo sapiens
  SIMILAR (63)..(539): 651254mologous to Homo sapiens U-snRNP-associated cyclophilin,accession number AF016371,Smith-Waterman Score=449.
agctcgtgccgaattcggcacgagccgggtcggagccatggcggtggcaaattcaagtcctgttaaccccagtggtgttctttgatgtcagtattggcggtcaggaagttggccgcatgaagatcgagctctttgcagacgttgtgcctaagacggccgagaactttaggcagttctgcaccggagaattcaggaaagatggggttccaataggatacaaaggaagcaccttttcacagggtcataaagggattccatgattccagggtggagattttgttaaatggagatggtactgggagtcgcccagtatttacccgggggccaattttgcagatgaaaatttttaaactttagacactcagctccaaggcctgctttccatggcgaacagtggtcccaagtacaaatggctgtccagttctttatcacctgcttctaagtgcgattgggctgggatgggaagcatgtggtgtttgggaaaaatcatcgatggacttctagtgatgagaaagattgaagaatgttcccacaggccccaacaataagccccaagctacctgtggtgatctcgcagtgtggggagatgtagtccagaagacaagactgaatcaaggccttcccttcttcttggtggtgttcttgagtaagataatctggactggcccccgtctttgcttccctgcctgctgctgccccatttgatcaagagaccatggaagtgtcagagattcagaatccaagattgtctttaagttttccaactgtaaataaagtttttttgctatgcgtaaaaaaaaaaaaaaaaa

SEQ ID NO: 23473 - DNA, 635 bp, Homo sapiens
  SIMILAR (45)..(422): 1001254mologous to Homo sapiens histone H2B,accession number Z80779,Smith-Waterman Score=628.
attgaatgtcactactccagtgcggtggaattcggtgttttaagatgcctgagccagccaagtctgctcccgccccgaagaagggctccaagaaggcagtgaccaaagcgcagaagaaagatggcaagaagcgcaagcgcagccgcaaggagagttactctgtgtacgtgtacaaggtgctgaaacaggtccatcccgacactggcatctcttccaaggccatgggcatcatgaattctttcgttaacgacatatttgagcgcatcgcgggcgaggcttcccgcctggcgcattacaacaagcgctcgaccatcacctccagggagatccagacggccgtgcgcctgctgcttcccggagagctggccaagcacgccgtgtcggagggcaccaaggccgtcaccaagtacaccagctccaagtaactttgccaaatttccaagttgatcgtgatgttgatccgggactcggtgtggtgacggcccgccctgagcacgaaagtgcacgctcttgacaacttccttatgtttggagctttctccaccaccacccccgcccattttcttgtaaaatttttaccatgcagatatgtaataactgcaagtaaaggctgaagacaatgtgagctgaacacg

SEQ ID NO: 23474 - DNA, 876 bp, Homo sapiens
  SIMILAR (84)..(467): 731254mologous to Homo sapiens histone H2B,accession number Z83336,Smith-Waterman Score=420.
cggacgcgtgggtaagcggtaggttgacagaactaccgtcttcctgtttttttcctccaattttccggcagttactcccagtcatgcccgagccctcaaagtccgctcctgccccgaagaaaggctccaagaaggcagtgacaaaggcccaaaagaaggacggcaagaagcgcaagcgcagccgcaaggagagctactccgtgtacgtgtacaaggtgctgaagcaggtccattcccgacaccggcatctcttccaaggcaatggggatcatgaattccttctgtcaacgacatcttcgaggcgcatcgcaggcgaggcttcccgcctggcgcattacaacaagcgctcgaccatcacctccagggagatccagacggccgtgcgcctgctgcttcccgggggagctgtgcaagcacgccgtgttcggaggggaccaatgccggtcaccaagtacaccagttccaagtaactttgccaagggagagacatgaagacagaggagaaatgaatgcataaaataaccgattaatatgattctatacatagaacttaggaagtctcatcttgcctgaaaatgacctgtgtggatcccacccaaatccaacttcatcctggtttggtgcccccttggttcatcaaaaaaaggttcccgaggggaaggaactaaaggggtttgcccttcatgttactttttgagtttataaacataaaaaccagaatttactytctgttacagacctagttactgggaattcattacttgccatggactacctttgctaagaaaagtctgaatgagaagatggcaggacgtctgaaaaaaaaagttataattaataaaatctgcgaagaattgtaaaaaaaaaaaaaaaaaa

SEQ ID NO: 23475 - DNA, 421 bp, Homo sapiens
  SIMILAR (93)..(419): 1001254mologous to Homo sapiens bK1191B2.3 (PUTATIVE novel Acyl Transferase similar to C. elegans C50D2.7) (isoform 1)),accession number AL022237,Smith-Waterman Score=580.
ccctcggtgattgagaactgtgttgctgctgctggattcagtgtgggagagtttgcagccctagtgtttgccggagccatggaatttgctgaagacgcaccaggatgttgccggttagtggcgcattccacacccgcctcatggagccagccgtggagcccctgacgcaagctttaaaggcagtcgacattaagaagcctctggtttctgtctactccaacgtccacgcgcatagatacaggcatcccgggcacatccacaagctgctggcccagcagctggtctccccagtgaagtgggagcagacgatgcatgccatatacgaaaggaaaaagggcagggggttcccccaaactttcgaagtaggccctggcaggcagctgggagccatcctgaagagctgtaacatgcaggcctggaa

SEQ ID NO: 23476 - DNA, 1173 bp, Homo sapiens
  SIMILAR (74)..(1171): 821254mologous to Homo sapiens bK1191B2.3 (PUTATIVE novel Acyl Transferase similar to C. elegans C50D2.7) (isoform 1)),accession number AL022237,Smith-Waterman Score=1509.
ggaccacgctgcgccgcgccgccgcagtcgggcctcggtcgccacggtaacgcgcgcgggcaggtgtccgaccatgagcgtccgggtcgcacgggtagcgtgggtcaggggcttgggcgccagctaccgccgcggcgcctcgagcttcccggtgcctccgccgggcgcccagggtgtagcggagctgctgcgagatgcgaccggggcggaggaggaggcgccctgggcggcgacggagcggcgaatgccgggccagtgctccgtgctgctcttcccgggccagggcagccaggtggtgggcatgggccgcggtctgctcaactacccgcgcgtccgcgaactctacgccgccgcccgccgcgtgctgggctacgacctgctggaactgagcctgcacgggccgcaggagaccctggaccgcacctctcaggtacagagccctggaactgggatccccaggagagtgagggctcacgttctgcatctgtccccacaggtgattgagaactgtttgtttctcaggcctggccttttctccttcattctgtgccctcatttttccaaatgcgcttctctctggccaggtttgtatgcagtgaaaatccgagctgaggccatgcaggaagcttcagaagctgtccccagtgggatgctgtctgtcctcggccagcctcagtccaagttcaacttcgcctgtttggaagcccgggaacactgcaagtctttaggccctgtgaatggtcagatctgtaaaggcggatttctgggacattgctcggctgaaacctccttccttccccaggctctacggtttctccagaagaattcctctaagtttcatttcagacgcaccaggatgttgccggttagtggcgcattccacacccgcctcatggagccagccgtggagcccctgacgcaagctttaaaggcagtcgacattaagaagcctctggtttctgtctactccaacgtccacgcgcatagatacaggcatcccgggcacatccacaagctgctggcccagcagctggtctccccagtgaagtgggagcagacgatgcatgccatatacgaaaggaaaaagggcagggggttcccccaaactttcgaagtaggccctggcaggcagctgggagccatcctgaagagctgtaacatgcaggcctggaa

SEQ ID NO: 23477 - DNA, 425 bp, Homo sapiens
  SIMILAR (184)..(2): 951254mologous to Homo sapiens tubulin-tyrosine ligase,accession number AF104927,Smith-Waterman Score=309.
ctatttggtcatgtgagagccgatatccagtttcaacgctgaacacatttcggatggtctgcacactcatccagtaaaaattccagtcctcgttttctgtcacttggacccatcctctcttttcagagttattgatcagcactgacttctcgatatcagtgacccattttactttccctgccataatccataggcactgacagagcacctctggcaacgcccacgctcacctcggtctcgctgacgtcactaacgccggcccctccttcttccctgtgggctcagagcgccgagggactcggaggagcgccctgcagggatgcctcgagccgcgccctcgccccgcctccagcccctctccggcgctcgcaggaggacgcacccgactgccaggcgcaccggtccgccccgccccgcgctgcact

SEQ ID NO: 23478 - DNA, 1259 bp, Homo sapiens
  SIMILAR (574)..(915): 941254mologous to Homo sapiens bK1191B2.3 (PUTATIVE novel Acyl Transferase similar to C. elegans C50D2.7) (isoform 1)),accession number AL022237,Smith-Waterman Score=565.
atgaaggcatacctgctgttgggtgctgcccctcccctcccatggttccccgggcaggcagttttcagaccctgcccaccacctgccggcttgtggagaacagcccagctggtagagctggaacatgggccagtgccaagggaggacttaatcccgtgctccagacccttctcaatctcctttctgggccccgagagggtggacggcctggcatttcctaggatccaagccctgggcatagcggccgcccgaggtatggagcccaaaggagccccaggcaagtctgactccggaaatagtcgcagcgccggcggtcgcgtcctgggttgccagggcgccgccctggaagtagagtgcagcgcggggcggggcgggccggtgcgcctggcagtcggctgcgtcctcctgcgagcgccggagaggggctggaggcggggcgagggcgcggctcgaggcatccctgcagggcgctcctccgagtccctcggcgctctgagcccacaggtaggagtgaggtcggatatagggatcaatggaaacatctggcaccctggggtacaaacggatttctccagccttaagcgttcccaaggtttgtatgcagtgaaaatccgagctgaggccatgcaggaagcttcagaagctgtccccagtgggatgctgtctgtcctcggccagcctcagtccaagttcaacttcgcctgtttggaagcccgggaacactgcaagtctttaggcatagagaaccccgtatgtgaagtgtccaactacctctttccagattgcagggtgatttcaggacaccaagaggctctacggtttctccagaagaattcctctaagtttcatttcagacgcaccaggatgttgccggttagtggcgcattccacacccgcctcatggagccagccgtgggagcccctgacgcaagctttaaaggcagtcgacattaagaagcctctggtttctgtctactccaacgtccacgcgcataggatacagggcatcccggggcacatccacaagctgctgggcccagcagctggtctccccagtgaagtgggagcagacgatgcatgccatatacgaaaggaaaaagggcagggggttcccccaaactttcgaagtaggccctggcaggcagctgggagccatcctgaagagctgtaacatgcaggcctggaagtcctacagcgccgtggatgtgctgcagaccctcgaacatgtggacctggaccctcaggagcccccgagatga

SEQ ID NO: 23479 - DNA, 1172 bp, Homo sapiens
  SIMILAR (17)..(529): 1001254mologous to Homo sapiens bK1191B2.3 (PUTATIVE novel Acyl Transferase similar to C. elegans C50D2.7) (isoform 1)),accession number AL022237,Smith-Waterman Score=877.
gggcaggtgtccgaccatgagcgtccgggtcgcacgggtagcgtgggtcaggggcttgggcgccagctaccgccgcggcgcctcgagcttcccggtgcctccgccgggcgcccagggtgtagcggagctgctgcgagatgcgaccggggcggaggaggaggcgccctgggcggcgacggagcggcgaatgccgggccagtgctccgtgctgctcttcccgggccagggcagccaggtggtgggcatgggccgcggtctgctcaactacccgcgcgtccgcgaactctacgccgccgcccgccgcgtgctgggctacgacctgctggaactgagcctgcacgggccgcaggagaccctggaccgcaccgtgcactgtcagcccgcgatcttcgtggcatcgctggccgctgtcgagaaactacatcacctgcagccctcggtgattgagaactgtgttgctgctgctggattcagtgtgggagagtttgcagccctagtgtttgccggagccatggaatttgctgaaggctctacggtttctccagaagaattcctctaagtttcatttcagacgcaccaaggatgttgccggttagtggcgcattccacacccgcctcatggagccagccgtggagccccttgaacgcaagcttttaaaggcagtcgacattaagaagcctctggtttctgtctactcccaacgtcccacgcgcattagattacaggcattcccgggcaacatccaacaaagttgcttggcccagcagcttggtctccccaagtgaaagtgggagcaagacgatgcatgccatatacgaaaggaaaaaagggcaagggggttcccccaaactttcgaagtaggcccttggcaggcagcttgggagccatcctgaagagctgtaacatgcaggcctggaagtcctacagccgccgtggatgtgctgcagaccctcgaacatgttggacctggaccctcaggagcccccgaagatgactggcagggggctcaaatgcaatgaccccctctgtcctcctgaggagaggctgtaggctgtgcctgtcgccccctaccttcctaatggctcctcctctgaggagtgaaagggatttgtttgcaacgtgctttgaaggccacataaaaagccctaaaaatgagtaaaaaaaaaaaaaa

SEQ ID NO: 23480 - DNA, 1575 bp, Homo sapiens; identical to SEQ ID NO: 13427
  SIMILAR (1323)..(955): 961254mologous to Cloning vector pZC320 SopB,accession number U26464,Smith-Waterman Score=590.

SEQ ID NO: 23481 - DNA, 804 bp, Homo sapiens
  SIMILAR (539)..(655): 351254mologous to Arabidopsis thaliana F24O1.6,accession number AC003113,Smith-Waterman Score=51.
ggtgataaagatattggctcctcgagtatgatggttcatgtcgtggggaggatgtgagggcgaatagtaatgattagagcgatgagtgacgtggatgtcgtaaatgtgcgccgaaacaatgtgtggacccagtgaaattgcccttgccattacaattccaagaatcagagttgttaaacctgtagagatgagggagacctttccaagctttgctatatttcggtacaaggataaaggcagagtaaaggtaactgtggaaagtccaataatgaagtggcgaccaataaacacgttttcaggatcaactgacctgttgcaaggtgaatgaaatttccggacaactggcttcagaacctgcctagtcgctagttttacctgcggcgggatgacaggctcctgcctctggtagcccatggctgagcggtggtcctcagcaggtggaagatgctggggctgggtacggattcgcacccggccagcctcctccgccacctcgcacacagccgaggtccgcgtgtagccgcagagctgcagggagccagttccacgggcgccccctgctccctcggcaggccgcgagggctgcagccccaagatctctaggctgtggcagcctggggcgcttttccaccggagttcgcccagacaaatgtatttttcctccggagacggagatgtcttatctgctctttcggaacactgtttctcgttgtcgttgttgatcattccttttattctcaaccattctcctttggcctttgtgacatctctttcttgtggttttcttcctgctgttttggtcat

SEQ ID NO: 23482 - DNA, 674 bp, Homo sapiens
  SIMILAR (85)..(228): 911254mologous to Homo sapiens dJ850H21.1 (novel protein),accession number AL031680,Smith-Waterman Score=210.
atggggcaagtgaaggggcacaagctctgcctggacttcacactgctttccccagatggaggagctgctgaggggcggtgccttgagctgggttggcaggcgaaggaggtggaggagaccatcgagggcatgctcctcaggctggaagagttttgcagcctggctgacctgatcaggagtgatacttcacagatcctggaggaaaacatcccagtccttaaggcccaaacttacaaaaaatgcgtggcatttatgccaaagtggaccggataaaggcctttgtcaaaatggttggacaccacgtcgccttcctggaagcaaacgtgcttcaggctgagcgggaccatggggccttccctcaggccctgcggaggtggttgggatccgcagggctcccctccttcaggaacgaccccactgcccccctgaggcaggtgtttgaggcctcccccgaccccaggctggcccgaacagtgaccatccagacgcagcagccagtcagggtctcagggcccttgtccggtcagaggaaagaaaagagtctccagaaaggggcccaggtcttccagacaaatgtccctgagaccctgctagagggggcagccatcagcccagcgcctgcttgcggagggcccctcacatctggagatggtttcaggcatgtgcggaagtga

SEQ ID NO: 23483 - DNA, 651 bp, Homo sapiens
  SIMILAR (1)..(651): 1001254mologous to Homo sapiens dJ875H3.1 (APK1 antigen),accession number AL049733,Smith-Waterman Score=1138.
ctcccacctcctgcaacccgagaaagaccaccaggatgcaaaacagtatttgtgggtggtctgcctgaaaatgggacagagcaaatcattgtggaagttttcgagcagtgtggagagatcattgccattcgcaagagcaagaagaacttctgccacattcgctttgctgaggagtacatggtggacaaagccctgtatctgtctggttaccgcattcgcctgggctctagtactgacaagaaggacacaggcagactccacgttgatttcgcacaggctcgagatgacctgtatgagtgggagtgtaaacagcgtatgctagccagagaggagcgccatcgtagaagaatggaagaagaaagattgcgtccaccatctccacccccagtggtccactattcagatcatgaatgcagcattgttgctgaaaaattaaaagatgattccaaattctcagaagctgtacagaccttgcttacctggatagagcgaggagaggtcaaccgtcgtagcgccaataacttctactccatgatccagtcggccaacagccatgtccgccgcctggtgaacgagaaagctgcccatgagaaagatatggaagaagcaaaggagaagttcaagcaggccctttctggaattctcattcaa

SEQ ID NO: 23484 - DNA, 497 bp, Homo sapiens
  SIMILAR (375)..(455): 1001254mologous to Homo sapiens dJ875H3.1 (APK1 antigen),accession number AL049733,Smith-Waterman Score=140.
aagatttcgtccttgggccaaagtgccgggtctaggcctggaatcgcgaggcgggcatttcagaagagagcggcgcggagtggggcgccgcgagggcactacgagcccaggaactgtcgcgccggcccgattttccgcggctgtataaggactagcgcttccgtagccggggagctggagggaacctgatttgagatcaattcttggagaacacaaagaagtgtgatggattgaaccagctgtcctttgaccctgctaacaacaacaagcccctggagtttggtagagccagaggccctctggtcacagaaggcctcattgagaatggaggggaatcaagcaagaaaagaaggagaacaaattcttcttcagccgataacagtagaactctgaacgtggattccactgcaatgacactacctatgtctgatccaactgcatgggccacagcaatggaataattttggaatggcacccgtgcgaattgtcggacaccc

SEQ ID NO: 23485 - DNA, 1825 bp, Homo sapiens
  SIMILAR (1523)..(1609): 961254mologous to Homo sapiens dJ875H3.1 (APK1 antigen),accession number AL049733,Smith-Waterman Score=141.
ttcgaagtacctagtcagtgtggtggaattcgagtgccgggtctaggcctggaagcgcgaggcgggcatttcggaagagagtggcgcggcgtggggcgccgcgagggcactacgagcccaggaactgccgcgccggcccgattttccgcggctgtataaggactagcgcttcggtagccggggagctggagggaacctgatttgagatcaattcttggagaacacaaagaagtgtgatgaaatgatgacagagctaagttcacagttgaggaccacacaatgcaaagagattttagatggctgtgggtctacgaaataggctatgcagccgataacagtagaactctgaacgtggattccactgcaatgacactacctatgtctgatccaactgcatgggccacagcaatgaataatcttggaatggcaccgctgggaattgccggacaaccaattttacctgactttgatcctgctcttggaatgatgactggaattccaccaataactccaatgatgcctggtttgggaatagtacctccaccaattcctccagatatgccagtagtaaaagagatcatacactgtaaaagctgcacgctcttccctccaaatccaaatctcccacctcctgcaacccgagaaagaccaccaggatgcaaaacagtatttgtgggtggtctgcctgaaaatgggacagagcaaatcattgtggaagttttcgagcagtgtggagagatcattgccattcgcaagagcaagaagaacttctgccacattcgctttgctgaggagtacatggtggacaaagccctgtatctgtctggtaatagggaattgaagaaatttttgaacaaggaagataattatttccgcaagattaatttgacagctctatataaaactgtattagaggagagatgtgaaaagaggagaggaggttaccgcattcgcctgggctctagtactgacaagaaggacacaggcagactccacgttgatttcgcacaggctcgagatgacctgtatgagtgggagtgtaaacagcgtatgctagccagagaggagcgccatcgtagaagaatggaagaagaaagattgcgtccaccatctccacccccagtggtccactattcagatcatgaatgcagcattgttgctgaaaaattaaaagatgattccaaattctcagaagctgtacagaccttgcttacctggatagagcgaggagaggtcaaccgtcgtagcgccaataacttctactccatgatccagtcggccaacagccatgtccgccgcctggtgaacgagaaagctgcccatgagaaagatatggaagaagcaaaggagaagttcaagcaggccctttctggaattctcattcaatttgagcagatagtggctgtgtaccattccgcctccaagcagaaggcatgggaccacttcacaaaagcccagcggaagaacatcagcgtgtggtgcaaacaagctgaggaaattcgcaacattcataatgatgaatataatgggaatcaggcgagaagaagaaatggaaatgtctgatgatgaaatagaagaaatgacagaaacaaaagaaactgaggaatcagagttgaagaaactagaaggaatagtagatggtagtgtagaggtatcggctgaagccctgagaaaattattaaatgaatatgaaagacaagtgaaagaagagcaaaaggttggatacagaatttgggggactatccacaataagggagaaggaaagaaagaggagtttgcagaggagttagaaaaaagcagttctgagaggctggaagaaaactag

SEQ ID NO: 23486 - DNA, 1512 bp, Homo sapiens
  SIMILAR (1417)..(1506): 1001254mologous to Homo sapiens Human normal uterus tissue derived protein 26,accession number Y59863,Smith-Waterman Score= 159.
tcagaggcgccggttggactcacgggcggtgcatgatggtggtggctacggtcacctcgctggcgctctcctccctcctgtccctgctgctctttgctgagatgcagatgtacagccgtcagctggcctccaccgagtggctcaccatccagggcggcctgcttggttcgggtctcttcgtgttctcgctcactgccttcaataatctggagaatcttgtctttggcaaaggattccaagcaaagatcttccctgagaatgcttacgtgaaaggttgttaaggagaaatatatttactgaagctgtctgaagacagatgacgcttttcgattctgcaccttgtatagctcctggaggtggagctggaaaataaggcctttgaaagcaagaaactttgttctcctgtgcctcctgttggctctctttgcatctggcctcatccaccgagtctgtgtcaccacctgcttcatcttctccatggttggtctgtactacatcaacaagatctcctccaccctgtaccaggcagcagctccagtcctcacaccagccaaggtcacaggcaagagcaagaagagaaactgaccctgaatgttcaataaagttgattctttgtagaacattcagggtcagtttcttcttctttgcttcttgccttgtgacctttggcttggtgtgaggacttggagctgcttgccttggtacagggtggaagaagatctttgtgattgtagtccagcccaccccatggagaagatgaagataccaggtggtgacacagactcgcgtggatgcaggcccgatgccaaaggagagccaaccaggagcgcacaggcagaatctccagggaagatctttgcttggaaatcctttgcccaaagacaaagattctccaagattattgaaggcaagtgaaccgagaacacggaagagaccccgaaccacagcagggccgccctgggatggtgaagccactcggttggaggcccagctgacggcctgtacatcttgcatccccagccaaagagcagcaggggacaaggaagggaaggagagcgccagcgaggttgcccgtacccaccactggaaggggattggagaagggaccggagagtcaggctccgccttccttccggcaagctacgggcagattcagccggtccggaagctctggtgggccgaccccctccaagaactcccgggactgcagccacacgccccaactccccacaccgcgcggcaacccctacgtattccccagccccggacaccccgaaccctcccgtccggtggaaatgcccgctcccggtggaacccaggacacgtcagctctgtcgggagaggacgaggaaagcttgtccacccaaaccccgaccccctctaggacttcctggggaccccaccggtcctgttacccatcatgccccgcccgtgagtccaaccggcgcctctggccaagaaaggcgagctgaaccgggtgcggttagctatgcgcatgcgtcagcgacgaaa

SEQ ID NO: 23487 - DNA, 2502 bp, Homo sapiens
  SIMILAR (670)..(840): 361254mologous to Mycoplasma genitalium Homology to M62747,accession number U02214,Smith-Waterman Score=110.
atggcggcgcccaggtggagcgcgtcgggcccctggatccggggaaacggccaaggttgcgggagtctcttcactctcgtctcaaagccattttgtgccgctgccgctgcctctacggccataaatgcccagagattagcggagaagctccgagcccagaaacgggaacaagacacaaagaaggagccggtgtccacaaacgctgttcagcggcacgagtgcaagaaatagtgcggttcacacggcagctgcaagcgacgtccaccccaaccgtgcttgctaaggcacttgaccccgaggaattctccaccaggacaagaaccttgtggtcatcaataaagccctacggtctccctgtgcatggttggccttggggtccagctctgcatcactgatgtactacctatcctggcaaagatgcttcatggccacaaggcagagcctttgcatctgtgccaccggctggacaaggaaaccacaggtgtaatggtgttggcttgggacaaggacatggcacatcaagtccaagagttgtttagaacccgtcaggtggtgaagaagtactgggccatcactgtgcatgtccccatgccctcagcaggagtcgtggacatccccattgtggagaaggaggcgcaaggccagcagcaacaccacaagatgacattgtccccgagctaccgcatggacgatgggaaaatggtgaaagtgcggcgcagccggaatgcgcaagttgctgtaactcagtaccaggtgctcagcagcactctctcctccgccctcgtggagctccagcccatcactggaataaaacatcagcttcgagttcacttgtcttttggattggattgtccaatccttggtgatcacaagtactcagactggaataggttggccccccagaagctgtctgtgggcaccctgaagaagctggggctagaacagtcgaaggcccgctacatcccccttcacctgcacgcccggcagctgatcctgcctgccctggggtccgggaaggaggaactcaacttggtctgcaaacttcctcgcttctttgtgcattccctgcaccgcctgcgtttagagatgccaaatgaggatcaaaatgagaacaatgaagccaagtgtctgggagcacagtgaagaccatgggagcaccctggcacctgggagcacagtgaagaccctgagagcatcctggcaccttgggagcgcaggttggcccctgaactgttctttgtttacagccctctgctaacttctcactcgcaacagactgcgtaagagccaggtgggataagaaaaagcaaatcagctgctacagggcttttaatgaaaaccaaagtcctatttcctgatagtttggctgcgctgtgggaaagcctgctggaagtctccctcccgtgggctctcattgccaatatggaacagagcccagggccaggcagattggggcagtgactggaaaaggagacctaaaggtcagaatccgggatcaggaactgtttttatccagcagtgaagctcttgagctcttaaggaaaggttcccgtggttggaaagaacataatggttaacaaatatcgcagcatccagggattgcccagctatagtgtgggtgccctactgaactctgattagggaacctgtataagggtattgagtgtgaggttgaggtgggacatttgctgagcaaggagaaccgatgtgaatgacaggcagataacatgcacacatgaagctggctgggtgtaaggcagtagcggggaacagcatgctgtctaacagctgttagctccagctggtttttgccattgtgggaagggattttctcatttcttccagagaagctggaaacctagaatatttcatgtgaaacctccccagtgtattgcccaactaaatcaaatttttaaaagatgcttaggcacctaagcaaataatacttagaggttgaaatttggtctacaggcctagcagtttgccagtctaaggtttattgaatggtatagaagtttggggaaaggggccctcttgaaaattttggatcagtggttgggcattttcgctgcgtgtagtatgtatcctttctaggcttggagatggctttggttggtccgtggaatgtaagttaatgaggagtgctgcccatttaaaaaaatcaaaaaatctctgtttgtggaagcgtatctttctgttcttacggtctcaggaaggagagggctatactgaacaccattagggatagatggaaatgaccttggcctccctgctcagctggtccatctagtttccaccttgtttcttgcaaacaaaatacacctcacactactttttctttctgacagagttggagtgacagcacagttaggggggtacaccccgggacagtctttatatgttccctctgtatagatgatgccactttctagccctttccctgtctccatggtacccattactgtgcataataaatttaactttgaaagcacaaaaaaaaaa

SEQ ID NO: 23488 - DNA, 1752 bp, Homo sapiens
  SIMILAR (697)..(1134): 481254mologous to Homo sapiens reverse transcriptase homolog= pol {retroviral element},accession number S61070,Smith-Waterman Score=362.
  misc_feature (1)...(1752): n = a,t,c or g
atggctgtggacctgggaagtcacactcctggttcctcaggcgtgactgcagccaccttcagagggcggagactggtcaacaccagagaggagagtgtggtgctgggtgctggtggtgaggtactctcaggcgttccaggaacttgggatgccctgggccctggcgccagctttggaataaagggcatgttccccaaggggacagtcatcatgagcacatcccccatgtgcgaaggcccagtaccaaggcgcaagccttgcgccagcagtgtgggccagcaaaatagcagaagcaggaagaaagccggccggaagacacctaccctggctggaagacacgtacccgtgaagatcaagaaagaggccatccagcagaaaccacttccagcttcttccttctctcctgcccttactcgctcgggcgccatctttggcccatgccccgcccttacttcagcgccggtgctagaatacccccttcagaaagtagtagaaaatgaagccttcaaagtctttaacaatcgtgatgaggaaagtaaaaggcaaaaacaggcagagtttcgaatgcttacctctgccatcaggggccctgcaggcccacggggccatagctccacacggaagcctcctagcaatccacctccacctggcgcctgtttcaagtgcggcaatgaaggtcacaggtccagacaatgcccaaacccaggcaccacctcccaagaagctgaactcatcgccctcactcgagctctcactctagcagcaggacaacagatcaacatatattcaaattctcattatgtgttccacatagtgcactcacactcatccatctggaaagaacggggtatcctaactgcaaaaaacactcctgccataaatggctctctcatcaacaagctccttaaagctgccaggctcccgcaaaaagttgccatcattcattgcaggggccaccaaaccccagacaatcctatattggctggaaatgtgctagcagatcaggtagccaaacaagtggccctacaacccgtgcaaggccagtttctgtccctgtccttgttctctccgctttactcctcagaagaaaaggaggacttccgagcccaaaaccttcaaaagcaaggaccatggcccagtcccaaggtgcaaggctacttgtgccagcagcgtgcgccagcaaggtagcagaagcaggaagaaagccggcaggaagacacgtacccctgaagatccagaaagaggccatctggagcagtcccttctcagtgcccatggccaccagggctgccgccagcacatcccccacagcccatggccccgcctagttattacacagagcatgaggagctctctggtcaacaagaaattccaccgagtccgttactgggctcagacttttaagttaatttactgcccccctaccttggccagtaaccagcgcctttagggctagcctcccccccagctcctgcctgaaaaatgacatttcgccggtgtctccggagggggctgaatttcactttgtaactttctgcggaacccgagcccgggtnggcatgctcgggtggtggtatcgtatgcaaatacgcatgctgacgttacagatcatgtgggttttggcgtagattccccactgatgcgaggcattttttttccctttttttttccttgtnttttttcttttaaaaaatttttgggccaccgtttctccgttacgggggctttttctgttctgtctgtctgggctgg

SEQ ID NO: 23489 - DNA, 739 bp, Homo sapiens
tttttttaccccaagttgttgtttattttcatgaggggggaaaaaagaatcctttatgatagtgaaaatatactttattttttaatacaatagctgccagcaatatactggtgctgatgttccaaagataaaagaaaatacatgcattctataataagctttcatttgcctgttcaagaaattataaagaaaatactaagctaattaatgataggctcaaaaaatgcagtatacttataaaaagccgctttcataaagccagtgcttactaaatgttagcatatcaaagtgggagaaacactgccattttaaagcaataaacttaaaatttcaagaaacagcctatgagaaatagcacttcctatacaaattaggtataaaaaaattaccaaaaatgtattatagtcacaatcacagtctttggagtagtacgtagaaagtctggttttgcttttgtcttttaaaaaagagtaaatacatagcaaagttttattttcagcaagttcatcctcctgttagaacacaaataattcctggtttagggcttcaattaaaaaaaaccccgaaaaacaaaacaaaaacatgcagagtgctattcctcaacatgggctgtggaaaatttaactccaggaagtgcaatgagtgagatcaggcaaaactacagtaaatacacactcaccataactataacttagtccccaaagaatgaacaatcctctatacaaggtaaatggggtga

SEQ ID NO: 23490 - DNA, 4502 bp, Homo sapiens
  SIMILAR (889)..(939): 581254mologous to Homo sapiens H1 chloride channel; p64H1; CLIC4,accession number AF097330,Smith-Waterman Score=45.
atgccccctggggtaagggcgtggggaggtgctgaggggccgaggccgcggccagttagacgccgtactgtccagagagcactgcggcgggagccggcagtcggagcagccttggagcaggaggagcagcagcagcagcagccgtcgccgtttgcggagcgcagccgagccggccatggcgttgtcgatgccgttgaacgggctgaaggaggaggacaaagagcccctcatcgagctcttcgtcaaggctggcagtgatggtgaaagcataggaaactgccccttttcccaggggcctcttcatgattctttggctcaaaggagtttgtatttagtgtgacgactgttgccttaaaaaggaagccagcagactgtcagaatttggttccggggaccccccccccccattatacttttcagcagtgaagtcaaaacggatgtaaataagattgaggaattttctgaagaagttttatggccctcccaagtacttaaagctttcaccaaaaacaccccagatcaaatactgctggaatggacatctttgcccaaattctctgcatattatcaagaattcaaggccagaggctaatgaagcactggagaggggtctcctgaaaaccctgcagaaactggatgaatatcctgaattctctctctcccgtgatgaaattgatgaaaatagtatggaggacataaagttttctacacgtaaatttctggatggcaatgaaatgacattagctgattgcaacctgctgcccaaactgcatattgtcaaggtggtggccaaaaaatatcgcaactttgatattccaaaagaaatgactggcatctggagatacctaactaatgcatacagtagggacgagttcaccaatacctgtcccagtgataaggaggttgaaataggcatatagtgatgtagccaaaagacttcaccaagtaaaatcgcgtttgttaaaagaggtgtctttcatgtcttccccttaaggaatacggttttcctaacagggcttactccttcctgtagagcagaaattgtattttgcacgaacatgcagttattgaagattaggatcaaggatagacaaggtatagtagttatcttaaaatatacactcctaagcagtattattttaaaatcctttaccctggctacctcccctacccgggttcccctctctttaatttggagacactccaccacaaacttttcactttagaggtagcttgccatctctcaggagccctcaccattgtgtccattcactgtgtatagatggcagaacttttgaggtgcaatgtttaattgttaaaaatagtagccacgacttttatcaggcagccccaaactggtgcataatgcatggtaccaaggaaatatttatgtattttttggaattttgtaatatttagtaagagtatatgcaaaggattgcctactgtaatccagaaatattgtttccaatttaagtcctaccccgggatatgtacctaacgaatattacccacccagagaagagagctttctacaaaagtcacctacagattttgctatattgctttgtagatagatttttacttttgcctaaaagcatttatccttcataccaattgtaacatctgacaccatgtaggaagctaaaagtttagagggagtgagggttttctcaagaccttccctctccccccaaaaagggcccattttttatcttttagaagaagaaacctgatgggcaccctgatactctgttctaaatacgtttgtataatatgtgttttcgccctgtcgccattacatttggaactttattgcattcttatattttaaaaagccttgtttttacgtaatcatagaggcttgctatttgtacatcgtgttgagcacacactacataactgatttttagttgacttagcatatagcaggtacaatgattatgtaatgtaaaaattaacacagaaatttaacctaagagaatgaaggggtgggttgtgtcaaaatatcaagtaaatttttgtttctaaagtacatttaatgtagatgacctaaagaatgcgttatccatcctatataaaagaaagataaaacacaggtcaccaattttctcatttcaccccatttaccttgtatagaggattgttcattcctttgggactaagttatagttatggtgagtgtgtatttactgtagttttgcctgatctcactcattgcacttcctggagttaaattttccaacagccatgttgaggaatagcactctgcatgtttttgttttgtttttcggggttttttttaattgaagccctaaaccaggaattatttgtgttctaacaggaggatgaacttgctgaaaataaaactttgctatgtatttactcttttttaaaagacaaaagcaaaaccagactttctacgtactactccaaagactgtgattgtgactataatacatttttggtaatttttttatacctaatttgtataggaagtgctatttctcataggctgtttcttgaaattttaagtttattgctttaaaatggcagtgtttctcccactttgatatgctaacatttagtaagcactggctttatgaaagcggctttttataaggatactgcattttttgagcctatcattaattagcttagtatgaaagataaggaaaaatctccatgttgtatccatttggctcaggaagattctttgccttacctttcttagaactctttattgcttatcaaaagtttgagtacccgcttggtttttttttggtaattaaatattgtatgatttatctggttcaaggaagatgcactattcagttatctattgagaaattattttgcagtggttttagtgggtgaaaaatgtcccatctgcaccagtacacaggcaggcattatcattcttcacctactttttaaataagtggcaacttgggattcattcctggtgaattcctgaacctttgcctcatagcttaaagtataaaaaaagattcaagaggcagtgagggttgttcctttccagtgaatggtggactgagtggtgcgaggtggagggctaacaagaggaaagaactacattcttcagaatacagtgatgaaaaatttcattttgaaactcaaatattttcattttggatattctcctgtttttattaaaccagtgattacacctggccatccctctaaatgttctacggaaggcatgtctattgtgattttgatgaagacagaattatttttctctgtaggaaacacagataccacttttatcaggggaagttagtcaaatgaaatgggaaattgggtaaatgggaccaaaagctaggctaggtaaaaagggacgaccccggcaacatgctttaacccccatttgtatggttttgtggaaagagcatagtttaacatcttgagaaatttgggacataaagttttcatggtagacagtttcatgcagtatatgaattgacataatggaaataatcctgattttatttttacaactaacatccattccccttccatttaaacaccttttgtgtttttacttccagtgaggagattggagtcctgaatggatctgttttcccagagattcctgagaaatttttgtattcagcagttgggaaagctctctattctagttgataaaacttccccttttttgatgtagatgcagatattctatacatttctgttgtcttttactagggctgtaaacttttgmmgataaacttcaaataagattttatttcttgggtaattttgggcttttcacaatttatcctttaaatccttgaggcaatctgtatacaattaaggaggatttctggacatttattcttacaactaaatggatcaacctctaggatttaggcatgttaactttctgttgtgttttgaatctctccagagttgcatgtagatagcatttatttctgtgcccctaaaacccatttaggaaaattaactacaaagtaaaaatgtagggggaaataggaaatgtattttttccatgaacattttggataccaaatttccatccatttaatggattcccccccattccctgccattaattttgaatttaagccatttaattccaaagagaggggagcatccccattattgataccatgtgggcttttaaaaactccctccctttattaaatagtcaaggtttgggcccacacaaagtatatttrvvatcatggaaaaattttcaactccctcaagccggaatgtttgaacaggaatggaggtattttctttataatttcttgaacaggcaaatgaaagctgtattatagaatcgcatgtatttttcttttatctttggaacatcaggcaccagctatattgctggcagctattgtattaaaaaataaagtatattcctcactatcataaaggattctttttttcccccctcatggaaataaacaccacccttggggtaaaaaaaaaaaaaaagggcggccgct

SEQ ID NO: 23491 - DNA, 1128 bp, Homo sapiens
  SIMILAR (934)..(1014): 401254mologous to Chironomus pallidivittatus giant secretory protein,accession number X13031,Smith-Waterman Score=41.
atggcactggcatctggtgagggccttcctgttgcattatcccatggcagaagggggaatggtcaggaaagggttccttacctgaagcttcgggatacgtgtgcttaccgtgttgcatggcgttgcaataggttagctcgagcaaaagtcaagaggacgtcataccggagcggatatggtaatgggttcgagcctggagttgagccagattgtgtcgttttacttgccttgggcgtggagaacgatcttgtgagaatatcttcaaaggcagaaaaatattccctttatgaattctctttccctctgcgtgtaagtcgggaatgtgaagaggagtgtaggaaagagccctggttcaatcctggtcaaaagcccagcgtgctcatcacctctgggcagatcctagggcaagaggagcagaaaaccctgctcttccctggtctcctgtctttggtttttcagttcaatgtggaaaacagtgacttacgatgtctcagccttgctgaaaatttagaaataagcgctttattgtctctttcatgttcgagcgtcattcgtctaatactaatcaaccttgaggtgacgatcagtccccccatcaccatccttaagcatgcgccgcccttgacctcccttgaagcatcgagttcatcgtctggcatcgaaaaaaaaatccataataattttcgacagggtcctttcccatcatctgctacacgatctacctttttaatgaatcacacctcttttgacagctacgtcgtcgtatccaacatcgtccctcgccttaatctttatcctcaagtccttgacgtccttcagtctcttcataaaatccatcaattagccagcaatgcaaaatggactatacagggcccagccaagccagacctaggactagagcttggtctccacagatacccagattgggaaaaggaagagaggaaaaaaaagaggaaaaggtctgtgtcccctgaaaaatccatcaccacacacaataaacccacatcatctggaatcttctatccccaagaagatgtgggtgtgacctgggcaggcccccagcaccaggtcctcacccttccagtcctccccacagcccaccccagccctcccgctgccctcctgtga

SEQ ID NO: 23492 - DNA, 453 bp, Homo sapiens
  SIMILAR (84)..(221): 1001254mologous to Homo sapiens Human electron transport protein NHETP-3,accession number Y29977,Smith-Waterman Score=236.
tttcgttgggaaaagacattcgcccgcggtccgcacgcgctgcttgcaaaggggtggggttgtggagtggatgctttggcaagatggcggggagcggcgtccgccaagttacttctaccgccagcaccttcgtgaagcccattttcagtcgggacatgaacgaggccaagcggagggtgcgcgagctctaccgcgcctggtatcgggaggtgccgaacactggtgagaggtagcggcttacgtggggacccggaggccgccgctcaaggtcgtagccggcccggccggggtttctcatgggcccagctgaggtcaccaacttgggcaagaggcgactgcgggtgcttcaggggaagagggtcacccgaagcctaccatgggccggacctggcggcggcgcggttggtcagaccggccgtgcttaagcattcgtacgttgctaatcggagcttt

SEQ ID NO: 23493 - DNA, 1205 bp, Homo sapiens
  SIMILAR (72)..(389): 451254mologous to Homo sapiens NADH-ubiquinone oxidoreductase subunit CI-B14,accession number AF047182,Smith-Waterman Score=123.
gtccgtacgcctcgaggcgcaagttccgagtcgacccacgcgtccgggcgtggagcggatgctttgacaagatggcggggagcggcgtccgccaagctacttcctaccgccagcaccttcgtgaaagcccatttttcagtcggggacatgaacgagggccaagcgggagggtgcgcgagttcttaccgcgccttggtatcggggaggtgccgaacactggtgagagtgcaccaattccagctggacatacactgtgaaaatgggacgggataaagtccgagaaatgtttatgaagaatgcccatgttcacagaccccagggtggttgatcttcctggtcattaagggaaaagatcgaaactggaagaaacaattaaagttttgaagcaagcggacacatgttatgcggttcttccattgaaacagaagcgccaaggccaaaggatttcctatccaagtttctatgtttggccacgatccattgaagtcattcagtgggaaagatgcacgttggatactatttttaggagcacaaataaaactcactatacaatggtcactttgtgatagaattccattgatgaaccaattttctgcagcctctttttgcctgagcaagtggggaccttgggtattacacatcacctgttcttttcccttttcttggaaatgtggtgtttgctgtaaattggattgaattatttttctcagagccttgcatgtccagtaaacgggaaggaaggaggcccatctgttcaaaaaattgtgaccattgggcatgaggctggacggacttgttaatgtagttgtttcctatagccccctatgattaggacactttagtgtcaggggcaccagattatcctgaaattagcccagctcctcccctgtcaggggatcaggggcagcacttaacagggcgcaaaagtaggaggctgttcaaggatggggctagtttttccttggggtttcttgaaggaaaatgggatgtggcaaagggtttggcttccgttactttgtaacaagcttccagcccttaaaatgaaatttaacttcctactcagggcaccctgcttaggtgcacagctgttcaatatacacagagaacagaaatattcctactgtctttggaaaccctggtgtacctctcagtggcagaataaacatcaacacaggttcaagaactgataaaaaaaaaaaaaaaaa

SEQ ID NO: 23494 - DNA, 1304 bp, Homo sapiens
  SIMILAR (112)..(333): 351254mologous to Dictyostelium discoideum SP85; PsB,accession number AF066073,Smith-Waterman Score=104.
tttcgttaaacaacaacagcaagaggagctgtcccaacggcatggaggatgatgctatatttgggatccttaacaaagtgaagccttcctataaatcctgtgccgactgcatgtaccctacagccagcggggctcctgaggcctccagggagcgatgtgaggaccccaatgctcccgccatctgcacccagccagccttcctaccccacatcacgtcctcccctgtggcccacttggccagcaggtcccgtgttccggagaagccagcctctggcccaaccgaacctcccccgttcctaccaccagcaggctccaggagggcagacaccagtggccctggggctggagctgccctaaagccaccaaccagccttttggaacccttcagagagaccccaaaagtcctgccaaagtccctccttttgaagaattctcactgtgataagaaccctcccagcacagaagtggtaataaaggaagaatcgtcacccaagaaagatatgaagccagccaaggacctgaggcttctgttcagtaatgaatctgagaagccgacaaccaacagctacctgatgcagcaccaggagtccatcattcggctgcagaaggcaggcttggtccgcaagcacaccaaagagctagagcggctgaagagcgtgcctgcagacccagcacctccctccagggatggccctgccagcaggctggaggccagcatccccgaggagagccaggatccagccgcgctccacgagctgggccccctggttatgcccagccaggccgggagtgatgagaagtcagaggccgcccccgcttcattggaaggaggctcactgaagagcccccctcctttcttctaccgcctggaccacaccagtagtttctcaaaagactttctgaagaccatctgctacacccccacctcctcttccatgagctccaacctgacccggagctccagcagcgatagcatccacagtgtccgtgggaagcccgggctggtgaagcagcggacacaggagattgagacccggctccggctggcgggcctcaccgtctcttccccactgaagcgctcacactctcttgccaagctggggagtctcaccttctcaacggaagacctgtccagtgaggctgacccgtccaccgtcgctgactcccaggacaccactttgagtgaatcttccttcttgcatgagccccagggaaccccgagggacccagctgcaacctccaaaccatcagggaaacccgccccagaaaacttaaagagcccttcgtggatgagcaaaagctga

SEQ ID NO: 23495 - DNA, 642 bp, Homo sapiens
  SIMILAR (206)..(391): 881254mologous to Homo sapiens small GTPase RAB6B,accession number AF166492,Smith-Waterman Score=286.
  misc_feature (1)...(642): n = a,t,c or g
gcgaccgctcctctagttccacaatgtccacgggcggagacttcgggaatccgctgaggaaattcaagctggtgttcctgggggagcaaagcgttggaaagacatctttgatcaccagattcatgtatgacagttttgacaacacctatcaggcaacaattggcattgactttttatcaaaaactatgtacttggaggatcgaacaatgttaactcattccagcaaactacaaagtggattgatgatgtcagaacagaaagaggaagtgatgttatcatcatgctagtaggaaataaaacagatcttgctgacaagaggcaagtgtcaattgaggagggagagaggaaagccaaagagctgaatgttatgtttattgaaactagtgcaaagctggatacaatgtaaagcagctctttcgacgtgtagcagcagctttgccgggaattatgccttcagttcttttccaaatcattcctagccaagctctgactcgttacctatgtngtttttaataaatctgagataggctactggtaaaaaaagaaaaagaagaagggaggagtgaaaaaaaaacctcgtgccgattcttggcttcgggggcaaatacccatagtgatcgtttaattcggacctgtccagcg

SEQ ID NO: 23496 - DNA, 3195 bp, Homo sapiens
  SIMILAR (501)..(1061): 661254mologous to Homo sapiens small GTP binding protein RAB6 isoform,accession number AF130122,Smith-Waterman Score=533.
gttgggctgcggcgccggcggctggggaagccgaagcgccgcgcgtgagagatcccggatacatctgcggtttgggctccgccaccctccgtctctctcccgcaggtctttgagccgggtgcggaaggagggaacggccctagccttgggaagccaaagcacacccctggctcctgccgacaccgccctccttcccttcccagccgcgggcctcgctccgtgctcggctactctgccgggaggcggcggcggctgccagtctgtggcgagccctgctgccctccagccgggcttctccagccgggctcctcccccggcccttgcaggggcacagagagctcggcgcccgcccttccgctcgcctttttagtcagccggatggaggagcatcggtccgggacggtctctaggctgaggcggcggccgctcctctagttccacaatgtccacgggcggagacttcgggaatccgctgaggaaattcaagctggtgttcctgggggagcaaagctctgtgaaagacatctttgatcaccagattcatgtatgacagttttgacaacacctatcaggcaacaattggcattgactttttatcaaaaactatgtacttggaggatcgaacaatcaggcttcagctgtgggatactgcgggtcaggaacgtttccgtagcctcattcccagttacatcccgtgattctgctgcagctgtagtagtttacgatatcacaaatgttaactcattccaggcaaactacaaaagtgggattgatgatgtcagaacagaaagagggaagtgatgttattcatcatgctagtaggaaataaaacagatcttgctgacaagaggcaagtgtcaattgaggagggagagaggaaagccaaaagagctgaatgttaatattaatggaaactagtgcaaaagctggaatacaatgtaaagcagcttctttcgacgtgtaagcagccagctttgccgggaatggaaagcacacaggacagaagcagagaagatatgattgacataaaactggaaaagcctcaggagccaaccagtcagtgaaggaggcctgttcctgactaatctcccatgtcatcttcaacctttctttcagaagctcactggcttttggcccccttactctttcattgactgcagtgtgaatattggcttgatgccttttcccttcagtaataacgtattgcgattcatcattgctgcctgtcctgcgtggagatgatctattagcttcacaagcacaacaaaagtcagtgtcttcattatttatattttacaaaaagccaaaatatttcagcatattccagtggataactttaaaaattaggatacattttcttaacatttttttcttttttaatgttatggataatgtacttcaaaatgagggaaatcttcaacagtatgagtatggcttggttaacgagcggtatgttcacagcctacctttatctctcccttgcctttctcacctctcacttacccccattccctattaccctattcttacctagcctcccccgacttcctcaaaacaaacaagagatgggcaaagcaggcagttctaccaaggcccattgggaattatcctttaattttacaggataccacttggctgtagggctacgggaccaaggatggtcccaaaatttattctttggaggcactggattaaaaattacgggtcttcttttgagggggtcaaaaatttcaggccatccatggggtaggggcagttgcttggaatggggaaaagggctcccgggtgccatcttccaaaatggggtcctaaaggaaccttctgaggtacttaggaggtgggagggaccttagggtgtattttctggacttaaaaccaattggctcttttcacatgtgctttattagactctggggagagaaaattaaccaagtggcttcagaacaggtttttaagtatttaaatccctccacggtaagaaaatgaaagtccctaatgaactgtttcctccccaagggttttaaaattgtcaagaggttattcctgtttgtttaaaaaataagaaacctctttaagccaatagattttgccttgggttttccttttttaaaaacaattatactgtgccaggcaaggcacgtgtaaaagtttttaattccctcccagaagaacccagtggaagaatttaaaatttgggcgcctacggatcaaaacttactgaattaggtagaaataatgatgtctaaaagcttaccaaccaaaaggaccctcagcagaatatactaaaactttgctcaggacatttgaggtcaaaattgaagacggaaaccggaaaccgttttcattgtaagcccctagaggcagattcaggtaaagcattacatagtagagggaaaggagagaatggaaataaaactcaatattatgcagatttatgccattattttttagcattttttaaggttgggttctttcaggctggttttggtttgttattagacctctcatatgtttaattaactgtgcgatttagttttatatttaagctacaattaatcttttttctttgggtggatatttatttctttgcctttttttttttttaacaactttcaatcttcagatggtttcgttgtaatctattttagagcttcacccatggcaatatgtatttccccttaaaacactgcaaacaaatatacctaggagtgtgccccttttaaacctttaccagttattgtgagattccggtgtaagctaataaccccatttgtaaatacattgtttgcaggacgaaaacttctgagttacagctcaggaaaagcctgctgaatttatgttgtaagcattacttaacacagtataaagatgaaaagacaacaaaaatatcttcatacttcctcatcccctcattggaacaaaaccttaaactgggagaaccttagtcccctctctttcctcttcctcctccacttcccacttattgtcaccttgtaatattcagagagcacttggattatggatctgaatagagaaatgcttacagataatcattagcccacataccagtaacttaaagatgggatggagttgtaaagtgcttttataatacaatataattgttaaaggcaagggttgactctttgttttattttgacatggcatgtcctgaaataaatattgattcaatatgga

SEQ ID NO: 23497 - DNA, 5338 bp, Homo sapiens
  SIMILAR (383)..(991): 401254mologous to Homo sapiens Amino acid sequence of protein PRO222,accession number Y13366,Smith-Waterman Score=348.
ccgaagccggcgaccgccccacctcctccctccctcccgcccgcttcctctgcccacagcgccggccagagcgagctagacaagggcacgcggggcctcgcctagacccgagaagactgcgggcgcgcgcaagcggcggcgtggaagctgtgagcgcccccatcccggaggtctccgccggctcccgggtgaatcagctcccggccgactttaggattcttctggattttaaattttttctttttaaaaaaacttggacggataaaagatgtgccatggcaggatagcaccaaagagcacctcagtgtttgccgtggcctccgtgggacatggagtgttccttccgctagtgatcctttgcaccctgcttggagacggacttgcttccgtgtgccccctaccaccggagccagagaatggtggctacatctgccacccccggccctgcagagaccccctgacagcaggcagtgtcatcgaatacctgtgtgctgaaggctacatgttgaagggcgattacaaatacctgacgtgtaagaatggcgagtggaaaccagccatggagattagctgccgtctcaacgaggataaagacacccacacatcacttggggtccccacgctgtctatagtggcttctactgccagctccgtggcgctcattctcctcctcgtggtgctgtttgtgctgctgcagccaaagctgaagtctttccatcatagcaggcgtgaccagggggtatctggggaccaggtctccatcatggtggatggagtccaggttgcactaccatcatacgaggaggctgtatatggcagttctggtcactgtgtgccacctgctgaccccagagtacagattgtgctgtcagaagggtctgggcccagtgggaggagcgtgccaagggagcaacagctgccggaccaaggggcctgctcctctgcaggtggagaagatgaggccccaggccagtctggactatgtgaagcctggggctctcgggcctcagagactgtgatggtgcatcaggcaaccacctcttcctgggtggccggctcagggaaccgccaactggcacacaaagaaactgcagattcagagaacagtgacatacaaagccttttatccctcacgtcagaggagtacacagatgatattccactgttgaaagaagcatgagggcagcggccagcctttcctctctgcgaggttctctcagcccttcctccctctccctgtgggattgagcaccctgtactctccagccaccttacctggatacctgagctgccacctgtgtatctgtgtatctctgagggccctataggcccaccttgctggaaactcaaggaagattctcgccatctgcctgttggacagctggaggagctggctctttgcctggccccgccttcccatctgtcagagacatatttgaatgtgctggatcaaaccctcccttttcctaagcctctgggtcccctccagccagctctttggcggcagcccccaccagctcctgtgggcctgagtgctgctgtgtttacttgtgcctttcccccaccctgtccagtttccctgtcatgcagacttgttgctgtccacaagccttagtggctgcactgctgccccctgccacacagggggccgggcctgggtctgtcctgtttcctttgagggttgcccctactgccctttgcaggaacagatccaggtgtgagagctcttgagtcaagagtggcagaagtggctctaattggggtgagagtgtagtccctgggcttgccctgggttgaccctggtggcatatttccttggccgaggatggaagatttggagaatcatgtccatgctggcccaggacccagccatctggcccaaaggcacaagctcctggccctgttgagttgagagtttccaagaagcatccagaagatcccaagggagagaaggaaaatggctgataatgattgtcttcctaatatgcaagttctcacttcctacttccagcatcggccttcctggccttgtcttttttttgtttccctggagtataatgggaagttgcatgctgcctcctgggttttatcccagatagctctggctttcttgctgcccacaggggcctggggcaggaaggagacttgctgagatgccatggagtgcccatctggtcactggcagtctgggcaggttgcccctttctgggtttgtggtgacggaggggaggccgagaggcacagaccaagtccccgggtggctgcaggcagctccagcccggtcctgaggatcctcctcaccatggtcacgtgccttagtaactgtgcccaggaagtggcctgctgcttgctgtgctgctgcttttcctacttctgcccttccctgccacccctcgcatgtcacagctgacaagcaattccttgtcttccctggccccctgggggaagggctgagaaacagtccatgtgcaccccaaccttaatggcctgaggtgggcagaggggtgtggagcagcctggagtacagggccctgggggaggagcccactgatgaggggcgctctcccatagccatgtgttgaatgctaactaggctggggtggacgaactctgccaactgctgtcatcttagaagatagatgcagcagtaaggaatgtttgttttgcttttttctgaaattttctgaagcactgtggctgggaaacttcgaagcggaccctgtgctgcatgtctgctcctcccctgagcctgtctgcttgggggtggtaaaaataaaaatcccagtttattttcagtaccttacctaacagggttggctccaggcgtgggtggcctagaagatgaggggagtggtcttctcccagccttttaccctcttgcctcctgcctccgcgcttacacacgcactttaccacccggtcattccctggcctcttgctgccacttgtagtcttccttccttcctctcagggtaagggcagtgcctgctgtgcctgttggccactcccacacttcccctcccccaggagccctcatctgctgtgctgagtccaggaaagcatagttaggtagggagctggttggagaaggtgctagaactagaaggcagatgagactagcatgggcccacctggagggctgtccctaatggccccagtcgccttacctcacccacagcagtgcccttgtcttcctccaaaacagaaagcagtgacaaaagggggaggggtggtaatctgaagtctcactgctgagccttcagcttttatttttcactgtttcaaaacccgcattctattctagaatggtttttaaaatggaagatcttacctttttctatcttgttactctggggttttgtccccctaagagattgcactttttgtttggggtttattcagctgcatagatgaccagcttgatccctggtgaaatgaaaagccttccttctcctgaagcctctttccgccctgccctccactaacaacactgaggagcacaagcccaggcttgcccacctggtaggaaaggaagaaattagaacaatgggagccttggctcccctctcgtctcctcccctccttcttgtcactggctttgatgaggcccacttcccagaggctcctgggcctgtgagtgcaggagctcattctcccctcactgctgaagtctgtgacagcttcttcctccagttatgtctttcttccaaagcaatttcttaaccatcagccatgtgctgctatttctagggcttctgggctttgtcccttactgagagattagggactccacagctgccttgaggtagggcctggctgagagacaagggtagcagcaggtggcaggctgttaaaagacaggctgcctgaggagcctggagcaggtggaaacaggtggaagaaaccggccacagccctgctttaccgggctcacctctagggcattccagcaagaggctgatgcaggagaatggccagcaccaaaggacatttaaaagagtttttgggtttttttgtttgtttgttgttggtgtttgtttttttttttttttttttggcacacttgagctgactcagtgcaggtttaatatcctggtgacttgcagtcacattctaatgactttcaagggccagaatatggtgaaaatcacttaaaatatccgtcccttccatgccttagtttagcaggtaggctctatcttttgccatttctgtattttatgtgctgtgttcccgtttcactgggtatgaactgtgaaatggactgaatcctggccactttatgagtttgtttggttttataaggcatttcaatgtacattctataaatacaagcactccatttgcaaacagatcttaagctaatattttctttcccattcatcttgccctccccctcctcccaccagctttaaagttcagtggagaagccagatggcaattcagacaaaggtatactcttcctgcttcatgggtggtggcacgggaatagatagcccttagccctttccctcccagtcccagctgagccctcagaccacttgcttcccacataacaatgtcgcctccatttccgaggaacatccttgcgtagagaatgaaatatgctgcaatcatttctgcatccttactcctcacccccaaagaaaaaaaaaaggcctagcagggaagcagcatgcaggcttcacagcttaatgccaaggacagcgagtgaggctgggagcttctcttgggcctgctgggtctgtcagctctcggaatagggacagtccttactggtgccccaaggtgggacttggagaatattttgcttggcatatgtttggtctgaatggtgtagttgctggttccctagagaggaaaaggtggcaggcccagctttgctgggaaatggctcttaatttccagttgaaaccctagtagaattgtgaatgaaaacctcaaggttgagcccctctgccaagcagcagagctagtagaaggggatgcaggggcaaagcactcagttgccaagcaaggaggagagatgtacgtgggctgtgtggcagtccccacaccctgccctggcttcttcaggttatcgcaccactatggaatcctttgcagaatggtactcatataatggtttaaaacaacacattcataattgactctgtgcaggatgtcactcaatcagtttgggtttgctttattttattttatatatatattttttggtatcctgtacattgcagtgggtgtgaagatagtattttaatatttgtacaaagtttaatttaattttaattgttctatgtatataactgcatttctaaataattaaaaaaaagttcttatg

SEQ ID NO: 23498 - DNA, 750 bp, Homo sapiens
  SIMILAR (343)..(152): 381254mologous to Helicoverpa armigera nuclear polyhedrosis virus basic DNA-binding protein BDBP,accession number AF197913,Smith-Waterman Score=84.
atggagagcatttgggccggactgtggacagcacaggatactacagtccttgctgatgactttgagttcattctgtggaccctgaagcgccggccagagcgagctagacaagggcacgcggggcctcgcctagacccgagaagactgcgggcgcgcgcaagcggcggcgtggaagctgtgagcgcccccatcccggaggtctccgccggctcccgggggcgcgggaccagcgcgcaccgcccaggagtgacgctggccggagcccgggccggcttcggcggctccccgcgcttctctgcgccggcccgctgtcacccggccgcgagccgcgccgctgggagccccgcgctggcgtggcgcggccagccggccagcagtggggttttttttggcctggaaaccagcagggtgcctccatttgctctctcatcctctggttcttacttgagtgtggaagtcgctccactggtggaccttgcagtggcactgagctgggtcacttcagccgtgaaaggccaactgtactactgtcaaggcttgggacagttaagcgtccgtgaaggttcctatctccaccaccctaaccagaccttgtcatccgctggccttccaggctgtttcaatctctcttgccaggttcaccctgctagaacacggttctcctctccgtcctttgatgatgatgatgacgacgatgaagatgatgataatgttgatgatgatggaggacactcagtagcagtggactga

SEQ ID NO: 23499 - DNA, 410 bp, Homo sapiens; identical to SEQ ID NO: 3041
  SIMILAR (74)..(250): 771254mologous to Human endogenous retrovirus tripartite fusion transcript PLA2L,accession number Z14310,Smith-Waterman Score=236.
  misc_feature (1)...(410): n = a,t,c or g

SEQ ID NO: 23500 - DNA, 478 bp, Homo sapiens
  SIMILAR (33)..(1): 721254mologous to Homo sapiens PRO1488,accession number AF116636,Smith-Waterman Score=46.
gctgactcctttctcggactcagcccacctgcacccaggtgaaataaacagccctgttgctcacacaaagcctgttggtggtctcttcacaaggatgcgtgtgacatttggtgccaaaacccaggacaggagtactccttcaggagaccagtcccctgtcttcgccctcactccgtgacctcaggtcctcagaccaaccagcccaaggaacatctcaccaatttcaaattgggtaagcagtcttttcactcttctcatgcctctcttgctacccttcaatcttcctctcttgctacccttcaatctccctgtccttccaattccaattctttttcctctctagtagagacaaggagacggccaggtgcggtcgcacgcctgcaatcccagctctcagggaggctaagaggcgggaggatagcttgagcccaggagttcgagacctgcctgggcaatatagcgagaccccgttctccag

SEQ ID NO: 23501 - DNA, 362 bp, Homo sapiens
  SIMILAR (78)..(233): 781254mologous to Homo sapiens Human secreted protein, SEQ ID NO: 5210,accession number G01129,Smith-Waterman Score=216.
actcagcccccctgcacccaggtgaaataaacagctttattgctcacacaaagcctgtttggtggtctcttcacacggactcacatgaaatttggtgccgtgactcggatcgggggacctcccttgggggatcaatcccctgtcctcctgctctttgctccgtgaaaaagatccacttacgatctcagggcctcagacccaccagcccaaggaacatctcaccaattttaaatcaggaccccactgaaaatcggactgttcaactgcacctggcagccactcccagagcccctggaactctggcccaaggcgctctgactgactccttcccagatcttctcagcttagcagctgaagactga

SEQ ID NO: 23502 - DNA, 464 bp, Homo sapiens; identical to SEQ ID NO: 21420
  SIMILAR (211)..(420): 641254mologous to Homo sapiens calbindin D28K,accession number S46006,Smith-Waterman Score=213.

SEQ ID NO: 23503 - DNA, 1440 bp, Homo sapiens
  SIMILAR (271)..(663): 661254mologous to Homo sapiens hypothetical protein,accession number AL137275,Smith-Waterman Score=412.
atgctgtcagacaaatgtcagcatcagataatgcatatggatagcatgcatgacatgaccatcaccatcatgatcaccgtcaagcttcttattggagaaactgacagcatacgttttaaactagccattaaacctgcctgtgaccttgtcagcctccaccacgtttatctggatggatgcatggttcttggcaccggtgacgcggttactagcagagactttcttccgcatgtacaggtccacaagctcgccggtgtgcttttggatttcaagactgtgcctgctgccacgacactgcgtaattcttctattccttcagctcttcctgaaccgatgactgctagtgaagcagctgctaggaaaagccaaataaaagccagaataacagataccattggaccaacagaaacctcaattgcaccaagacaaagaccaaaggccaactctgctactactgccactcccagtgtgctgaccattcaaagttcagcaacacctgttaaagtccttgctcctggtgaattcggtaaccatagaccaaaagagtacagtgtctctcccggcggctttcatgggctggccgttgagtatcagcagctttttcaggcgcatgttgcaagctgtaggattgaacagttgcatttgaatgtaggcagccgccacagcagcatagagtactccagcaactacagcagggagattggagattacagcaactccatttacagcatcgtcatcctcaccagcagcagcagcagcagcagcagcaacagcaacagcagcagcagcaacagcaacagcagcagcagcagcagcagcagcagcaccaccaccaccaccaccaccacttacttcaagatgcttatatgcagcaggtcagttgctgataaagaggccattgcaaatttcacaaatcagaagaacatcagcaatccacctgatatgtcagggtggaatccttttggagaggataatttctctaagttaacagaagaggaactattggacagagaatttgaccttctaagatcaaactcagcccacctgcacccaggtgaaataaacagccatgttgctcacacaaagcctgtttggtggtctcttcacacagatgtgcatgaaatttggtgccgtgactcggatcgggggacctcccttgggagatcaatcccctgtcctcctgttctttgctccatgagaaagatccacctacaacctcaggtcctcagactgaccggcccaaggaacatctcatcaattttaaatcaggagcttgctacacgtgccggaaatctggccactaggccaaggaatgcctgcagcctgggattcctattaagccgcatctcatctgtgtgggaccccactgaaaatcggactgttcaactcacctggcagccactcccagagcccctggaactctggcccaaggctctctga

SEQ ID NO: 23504 - DNA, 747 bp, Homo sapiens
  SIMILAR (1)..(228): 471254mologous to Homo sapiens PRO2221,accession number AF116695,Smith-Waterman Score=167.
atgaaaaagaatcaaccaaaaaatgccgaacatccaaaaggccagagtgccccttctcctccagatgattgcaatgcctctccagcaagggtgcagaactggacagaatatgagatgaacaaattaaaagaagtaggcttcagaagatgggtaataaaaaactctgctgagctaaaggagcatgttaaaatccaacacaaagaagctaagaactccaataaaaggcttgcattcttggaaggtaaagggataagaagctgtgaagaaagagaggagctcaagaaagagtttgcattggcaagcaagattgcaaggttacgagaaattcatggccttgcaatgttggaaaagccaaccaatcaactaatttcatactccaaacggagtgagaaggtgcctccctactacagggcagagtgtggtgaaacctctccctgggctttccctagtactaggctggctggagagtcaggggtgccttatgactgctccacatgccctccttctttcccagcccgcctgcacccaggtgaaataaacagccatgttgcttacacaaagcctgtttggtggtctcctcacacggacacgcatgaaatttggtgccttgactcggatcgggggacctcccttgggagatcaatcccctgtcctcctgttctttgctccatgagaaagatccacatacgccgtcgagaaagatccacatacgacctcagggaaaccatgaaagtcagaaaggactga

SEQ ID NO: 23505 - DNA, 1723 bp, Homo sapiens
  SIMILAR (756)..(914): 711254mologous to Homo sapiens Human secreted protein, SEQ ID NO: 5210,accession number G01129,Smith-Waterman Score=176.
  misc_feature (1)...(1723): n = a,t,c or g
cctggtgactaggatgtcgtcggaggagaacaagtgcgtggagcagccgcagccaccaccccccgaggagcctggagccccggccccgagccccccagccgcagacaaaagacctcggggccggcctcgcaaggcgcttcccctttccagagagccagaaagaaactcagcccacctgcacccaggtgaaataaacagctttattgctcacacgaagcctgtttggtggtctcttcacacggatgcgcatgaaatttggtgccgtgacttggatcgggggacctcccttaggagatcaatcccctgtcctcctgctctttgctccgtgagaaagatccacctacgacctcaggtcctcagaccaacccagcccaaggaacatcttgccaatttcaaatcggaagataggagtgtcaggcctctgagtccaagctaagccatcaaatcccctgtgacctgcacgtgtacatccagatgacctgaagcaactgaagatccacaaaagaagtgaaagtagccttaactgatgacattccaccattgtgatttgttcctgccccacgctaactgataccatatattcttcccccgcccttgagaatgtactttgtacacctatcccaaaacctgtaagaactaatgataatcctaccaccctttgctgactttttttttggactcagcccgcctgcaccccaggtgaaataaacagctttattgctcacacaaagcctgtttggtggtctcttcacacggacgcacatgaaatttggtgctgtgactcagatcgggggacctcccttgggagaatcaatcccctgtactcctgtgttctttgctccgtgagaaagatccacctacgacctcaggtcctcagaccgaccagcccaaggaacatctcaccaatttcaaatcgggtaagtggtcttttcactcttctccagcctttnttgctacccttcaatcttcctctctcactacccttcaatctccctgtccttccaattcccgttctttttcctctctagtagagacgaaggagacacattttatctgtgggacccaaaactccagcaccggtcacagactcaggaagacagtcttcccttggtgtttaattattgcagggatgcctctctgattattcacccacactccattggtgtctgatcaccacggggatgcctgccttggtccttcacccttagcggcaagtcccgcttttctgggaaaggggcaaaccatcacggacgccgagcttcgggtaactctcacagtggaggactcagcccgcctgcacccaggtgaaataaacagccatgttgctcacacaaagcctgtttggtggtctcttcacacggatgcacgtgaaaccacacacctgcaacgaactcattttcaacaaaggaactatagggttggggccacaacggacagccctgattatgacaatgtccaagaactctgggattacagctgcaacagagtccctaaaactttagagctacccatgtgcaacatcagcgtggaaaagctacaggaatatgactccaactctagaactgctgcatgggctgactatagcaaagccataggcatggggctatccaaggtcatgggatcccaacccctgccccagtgtgtccaggacgcaggacatggagtcaagaaaaattattctggagacttaagttttgatattgtttaccctcttgtgttttag

SEQ ID NO: 23506 - DNA, 1260 bp, Homo sapiens
  SIMILAR (157)..(1218): 821254mologous to Homo sapiens nucleosome assembly protein 2,accession number U77456,Smith-Waterman Score=1557.
atggggaagaaagtccttggcattgcatctcagctgttgggagctgtgcggtgcgagccagatgggcggcgtgtgctccccgaggactggcctgagtgccttagcctagttactcacgggacttggtttaccagacaaggggataaaaacattcagatggcagataacagtttttcagatggggttccttcagatttcgtggaagctgctaaaaatgcaagtaagacggaaaagctcacggatcaggtgatgcagaatcctggagttttggcagctttacaggagcgacttgacaatgcccctcacaccccttccagctacatcgaaactttacctaaagcagtaaaaagaagaattaatgcattgaaacaaattcaggtgagatgcgctcatatagaagccaagttctatgaagaagttcatgacttggaaagaaaatatgcagcattataccagcctctctttgacgagagaagagaatttatcaccggtgatgttgaaccaacatctgatatggaatcagaatggcaccgtgaaaatgaagaggaggagaaattggctggagacaggaaaaataaagtagtcataacagaaaaagcagcagcaacagctgaagagccaaatcccaaaggaattccagagttctggtttaccatctttagaaatgtagatatgctaagtgaattagtccaggaatatgatgaaccaatcttgaaatacctgcaggatattaaattccactttcaacccaatgactgctttgccaactcagtcctgacaaaaacctgcaagatgaaatcagaaccagataaggctgatcccttttcatttgcaggtcctgagatcatggactgcgatgggtgtactattgactggaagaaaggaaagaatgttactgtcaaaaccatcaagaaaaagcagaagcgtaagggtccaggcactgttagaacaattaccaaacaagtatccaatgagtcatttttcaacttcttcaatccactgaaagcatctggggacggagaatcactggataaagattctgaattccctctgattttgaaattggacactttttccgtgagcggaccacaggctgtgctgtacttcgctggggaggccttaaaggatgatgacaattttgacgaaggtgaagaagaagaggacgaattagaaggtgatgaggagggagaagatgaggatgaggtggaaattaatcccaacaaggaacccagccagccggcggaatgcaagcagcagtag

SEQ ID NO: 23507 - DNA, 1647 bp, Homo sapiens
  SIMILAR (150)..(1274): 1001254mologous to Homo sapiens nucleosome assembly protein 2,accession number U77456,Smith-Waterman Score=1971.
ggcacgagcttgctcgcggagagaggagctaggagcctcggccaatgggagccggcgttgttggaggccacggcggcgcagccccaaagcgagcgaagctagggtcgccgccactgccgcaggaggcgtgaggggataaaaacattcagatggcagatcacagtttttcagatggggttccttcagattccgtggaagctgctaaaaatgcaagtaacacagaaaagctcacagatcaggtgatgcagaatcctcgagttctggcagctttacaggagcgacttgacaatgtccctcacaccccttccagctacatcgaaactttacctaaagcagtaaaaagaagaattaatgcattgaaacaacttcaggtgagatgtgctcacatagaagccaagttctatgaagaggtacatgacttggaaagaaagtatgcagcgctataccagcctctctttgacaagagaagagaatttatcaccggcgatgttgaaccaacagatgcggaatcggaatggcacagtgaaaatgaagaggaagagaaattggctggagacatgaaaagtaaagtagtcgtcacagaaaaagcagcggcaacggctgaagagccagatcccaaaggaattccagagttctggtttaccatcttcagaaatgtggacatgctgagtgaattagtccaggaatatgatgaaccaatcttgaaacacctgcaggatattaaagtgaaattttctgaccctggacagcctatgtcttttgtgttagagttccactttgaacccaacgactactttaccaactcagtcctgacaaaaacctacaagatgaaatcagaaccagataaggctgatcccttttcctttgaaggtcctgagattgtggactgtgacgggtgtactattgactggaagaaaggaaagaatgttactgtcaaaaccatcaagaaaaagcagaagcataagggtcgaggcactgttagaacaattacgaaacaagtacccaatgagtcctttttcaacttcttcaatccattgaaagcatccggggatggagaatcactggatgaagattctgaattcacattagcctctgattttgaaattggacactttttccgtgagcggatagtcccgcgggctgtgctgtacttcactggggaggccatagaagatgatgacaattttgaagaaggtgaagaaggagaagaggaggaattagaaggtgacgaggagggagaagacgaggatgatgcggaaattaaccccaaggtgtaatttttgtctgttaatcattcatacgtttctagaaggaacccagccagccggcggaatgcaagcagcagtaggaagcggaggcgggtgcctggcagaccggctgtcgggactccaggcctgtgggcggggcctcggtccttgccgcagcacaatcccgtggacagagcttactccatctaactcgttttcaagtgcatgattttcactttcacttttcctttttccttattattttgattaacttgtacagtggcaactgaaatgcatttcagaaataggaggtttcgtccagcaccctctgcagccttggtgcctgtagctctggacttccctgggcctttccctgtgggagggccctgtagaccacatc

SEQ ID NO: 23508 - DNA, 762 bp, Homo sapiens
  SIMILAR (531)..(626): 681254mologous to Homo sapiens longest open reading frame,accession number X02490,Smith-Waterman Score=98.
cgcgtgaggcaccgctctgtaagtgtcgggtccacccacgcgtccgcccacgcgtacggggagggctcactgagaatcatcccggtaacccgatcaccgctggtcaccatgaaccacattgtgcaaaccttctctcctgtcaacagcggccagccgtcccaactacgagatgctcaaggaggagcaggaagtggctatgctgggggcgccccacaaccctgctcccccgacgtccacctgtgatccactatccgcagcgagacctccgttgcctgaccatgtcgtcctggtccctgttcaacaccgctcttcatgaacacctgctgcctgggcttcatagcattcgcctactccagtgaagtctagggacaggaagatggttggcgacgtgaccggggcccaggcctatgcctccaccgccaagtgcctgaacatctgggccctgattttgggcatcttcatgaccatttttgctcatcatcatcccagtgttggtcgtccaggcccagcgatagatcaggaggcatcatttgaggccagggagctctgccccgttgaacctgtaatcccaccgtactctatctttcattcctcgccctgcccccagaggccaggagctctgcccttgacctgtattccacttactccaccttccattcctcgccctgtccccacagccgagtcctgcatcagccctttatcctcacacgcttttctacaatggcattcaataaagtgtatatgtttctggtgcaaaaaaaa

SEQ ID NO: 23509 - DNA, 859 bp, Homo sapiens
  SIMILAR (290)..(604): 391254mologous to Homo sapiens longest open reading frame,accession number X02490,Smith-Waterman Score=107.
tgctcccttgggctctagagaggaggcccctcttagccctcagcccctccttcctctctatcttaaagtaatttgatcctcaggaatttgttccgccctcatctggcccggccaaatcccgatttgacaaatgccaggaaaaggaaactgttgagaaaccgaaactactggggaaagggagggctcactgagtaaccatcccagtaacccgaccgccgctggtcttcgctcggacaccatgaaatcacactgtccaaaccattcttctctcctgtcaacagtggccagcccccccaacgtatgagatgcatcaaggaggagcacgaggtggctgtagctgggggcgccccacaaccctgctcccccgacgtccacccgtgatccacatccgcagcgagacctccgtgccccgaccatgtcgtctggtcccgtgttcaaacaccctcttcaatgaacccctgcatgccgtgggcttcatagcaattcgccttactccgtgaagtcttagggacaggaagatggttggcgacgtgacacggggcccaggccctatgcctccacccgccaagtgcctgaacgatctgggcccatgattctggggcatccgtcatgaccattctgctcatcgtcatccccagtggctgatcttgccagggcctattggatagatctaggaggcatcactggaggccaggagctttggccatgaccttgtatcccacgtactccaactttccattcctcggcctgccccccggagcccgaagtcctgtattcaggccctttatcctcacacgcttttctacaatggcattcaataaaagtgcacgtgtttctggtgaaaaaaaaaaaaaaaaaa

SEQ ID NO: 23510 - DNA, 1499 bp, Homo sapiens
  SIMILAR (420)..(536): 941254mologous to Homo sapiens dJ999L4.1 (ribosomal protein L12),accession number AL132821,Smith-Waterman Score=195.
caaggtgcaacttccttcggtcgtcccgaatccgggttcatccgacaccagccgcctccaccatgccgccgaagttcgaccccaacgagatcaaagtcgtataccttgaggtgcaccggaggtgaagtcggtgccacttctgccctggcccccaagatcggccccctgggtctgtctccaaaaaaggttggtgatgacattgccaaggcaatgggtgactggaagggcctgaggattacagtgaaactaaccattcagaacagacaggcccagattgaggtggtgccttctgcctctgccatgatcatcaaagccctcaaggaaccaccaagagacagaaagaaacagaaaaacattaaacacagtgggaatatcacttttgatgaaaatggtaacatttgctcgacagatatgcggcccgatccttatccagagaactctctggaaccactaaagagatcctggggactgcccagtctgtgggctgtaatgttgatggccgccaccctcatgacatcatagatgacatcaacagtgagaatgacaaacagccacgaaagagtaagatgagaacttcattcagtccccagattccagggcatgaacactttcactaccttctgcttcttcagcacgttcactgccagttagctttgacattaagagcgaggaaggaaggaagttccacccatcaccagaagctctccacttattacttcaaggaaggaaattccaaggaaccaaagaagatacagagatgcaggaacactgagctcaggaaggaagagggtggaggtgggtctgggaaagccccagggtctgagataaagctggagtccccggcgtgcagtggagcctcgctgggggaaatgacagcttggaccatgggcgcccgcggtctggacaagcgaggaagtttctttaagggccctttgcctaacacatgcggtcacttttgggagatggtgtgggagcagaaaagcaggggtgtcgtcatgctcaacagagtgatggagaaaggttcggttgttgagtttgtgactgagctgtttttctatgttgcgctccctaagatgttcccagtccattatattgttatcttgttagcatcaaagttggaagaagtcaccttcaacttcccaccaccccccgacctttgcaccccctttctccagaattacctccgagttgcatttcaggaggtcaacagtggttgcacaggaaagaccctccttgtgagaccttacatcaccactgaggatgtgtgtcagatctgcgttgagaagttcaaggtgggggaccctgaggagtacagcctctttctcttcgttgacgagacatggcagcagctggcagaggacacttaccctcaaaaaatcaaggcggagctgcacagccgaccacagccccacatcttccactttgtctacaaacgcatcaagaacgatccttatggcatcattttccagaacggggaagaagacctcaccacctcctag

SEQ ID NO: 23511 - DNA, 1094 bp, Homo sapiens
  SIMILAR (350)..(135): 371254mologous to Homo sapiens testis-specific basic protein Y 1,accession number AC006370,Smith-Waterman Score=97.
  misc_feature (1)...(1094): n = a,t,c or g
tttcgtgctcggaggaggccaaggtgcaacttccttcggtcgtcccgaatccgggttcatccgacaccagctctcctccaccatgccgccgaagttcgaccccaacgagatcaaagtcggtgcgtgctctggttgtggccggggctgcgggatggagcatccctcggccctgccgcgcgtgcaaagctttccccgtatggggctcttaaagccgctgcctcccagagaccttcccggtgttgcgccgccccggccaagcctcagcctttctgggccttagcttcttcacgtgtaggtggggagggaggactggaccacctgtggcggcttgggagcccgcacgccctaggtataccttgaggttgcaccggtagtagaggtacggtgccactttctgcccttggcccccaaagaatcggcccccctgggtcctgtctccaaataaaaagttgggtgaatgacatttgccaaaggcaaccgggtgaactggaaagggccctgaggatttacagtgaaactgacccattcaagaacaggacaggccccagattgcacgcgggtgccttcttgccttcttgcccttgattcattcaaagcccttcaagggaaccacccaagagaccagaaaagaaaccagaaaaaacatttaaacaccagttgggaatattcacttttttgaatgagatttgttcaacattgcttcgacagatgcgggcaccgatcccttagcccagagaaactctcttggaaccccacttaaagagattcctggggaattgcccagttcagtggggctgtaaatgttgatgggccgccattcctcatgacattcatcgatgacattcaacagtgggtgctgtggaaatgcccacgccagttaagcacaaaggaaaacattttcaataaagggatcatttgacaactaaataaaatttttaaatataatnnnnnnnnnntaaaataaaaaattatattttaagggggggccctttttaataattccctgggggggccccaatctcccgcggaggggaaaaannnnnnnnnnctcttatggggggctataaataccctcttttggtttttggaaaaaa

SEQ ID NO: 23512 - DNA, 645 bp, Homo sapiens
  SIMILAR (199)..(642): 721254mologous to Homo sapiens NAG13,accession number AF194537,Smith-Waterman Score=481.
atgggggctgacatcccccttgctgttctcatgacaggcatctctgcaggaaatgcagcagccccagtcacgggcttacagacacctcatatggaagagctccagctggcatcaggccagcgcccctctgggatgaagcttctggaggaaggagcagacaacaatctttgctgttttgcagcctccactggtgatacccaggtcagtatcatcctgataccaaaacctggcagaggcacatcaaaaaaagatatcttcagaccaatatccctgatgaacattgatgagaacatcctcagtaaaatactggcaaaccaaatccagcagcacatcaaaaagcttatctgccacgatcaagtcagcttcatccttgaaccatgcaaggctggttcaacatataaaatcaataaacataattcatcacataaacagaaccaatggaaaaaaacacatgatatctcaatggatgcagaaaaggcctttgataaaattcaacatcccttcatgttaaaaactctcaataaactaggtattgatggaacatatctcaaaataataagagctatttatgacaaacccatagccaatattatactgaatgggcaaaagctggaagcattcactttgaaaaccagcacaagataa

SEQ ID NO: 23513 - DNA, 2440 bp, Homo sapiens
  SIMILAR (181)..(363): 781254mologous to Homo sapiens Human secreted protein, SEQ ID NO: 6688,accession number G02607,Smith-Waterman Score=228.
  misc_feature (1)...(2440): n = a,t,c or g
atggcagaaggcacctcttttcacatggtagcaggagagagaatgagtgccaagcaaagggggaaagcatcttataaaaccaaaagatctcaagagaactcactactacaagaacaacatgggggaaaccacccccatgattcaattatctccacctggtcccacccttcacatgaggagattgttacaattcaagatgcagaaaagacctttgataacattcaagagcctttcatgttaaaaactcccaataaactaggtattgatgaaacatatctcaaaataataagagttatttatgacaaatccatagccaacatcatactgaatgggcaaaagctggaagcattacctttgaaaactgtgtttctgaagataacaacagctcaaagtaatgacttctgcagaaatggaaatttcagtcaccagatcaggctttatggcaaaagaaggcaccaagccaccccagtggatgtgaagtggtatctcattgtggttatgatttgcatttccaatgatgactctttagtgtgcagagaaatcatttttcttgagcgtttattactgaagcccacttcgccccgcgcatttgcccgcccctctcgtcctcgctactcgggcggcttcggcagccgattcacttgccctcgggcggcagcggtcccactagctcagtgtctgcccaaacagctgcccagttttctgcttgaaacccagggccctggtggtgtaggcacacaaggaaatctcctgatctgcagattgcaaaaaccgtgggaaaagcatagtaaccggccagattatgtcgaggtatcagtacgtgcggccagctcgatccggcgtttctggcccgcttcaaggaacgggttcggctacaggggagggaccccnccgtagagactaagagaattcagcctcagcccccagatgaagatggggatcacagtgacaaagaagatgaacagcctcaagtggtggttttaaaaaagggagacctgtcagttgaagaagtcatgaaaattaaagcagaaataaaggctgccaaagcagatgaagaaccaactccagccgatggaagaatcatatattcgaaaaccagttcaagcatccctcagatgaaaaatattcaggtttaacagctagctcaaaaaagaagaagccaaatgaagatgaagtatatcaggactcggtcaaaaagaactcacaaaaactaattataaatagtagcctgctttcttttgacaacgaagatgaaaatgacacagaaaaatccatggagaatttgacagggaaaataaggaagttacaactgaggattgttgaccccacttttctgcctaagttgtcaaataaagggaaagacccagttgctgtagcccgactggaaacaggaaaaggaaacaagggagccttcagggtcctgagagacatttctagatgggccactctctgcacaagccctcagcacagttcctcagaagcaaagaacattataccttaccaagccacacaattccagaatgaagttcacaaatggtacaaaaagaagggagggctgaagatctccaagcgaaaggctttatttttcctaactcaagatattcagaagaaactccaaaaactagcactaggccccaacacccctacacctgacatccttaaaatagcttccttggtcttttacaaccaggaccaggaggaaaaggaaagggctcagcaaaatgagaggcaaaaggaaaagctctactggttgtcctacaagtctgccagccctttccaggttgcactcagaatactctcccaggaaaccacacacaaggatgagctgcccacagaccttcccaataatccagaggtccaggccccaggaataccaggaaacaccataatggcaatgcctgtagcaattcagcttaaagatccttctagctatccttgtagaatcattaaagtaccagagattgccagctggatacatcgtacccaagtgaagctgtggaaaagccctgaaacatcagaactggaaccaacaccctcagttatagaatatactcgagaggcactggaagatctgaaattcctctttaagcaaaaagataactcttccgctaaaacaccaggaagagcttatgcagcctcgcccagagactggacaagcatagaggcagaattacatattttctatcagtgggaccctaatctgaaagggatgttcaagcctgcaagccttcttgcaaaagtaaagcaagatttccctgatatccacaaggaatctcccattttcagagccatcttttctaatatcactttaatgggaatagcccctatctgtgttacaggtaaaacaatcaagaaacgtacaaggcaacatcacacaactcccaaatccaatttacgggaacaagcctctcagggttcgttaaattgggaaggaaactag

SEQ ID NO: 23514 - DNA, 3164 bp, Homo sapiens
  SIMILAR (934)..(1725): 1001254mologous to Homo sapiens A secreted protein encoded by clone gm243_1,accession number W80403,Smith-Waterman Score=1365.
  misc_feature (1)...(3164): n = a,t,c or g
atggagggggacgcacgaaccgaacaaccagatgatccagtaaatagtaaatacagtaacacatactgtatatcaagctctgttcaaagtgcttcacatatgagtaacccgtttaataaacttcacatgaatctcaattcaaaggttaagattctgtgtcaccagttgctggtccaggtttgtgacctgctcaggctaaaggactgccacctctttggactcagtgttatacaaatcagactatatgacttggaaatatcgggtcagtttcttctatattctttcatgtcgtctcctgaaaaaaaatgtacagataatgaacatgtgtatatggagttgtcaaaaaagctttacaaatattgtccaaaagaatggaagaaagaggccagcaaggtacgacaatacgaagtcacttgggttgtttccaagagggggaaggactacatcctgaagcacattccaaacatgcacaaagatcagtttgcactaacagcttccgaagctcatcttaaatatatcaaagaggctgtccgactggatgacgtcgctgttcattactacagattgtataaggataaaagggaaattgaagcatcgctgactcttggattgaccatgaggggaatacagatttttcagaatttagatgaagagaaacaattactttatgatttcccctggacaaatgttggaaaattggtgtttgtgggtaagaaatttgagattttgccagatggcttgccttctgcccggaagctcatatactacacggggtgccccatgcgctccagacacctcctgcaacttctgagcaacagccaccgcctctatatgaatctgcagcctgtcctgcgccatatccggaagctggaggaaaacgaagagaagaagcagtaccgggaatcttacatcagtgacaacctggacctcgacatggaccagctggaaaaacggtcgcgggccagcgggagcagtgcgggcagcatgaaacacaagcgcctgtcccgtcattccaccgccagccacagcagttcccacacctcgggcattgaggcagacaccaagccccgggacacggggccagaagacagctactccagcagtgccatccaccgcaagctgaaaacctgcagctcaatgaccagtcatggcagctcccacacctcaggggtggagagtggcggcaaagaccggctggaagaggacttacaggacgatgaaatagagatgttggttgatgacccccgggatctggagcagatgaatgaagagtctctggaagtcagcccagacatgtgcatctacatcacagaggacatgctcatgtcgcggaagctgaatggacactctgggttgattgtgaaagaaattgggtcttccacctcgagctcttcagaaacagttgttaagcttcgtggccagagtactgattctcttccacagactatatgtcggaaaccaaagacctccactgatcgacacagcttgagcctcgatgacatcagactttaccagaaagacttcctgcgcattgcaggtctgtgtcaggacactgctcagagttacacctttggatgtggccatgaactggatgaggaaggcctctattgcaacagttgcttggcccagcagtgcatcaacatccaagatgcttttccagtcaaaagaaccagcaaatacttttctctggatctcactcatgatgaagttccagagtttgttgtgtaaagtccgtctgtgtgcagctgtacaggcagcttactgtttgctagaggatgcgaaagtcataagttctttacatattacttgtgccatatcttcttcaccctaaacatagctctttctttataatatttgtgatgatggaaacaaaagccttggaacaattgcactttaagtattacacagaagtaaaagaactacagaaaatgtacagcaagacaagtgcccggaagttcactgatccttcagaaggaaatgcgctttactgattgcaaagccttcagaatattggagtgtggtgtgtttgctcatctgatgctttttagttcagttacatgtaacatcacatttttttatcacgtgaaagatgttagatttgtttgcttataaattttttaccactcccacataaaatgctcatagtttgggagaggaaagagggaagattctctcttcttttaacagagagatgattgctctgtatacccattgcttcctccctgaggctgtccccaaagtgaaccacttgnatggagtggtcaaaatcataaggttgtagcaagccaaagatacgtaattgtgacagaaagcacataagcaataagcagaaaaccacgaagtgcatgctgtgatgcctgtgactccttacatcccgctcagtgccatgtcctcttttgtgatcttccagaaagctccagggattcatttgagttccacatccaagtaacagatgaattatattcatgttgtaatgcattttgtgggagtttaccaaaaccagtgtctgttaaaactttgggaaaatgtctttagaaaaacggttggtgcttgggtgattgcctttatttgtttaattatcaagaacaaattatggcaatgctagtttctgcttaaccaaaatactctgtgtatatattatacatatataaatacatgggattgtgtatgtctatatgtgtttaaagcttactatgtcttcattttggcttccatgactatcttttatacatggaattccttaagattgagaatatgtcactgagtgaatgatacctgcagacagtcagttgatatatgtagagttcagaatgactggttttctcatgtgcctttggccatggattcctcaacactggattgtataacagaattttggggggggagcttttaaaaaataatgactgagtctcccaccagaccgattacatcattctcttgtggcgggaccccaggtagaattgccttttcttttaaagttctccagatggagctaatatgcaacaaagttgaaaaccactgatcctgggggtgtcttgttaattttgaagtaaaagtgtacagaagacgtagtggtatgagaaagggccatttttaagacagttacctgttgtgctgctgttacaatatataatgaaaccaagtcaggggagtgaatttatcaa

SEQ ID NO: 23515 - DNA, 454 bp, Homo sapiens
  SIMILAR (194)..(274): 1001254mologous to Homo sapiens dJ34B21.3 (PUTATIVE novel protein),accession number AL031778,Smith-Waterman Score=142.
  misc_feature (1)...(454): n = a,t,c or g
cttaagatgcgtgcaattaagggctttggcgggattggctccncgtttgggctggtccgctgctccccacctaccagggtcggatccggagcccttccccgcgggcganccatccaaacaaccgactcctttccaggtgaagggtgacttggctgaagaaacacttaaattctggaaatagcgactcagtatcatggccagcagccttaatgaagatccagaaggaagcagaatcacttatgtgaaaggagacctttttgcatgcccgaaaacaagactctttagcccactgtatcagtgaggattgtcgcatgggcgctgggatagctgtcctctttaagaagaaatttggaggggtgcaagaacttttaaatcaacattacaaagaaaaggggcttcgcacaagccaactttatgganaacttacagaagaagttntagagggcaatggaag

SEQ ID NO: 23516 - DNA, 819 bp, Homo sapiens
  SIMILAR (13)..(249): 1001254mologous to Homo sapiens dJ34B21.3 (PUTATIVE novel protein),accession number AL031778,Smith-Waterman Score=426.
cccacgcgtccggatccagaaggaagcagaatcacttatgtgaaaggagacctttttgcatgcccgaaaacagactctttagcccactgtatcagtgaggattgtcgcatgggcgctgggatagctgtcctctttaagaagaaatttggaggggtgcaagaacttttaaatcaacaaaagaaatctggagaagtggctgttctgaagagagatgggcgatatatatattacttggattggatgtggtcttgatcgtctgcaatgggaaaatgtatctgcgatgatcgaggaggtatttgaggcaacagacatcaaaattactgtgtacacactctgaaccagtgaacattttggatgtttccgtgttctcctgtgtcatctctactgggccataggaccgggcaaacctaccttaaaataggcagaggaaagtttcatgagaagtagtgtgtttaacaagacagactttggttgctgtattcaagtatttggattatgactgtggaggagggcttgcttaagatatgtggttgtgtttttttgtggaaaagtaaggagttaggtggcttgataataggcagggaaaccagattgtcgggactatgacctttttctccagtatgctacctgatttgtttggctggccactaggtggcagcattggttctacttctctgctttttaagagaaatttcaggaaggatgatcattccagttagtttggcattttttgtcgtttgtgcacataacttggtgttatccttatgtcatcagattcctcctaggggagagtatggaaaaataaaaatttggggagtt

SEQ ID NO: 23517 - DNA, 588 bp, Homo sapiens
  SIMILAR (322)..(185): 411254mologous to Enterobacteria phage 186 Orf69,accession number U32222,Smith-Waterman Score=70.
aaatgagcagtggataagattagtaatatgaacagcaagttgtgcagcctccggaaagaatgcgcaagggtatcaatcttctaagagtgaggttccaggcaccgaatggacggtcagcgagacccgccaatcggggcgctggggccggctctgggccgctggatattggctcctcacactcaccgtgcctcgctcccccggttcgctgcccgcgctgttagatgcgtgcaattaagggctttggcgggattggctccgcgtttgggctggtccgctgctccccacctaccagggtcggatccggagcccttccccgcggggcggggacctccaaacaaccgactcctttccaggtgaagggtgacttgggtacgtgattatttgtttttatgctttgagtggatatagcttaaaagagaggagcagtttcctagatactttcgttaccatcaatggagatattttgtctttttcaggattggatgtggtcttgatcgtctgcaatgggaaaatgtatctgcgatgatcgaggaggtatttgaggcaacagacatcaaaattactgtgtacacactctgaacgtgattg

SEQ ID NO: 23518 - DNA, 1254 bp, Homo sapiens
  SIMILAR (217)..(615): 521254mologous to Homo sapiens Human secreted protein, SEQ ID NO: 5272,accession number G01191,Smith-Waterman Score=266.
taccgggcgggggcggccatcttagatgcgtgcaattaagggctttggcgggattggctccgcgtttgggctggtccgctgctccccacctaccagggtcggatccggagcccttccccgcggggcggggacctccaaaccaaccaactcctttccaggtgaagggtgacttggctgaagaaacacttaaattctggaaatagcgactcagtatgcatggccagcagccttaatgaagatccagaaggaagcagaatcacttatgtgaaagggagccctttttgaaggcccgaaaacagactttttagccccctgtatcagtgaggattgtcgcatgggcgctgggataacctgtcctctttaagaagaaattttggaggggtgcaagaacttttaaatcaacaaaagaaatcttggagaagttggctgttctgaagagaagatgggggcgattatatatatttacttggattaccaaaagaaaaagggctttcgcacaaagcccactttatgaaaacttaacagaagagtttagagggcaattgaagtctcatttgtctgaagaatggagtcactgacctctccatgcccaggattggatgtggtcttgatcgtctgcaatgggaaaatgtatctgcgatgatcgaggaggtatttgaggcaacagacatcaaaattactgtgtaccccactctgaacccagtgaaccatttgggatgtttccgtgttccccctgtgtccatctctactgggccataggaccgggcaaacctaccttaaaataggcagaggaaagtttcatgagaagtagtgtgtttaaccaagacagactttggttgctgtattcaagtatttggattatgactgtggaggagggcttgcttaagataatgtggttgtgtatttttgtggaaaagtaaaggagttaggtggcttgataataggcagggaaaccagattgtcggggactatgacctttttctccagtatgctacctgatttgtttggctggccactagggggcagcattggttctacttctctgctttttaagagaaatttcaggaaggatgatcattccagttagtttggcattttttgtcgtttgtgcacataacttggtgttatccttatgtcatcagattcctcctaggggagagtttttgttttaattacaaaattaaattctacattgttaccaagaaatttgtggtgataaaaatggaaaaataaaaatttggggagttagtgaaa

SEQ ID NO: 23519 - DNA, 2241 bp, Homo sapiens; identical to SEQ ID NO: 11853
  SIMILAR (265)..(1146): 1001254mologous to Homo sapiens calmegin,accession number D86322,Smith-Waterman Score=1569.

SEQ ID NO: 23520 - DNA, 2727 bp, Homo sapiens
  SIMILAR (315)..(1136): 971254mologous to Homo sapiens calmegin,accession number D86322,Smith-Waterman Score=1437.
gcgaccgccgcgggaactggtctgaagagacgcggggaccaagtggcaacgacttggacatctgagctgtcactgccgaaaacaggccgcaagagagataatcaatatgcatttccaagccttttggctatgtttgggtcttctgttcatctcaattaatgcagaatttatggatgatgatgttgagacggaagactttgaagaaaattcagaagaaattgatgttaatgaaagtgaactttcctcagagattatatataagacacctcaacctataggagaagtatattttgcagaaacttttgatagtggaaggttggctggatgggtcttatcaaaagcaaaagaaagttgacatggatgaggaaatttcaatatacgatggaagatgggaaattgaagagttgaaagaaaaccaggtacctggtgacagaggactggtattaaaatctagagcaaagcatcatgcaatatctgctgtattagcaaaaccattcatttttgctgataaacccttgatagttcaatatgaagtaaattttcaagatggtattgattgtggaggtgcatacattaaactcctagcagacactgatgatttgattctggaaaacttttatgataaaacatcctatatcattatgtttggaccagataaatgtggagaagattataaacttcattttatcttcagacataaacatcccaaaactggagttttcgaagagaaacatgccaaacctccagatgtagaccttaaaaagttctttacagacaggaagactcatctttatacccttgtgatgaatccagatgacacatttgaggtgttagttgatcaaacagttgtaaacaaaggaagcctcctagaggatgtggttcctcctatcaaacctcccaaagaaattgaagatcccaatgataaaaaacctgaggaatgggatgaaagagcaaaaattcctgatccttctgccgtcaaaccagaagactgggatgaaagtgaacctgcccaaatagaagattcaagtgttgttaaacctgctggctggcttgatgatgaaccaaaatttatccctgatcctaatgctgaaaaacctgatgactggaatgaagacacggatggagaatgggaggcaacctcagattcttaatccagcatgtcggattgggtgtggtgagtggaaacctcccatgatagataacccaaaatacaaaggagtatggatacccccactggtcgataatcctaactatcagggaatctggagtcctcgaaaaattcctaatccagattatttcgaagatgatcattcccattcttctgacttctttcagtgctcttggtttagagctttggtctatgacctctgatatctactttgataattttattatctgttcggaaaaggaagtagcagatcactgggctgcagatggttggagatggaaaataatgatagcaaatgctaataagcctggtgtattaaaacagttaatggcagctgctgaagggcacccatggctttggttgatttatcttgtgacagcaggagtgccaatagcattaattacttcattttgttggccaacgaaagttaaagacagcacatagcgatctagagtatatcatacccgacatatgtatcccacaaacgaaaggagtactagagcaagaagaaaaggtagagaaagcagccctggaaaaaccaatggacctggaagaggaaaaaaagcaaaaatgatggtgagatgcttgaaaaagaagaggaaagtgaacctgaggaaaagagtgaagaagaaattgaaatcatagaagggcaagaagaaagtaatcaatcaaataagtctgggtcagaggatgagatgaaagaagcagatgagagcacaggatctggagatggcccgataaagtcattacgcaaaagaagagtacggaaggactaatctagattgaaatatttttaattcccgagagggatgtttggcattgtaaaaaatcagcatgccagacctgaaccttaaatcggtctgcacacccggtttctaatatctagcaaccattatattctttcagacatttattttagtccttcatttcagaggaaaaagaagcaactttgaagttacctcatctttgaatttagaataaaagtggcacattacatatcggatctaagagattaataccattagaagttacacagttttaggttgtttggagatagttttggtttgtacagaacaaaataatatgtagcagcttcattgctattggaaaaatcagttattggaattcccaccttaaatggctataccaacaatataactggtagttctataataaaaatgagcatatgttctgttgtgaagagctaaatgcaataaagtttctgtatggttgtttgattctatcaacaattgaaagtgttgtatatgacccacatttacctagtttgtgtcaaattatagttacagtgagttgtttgcttaaattatagattcctttaaggacatgccttgttcataaaatcactggattatattgcagcatattttacatttgaatacaaggataatgggttttatcaaaacaaaatgatgtacagattttttttcaagtttttatagttgctttatgccagagtggtttaccccattcacaaaattttttatgcatacattgctattgaaaataaaatttaaatattttttcatcctgaaaaaaaa

SEQ ID NO: 23521 - DNA, 398 bp, Homo sapiens
  SIMILAR (302)..(391): 371254mologous to Homo sapiens hypothetical protein,accession number AL133035,Smith-Waterman Score=53.
  misc_feature (1)...(398): n = a,t,c or g
atttgtgctttttctcatcaataacaacatctgattggctcaccaccaacgtgtctactaagaataaaaattaggttgataggttgagaggccgggcgtggnnnnnnnnnnnnnnnnnnnnnnnnnnnnnnnnnnnnnnnnnnnnnnnnnnnnnnnnnnnnnnnnnnnnnnnnnnnnnnnnnnnnnnnnnnnnnnnnnnnnnnnnnnnnnnnnnnnnnnnnnnnnnnnnnnnnnnnnnnnnnnnnnnnnnnnnnnnnnnnnnnnnnnnnnnnnnnnnnnnnnnnnnnnnnnnnnnntcccagcttccaggatgtcctggcatcttagctgtgcgtctcccagaacctgcagatcacagggcaagaggctgtgacagtcaccgggggctcccgacgaaa

SEQ ID NO: 23522 - DNA, 1086 bp, Homo sapiens
  SIMILAR (331)..(624): 371254mologous to Human T-cell lymphotropic virus type 1 Pr gag-pro,accession number AF139170,Smith-Waterman Score=128.
ctaggcaagtgcaacatgacagccaccccaggacccgcgctgctgccctccaactccacgggcagcccacagcaaaatttcatgtgttccttgtatacaagctatcaggcctctgagcccaagcctgcaagtacacatccagatggcctgaagcaacttcaaggtgtacagtaatagagaagaggcagccaagcggcaatgtatttctgagttgcaattacttgcctctgctgtgagagaaaccccagctacatctccagcacacaagaacttcaaaactcctaaactgcaggggccaggtgttcctccaggacctcctccccaggatcttgcttcaattgccagaaatccggccactgggccagggaatgcccgcagtccaggattcctcctaagccgtgtcccatcagtgaactggatccacatctgagagtcaagtttccggcctttgactgccaagtcaggattctgccctgatgacccccctggcatccctgaacactctgggaaatactcggggctgcaggtgcagagctgcccagagagctccatgtagggcgccccccaggcaccaggtgcgatgccagggtcctggctgcaggcccacctgccatcttgcagccagagggccatttcccagcttccaggatgtcctggcatcttagctatgcgtctcccaggacctgcatcacagggcaacagaggctgtgacagagtcactgggggctcccaaggaggaggacgcaaaaccggaagaggacgcagaacagtggaaatgaattccaagctatctgttcccttgattacccgctctgtaactgaccttctgtccaaactgctcttactgccactgtaacccacacctctgcagattgttcccagagtcttcccagagtgttcagagatgctagacaggtcatcagggcagaaactcaactcagtgtatgtgtgggaggagctgcagccctggggtccccagtctctctggtgtcgagaccagcttggccggggagaccctaacccagtggcactgtggttatcctgaggcctaaccatctccctgtgatgctgtgcttcagtggtcat

SEQ ID NO: 23523 - DNA, 571 bp, Homo sapiens
agcccctgttgccctgtgatctgtaggtccttggggacgcatagttaaggtgccaggacatcctggaagctgggaaatggtaacttcttataccaagtctagaaacaatctgaggacaataacaattccattctaaaaagaatctcccaacatttcttctgtctcaacctcaactgcatctgcctgtgaacttccagcttaccaaggctctatatcttctggcagtgacaaaggctccttccatgatatgtattcatttcctaccacccgtagtggaagagatactatccctatctttacaactgatagcatttccaacagtaagctgtgagattctgcttgaaatcacctctcagacaaataaaaaacagacccgggagacatgctacgctcattctggctcaaggaaataggcatcatagctgggaaacggattcacaagacccagggctgttccctacatatgtttcctcctccgacattcagtttcatcagttcattcaagccatgttgaggagtgggaggccttgtattccctatttattcttgggcactcttattccaagtagga

SEQ ID NO: 23524 - DNA, 660 bp, Homo sapiens
  SIMILAR (514)..(657): 891254mologous to Homo sapiens voltage-dependent anion channel,accession number L06132,Smith-Waterman Score=220.
atgaagggaagtcctaggatgatgggagatgaaacaggatttgctgttagtaccaaaggtaaattggggatttcttcttggtttggatccattactgatgatgcaaaagaacctgaaattatttttgtttctgccagtatgagcacctggtggattcagtctagaagatggatgtatgacaagatatggcatccagaaccagagaaacaaagtcacattgcctctcttatgaactgctgcagcctgaatgtgctgacagcccaacagggaggagcttgtgcagctattggtgacaaatgctgtttctacataaaccgctcagggcaagtagagactgatctgcacctcttgaaggtcaaggtaaaatattatccatcaggatgtggaatcctgaagtcagcgccttgccttctcttaggctttgaagcatttttgtctgtgctccctgatcttcaggtcaccaccatgaagttcttagcagtcctggtactcttgggagtttccatctttctgtctctgccctgtgctctggtgctgggttacggcggctggctggccaactaccagatgaattttgagactgcaaagtcccgagttactcagagcaactttgcagttggctacaagactgatgaattccagcttcacactaatgtctga

SEQ ID NO: 23525 - DNA, 501 bp, Homo sapiens
  SIMILAR (70)..(198): 721254mologous to Homo sapiens BS106 polypeptide,accession number W42088,Smith-Waterman Score=137.
cagcgccttgccttctcttaggctttgaagcatttttgtctgtgctccctgatcttcagtgtcaccaccatgaagttcttagcagtcctggtactcttgggagtttccatctttctggtctctgcccagaatccggacaacagctgctccagctgacacggtatccagcttactggtcctgctgatgatgaagccccttgatgctgaaaccactgctgctgcaaccactgcgaccactgctgctcctaccactgcaaccaccgctgcttctaccactgctcgtaaagacattccagttttacccaaatgggttggggatctcccgaataggtagagatgtgtccctgaggatgggaatcagctgtgacgtctttgcaattgtgtcacagactattgcatgcttacctgtgattttcatccacactacttaccttgcctacgatatcccctttatctctaatcagtttattttctttcaaataaaaaataactatgagcaac

SEQ ID NO: 23526 - DNA, 273 bp, Homo sapiens; identical to SEQ ID NO: 3385
  SIMILAR (1)..(270): 901254mologous to Homo sapiens high mobility group protein 14,accession number J02621,Smith-Waterman Score=421.

SEQ ID NO: 23527 - DNA, 563 bp, Homo sapiens
  SIMILAR (151)..(276): 1001254mologous to Homo sapiens high mobility group protein 14,accession number J02621,Smith-Waterman Score=204.
cgctgtgggtctcagcagctcgggcggcgggaggagtggcagcggcaaggcagcccggtttcgcgaaggctgtcggcgcgccgcggcccgcaggcacccggcacgcgccttccccgcaggcacccggcacgcgccttccccgccgccacgatgcccaagaggaaggtcagctccgccgaaggcgccgccaaggaagagcccaagaggagatcggcgcggttgtcagctaaacctcctgcaaaagtggaagcgaagccgaaaaaggcagcagcgaagtgtaggtagaagtttagcactgcagtcatcagaagaggcaagattaatttccttgacattgaggagttgttggataattactaaatttgtccttgttaaataaagaaagttctgtttttgtgatccttttaaaaataaagcttcacggaaggtatgagaatagtatttttcaactttaaatttctcattaccagaagaccatgtggtaattctctgtatacagtagacagcacggaaacttgaggcctaaaaattagctgacttgttaaaatgtggcgacggtatat

SEQ ID NO: 23528 - DNA, 546 bp, Homo sapiens
  SIMILAR (93)..(25): 601254mologous to Mus musculus Q300 protein (AA 1- 77),accession number X52164,Smith-Waterman Score=64.
gatatttcagccaattagtttaaaaacacacacacacacacacacacaaaataaaaaaagataggtaataatatactgctcacgccaacatttttaacaaggtcagctaattttttaggccttcaagtttccgtgctgttctaactgtatacagagaattaccatcatggccttctggaaatgagaaatctaaagttgaaaaatactattctcataccttccgtgaagctttatttttaaaaggatcacaaaaacagaactttctgttaaagaaaacatagctaacatttttacactcagctctgtaaaaaatttaaattaaaaaagaaaaaaacatctttgttttatacctttatttaacaaggacaaatttagtaattatccaacaactcctcaatgtcaaggaaattaatcttgcctcttctgatgactgcagtgctaaacttctacctacacttttaggaaagaggtgaaggcattaacaaaaattttttttgagacttcaaatagcaaactctcacctaagttttggataaaaattaatcg

SEQ ID NO: 23529 - DNA, 459 bp, Homo sapiens
  SIMILAR (185)..(355): 291254mologous to Simian immunodeficiency virus envelope glycoprotein,accession number U05131,Smith-Waterman Score=63.
  misc_feature (1)...(459): n = a,t,c or g
ttatgtttctttaacatggcttaaattttgaacttaatgtatcaagttagtatggtcatattaatacctgtgcttttcagattcttcaaacacctaaatgaaagtgataaattcaaaactgatccttttagttcctcattatatgatatgaagggattaactgtagcaggatagtcaacctgaccgtacggcatggtgctttttttcaggtgattggtcttaatgtgagggttaaggtcttgtgaggacagtattgttgaagttcacaacaaatttggggatgggtgggaatacggtcgacgagactcctccggtattcaacttcatggacattgtcctgttcatgtgggaactgtaggggaatagtgggatgatgggcgacagtgggtgaaattttaggntcgggctttagggattttgttcatatgtccaaatgagggcttgacatgccagtactat

SEQ ID NO: 23530 - DNA, 586 bp, Homo sapiens
  SIMILAR (2)..(40): 761254mologous to Homo sapiens high mobility group protein 14,accession number J02621,Smith-Waterman Score=40.
  misc_feature (1)...(586): n = a,t,c or g
tgcaaaagtggaagcgacccgagcaaaggcagcagcgaagtgtaggtagaagtttagcactgcagtcatcagaagaggcaagattaatttccttgacattgaggagttgttggataattacntaaatttgtccttgttaaataaagattcttcaaacacctaaatgaaagtgataaattcaaaactgatccttttagttcctcattatatgatatgaagggattaactgtagcaggatagtcaacctgacccgtacggcatggtgctttttttcaggataaatcttcagacaaaaaagtgcaaacaaaagggaaaaggggagcaaagggaaaacaggcccgaagtggctaacccaagaaactaaagaagacttacctgcggaaaacggggaaacgaagactgaggagagtccaagcctctgatgaagcaggagagaaagaatgccaatgtctgattaataaccatataccatgtcttatcagtggtccctgtctcccttcttgtacaatccagaggaatatttttatcaactattttgtaaatgcaagttttttagtagctctagaaacatttttaaagaaggagg

SEQ ID NO: 23531 - DNA, 1313 bp, Homo sapiens
  SIMILAR (165)..(464): 591254mologous to Homo sapiens high mobility group protein 14,accession number J02621,Smith-Waterman Score=235.
  misc_feature (1)...(1313): n = a,t,c or g
ccgcccccgctgtgggtctcagcagctcgggcggcgggaggagtggcagcggcaaggcagcccggtttcgcgaaggctgtcggcgcgccgcggcccgcatgcagcaggcacccggcacgcgccttccccgcaggcacccggcacgcgccttccccgccgccacgatgcccaagaggaaggtcagctccgccgaaggcgccgccaaggaagagcccaagaggagatcggcgcggttgtcaacttaaacttcctgcaaaagttggaagcgaagccgaaaaaggcagcagcgaaggataaatcttcagacaaaaaagttgcaaacaaaagggaaaaggggagcaaagggaaaacaggcccgaagtggctaaccaagaaactaaaagaagacttaccctgcggaaaacggggaaaccgaaagacttgaggaagagtccagcctcttgattgaagcaggagagaaagagaagcccaagtcttgatttaattaaccattataccattgtcttattcagttgtccctgtctcccttcttgtacaatccagaggaatattttttatcaactattttgtaaatgcaagttttttaggtagctctagaaacatttttaaagaaggagggaatccccccctcatccccattttttaagtggtaaatgccttttttttaagaaggtgaaatcatttgcctggttgtttattttttgggtaccanccagaaaatagtgtggggatattgaattatgggaggctctgactgtctccgggtgtccagcttaaccattcccacagatgggggggttagtttttataatcctataatacaaagcatatttaaatgggcaatatggagtcagtcctgcatttaatgtcttgaacattttaaattacttctattagccatgttgttttttagtagaattgtttccctaaagaaaaccactcctttgatcatgggctctctctggccagaattggtgtgcactccggtaacatctttggttgtggtagtcctgttttcctaataactttgttactgtgctgtgaaagattacagatttgaacatgtagtgtacgtgctattgagttgtgacttggtggggccgtatgtaacagctgaccaacgtgaagatactggtacttgatagcctcttaaggaaaatttgcttccaaattttaagctggaaagtcactggaataactttaaaaaagaattacaatacatggctttttagaatttcgttacgtatgttaagatttgtgtacaaattgaaatgtctgtactgatcctcaaccaataaaatctcagtttatga

SEQ ID NO: 23532 - DNA, 489 bp, Homo sapiens
  SIMILAR (399)..(461): 401254mologous to Homo sapiens R31665_2,accession number AC007228,Smith-Waterman Score=42.
gggtgtggtgtgaggctggcgctggagcggtctgggaatgttaggaggtctagggtatcgcggccctgcgtcctcttgtctggactaaaagtccgggcagttctccccggacctggattgtgggcccagcgacaggtgcttggcgatctgtgcccgctgtgcctgcggggctgtggtgggagtcctgtctgcacgggattctgtgtggctgtgcataacccagaagaggagagaactgctgtgcgtctgaagtgatggcggagggctttctgatactaagccaaatgtgatctccttattggagcagaagaaagagccctggatggttaagaggaaggagacaaaagaatggtgtccagattgggagtttggaagagaaaccaagaatttatctccaaaggaaaacatttatgaaattagatcaccacaacaggagaaggccagagttatccgagaaatcagatgccaggtggagagacaacagggtca

SEQ ID NO: 23533 - DNA, 474 bp, Homo sapiens
  SIMILAR (469)..(2): 871254mologous to Escherichia coli ORF_f260,accession number U18997,Smith-Waterman Score=626.
  misc_feature (1)...(474): n = a,t,c or g
ccacggcgacgaaattaaccgtcaacagtggtaatgaaataaccccagcccagaaacggggagaaataacccgacgcagcggatccaccgccatcatctccatactggagagttgctctgtagcgcgcatcaggccgatttctgcggttagcgccgaaccagcacgcccggcaaacaacaacgcggcaaccaccggccccagttcacgcagtagcgataacngctcaccagcatacccagactggtttccgcactataagtggtcagaaccaggataaccttgcagccccaacaccattccgatgaacacgccagaaaccacaataatcagcatcgacaggacgccgacattatagagctggcgcaccagcagcggcgcatgtttgcgaaattccggtttgccgaccagcgcattgaataacattaacccggcccgcccgacccttctcagggttttaatccctttatgtctga

SEQ ID NO: 23534 - DNA, 3159 bp, Homo sapiens
  SIMILAR (2401)..(3048): 981254mologous to Escherichia coli trkA,accession number X77091,Smith-Waterman Score=1075.
atggtgcatgagctggcgggcgaagggatgttaatcctctggagtacctcgtatctcgacgaagccgagcagtgccgtgacgtgttactgatgaacgaaggcgagttgctgtatcagggagaaccaaaagccctgacacaaaccatggccggacgcagctttctgatgaccagtccacacgagggcaaccgcaaactgttgcaacgcgccttgaaactgccgcaggtcagcgacggcatgattcaggggaaatcggtacgtctgatcctcaaaaaagaggccacaccagacgatattcgccatgccgacgggatgccggaaatcaacatcaacgaaactacgccgcgttttgaagatgcgtttattgatttgctgggcggtgccggaacctcggaatcgccgctgggcgcaatattacatacggtagaaggcacacccggcgagacggtgatcgaagcgaaagaactgaccaagaaatttggggattttgccgccaccgatcacgtcaactttgccgttaaacgtggggagatttttggtttgctggggccaaacggcgcgggtaaatcgaccacctttaagatgatgtgcggtttttgtccccccgggttggaaactttttcccgggagggatttctaaaggagcatgaaatatgtaccaccatccgtgtcgtcatactaaccctcctgcgcgccacacaagaggagaatgaaaaggcatcagctgtgatccagactactgagagaagaatcatatgttcacgaaaagtttggggaaatccccagccacccagaagggaaattgttatgaaaaagttctgtaggcattttcccaatatcggcgcttccggcgacttctgcgtgggctgcacctgtacaggtggccgaagcgacaggttcggcagcaacgtcgctttcggcggggagttcctccgcgaccagcgtcagcaccgtaagctcgccggcgtacagctgacggatgatgatattcaaaatatgccctacgccagccagtacatgcagcttaatggcgggccgcagttatttgtggtgctggccttcgctgaagacggacaacaaaaatgggtcactcaggatcaggctactctcgttacccaacatggccgtctggtgaagactctgctcggcggcgacaacctgattgaagtgaataaccttgctgccgacccgctgattaaacccgcacaaatcgttgactcccggggccccccactcctggacaggccccgaccattaaggccaggtctggtgcagaccaattctgcccgttgtattggctgtcagagttgcgtcagtgcgtgcccgtttggaatgatcaccattcagtcgttgccgggggatacccgacaacaaattgtgaaatgcgatctctgtgaacagcgggaagaggggccagcctgcgttgaatcttgcccaacacaggcgctgcagttgcttactgaaagagaactcaggcgagtccgccagcagcgtattgttgtcagcgaaatctccgcgctgaaaggcgcggagaatctattagattgcccaaccacccgcgtaaaatgcgaccagtgcggcagtaatgatcaccgtaccaatattcagcttttgccattcgcgtgcaaagacgcggcctacgaccagtgtcacaaagcccagcataagcgcacgcagaattttcacgctccacgccagaccgtcgcggcacggcgtacaccagccgcaggactcacgggcgaaaaactcttccaggttacgcaccagcgacaccatgttgatctcatggtcaaccgccatcgccagcgccgtacccagacggctgcccgctttaccgatactttcgaattccatcggcagatcaaggtgcgcttcggtcaggaagtcagtccccgcgccgcctggctgccaggctttaaatttcagaccatcacgcataccaccggcgtaatcttcgaggatctcgcgtgcggtggtgccgaacggcagttcccacagtcccggatttttcacccgaccggagaagcccatcagcttggtgccagcatctttacttttcgagatgttctgataccactccacgccgttagcgaggatcgccggaacgttacacagggtttcgacgttgttgacacagtgtttgaagcgagtctgcgcagacggcgtattgaccgtttcagtccactcacacagtaccgcttcacgcaggcgcgccatctcttcttccagatgtgcgttcagccccagtttgtcgtcaatgatcactgctttcagtttgtcggcagtacggatgtagaacatcatgaagcggtcgagatatttgatcagcgtttcgcgatcgatatccgccgccagcagatccgcatgacgcggtttcatgccgccgttaccgcaaacatacagtacgcctactcactgtgcaacacccctaatcgcatcgctcgtatccgctcaccagactacgtgcgcgatgccgataagctatttcattcagatgctgtgccgattgatcatctgatcgcaccagagcagttggttatcgataatatttaccgactgattgagtatcccggcgcattgcaggtggtgaacttcgctgagggtaaagtcagcctggctgtggttaaagcctattatggcggcccgctgattggtaatgcactttcgaccatgcgcgaacatatgccacatatcgatactcgtgtggcagcaattttccgccacgatcgccccattcgtccgcaaggttcgaccattgttgaagctggtgatgaagtgttctttattgccgcttcacagcatatccgcgcggtgatgagtgaattacagcgactggaaaaaccgtataagcggatcatgctggttggtggcggtaatatcggtgcagggctggcgcgtcgtctggaaaaagattacagcgttaaactcatcgaacgtaatcagcagcgcgctgccgaactggcggaaaagttacagaatacgatcgtcttttttggtgatgcgtcggatcaagaactactggccgaagaacatatcgatcaagttgaggagtgtgccttccacgccggtttgcgttatcgtagttattgcccccagcgcgtttcctggaagagtgaacaaagggccgttcacagggtaaatccagctaacacgctttga

SEQ ID NO: 23535 - DNA, 2793 bp, Homo sapiens
  SIMILAR (145)..(1593): 851254mologous to Escherichia coli K12 fumarase B= fumarate hydratase Class I; anaerobic isozyme,accession number AE000485,Smith-Waterman Score=2080.
atgcgctctataccaagtcagcagggtatcacccggttgctcagcaaggcacaatcacgccaccgattacgcgttcagcgttgccgacttcgacggcgaaaccatcctgaaagtggaaccagaagccctgaccctgctggcgcacaagcctttcacgacgcttcttttatgctccgcccggcacaccagaaacaggttgcggctattcttcacgatccagaagccagcgaaaacgacaagtacgtggcgctgcaattcttaagaaactccgaaatcgccgccaaaggcgtgctgccgacctgccaggataccggcaccgcgatcatcgtcggtaaaaaaggccagcgcgtgtggaccggcggcggtgatgaagaaacgctgtcgaaaggcgtctataacacctatatcgaagataacctgcgctattcacagaatgcggcgctggacatgtacaaagaggtcaacaccggcactaacctgcctgcgcaaatcgacctgtacgcggtagatggcgatgagtacaaattcctttgcgttgcgaaaggcggcggctctgccaacaaaacgtatctctaccaggaaaccaaagccctgctgactcccggcaaactgaaaaacttcctcgtcgagaaaatgcgtaccctcggtactgcagcctgcccgccgtaccatatcgcgtttgtgattggcggtacgtctgcggaaaccaacctgaaaaccgtcaagttagcaagcgctcactattacgatgaactgccgacggaagggatcgaacatggtcaggcgttccgcgatgtccagctggaacaggaactgctggaagaggcccagaaactcggtcttggcgcgcagtttggcggtaaatacttcgcgcacgacattcgcgttatccgtctgccacgtcacggcgcatcctgcccggtcggcatgggcgtctcctgctccgctgaccgtaacattaaagcgaaaatcaaccgcgaaggtatctggatcgaaaaactggaacacaacccaggccagtacattccacaagaactgcgccaggccggtgaaggcgaacgggtgaaagttgaccttaaccgcccgatgaaagagatcctcgcccagctttcgcaatacccggtatccactcgtttgtcgctcaccggcaccattatcgtgggccgagatattgcacacgccaagctgaaagagctgattgacgccggtaaagaacttccgcagtacatcaaagatcacccgatctactacgcgggtccggcgaaaacccctgccggttatccatcaggttcacttggcccaaccaccgcagccagtatggactcctacgtggatctgctgcaatcccacgcggcacatgatcatgctggcgaaaggcttaatgcctgcctgacgcttgcagtcatgcatcagggggccgagatcaccaccattgaaggcctgggttcgccagataatcttcaccccatgcaggcggcctttatcaagcatgatggcttccagtgcggctactgcacctccgggcaaatttgctcatcagtagcggtgctaaaagagattcaggacggcattcccagtcacgtcacggtcgatttggtttccgctccagaaacaactgccgatgagatccgtgaacgtatgagcggcaacatctgtcgctgtgccgaggcggcacttagcgctcagcgcgtacccggcgcaaaatttatcgcgggcgggaccaatctgctggacctgatgaagctggaaattgaaacgcccacccaccttatcgatgtgaacggcctcgggctcgataagattgaagtgaccgacgcgggtgggctgcgcatcggcgcactggtacggaacaccgacctggcggctcacgagcgcgtgcgtcgtgattacgcggtactctcccgcgccctgctcgctggcgcgtctgcgcacgcgctgccccctatttttacgacaccaatcagccctgcaataaagcgctgcccgggagcggctgcgcggcgcttgaaggctttagcgtcagcacgcggtggtaagcgtaacgacgctgcattgcacccacttcccaccaccaacaatcagctggtcagcgattttagacagggagtccagaacggtcagtttggtagatactttagaaccaccaacgatagccaccatcgggcgagcaggttctttcagtgctttacccagcgcgtccagttcagctgccagcagcgggcctgcgcagcgcaacgagcagcgcaatttacacgataccggtaagtagaaagcctgcgcgcaggtgagcagtaccgaatgcgtccattacgaacacgtcacacagtgcagcgtatttcttggacagggtttcgtcgtctttcttctcgcctttgttgaagcgaacgttttccagaacaaccagttcaccttcagcaacgtcaacgccgtcgaggtaatctttaaccagacgaaccgggttagacagtttgtctttcaggtagttaacaaccggcagcagagagaattcttcgttgtactcgccttcggtaggacgacccaggtgggaagttaccatcacttttgcgccttgtttcagggccagttcgatggtcggcagagaagcacggatacgcgcgtcgctggttactttcccgtcttttactggtacgttcagatccgcacggataaatacacgtttcccagcaagatccagatcggtcatcttaattacagacatgaccaacgttttgatcaagtgtgcgccattgaccggggttttggtgcatcgaccatggcactgtgccgatcgtg

SEQ ID NO: 23536 - DNA, 423 bp, Homo sapiens
  SIMILAR (265)..(423): 601254mologous to Homo sapiens Krueppel-related DNA-binding protein,accession number M61866,Smith-Waterman Score=170.
tttcgtctagggtatcgcggccctgcgtccttttgtctttactaaaagtccgggcagttctccccggacctggattgtgggcccagcgacaggtgcttggcgatctgtgcccgctgtgcctgcggggctgtggtgggagtcctgtctgcacggtattctgtgtggctgtgcataacccacaagaggagagaactgctgtgcgtctgaagtgatggcggagatgtgatcttgtttaatccacataacaaccctattagacagggcttgaagttcaaagatgtggtcatttacttctctcaaaaggagtgggaatgcttgcactctgctcagaacgatttgtaccgagatgtaatgttggaaaattacggcaacctggtcttactggggctttctgatactaagccaaatgtgatctccttattg

SEQ ID NO: 23537 - DNA, 849 bp, Homo sapiens
  SIMILAR (34)..(81): 871254mologous to Escherichia coli K12 putative oxidoreductase, Fe-S subunit,accession number AE000372,Smith- Waterman Score=77.
gatatgttaaactctgtttgatacgaaggcatcgtgatgaaaccgttaattatcgttaatccggctgactgtattggctgcccgtacttgtgaaagtagcctgtgtggtcgctcacccttcagaacaggagttgaatgccgatgtctttttaccccggctgaaggtacagccgatctggacagcagtcagtgctgccaggtgatgttgcccattcagtagtgaaaacgcacccttgtgttggcgcttgaccccgtgggggcgcatgacgatgggcgagcaggtggtgcagaccaattctgcccgttgtattggctgtcagagttgcgtcagtgcgtgcccgtttggaatgatcaccattcagtcgttgccgggggatacccgacaacaaattgtgaaatgcgatctctgtgaacagcgggaagaggggccagcctgcgttgaatcttgcccaacacaggcgctgcagttgcttactgaaagaaaactcaggcgagtccgccagcagcgtattgttgtcagcggtgagaatcctctttgaaagaaaactgccccccttaagggcgcggagaaatctattaaattgccccacccaccccggcggaaaatgcgaccagtgcggcagtaatgatcaccgtaccaatattcagcttttgccattcgcgtgcaaagacgcggcctacgaccagtgtcacaaagcccagcataataccggtaacgatattacaagtcagaacgatgaacacggcacacaccaggccagccatagcgtcaataaaatcattgaaatccagcttcgagacgttacttaacatcagcaaacctacgtacatcagagcgggtgcagtggc

SEQ ID NO: 23538 - DNA, 2802 bp, Homo sapiens
  SIMILAR (178)..(960): 941254mologous to Escherichia coli glucose-specific enzyme II of phosphotransferase system,accession number J02618,Smith- Waterman Score=1280.
ctagccccaaggcttcaaattaaccaggcgccaggcagagtgcgggtttttgatccacccggattcacatttagtttgatcccgatttaaatcagaaccctctacgcagcggatcaggtcgcccagccctatgacccattcacatgaaaacgcggcagccgcgtgaccaattttcagcagactgtgtatttctgcaatccacttgtccagtgccctgctgaagaaatcgcctctaaacacctggcggatactggcgtactcggagggattatctccggtgcgatcgcagcgtacatgtttaaccgtttctaccgtattaagctgcctgagtatcttggcttctttgccggtaaacgctttgtgccgatcatttctggcctggctgccatctttactggcgttgtgctgtccttcatttggccgccgattggttctgcaatccagaccttctctcagtgggctgcttaccagaacccggtagttgcgtttggcatttacggtttcatcgaacgttgcctggtaccgtttggtctgcaccacatctggaacgtacctttccagatgcagattggtgaatacaccaacgcagcaggtcaggttttccacggcgacattccgcgttatatggcgggtgacccgactgcgggtaaactgtctggtggcttcctgttcaaaatgtacggtctgccagctgccgcaattgctatctggcactctgctaaaccagaaaaccgcgcgaaagtgggcggtattatgatctccgcggcgctgacctcgttcctgaccggtatcaccgagccgatcgagttctccttcatgttcgttgcgccgatcctgtacatcatccacgcgattctggcaggcctggcattcccaatctgtattcttctggggatgcgtgacggtacgtcgttctcgcccggtctggtcgacttcatcgttctggctggtacagcagccaactgtggttgtccccgaacgacggatcggtaatcgacggtgtataaacaatttcccggggaggataaagccaaacaatcccatgttcagccggtatttgccgtgctcgatccggtttatacctacaccctgccgccgcgtcaggtggctaacggcgtagtggacgcctttgtacacaccgtggaacagtatgttaccaaaccggttgatgccaaaattcaggaccgtttcgcagaaggcatttttcggtaccatttcgcagtttaacagcgcagtcgtacattcgaaatccacattaatatgcggctgaatagcgcccgttgtaccgatacgcaggaaggtgcgaatgcccagctgtgccagctcttcaacagcaatagaggtagacgggccgccgataccggtagagcagacgataacaggtttaccatccagctctgcacgccaggtagtgaattcgcggtgagatgccagcttaaccggcttatccatcagcgcggcgatcttttccacacgatccgggtcgccagggacgatggcaagcgtagcccctgccgaacaagcaagcgtggccacgccatgtccggtgtgcgaattcgcgctatacattggactggtccgagcccgaggaatggacaaacgaatatcggaaggccaagatggatccacggaagccttcaacaccggacgaccaatagcgcccaggaactccctgaggctgttgttatgggggccgtcttcaatcggtaacgaggcgtgaatatcatgacgcaggcggatcgccaccacaaacaccgccaggtagcaaatcaaaaaggtggcgctggcaacgctggcgagtgagcctaaattcagtgccgccgtcatcagcataatcaacaccacgacaataatgttgccccacgtactctgccgccacagggatttattcattagcttcggcagttcgcgttcgctgcccatgttgtccatgatgttaaacacggcgaacaggttcgcgttaatggctgaagccgtcgccagtaaagcgccgatgacgacgatcacataacccacatgcccgagcagcggagaagcagcctgcgctacggcggtatcggcatatttttctaactctaatgccgatacatcgctaagcaaaaccagtgccagcgagatataaagcaacgtggtaacgccaatcgccaccagaaacgcccgtggcataatgacctgcggatctttcactttatccgccgcgttcgccatcatgccaaagcccgcataggcaaggaaagttatcccaatacatgagaagaacgcaccggagctggggggcgcatagactgaaatatgccccggttgcagcgaccaaacaccggcaataatcagcaataacaggatcatcattttaatgccgacgaggatcactttcagccgccctaccgcatggtggcgcatgatccccacgcgtaagcaaaaaagggctctatatcgcgcttctatggcgattgcacacagcggccagcgtaattgatcgacatcctccatgttccaggtatttaattgctgaataaatttctgccaggcggaaggctgaaaacgatcactttctgaatccagtaatgtcctgaatgcacgtagtatttcatgttcagcggcagcatctttttcttcatcatctgcttcctcgacaggatttaccgccagtcgcagggcctcttcataggcctggcgtaatgctttaaacccttgcggatcggtttcgggatgacacaacggtaagcgagcaagataagcctggcggataatgtctatttgcgtcgtgctttcaatttcgaggatttgccaacatgttttcat

SEQ ID NO: 23539 - DNA, 3111 bp, Homo sapiens
  SIMILAR (475)..(678): 501254mologous to Escherichia coli K12 putative oxidoreductase, Fe-S subunit,accession number AE000372,Smith- Waterman Score=142.
ctaggcgtcctctagggcgttcctagagcggtagatccatgagacgatgtgacagagacctccatggatccttccataacgattatatggacagacagctacatctacatacttagcacagcgggtggtaaccaaaatatccacagctagagcatctacgtgtacgctagatagctttcgacacattcccagcctatagccgacgcagcggatccaccgcctcatctccatactggagagttgctctgtagcgcgcatcaggccgatttcgcggttagcgccgaaccagcacgcccggcaaacaacaacgcggcaaccacggccccagttcacgcagtagcgataacgccaccagcatacccagactgtttccgcactttgccgaagtctctttctcaccaagattccactcagaggctctacggcatagccagactgctcttgcgcatctccacgtccgggccccctccatcccggctgaaggtacagcgactggacagcatcagtgcgccggtgagtgccatcagtgtgaaaacgccccttgtgttggcgcttgccccgtggggcgctgacgatgggcgagcaggtggtgcagaccaattctgcccgttgtatggctgtcagagttgcgtcagtgcgtgcccgtttggaatgatcaccattcgtcgttgccgggggatacccgacaacaaattgtgaaatgcgatctctgtggcgccttgcgcgactgcgtcgcggtacttcgtcaacgcagaaattcacgggtagtactcgatgcctgcacacgggcctagcagtaaatcgagtccgactcggcgacgataagaatcggcaacgaggcgtgaatatcatgacgcggcggatcgccaccacatacaccgccaggtagcaaatcaaaaaggtggcctggctacgctggcgagtgagcctaaattcagtgccgccgtcatcagcaaatctgcggtctttcactttatccgccgcgttcgccatcatgccaaagcccgcataggaaggaaagttatcccaatacaggagaagataaccggagctggtaccgatggagatgatgtttgttgtgctgtgccggtattgttttggccgaagatcttttttgatccgttcacgtgtttcgcattgtatagctggtgattgccggtggatctgaggcgtttgttgcgcggttagggtcacggtggggctgtatcgggggggtgcggcaacacagccactgttggaagcaggtcgcttcctgcgggcttgtaatcctggcacgcggtgtgtatgagttgtgcgcccacgactttgacagatgatcagaagtctcaggtacgcactagttaatagtcttgtgcgagcacgacctatatccgtctgtcctctctgccttcttggtcctttgtggttcttcttttctttctttctcctttctgctctttcttctccccgctcgctctcctccctttgcttctttctcctcgtgtcgtcttttctgtcttggtctttcatgctgctctcttctctctggcctcttttctcttttcgcctcgctctcctgtcttctcccttcctcttcttgctctgcttttgtgttcggtgtgcgtgcagatcagaccttcgaattcggatcgacacccaccggccgtcccagaatggtttcgcatcttcaggattcaaccaggtccataccgtgagtagaagcctgcgcgcggtgagcagtaccgaatgcgtccatacgaacacgtcacacagtgcagcgtattttttggacagggtttcgtcgctttcttctcgcctttgttgaagcgaacgttttccagaacaaccagttcccttcagcaacgtcaacgccgtcgaggtaatctttaaccagacgaaccggttagacagtttgtctttcaggtagttaacaaccggcagcagagagaatcttcgttgtactcgccttcggtaggacgacccaggtgggaagttaccatactttgcgccggggcgtttggcgcggcccgcgagccactgtgttgcctcgctgtgggaaaaggttagccccagcccagtggaatctggttcacgtgcttttctgtaagaccgcgttcgtctgtgattgaacatgaacaacgggggtgtacacacagtctgcgtccctgatacagtcaacttggtcacggccgtttcccccgtgggataggttccggatgcacagccacaagaataccgtgcagacaggactcccaccacagccccgcaggcacagcggcacagatcgccaagcacctgtcgcagtgtgaattctctgatgtcgagtaagatttgagcctttataaaggccttcccacattcattacattcatatgttttttcatctgtatggatttctctgatgttgaaaaaagtttctggagcttcggaataaaggcccttcaaccattctttcacaatttcaataggggctttctcaacccgccaggattctatgtgagtcctccctgtgggaggtgtccgagggacagtataaatgcctttgtctgacgtgttggtgtgtacaggtatccctggtggatgtttcccatgggggacaataagggccgtatggtctgtacgttgtggatgtactcctctgttcccctgcccagtgtccaaggtaatcgccagagggtagttcacaagggttcccactacccaagggccacacgtgtccacttccacattgtccaagaatcgcccaaggtgtagttcccaaaggtgcacacaaaagcacacacgttcactttccacgcttccgagaactccttggggggaaaatgagaacgcgcacacggacaacgccacacactgcgactgccacactatcccatagtttggtggacctaacggtaagttctcacctcgtaatttggggggtttataaattgggtaaaattttataggtctggggtcgtcggttggcgtccagggaccctggtaatgtcccagcatctttttggggaaggtccgaatgttttgggctatgattacacccgtgacgttccagggatgttttgaatgacccaggcctgtggcccacatcaatgggtgaatatccccccggtgcttctggcctcgacaaaagga

SEQ ID NO: 23540 - DNA, 434 bp, Homo sapiens
  SIMILAR (2)..(247): 1001254mologous to Homo sapiens SOX3,accession number X71135,Smith-Waterman Score=429.
  misc_feature (1)...(434): n = a,t,c or g
tttgataagcctacccttcccgccggactcgctggcccacaggcccccaagctccgctccgacggagtcncagggccttttcaccgtggccgctccagcnccgggagcgccttctcctcccgccacgctggcgcaccttcttcccgcnccggcaatgtacagccttctggagactgaactcaagaaccccgtagggacacccacacaagcggcgggcaccggcggccccgcagccccgggaggcgcaaaatggccctggagaaccccaagatgcacaattctgagatcagcaagcgcttgggcgccgactggaaactgctgaccgacgccgagaagcgaccattcatcgacgaggccaagcgacttcgcgccgtgcacatgaaggagtatccggactacaagtaccgaccgcgccgcaagaccaagacgctgct

SEQ ID NO: 23541 - DNA, 490 bp, Homo sapiens
  SIMILAR (3)..(260): 1001254mologous to Homo sapiens SOX3,accession number X71135,Smith-Waterman Score=452.
cggccgcagccgccatgagcctgggccccatgggctcggtagtgaagtctgagcccagctcgccgccgcccgccatcgcatcgcactctcagcgcgcgtgcctcggcgacctgcgcgacatgatcagcatgtacctgccacccggcggggacgcggccgacgccgcctctccgctgcccggcggtcgcctgcacggcgtgcaccagcactaccagggcgccgggactgcagtcaacggaacggtgccgctgacccacatctgagcaccggcctgcgctcgtccacccttgttccccacccgcacccccactcccgccccgcacccccaagttgggacgcccttgtttagctttgcttgcctaggactgttgccttgtaccgatgatggggagggctgaaagttttgctgtagctgtcgggttttgtacaaaagccaaaaataagtcaggagcagcgaaaatgggacttctagagagctctcttgccccac

SEQ ID NO: 23542 - DNA, 2378 bp, Homo sapiens
  SIMILAR (523)..(828): 921254mologous to Homo sapiens bA51C14.3 (SRY (sex determining region Y)-box 3),accession number AL121875,Smith- Waterman Score=472.
atggatgataccttcctaaactacaaatataaaaacaaatgtggtccaaaacatattaagaagaaagaggaggaggaggaggaggacaataacagcaatgacagcaagaacaaggacaagacattgacaactgggagttcaggctctgccaagatcttcttgatgcgaggtggtaggagacagctacttcttcccactctttccttatgtcttctgtcagttcaaagaagcccaggtagtcatgaatctggacctcctcagagcatgaatcctagactgagtccacaagggaagtacctgaaaaatgactttttagatgtgattgggatgtgtgacatagcctgccatcttgttgtggagcttcttgttgggaataatggcaacttcctcgcacatgcctttgctcatgtggaagtagttgcccagcagaatcagagggaaaatgctgccaggccgaacgggggctcggtaatgattggccagggcgcatcactgcgaacctgtcaatcacgggtcctccgggttgcgaggggcggaccaagccccaaccccggggaatccgagcagggccttttcaccgtggccgctccagccccgggagcgccttctcctcccgccacgctggcgcaccttcttcccgccccggcaatgtacagccttctggagactgaactcaagaaccccgtagggacacccacacaagcggcgggcaccggcggccccgcagccccgggaggcgcaggcaagagtagtgcgaacgcagccggcggcgcgaactcgggcggcggcagcagcggtggtgcgagcggaggtggcgggggtacagacccaggaccgtgtgaaacggcccaatgaacgccttcatggtgtggtcccgcgggcagcggcgcaaaatggccccggagaaccccaagatgcacaattctgagatcagcaagcgcttgggcgccgactggaaactgctgaccgacgccgagaagcgaccattcatcgacgaggccaagcgacttcgcgccgtgcacatgaaggagtatccggactacaagtaccgaccgcgccgcaagaccaagacgctgctcaagaaagataagtactccctgcccagcggcctcctgcctcccggtgccgcggccgccgccgccgctgccgcggccgcagccgctgccgccagcagtccggtgggcgtgggccagcgcctggacacgtacacgcacgtgaacggctgggccaacggcgcgtactcgctggtgcaggagcagctgggctacgcgcagcccccgagcatgagcagcccgccgccgccgcccgcgctgccgccgatgcaccgctacgacatggccggcctgcagtacagcccaatgatgccgcccggcgctcagagctacatgaacgtcgctgccgcggccgccgccgcctcgggctacgggggcatggcgccctcagccacagcagccgcggccgccgcctacgggcagcagcccgccaccgccgcggccgcagctgcggccgcagccgccatgagcctgggccccatgggctcggtagtgaagtctgagcccagctcgccgccgcccgccatcgcatcgcactctcagcgcgcgtgcctcggcgacctgcgcgacatgatcagcataacaggaagagagaacatctttgtcgtgggtgaccccgcagcgtgcttgcttcccatagaaatggaggagacattcctaccctggccccttgggttcgaggacaggctccatctggagggccctcgcccagtccaggagattccttcatttctaagaaaagtgcctaactgcggccagtggctcctacagaccccttctgtagagcctgcagacccttgggagaatcctcaggcctttccaccaagtcttcaacaggaacagccctgcttgtctcttattgttgggatttttgtagaagcttttggaggcagagggcggtggggcagcaaaggcaaaaaaccaaaaagatacagaacggtagaatggatgagaattcaccaaccaagtatctgctgtcttcaagagactcacctgacacgtaaggactcacataaacttaagcaaaattggctacaagggacatactttaaggtaataaaagccatctatgacaaacccacagccaacattatactgaatggggaaaagttgaaagcattccccctgagaattggaacaagacaaggattcccactttcatcacttctactcagcattttactggaattcctagccaaagcaattagacaagagaaagaaataaaggacatccaaatccataaagaggaaggcaaactgttgctgtttgctgatgatatgatcatatacctagaaaaccctaaagactcatccaaaaactcctag

SEQ ID NO: 23543 - DNA, 399 bp, Homo sapiens
  SIMILAR (52)..(399): 921254mologous to Homo sapiens human elongation factor-1- delta,accession number Z21507,Smith-Waterman Score=530.
cttcccgcgtccgccgattcctcctccttggtcgccgcgtccttggctggcgtcagaaaaatggctacaaacttcctagcacaccagagtctgcgtggcgtggtacaggagctgcagcaggccatctccaagctggaggcccggctgaacgtgctggagaagagctcgcctggccaccgggccacggccccacagacccagcacgtatctcccatgcgccaagtggagcccccagccaagaagccagccacaccagcagaggatgacgaggatgatgacattgacctgtttggcagtgacaatgaggaggaggacaaggaggcggcacagctgcgggaggagcggctacggcagtacgcggagaagaaggccaagaagcctgcactggtggccaagtcc

SEQ ID NO: 23544 - DNA, 1216 bp, Homo sapiens
  SIMILAR (623)..(1114): 571254mologous to Homo sapiens human elongation factor-1- delta,accession number Z21507,Smith-Waterman Score=402.
tcttagggaacaagcgggccgggctgcgacgggccgatggggaggccccctctgccttgccctactgttacttcctgcagaaggatgcagaggccccctggctcagcaagcctgcctacgacagcgccgagtgccgccaccacgctgccgaggccctgcgtgtggcctggtgcctcgaagctgcctccctgtctcaccgacccggtcctcggtctggcctgtccgtgtccagcctgagacccaccagaaaaatggctacaactttcctagcacatgagaagatctggttcgacaagttcaaatatgacgacgcagaaaggagattctacgagcagatgaacgggcctgtggcaggtgcctcccgccaggagaacggcgccagctgtgatcctccgtgacattgcgagagccagagagaacatccataaatccctggctggaagctcagggccccggggcctccaagcggcaccagcggagaccacggtgagctcgtcgtccggattgccagtctggaagtggagaaccagagtctgcgtggcgtggtacaggagctgcagcaggccatctccaagctggaggcccggctgaacgtgcttggaaaagagctccgcctggcccaccggggcacggccccacagacccagcacgtatctcccatgcgcccaagtggagccccccagccaagaagccagccacaccagcagaggatgacgaggatgatgacattgaccctggtgggaagggacaatgaaggaggaggacaaggaggcggcacagcttgcgggaggagcggcctacggtcattacgcggagaagaaggcccaagaaagcctgccacttggtggccaagtccctccatccttgctggatgtcaaagccttgggatgatgagtcggacatggctcagctggaggcctgtgtgcgctctatccagccggaacgggtcgttcttggggggcttcacagatggttgccgtgggctacgggtatccggaagctacagattcagtgtgtggtggaggacgacaaggtggggacagacttgctggaggaggagatcaccaagtttgaggaagcacgtgcaagaagtgtcgatatcgcaagcttttcaacaagatctgaagccttgaagtgtgtgtacgttgcgcacgtgcgtgaaggcccgtgcacacgatctaaagacttgagaccggcaaaaaaaaaaaaaaaaaaa

SEQ ID NO: 23545 - DNA, 2068 bp, Homo sapiens
  SIMILAR (394)..(1086): 1001254mologous to Homo sapiens R28830_2,accession number AC003682,Smith-Waterman Score=1242.
atggcggcggcactgagggccccgacccaggtgagcgctgcgtcctcccggcctcctctgccctccccacccgaaactgagggacgcgtgaagggttttctgcagcccggaccgcactgtccggcacaatgtctttgttctggagatgatggcagcaatgaagatttggagcagaagagggaggtgatcttccccaggcctcatgaggctcctgtggctgagcacagacaacagactgtgggtttaagggagttggtagcaataccaaagaggaaagaggagactactgcaatagtccaggtttttgtagcctttgaggatgtggccatttacttctcccaggaggagtgggagctccttgatgagatgcagaggctcctgtaccgcgatgtgatgctggagaactttgcagttatggcatccctaggttgctggtgtggagcagtagatgaggggacgccttctgcagagagcgtttctgtggaagaactgtcacagggcaggactccaaaggcagatacatccactgataagagtcacccctgtgagatttgtaccccagtcctgagagacattttacaaatgattgagctccatgcctcaccctgtggacagaaattgtacttgggtggagcatcaagagatttctggatgagttcaaaccttcaccagctccagaagcttgataatggagagaagctctttaaagtggatggggaccaggcctcatttatgatgaactgcaggttccatgtgtcaggaaaacccttcacgtttggggaagtcgggagggacttttcagccacctcaggacttctccagcatcaggtgactcccaccattgagagaccacacagcaggattagacacttgagagttcccactggacgaaagcctctcaaatacactgaatccaggaaatcttttagagagaaatctgtattcattcaacaccaaagagctgactctggagaaaggccttacaagtgcagtgaatgtgggaaatcctttagtcaaagttctggctttcttcgacacaggaaagcacacggtagaacaaggactcatgaatgtagtgaatgtgggaacatcctttagtcgcaaaactcacctaactcaacaccaaagagttcacactggagaaaggccttatgactgcagtgaatgtggcaaatcctttcgccaggtatctgtcctcattcaacatcaacgagttcacactggagaaaggccttatgagtgcagtgaatgtgggaaatcttttagccacagcactaacctctatcgtcacaggagtgcccacactagcacaaggccttatgagtgcagtgaatgtggaaaatcctttagccatagcactaacctctttcgacactggagagttcacactggagtaaggccttatgagtgtagtgaatgtgggaaagcatttagttgcaatatctaccttattcaccaccaaagatttcacactggagaaagaccttatgtgtgcagtgaatgtgggaaatcatttggccagaaatctgtcctcattcaacaccaaagagttcacactggagaaaggccttatgagtgcagtgaatgtgggaaagtttttagccaaagctctggcctctttcgacacagaagagctcacactaaaacaaagccttatgagtgcagtgaatgtgaaaaatcatttagttgcaaaactgacctcattcgacaccagacagttcacactggagaaaggccttatgagtgcagtgtatgtgggaaatcttttatccgaaaaacccacctcattcgacaccagactgttcacactaatgaaaggccttatgagtgcgatgaatgtgggaaatcctatagccaaagctctgccctccttcagcataggagagttcacactggagaaaggccttatgagtgcagagaatgtgggaaatcttttacccgcaaaaatcacctcattcaacacaagacagttcacactggagaaaggccttatgaatgcagtgaatgtggaaaatcctttagccaaagctctggcctcttaagacacagaagagttcatgtgcagtga

SEQ ID NO: 23546 - DNA, 970 bp, Homo sapiens
  SIMILAR (352)..(137): 391254mologous to Plasmodium falciparum merozoite surface protein 2,accession number AF217039,Smith-Waterman Score=111.
atggctgcgcaggtcggagcggtgcgcgtagtacgggcggtggcggcgcatgaggagccggacaaagaggggaaggagaaacctcatgctggggtctccccgcggggagttaaacggcagcgccgatctagcagtggggggtctcaggagaagcgggggcggccgagccaggagccccctctcgctccccctcaccggcggcggtcgcagccgccaacatcctgggccgctgccgtcaacgatatgcagccccaactgtgccaggccctgttgagcctcttctcctgccgcctccgccgccaccttcgctggcacccgccgggcccgctgacgatgcccctctcccggccccaagcacctcgggcctcttcaccttctcgcctctgacggcgagcgcggccgggcccaagcataagggcacacaaggagcggcacaagcaccatcaccaccgcggccccgatggtgatcccagctcctgcggaaccgatctcaagcacaaggacaagcaggaaaacggcgagaggactggaggggtgcctctgatataaagcccccaagagagtgagtcttaccatctttgcctccaatgaggggagtatccagtttagatttatgagcttcagaatttctctaattgaagttctctctgcagtagagagagcaggagcagccaatgtggagaggtcgcaagatggggctgcccaagatgttggaacaccatgtgcaataaagggcttcgtcttggattttggccttattaccacaaccagacttgaggtaattcgaaaaggcatgttaagccatgtgatgcttgagtacaatcttgaaagcatgttaatacttaacttggtgggagaacacaaagtttggctgtctcgagaactctgcaaggtagttcctcagtgccttgcaaatataggtcagtattataccaagcctccatcaggacagaagaagtacaagtggtaa

SEQ ID NO: 23547 - DNA, 1578 bp, Homo sapiens; identical to SEQ ID NO: 12836
  SIMILAR (1001)..(1105): 881254mologous to Homo sapiens cytochrome c-like polypeptide,accession number S80864,Smith-Waterman Score=165.

SEQ ID NO: 23548 - DNA, 1027 bp, Homo sapiens
  SIMILAR (420)..(914): 441254mologous to Homo sapiens cytochrome c-like polypeptide,accession number S80864,Smith-Waterman Score=222.
ttcaatgtaaatgctgtgtcagtagttgtctagggaataatgacaagaagaaaattttgtacatgttcagtacgtaggaaaaagaaagagagatcagactgtcactgtgtctatgtagaaagggaagacataagagattccattttgaaaaagacctgtactttaaacagttgctttgctgagatgttgttaatttgtagctttgccccagccactttgccttagccactttgacccaacctggagctcacaaaaatatgtgttgtataaaatcaaggtttaagggatctagggctgtgcaggatatgccttgttaacaaaatgtttacaagcagtatacttggtaaaggtcatcgccattctctagtctcaataaaacaggagcacagtgcactgcggaaagccgcagggacctctgcccttgaaagtggggtattgtccaaggtttctccccatgtgatagtctgaaatatggcctcgtgggatgagaaagacctgactgtgccccagcccgacacccataaagggtctgtgctgaggtggattagtaaaagaggaaagcctcttgcagttgagatagaggaaggcccactgtctccctgaactgccccctggggaacttgaatgtcccgggtattaaaacacggattgtaccattggtccagttctgagatgggagaaataccgccctatggtgggaggcgagacatgtttacagcaatgctgccttgttattctttactgcactgaggatatttgggcagagaagaaacataaatctcggcctacgtgcacatccagggcatagtacctccccttgaacttaattatgacatagattcttctgctcacatgtttttttggcggaccttctccttattatcaccctgccctcctactacattcctttttgctgaaataatgaagataataatcaataaaaactgagggaactcagagaccggtgccggtgcaggtccttggtatgctgagctccggtcccctgggcccactgttgtttctctat

SEQ ID NO: 23549 - DNA, 945 bp, Homo sapiens; identical to SEQ ID NO: 9261
  SIMILAR (37)..(942): 521254mologous to Homo sapiens p40,accession number U93569,Smith-Waterman Score=729.

SEQ ID NO: 23550 - DNA, 1754 bp, Homo sapiens
  SIMILAR (799)..(879): 921254mologous to Homo sapiens p40,accession number U93567,Smith-Waterman Score=133.
tcactgtctgaagctgcctgcctcctccttctcccgcttcgtgctgagaaagtagtggcagaagaggcggccctgccgcagtgccacgctttctccaggaaacaaggacagctgcacgggtgcccacacgagagtcggcgaccagcctcggcggtggggttcctgcaacgcgtgttcctgctggggttctcctttctgctgttccgagctacagtgcggatcatgctccccatacgtggagtccagggacagcacagcccggggactgcccagccagccaggaagtctggctttcagagaactgggaagaccatcttccactttatcccatctgggagactgtaaacatggattccactgtctcggacagggagacgattcccagtcttttcctgttcctcctctaggtatgtagctgctatcagcttccacaaacgctggaaggaagggcgttgctttggcaggacacgtggggagatgggctgggaggggagatcccggagcctgaaggaattgaacaccaggaatgactggaaccctggagagagagaactggatttctggaggaaaatcactcgttttaaggaagcagcatcctggacccttgaggccctggaggaagcgggcagcacagctcggaggcgggtgtggctggaggacggccgtcgcacctgcgaaattctgtctgtgctttgcacctcgtcattgtcttctaattgtgcatccctggactgcgtgacctacaaggctctcagcacaacaagactctatgattctgtctattggaacaaaaagccagaacgtagctcctcaccagcaacggaacaaagctggacagagaatgactttgacaagttgagagaagaaggcttcagacgaattaaattactccgagctaaaggaggaagctcgaacccatggcaaagaagttataaaccttgaaaaaaagattagacgaacggctaactagaataaccaatgcagagaagtccttaaaggacctgatggagctgaaaaccatggcacgagaactacgtgacgaatgcacaagcttcagtagccaattcgatccactggaagaaagggtatcagtgatggaagatcaaatgaatgaaatgaagccaagaagagaagtttagagaaaaaagaataaaaagaaacaaaagcaaagcctccaagaaatatgggactatgtgaaaagaccaaatctacacctgattggtgtacctgaaagtgacagggagaatggaaccaagttggaaaacactctgcaggagattatccaggagaacttccccaatctagcaaggcaggccaacattcaaattcaggaaatacagagaacgccacaaagatactcctcaagaggagcaactccaagacacataattgtcagattcaccaaagttgaaatgaaggaaaaaatgttaagggcagccagagagaaaggtcgggttacccacaaagggaagcccatcagactaacagctgatctcttggcagaaactctacaagccagaagagagtgggggccaatattcaacattcttaaagaaaagaattttcaacccagaattgcatatccagccaaactaagcttcataagtgaaggagaaatacaatactttgcagacaagcaaatgctgagagattttgtcaccactaggcctgccctaaaagagctcctgaaggaagcactaaacatggaaaggaacaactggtaccagccactgcaaaaacatgccaaatggtaa

SEQ ID NO: 23551 - DNA, 447 bp, Homo sapiens
  SIMILAR (317)..(108): 411254mologous to Streptomyces coelicolor A3(2) putative acyltransferase,accession number AL391515,Smith-Waterman Score=123.
ctagcagtcctcacagctctcgctcgctctcggcgcctcctctgcctgggctcccactttggcggcacttgaggagcccttcagcccaccgctgcactgtgggagcccctttctgggctggcgaaggccgcagcccgctccctcagcttgcagggaggtgtggagggagacgcgcgagcgggaaccggggctgcgcgcggcgcttgcgggccagctggagttccgggggggcgtgggcttggcggccccgcactcggagcagccggccggcccgggccttagctgccttcccgcggggcaggccttgggactgcagcccgccatgcctgagccttcccccgcctccgtgggttcctgtgcagccggagcctccccgacgagcgccgccccctgctccacggcgcccagtcccatcgaccgcccaagggctgaggagtgcaagcgcat

SEQ ID NO: 23552 - DNA, 417 bp, Homo sapiens
  SIMILAR (287)..(349): 1001254mologous to Homo sapiens Human secreted protein, SEQ ID NO: 7678,accession number G03597,Smith-Waterman Score=108.
ttttttttttttgggtttccatgtattttattccattccactcataccaagagacaattctttttgaggtgtgtttagctctctagacttaattactgctgtgtttgtcacattggctgaattgagatcggtgacataaggattcctgggagcctgcgctgggcgcgaatttaagatggctcctccatgatcttcactctctgggtgaaaactgtcggtcagcccatgcccaggattgttgatcagtgctgaaggtcctgaggctgtttttagcatagtctaaaacgcgagggtccgtggcttcattcttgaagtcagtgagaccaagaacccaccaattccggacacattgggaacttagagcagtgcttgggacatggttatcagcgttagctatttccttaaactagcgtgaag

SEQ ID NO: 23553 - DNA, 3277 bp, Homo sapiens
  SIMILAR (1210)..(2028): 1001254mologous to Homo sapiens zinc-finger protein (ZNFpT17),accession number X65233,Smith-Waterman Score=1541.
catgccctggtgtccccaaaaccagttccgtcttgggggttgtgggaaacaccgaaggcggcggcagttgtcatagaaggcgtaggtccaggccaggacatgggccaggagccaggaggccccgaccagcaggaggagcagccaaggggatgctgccactggccagaggcccagccaggacaggctcagctgggacatcttataggtgtaggagcccctttctaggctggccaaggccagagccggctccctcagcttgcagggaggtatggagggagaggcgcgagtacgaaccggggctgcgcgcggcacttgcgggccagctagagttccaggtgggcgtaggcttggcaggccccgcactcggagcagccggccggccctgccagccccgggcaatgaggggcttagcacccgggccagcggctgctcgggaaggtgtactcggtcccccagcagtgccagcccaccggcgctgcgctcgatttctcgccgggccttagctgccttcccgcggggcagggcccaggacctgcagcccgccatgcctgagccttcccccgactccgtgggttcctgtgctgcccgagcctccctgacgagcgcgaccccctgctccacggctcccagtcccatcgaccacccaagggctgaggagtgcgagtgcatggcgccggactggcaggcagctccacctgcagccccggtgcgggatccactgggtgaagccagctgggctcctgagtcatggaagcgttgttctttcgctctttgcaataaatcttgctgctgctcactctttgggtccacactgcttttatgagctgtaacactcaccgtgaaagtctgcagcttcactcctgaagccagcgagaccacgagcccaccgggaggaacgaacaactccagacgcgccgccttaagccttaagagctgtaacactcaccacgaaggtctgcagcttcactcctgagccagcgagaccacgaacccgccagaaggaagaaactccgaacacatccgaacatcagaaggaacaaactccggatacaccatctttaagaactgttaacactcaccgtgagggtccgcggcttcattcttgaagtcagtgagaccaagaacccaccaattccggacacagttggaaatgcagaagggcacttgagtttccctgcagtctcccacacggacaccttctggaggaagatgagccctaaacgcgatgggttggggacaggtgatggtctgcactcacaggttttacaggagcaggtctccacaggagacaatctccatgaatgtgactcccagggaccaagtaaagacactttggttcgtgaggggaagacctacaaatgcaaggaatgtgggagcgtgtttaacaaaaacagcctccttgttcgacatcagcagattcacactggggtgaagccttatgaatgccaggagtgtggaaaagcctttcctgaaaaggtcgacttcgttcgacacatgaggattcacacaggggagaagccctgtaagtgcgtggagtgcgggaaggtcttcaaccgcaggtcgcacctcctgtgctaccgccagattcacactggagagaagccctatgagtgcagcgagtgtggaaagaccttcagctatcactctgtcttcatccagcatcgtgtgacccacactggagaaaaactctttgggtgcaaagaatgtggaaaaaccttttactacaactcttccttaacccggcacatgaagattcacactggagagaagccctgcaagtgcagtgagtgcgggaagaccttcacctaccgctctgttttcttccgacatagtatgacccacactgcaggaaagccctacgagtgcaaagaatgtgggaaaggtttttactacagctattccctcactcgacatacaaggagtcacactggagagaaaccttatgagtgccttgaacatagaaaggactttggctaccactctgcttttgcccaacagagtaagatccactctggaggaaaaaacctttgagtgcaaatgatgtgggaatttgtgggttttctttttttttttttctttgatacatagagagccacactgaggagaagcactctgaattcagtggcagtaggaaagctgtgacctgcagctcatcctcacttggcattgaagaattccttccagagataaactctatgagatatgtgggaaggccttttgcaagtgggccctcatcagtcgacgtcagagaacttaaactgcgaaaagacattttgacaaaaactagtgaagaaaatcttttggccacaggaaatatcttcctcagcatctgagaatttttccaggagggagacctgttggttattgtgcacttaaaagaaccacccacacctctctccatagtttatatcactaagccacttcaggatttttttttttttaagtaagaagggaactgtaaaagagaaaaaaagaaattcatgcatagcttctgtcagacttctctgaaagaaatgcctatcaaaatttgaattcagttcttcattttgcagatggctgaaagggacgagagaatgatggtgaagctgtgttgctttcccaggtgagccttgattatttcctctgtgctttctcagcttctttggccttctgtaagaggggcttctccaagagcatgtcactagttttctagaagttaaacaagagctaagacaaacaaaacaaaacacagcttatctaatctaatgagaaactcagaaaaaaatgttttgatgaatacaatgtattaaaatataaaacatgtagatcctttgacatgttaattcaattctagaatcctcaagaaatgtttttatattatgcagagatgtgcgtgcaaagaataatcgctggagttttgtttttatgtgtgaacgttgagacaatctaaatgtttatcagtggaagtaagtaggtacactgtctatgaaatactgtgaaacaataaggtatctctgtatgtactgatatcaaaagatctctaagatacagtatttagtaaaagagaaagtttcaggaaataaaactacatctagaagtataagcataaaactgttaatagtggttttctgcaggaaatgggatggaccagggttatatgcaatgttcagtttttacttttatacttaagtattgtttatgtttgaaaaataaaaagcatttattgtttttgcaataaatgtttaaaatatttcaataaagatagcatgttagaaaaaaaaaaaaaaaaaccgaattc

SEQ ID NO: 23554 - DNA, 579 bp, Homo sapiens
  SIMILAR (271)..(324): 441254mologous to Helicoverpa armigera nuclear polyhedrosis virus basic DNA-binding protein BDBP,accession number AF197913,Smith-Waterman Score=42.
atgaaacatgagaagagggatcggtgcgcagaattaacagctattctattaaatgaacaagcatctcccatgtgcacgattgtgttgggctacacagggacatccacgataaccctgccgcggacatcatgccattttgctccacgattgagcaacagtcaacagcattcatcatatcaagtgggacataaaccagagtcctattgtgtccggaattggtgggttcttggtctcactgacttcaagaatgaagctgcggaccctcacaactcaggaggccagctggcttcacccagtggatcccgcacaggggctgcaggtggagctgcctgccagccccgcgccatgtgctcgcactcctcagcccttgggcggtcgatgggactgggcgccgtggaacagggggcggcattcgtcggggaggctcgggctgcacaggaacccacggaggcgggggaaggctcaggcatggcgggcttcagtccggaggcctgccccgcgggaaggcagctaaggcccggcgagaaatcgagagcagcgccggatatagtaactcctcgagcaaatgtagcatcataa

SEQ ID NO: 23555 - DNA, 592 bp, Homo sapiens
  SIMILAR (381)..(277): 541254mologous to Mus musculus nuclear localization signal binding protein,accession number S79410,Smith-Waterman Score=100.
gggctctgtgtgtctggatgcgccttaggttccaagacaattgcccaataccttgtaggtcaagggcccagggcccccccacagcaaggttgagggacccctttccagtagggctgtcccaagccccactcaatgggccaggtttctggcccacttttgttaatagcacatggatcaatattagtaaccccatccaagattgacctgtgaaaagaggttccaggggaatctccctcagtgccagttacttagtgatgtgttacccaggatgcagcaggtgtgtgcaggtatcttgctctctaggcctgtgtgtgtgtgtaagtgtgtgtgtatatgggtgtgggtgtgtttgtgtgtggtggttgtggggggggtgttggaggttctatttcatttaaaaatgtattcatttccctggccccaccccaaagtttgtctgtggtgttatagtggtaactgcagttcctcctttggaatgtagactgtatatgtttaataactccccttctctatccttgctcaaaatgtgggataacgcgatgactgtgaccctggttggaaattaaacttgttttatgcaaaaaaaaaaaaa

SEQ ID NO: 23556 - DNA, 1158 bp, Homo sapiens
  SIMILAR (145)..(1155): 911254mologous to Homo sapiens p40,accession number U93569,Smith-Waterman Score=1587.
atgaccgggtactcctctgagaaaaaacttccagaggaacgatcagacagcagcattcacggttcacgaaaatccgctgctgtgcagctaccgctgctggtacccgggcaaacaggaacaaaagaagataaaaccacaaagagggggaaagaacagagcagaaaaactggaaactctaaaaagcagagcgcctctcctcttccaaaggaacgcagttcctcaccagcaacggaacaaagctggatggagaatgactttgacgagttgagagaagaaggcttcagacgatcaaactactccgagctacaggaagaaattcaaatcaaaggcaaagaagttaaaaactttgaaaaaaatttagacgaatgtataactagaataaccaatacagagaagtgcttaaaggagctgatggagctgaaagccaaggctcgagaactacgtgaggaatgcagaagcctcaggagccgatgcgatcaactgaaagaaagggtatcagtgatggaagatgaaatgaatgaaatgaagcgagaagggaagtttagagaaaaaagaataaaaagaaatgaacaaagcctccaagaaatatgggactatgtgaaaagaccaaatctacatctgattggtgtacctgaaagtgatggggagaatggaaccaagttggaaaacactccgcaggatattatccagcagaacttccccaacctagcaaggcaggccaacattcaaattcaggaaatacagagaatgccacaaagatactcctcgagaagagcaactccaagacacataactgtcagattcaccaaagttgaaatgaaggaaaaaatgttaagggcagccagagagaaaggtcgggttacccacaaagggaagcccatcagactaacagtggatctcttggcagaaactctacaagccagaagagagtgggggccgatattcaacattcttaaagaaaagaattatcaacccagaacttcatatccagccaaactaaacttcataagtgaaggagaaataaaatcctttacagacaagcaaatgctgagagattttgtcacaaccaggcctgccctaaaagagctcctgaaggaagcactaaacatggaaaggaacaactggtaccagccactgcaaaatcatgccaaattgtaa

SEQ ID NO: 23557 - DNA, 873 bp, Homo sapiens
  SIMILAR (849)..(115): 651254mologous to Homo sapiens p40,accession number U93564,Smith-Waterman Score=748.
ttagccggttattttgctcgttagttgatgcagtttcttcctagtctcgatggtctttacattttggcatgattttgctgcggctggtaccagttgttcctttccatgtttagtgctttccttcaggagctcttttagggcaggcctggtggtgacaaaatctctcagcatttgcttgtctgtaaagtattttatttcttcttcacttatgaagcttagtttggctggatatgaaattgtgggttgaaaattcttttctttaagaatgttgaatattggcccccactctcttctggcttgtagagtttctgccgagagatccgctgttagtctgatgggcttctctttgagggtaacccgacctttctctctggctgcccttaacattttttccttcatttcaactttggtgaatctgacaattatgtgtcttggagttgctcttctcgagaagtatctttgtggcattctctgtgtttcctgaatctgaatgttggcctgccttgctagattggggaagttctcctggataatatcctgcagagtgttttccaacttggttccattctccccgtcatttatttcattcatttcgtcttccatcgctgataccctttcttccagttgattgcatcggctcctgaggcttctgcattcttcacgtagttctcgagctttggctttcagctccatcagctcctttaagcgcttctctctattggttattctagttatacattcgtctaaatttttttcaaagtttttaacttctttgcctttggtttgaatttcttcctgtagctcatagtttgatcttctgaagccttcttctctcaactcgtcaaagtcattatccatccaggtttgttccat

SEQ ID NO: 23558 - DNA, 2079 bp, Homo sapiens
  SIMILAR (1753)..(2076): 971254mologous to Homo sapiens p40,accession number U93564,Smith-Waterman Score=544.
atggacacttttcagttgcgtctccaccccacagaagcacagctgtgggtgttggctgccatttggccaggatacttgaaaagagactcgagtgttcaggacaagctcaaggctcacgtgtttccagaagatgaggaggaaggcccattccttacttcagggcagatgttccggagtctgaatgcaggagtggctgagactcacggccaggaagacagagctgtccagagacagtcggagctgcggacaactgaaaacatctctgctcatttccttgctggtcgaaagcacacaggggaggcattgatctttcctagctggacccaaacacattctggaggagatggctggagagtggccaaagcctggaggccaaaataccatgacacacaattgggaggagagaaagaggagccccaaggccaccatgcctccgactgccgctggcgggcacagcctcattgccgcaccctcagtgcggctgttgtcaacgtcgcagggttcacagtcacctttgagctcagatgcctcacacttatgaaaatgagggagaaggatcatcatctctgtgataacgacatcgtgctctttcctccagacactgcctttccccttgattgtctcctttcctgcattcattcaactgttcatgggctgctgaggtggaatgcaattcagtatttggcttcaagaagtgaaagtcacccagagagatctgagggtgggacaccagacaggaacggccatcctgctttgtctctagcgtctttcaatggtgcacagcaagacagaaggacagttcaatcccttggggagaaacctgggctccctgaagagatggctgctttcatggctggcacagagaaagaacaaaatgagcttggaattgaattctttcagttgatcattcctgcctctaagagaacacattcagaaaatgcgcttttctctcattccggcgatgacacagaatgttcaagatcaggacagggctctcctccgtcatacagccgaggcccaccccgaagaacattcatccttgcaacacagccactgtgctctaaagaagcccagactagcccacatgaacagcccacacgcactgagaaaaaccgaggctcccacctataccacaagtctccctgtgatcatgcatcacctgggatgtctgtgacaatgtctgggatgcagcaggcactccctagacagttaactactcttactttttatcccccagcttttcgctctataaaaatctttagaataatgattctgaaaacagagatgctgcatactcatgcacgatctcaagaagcacttctaaaagattcctccaaaacgatgctccattccacacttccttcctgtgtccggaaatctaattatcatcatcgggagagaaaaatcaagacaaaggaagcctttcctgccaagattcacaggtccaggaatcaagggatgaaagtggaagtggcaccactcaccatcacctctagtgatccactagcagaatttttgcttcctgttactgtgacactatgttctgcaagcctagaggtcttagctccagagggaggaatgctgtcaccaggagacgcaacaatgattccattgaactggaagttaacactgccacctggccactctgggctcctcctgcctctaagtcaacaggttaagaagagagttccagtgttggttggggtgattgacctggactatcaagatgaaatcgactactactcctcgatgaaggaacgcagttcctcaccagcaacggaacaaagctggatggagaatgactttgatgagctgagagaagaaggcttcagacgatcaaattactccgagctacgggaggaaattcaaaccaaaggcaaagaagttgaaaactttgaaaaaaatttagaagaatgtataactagaataaccaatacagagaagtgcttaaaggagctgatggagctgaaaaccaaggttcgagaactacgtgaagaatgcagaagcctcaggagccgatgcgatcaactggaagaaagggtatcagcgatggaagatgaaatgaatgaaatgaagtga

SEQ ID NO: 23559 - DNA, 1380 bp, Homo sapiens
  SIMILAR (841)..(1377): 871254mologous to Homo sapiens p40,accession number U93564,Smith-Waterman Score=826.
atgtgggcaggcaaaagggctccaatatccagagaaagccctccagcaaagaaacacaagtgctggcaggcagaggagcctctctctgtggccatcaccactaaaaggcccacaggctgtacttctaggctactactgatgttcactgaattctcaagggctcctcagtcagcctgtggtgaattttgccaggcctgggactcacccttcagggcactaggctctcctctggcccaggacagctccagaaatgctgtccaagagccaaagcctgaagctggggaccccaagagcctgcttggtgctctaccccactatggccaagctgctgttgtggagaaatggcagaggggtagtgttggtaatacgactgtcattcctatcctcttcagtgtctctttcagtgatatgaagttaaaaaccggtaataaggttggcttgggctattccctgcattgccattattgtcactttaagtctcaggccgaaggagcaaccactgttggagaatgtttccagtcaccatggcagaaggaaaaaagagcttcaaacgggctcctaaagtttctgccaaagggcacagacaaacaaaaagacagcagtaacctctgcagacttaaatgtccctgtctgacagctttgaagagagcagtggttctcccagcacacagctggagatctgagaatgggcagactgcctcctcaagtgggtccctgaccccgacccccgagcaggctaactgggaggcacccccaagtaggggcagactgacacctcacacggccaggtactcctctgagacaaaactttcagaggaacgatcagacagcagcatttgcggttcacaaaaatctgctgctctgcagccaccgctgctggaacgcagcttctcaccagcaacagaacaaagctggatggagaatgactttgacgagttgagagaagaaggcttcagacgatcaaactactccgagctacaggaggaaattcaaaccaaaggcaaagaagttgaaaactttgaaaaaaatttagacgaatgtataactagaataaccaatacagagaagtgcttaaaggagctgatggagctgaaagccaaggctcgagaactacatgaagaatgcagaagcctcaggagccgatgcaatcaactggaagaaagggtatcagtgatggaagatcaaatgaatgaaatgaagcgagaagggaagtttagagaaaaaagaataaaaagaaacaaacaaagcctccaagaaatgtgggactatgtgaaaagaccaaatctacgtctgattggtgtacctgaaagtgatgcggagaatggaaccaagttggaaaacactctgcaggatattatccaggagaacttccccaattga

SEQ ID NO: 23560 - DNA, 1209 bp, Homo sapiens
  SIMILAR (274)..(1206): 921254mologous to Homo sapiens p40,accession number U93566,Smith-Waterman Score=1478.
atggtgtcataccaagttggatggactctcactatttggggagagtgtggcattggaggaagctggagggcaaaccgcactttggcttatgagattcttgtcaagaaaggcaaactatgtagacaaaatcactaccagggaagtgggccacagagagtgattaatgagctcaaggctacacagcagatgatgggccgcatccagtgtctgctcatcatcatgcgtcttgctgccctcaagtcactcctagcagttgcccaggactgtttgttccccgttcctatcctcagctggacggagaatgactttgacgagttgagagaagaaggcttcagacgatcaaactactctgagctatgggaggaaattcaaaccaaaggcaaagaagttgaaaactttgaaaaaaatttagaagaatgtataactagaataaccaatacagagaagtgcttaaaggagctgaaggagctgaaagccaaggctcgagaactacgtgaagaatgcagaagcctcaggagccgatgcgatcaactggaagaaagggtatcagtgatggaagatgaaatcaatgaaatgaagcgagaagggaagtttagagaaaaaagaataaaaagaaatgaacaaagcctccaagaaatatgggactatgtgaaaagaccaaatctaagtctgactggtgtacctgaaagtgacggggagaatggaaccaagttggaaaacactctgcaggatattatccaggagaacttccccaatctagcaaggcaggccaacattcagattcaggaaatacagagaattccacaaagatactcctcaagaagagcaactccaagacacataattgtcagactcaccaaagttgaaatgaaggaaaaaatggtaagggcagccagagagaaaggtcgggttacccacaaagggaagcccatcagactaacagcagatctctcagcagaaactctacaagccagaagagagtgggggccaatattcaacattcttaaagaaaagaattttcaacccggaatttcatatccagccaaactaagcttcataagtgaaggagaaataaaatactttacagacaagcaaatgctgagagattttgtcaccaccaggcctgccctaaaagagctcctgaaggaagtgctaaacatggaaaggaacaaccggtaccagccactgcaaaatcatgccaaattgtaa

SEQ ID NO: 23561 - DNA, 1230 bp, Homo sapiens
  SIMILAR (396)..(4): 721254mologous to Homo sapiens unknown,accession number AF149422,Smith-Waterman Score=477.
tcacttcatttcattcatttcatcttccatcactgataccctttcttccagttgatcgcatcggctcctgaggcttctgcattcttcacgtagttgtcgagccttggctttcagctccatcagctcctttaagcacttctctgtattggttattctagttatacattcatctaaatttttttcaaagtttttaacttctttgcctttggtttgaatttcctcttgtagctcggagtagtttgatcgtctgaagccttcttctctcaactcgtcaaactcattctctgtccagcttgttctgttgctggtgaggaactgctttcttttggtctttgatgatggtaatgtacagatgggtttttggtgtggatgtcctttctgtttgttagctttccttctaacagacaggaccctcagctgcaggtctgttggagtttgcaagaggtccactctggaccctgcttgcctgggtatcagcagcagtggctgcagaacagcagattttcgtgaaccacgaatgctgctgtctgatcgttcctctggaatttttgtctcagaggagtacccagccgtgtgaggtgtcagtctgcccctactagggggtgcctcccagttaggctctgagaacttggttattcttcgatttatcacgagtgttaaacttggattatgttctgggaagtaataatctgcccggttaagaagagttttccggggaacagccggaatttggataaagaactgcagatgaatagttgcaaaagttgtcccatttgcagtcgtctcttcttgtcttgttccagtaattagagaagagacattcgacttgtcccagttcagtttgttagctgtgggtttgtcatacatagcttttcttatgttgagatatattccttcttggtggtgcaccattggtgctagctctggtgggtcactctccatgggcctctgaaggccacaatgcaggtatgtcagcaaccgctgtggtgactggaagtccaggagggcagcattgaggcaccagtgacctccgcactctattgtccctgtgtggactggatctgcgtagagccatgagggaggtcctgcgcgacggccctgtgcctgcaacaggtcctgagaaacagctccgcaggcgctcttggaagatacaaccctgtctggcagagcagcctcgcacttgcgttccaggcctgaatagcagccccacaggctgcccctggcacacat

SEQ ID NO: 23562 - DNA, 1069 bp, Homo sapiens; identical to SEQ ID NO: 14081
  SIMILAR (177)..(239): 381254mologous to Homo sapiens p40,accession number U93570,Smith-Waterman Score=40.

SEQ ID NO: 23563 - DNA, 3309 bp, Homo sapiens
  SIMILAR (2364)..(1081): 411254mologous to Xenopus laevis polyprotein,accession number U81290,Smith-Waterman Score=871.
ttacattttggcatgattttgcagcggctggtaccggttgttcctttccatgtttagcgcttccttcaggagctcttttagggcaggcctggtggtgacaaaatctctcagcatttgcttgtctgtaaagtattttatttctccttcccttatgaagcttagtttggctggatatgaaattctgggttgaaaattcttttctttaagaatgttgaatattggtccccactctcttctggctaggagagtttctgctgagagatccactgttagtctgatgggcttccatttgagggtaacctgacctttctctctggctgcccttaacattttttccttcatttcaactttggtgaatctgacaattatgtgtcttggagttgctcttctcgaggagtatctttgtagcgttctctgtatttcctgaatctgaatgttggcctgccttgccagattggggaagttctcctggataatatcctgcagagtgttttccaacttggttccattctccccgtcactttcgggtacaccaatcagatgcagatttggtttcatttcattcatttcatcttccatcactgataccctttcttccaattgatcgcatttgctcctgaggcttctgcattcttcacgtagttctcgagccttggctttcagctccatcagctcctttaagcacgtctttgtattggttattctagttatacattcgtctaaatttttttcaaagtttttaacttctttgcctttggtttgaatttcctcctgtagctcggtgtagtttgagcatctgaagccttctactctcaactcgtcaaagtcattctccatccagcttcgttccattgctggtgaggaactgcgttcctttggaggaggagaggtgctctgctttttagagtttccagtttttctgctctgttttttccccatctttgtggttttatctacttttggtctaggctctccaagcatggctggcagcacatttgtatttctgtccgaattttccattcgaaattggtcaacagctggaatgctacgtttgtcttgggttggccaacttcctgtattgttttctattgttatcccattgatttttgattggatccagtccaagaagatcatcactctggcaaatacacccggcttccatggctggacacagccagctccccagctgacaatgccatagaggacaaagggaccattttcatgtctacatactagtggcccaccagagtctccctggcagaaatctttctctccagatgctgcaaagccagcacagatcatcttctctgtgatccctcctggatgggcagaatagtaagtgtgttcacagacctctctttctaacacatgcacttgaatctgctgtaggcgacttgctaggccaccatctaatgaagaaacattcagagagagctcgatgatgaagtaagcagaaagtgttgttagaaatgtatttaagttcagatgtagctctgtaccaacatagctgaagtcattcagtttggcctgagctgatgtagaattctgctctgttgattccttcaggtttctgtcatggtccccagcaataatagtccaggagagtggattattcttcaattgcacacagtgggctgcggtcagaatccacactgggttgatgatggcacctccacattggtaatcgcctagaaacctcagacccacctgccatggccaacagtgggggcaggcttcttcccctcctgcgattcttctggaaagccactggggactaaatggagggatgccacagacatcatgcagaatagcttttacggtagatacaggattgttttggggaggtaactttggttcaaatttgtttaaagactctgagggcaaaatggtaaatctggccttgaagccttgtaaacgatttttaccatcacttttaaagtatatcaccgtcatgttactagaactgaatattgaagtgatggtcaacattccacaaagtttagctaacttgtgcttttcttcagaatcaccgtaaatcacaacagcatcataaatacagtttggactaaatttgacagcaaagtcctcaaatgtcaactttataatgtgcttctctggagcacaaatgaaccaatgacaccttgtgttactgggatacaaatcaggatacttggcagagtgatttgtcccttcttctaccaatatagccagactcccacaacctgaccctgcttctgacttctgtacagcagtaacggtaagctcaaagccactgccactgtcttctgtatcagaaacaaatggaaccatggcctcactggtctctgccagcaatggtgaaggcaatatttttccacagaccttaccctttcctctctggcttccattcacttcttggacagaactcagggcctttgttatataccttgagcccacttttgagaggggttggccccgatccaaacctgtgaacaggttttgagtgataaaatccatcaactcagacactttggagaaaatgccaagtgatgccttcacatggttgtttcttacgggaactgaacctccagcacaaccagctacccaggaagttatcccagcaagaatccagattccaccacctcttctacaaaccagtggtcctccagagtccccctggcaggcgtccattccccaatcagggaagccagcacacagcatggtccttcccaggggagggaggttcatgctcttgagcacagtattacacgctctgtcatccatgatgggaagttccatttcttgtaggacatttgaatattctgatgttttggaaatcttgccccatccactggataagcaaagaattcctggttcaactttatcatcgctgtcaggaagacagattggctgaacagcatttccaaacttgactttgtgttttagatacagcagtgcaatatcaggactcatatattcacggctgttgtattcaggatgggtaataatttttgagacaggaatattctgttcttgcttatccttctgaaagaggctgtactccccagaagtcacagttatattcttcagctgcttctcactgaggctgtccaggcagtgtgctgctgtaacaacccgatcttcttgaatcaagcttcctccacagaagtggtgctcatctgattttagggagacctgccatggatgtccagtcactgttgaatttctccaactactaattctagagaagaatctagatcccacggcaggttccttacttttcatgttgaccatgcgaattccacacttcagtcctgtgtagaagagcat

SEQ ID NO: 23564 - DNA, 1367 bp, Homo sapiens
  SIMILAR (1017)..(4): 931254mologous to Homo sapiens p40,accession number U93564,Smith-Waterman Score=1619.
ttacaatttggcatgtttttgcagtggctggtaccggttgttcctttccatgtttagtgcttccttcaggagctcttttagggcaggcctggtggtgacaaaatctctcagcatttgcttgtctgtaaagtattttatttctccttcacttatgaagcttagtttggctggatatgcaattctgggttgaaaattcttttctttaagaatgttgaatattggcccccactctcttctggcttgtagggtttctggcgagcgatcagctgttagtctgatgggcttccctttgagggtaacccgacctttctctctggctgcccttaacattttttccttcatttcaactttggtgaatctgacaattatgtgtcttggagttgctcttcttgaggagtatctttgtggtgttctctgtatttcctgaatctgaacgttggcctgccttgctagattggggaagttctcctggataatatcttgcagagtgttttccaacttggttccattctccctgtcactttcaggtacaccaatcagacgtagatttggtcttttcacatagtcccatatttcttggaggctttgctcatttctttttattcttttttctctaaacttcccttctcgcttcatttctttcgtttcatcttccatcactgataccctttcttccagttgatcgcatcggctcctgagtcttctgcattcttcacgtagttctcgagccttggctttcagctccatcagctcctttaagcacttctctgtattgattattctagttatacattcgtctaaatttttttcaaagtttttaacttctttgcctttggtttcaatttcctcctgtagctcggagtagtttgatcttctgaagccttcttctctcagctcgtcaaagtcattctccgtccagctttgttccgttgctggtgaggaactgcattcctttggaggaggagaggtgctctggtttttagagtttccagtttttctgctctgttttttccccatctttgtggttttatctacttttggtctttgatgatgggtgatttacagatggggtttttggtgtggatgtcctttctgtttgttagttttcctttgactccttgctggctagtcacggtcagaggcaaggtatgtgttgaatggatgacatgcgtccccaacgccttgcctggctgctgggaatgctgataaagtttaggcacgctggcaccatggactgggatctgacaaagttttcctgtgaaatttggagggcactgacatttgtcccttgaactgcactggccaccattcatacatggaagatggcaaattacttcttgctgccacaaatctgattcactatccat

SEQ ID NO: 23565 - DNA, 3988 bp, Homo sapiens
  SIMILAR (799)..(1188): 321254mologous to Homo sapiens ADP-ribosylation factor 3,accession number M74493,Smith-Waterman Score=108.
  misc_feature (1)...(3988): n = a,t,c or g
tcatttcatcttccatcgctgataccctttcttccagttgatcgcatcagctcctgaggcttctgcattcttcccgtagttctcgaaaaaggctttcagctccgtcagctcctttaagcaattctctgtattggttattctagttatacattcgtctaaatttttttcaaagtttttaacttctttgcctttggtttgaatttcctcctgtagctcgtagtttgagcatctgaagccttctactctcaactcgtcaaagtcattctccatccagcttcgttccatgncgcgcagctttcgcgcgatcggggaggtgggaagtatccggggctggggtggggggtacgccgcacagctccagtcgccgtcgcggcttccggtgctaggtggagggaagaaaggagggagccggggagtgggccagggcagcagccgggctgaagtcggcttggggagccagagggagcggagcggaacctgcggggcagaggcggcggccgcagcggcgcagctgatagcaggaacaggatcaagtcttccataccagggaccaggccaaaaccagactgctattgctcctacttgtgccccactgtccccatgtaaagcagctgctgtgatcatgggcaatatctttggaaaccttctcaagagcctgattgggaagaaggagatgcgcatcctgatggtgggcctggatgccgcaggaaagaccaccatcctatacaagctgaaactgggggagatcgtcaccaccatccctaccattgggttcaatgtggagacagtggagtataagaacatcagctttacagtgtggggatgtggggtggccagggacaaggattcgacccctcttggagacacttacttccagaacaacccaagggtttgatattttgtggtccgacagcaatggatcggggagcgagtaaatgaggccccgggaagagctgattgaagaatgctggcgcggagaccagcctccgggatgctgtactcccttttctcttggaaacaaaacagatctgcgtaatgctatgaacgctgctggggatccaagacaaactggggcgtgcattcccttcgtcaccgtaactggtacattccaggcaacctgtgccaccagggggaaccgggctgtacgaaggcctgcactggctggcaaattcggttcccaaacaggaagtcgaaagccggacggccctaacaaagcaccccaaccgaccctgaacatactactgtcaccctgcccccagttcttacccttactctccatgcaaggtttggcaagggcctggggtatcatgtccacattgcccagcagaaccctgcctcccctgacctccctccccttttcctgtccacctatatgaccaatccctaattgctgtcctgatgatgagtcattccaatttactggatttaaaacaaaaagttgttacggtttcatggggtggcccctctctctctctcacctctgggtttcgggaggtcgagtggggtattctctttgtttggcagtggttgctgtcctcttggcatctgagtcctttccctgtccccacaagcccttctactccctgtttgcctttcctttgccaccctctccctgttttacatggaaattgcacgggcctctctgtgtttgcgtgcatgtgtgcgcctgtatatacatgtatagagagatatatttgtgggggccggggggagcggggagggggtggagtgaagctcagggcttgcagccaggacactgcccactggagcctgtcatctgccccttccgtgttggtgagattaagggaagaaggtgggagggcattagtcaagccggactgccccagtctttgactggttaccctcctctctgcaggtaggtttttctggatgataggacagatgatggattcttcaccaccattttccttgtactcttctctccacccttcttagggctggaggatggcatttatctctagatgactgttcccaaggagatgccactctgctctgccttactgttgggaaggagagaggaacccactcactcttatcagcttagagtgttcaactgatccttccccaccatcttcagatctgttcctctggagcttgactgaggggtgggaatgacaagtccatggtgtgtgttatggaactcagggcattggggaaaggaagacgaaggcatgaggttttccatcttcattctcttttgttattaggagaaggtgaggcatgggccaatcccattcctgccttccagtgccccaccacccttctgatcttaggggttggatgggtcatctgtccttggtcagaattttctcaccctagtactcctactggcctgaccagggctgactgggtattctaatgaggagctgggaagtggggtgacatagctgaccttagtatcaacccccctcttctccaactcttgttttctagtccaggatatgctaaaggacgaagattttctattgtttccaggccctcagaccatccttgctgtcccttcaccctccatgcccctgccatcctcactcacttctcataaatggatctgggggttagagtggaggaaataaaatcctgaagtggttgtcagtgcttgtgggatgcagtggtcttcaggattctccccgcattattatgtagttgttcagaagctgttgctactgcgtctctctgtctgcagggggcacttgttcctgaggtcctcgcctgggtcctgacttctgtagtttctgtgaagacgtggctgtcctgtgggctcctgtgtgtgctggctgcgccctgagctccgagacagctgcccataacctgctaaggtcagggcccagggccctccaacaagcaatggctgaagggaccccttcccagtaagggctgtcccaagccccactccatgggggccaaggtttcctggccacttttgttgatagcagatggatcaatattagtaaccccatccaagattgaactgtgaaagagaggttccagggggtaatctccctcagtgccagttaacttagtgatgtgttacccaggatgcagcaggtgtgtgcaggtatcttgctctctaggcctgtgtgtgtgtgtgagtgtgtgtgtatatgggtgtgggtgtgtttgtgtgtggtggttgtggggggggtgttggaggttctatttcatttaaaaatgtattcatttccctggccccacagatgcttccctccatactttttatttgctctgtttcctcagatttattttgtcttgccccattgcctctccttccttgaactctttccttttcaatctcaactcattcacctgctgttgctcatttgccctttttccattgtattttttcctacttaggattttccactctatctttgtggttcatgaggactttgcctcttctcctgcctcattccctggactttctctagtttagatgtccagtcctaaaataggttttcctcacttcagggcctcacccctcaccttgtttttttgggggctccagggacccaatctggggctggaaatgttagggaggttgccttggtgctgccccagatctgtcccagccagggggcaagttaagtgaatcttggtagtaatccctgggctggctaagcccttgggcaagggggtgggtcctttctacattcccattcacttaacagctcttttgggattgggtgtttcattccatttctgcccactccctctccatctccgtctctggtaggtttaaattttatgctttccctgattccagctttctgcttcctgaggactcccgctccccccgaccccaaagtttgtctgtggtgttatagtggtaactgcagttcctcctctggaatgtagactggtatatgtttaataactcaccttctctatccttgctcaaaatgtgggataacgcgatgactgtgaccctgggttggaaattaaacttggttttatgcagctttaaaaaaaa

SEQ ID NO: 23566 - DNA, 404 bp, Homo sapiens; identical to SEQ ID NO: 804
  SIMILAR (308)..(282): 881254mologous to Homo sapiens calbindin D28K,accession number S46006,Smith-Waterman Score=40.
  misc_feature (1)...(404): n = a,t,c or g

SEQ ID NO: 23567 - DNA, 381 bp, Homo sapiens; identical to SEQ ID NO: 12907
  SIMILAR (87)..(146): 501254mologous to Homo sapiens Human secreted protein, SEQ ID NO: 5576,accession number G01495,Smith-Waterman Score=64.

SEQ ID NO: 23568 - DNA, 349 bp, Homo sapiens
  SIMILAR (314)..(156): 531254mologous to Human immunodeficiency virus type 1 gag gene (AA 1-429),accession number X15951,Smith-Waterman Score=192.
  misc_feature (1)...(349): n = a,t,c or g
cggacttaccctccactgtaagagttacccaaagtgtctgtgatggtccaggaggcttccgaggccatcaggcagcatcagtcttcagccactaagctgagaagatctgggaaggagtcagtcagagagccttggggcagagttccaggggctctgggaacagctcccgggcaagttggacagtccgatttccagtggggtcccacacagatgggacacggcctaggaggaatcctgggctgcaggcattccttggcccagtggccagatttctagcacttgaagcaagatcctgggggaggaggtcctgaaggaatgcctggccactgtggcttangtgttntgaagt

SEQ ID NO: 23569 - DNA, 462 bp, Homo sapiens; identical to SEQ ID NO: 10181
  SIMILAR (1)..(81): 811254mologous to Homo sapiens Human secreted protein, SEQ ID NO: 5576,accession number G01495,Smith-Waterman Score=99.

SEQ ID NO: 23570 - DNA, 285 bp, Homo sapiens
  SIMILAR (285)..(214): 791254mologous to Homo sapiens Human secreted protein, SEQ ID NO: 5576,accession number G01495,Smith-Waterman Score=89.
atgatcataaggtaaagttccacaataggctgtcttcatgctgaagagcaaagaagtcattccaagtcccaaaatctcaaaagtagggaagccaaaagtacagccttcagtctgtggctgatggcccaaaagcccctggcaaatcactggtgttaagtttgaaagtctgacagccactgccagagcccctggaactctggcccgaggctctctgactgactccttcccagatcttcttggcttagtggctgaagactgatgctgcctgatcgcctcggaagcccc

SEQ ID NO: 23571 - DNA, 410 bp, Homo sapiens
  SIMILAR (208)..(152): 841254mologous to Homo sapiens Human secreted protein, SEQ ID NO: 5576,accession number G01495,Smith-Waterman Score=87.
ttggtccaaattgccaggagtgcaccaacacgtacaagactcttaatgcaaaccaggaacagatggcctatcctgacagaaaaattacacacagaggccccttcctctgcacggcctcttggagctggaagtaacttgtaggtgttggtcctggcagccacttctagagcccctggaactccggcccaaggctctctgactgactccttcccagatcgtcttggcttagcggctgaagactgacgctgcccaatcgcctcagaagccccccttttctcacagggagagtatctcctggtcccaagctgatcccaacttcttccaccatgggaagacaaatagaatgtaccttctttgaggaacaggccctcaccagacaccaaatctgctggtgcctttgtcttggacat

SEQ ID NO: 23572 - DNA, 765 bp, Homo sapiens
  SIMILAR (188)..(132): 841254mologous to Homo sapiens Human secreted protein, SEQ ID NO: 5576,accession number G01495,Smith-Waterman Score=88.
tcaggacatactctgagaaacattttcagatgggtctttaaaggcattgagaaaagctgagagatagagcaaggaaagcaggtgctgcacgttgctgcctttatcttcctgcacaggagtaaatactttcctggcagtcactcccagagcccctggaattccggcccaaggctctctgtctgactccttcccagatcttcttggcttagcgactgaagactgatgctgcccgatcgcctcggaagccccataattatggaagccaaggagtcccacaatctgccatctgaaagctggagaaactggagagctagtattgtaattcagtctgaagggaaccaatggtgtaactctcagtccaaggccaaagacctgagaatgggggcaaggtggagttgggggcactggtgtaaatccctgagtctgaaggtctgagaacctgaagttctgatgtcctgcctgcaactgacctgagtattctctgtattgtggctctgcatggtatggcattttcccctcctcttgggaactgtgaataattaactctcgtttaaatgcaattgtctcctgatctattggcttcactatatcaaaatccttggcaataacttttccttgtctctttctctcatatttcccatacagtgcatccgaaaatccaatccattttacctctgaaatttgtgctgcatacaaccactttttaccaagaggatttgctgataaatggcaacagagcaggccccagttgagcagctgtatcat

SEQ ID NO: 23573 - DNA, 411 bp, Homo sapiens; identical to SEQ ID NO: 447
  SIMILAR (109)..(222): 861254mologous to Homo sapiens Human secreted protein, SEQ ID NO: 5576,accession number G01495,Smith-Waterman Score=172.

SEQ ID NO: 23574 - DNA, 2664 bp, Homo sapiens
  SIMILAR (885)..(16): 771254mologous to Homo sapiens BC273239_1,accession number AC007204,Smith-Waterman Score=1259.
tcacatttgtagttgtctctctccagtatgaattttcttatgtgtagtaaggttagaggagcacttacaagctttgccacattcttcacatttgtagaatatctctccagtatgaattctcctatgtgtagtaaggattgaggactggttgaaggctttgccacattcttcacatttgtagggtctctctccagtatgaattttcttatgtgtagtaaggttagaggagtacttaaaagctttgccacattcttcacatttgtagggtttctctccagtatgaattatcttatgcgtagtaaggtctgaagaccgcttgaaggctttgccacattcttcacatttgtagggtttctctccagtatgaattctcttatgtgtagtaagggtagaggagtacttaaaggctttgccacattcttcacatttgtagggtttgtcttcagtatgaattcttttatgtgtagtaagggtataggagtacttaaaggctttgtcacattcttcacatttgtagggtttttctccagtatgaattatcttatgtgtagtaagggttgaggaccggttgaaggctttgccacattcttcacatttgtagggtttcttttccgtatgaattatctcatgtttactaagggttgaggatgacataaaggctttgccacatttatcacacttgtagggtttctctccagtatgatttctcttatgtgtagtaagagtggaggagtgcttaaaggctttgccacattcttcacatttgtagggtttctctccagtatgaattttcttatgtctagtaaggctacaagagtggttaaaggctttgccacattcttcacatttgtagggtttccctccagtatgaatttttttctctttttcactataacgaaagaagagacgataacgaccagcaccaaattttacccgtgaccagtctttatttttcccagagcctaacgacttgccatgacggaatgccggtgatgatggattgaccgtgatatgctcctcaatcactttatggactaccgccaataactttgtggcggcttttctctgataattttcaggatcttttccctttaatgtctcgacttcggcaactaaagcgtcgtaggtttcctgaaaacagggatgagcatatagcgcccaaccattaacctggatgttgacggcgaaatttgaaatcactaaaacgtcggctgcgaagatatcgccagagctgtgcgtttccgtgccaatatgctcgatgatcttggccgttgcgttaagagtgcatcgtcggccattttctcgactctttacaactctctgtaagtgcctagttgcagccgtgccacgtgtgctcgaaccaacgactttaatcggtttgtcagaatgaggtgaataatcctcgaacccgctttcacgaccaccccttcctaccccagttaccccatgccccctcctccgcctttctctgcttcgggcttgctgctgttgtctctttctccctctccgcttcttctcctgtcctctgttatgttttttgttgtgtttttttttttctgtttgttctccagcacacaagaacttcaaaatgcctaagccacagtggtcaggcattcctacaggaccgcctccctcaggatcttgcttcaagtgccagaaatctggccactgggccaaggaatgcctgcagcccaggattcctcctaagccatgtcccatctgtgtgggaccccactgggaatcagactgtccagctcgcctggcagccactcctagagcccctggaactctagcccaaggctctctgactgactccttcccagatattcttggcttagcggctgaagactgacactgcctaatcacctcagaagcctccgcccaacgaggtgtaccgcgatttacgcgcgggggcggcctccggttgggattactcttcccgttggcggcgtgaacttggcgttgatgtagtcctcgactgcaccggcgtatatggctcccgcgagcatggcgaagcgcatattgccgccggggccaaaaaagtgctcttttcacatcctggcagtaacgattgcccgggctggcgtgaatggcttcaaccatcagcgtgacgccttcttttttcagcatctggcccgcttgcccccgggcgctaaagccgccgtcgctgctcagggtgtagtttttgttgtccagcacattaagcgtaaacacctgatccgccatctctttcgggcggttaaaggtggtcactttcaccgtctcgttctgacgtcccatcaggcgatcccagcccgcaccgaaaatcgggaacgtgtttttgctcactgcaatatcgaggtcgagatcgtccaccgttttaccaagcaccagacgcgaacgaatcaactggatctcggcgtccgatgcaggcggtttgttggctaatgccgaaccaatgtcctgcactaacgaattgccgctgttttgctcgatttgtaccagtgcgtcggcactataaatcggcgtggcgaagaaggtgtaaaccacggcacagagggcgaatacggtggtgatgccaatcacccaccagcgcgcttcaatgacggtgccgaccaggcgaccaatatcgatttcatcactgcccgttaccggagcggcatgttgttttactttttctgtcat

SEQ ID NO: 23575 - DNA, 433 bp, Homo sapiens; identical to SEQ ID NO: 10189
  SIMILAR (166)..(83): 821254mologous to Homo sapiens neutral protease large subunit,accession number M27826,Smith-Waterman Score=116.

SEQ ID NO: 23576 - DNA, 606 bp, Homo sapiens
  SIMILAR (397)..(507): 571254mologous to Human T-cell lymphotropic virus type 2 gag polyprotein,accession number AF326584,Smith-Waterman Score=147.
atgagaacacatggacccaaggacgggaacatcacacatcagggcctgttggaggacacatgtgacatttggtgccaaagacccgggacaggaggactccttcaggagactggccccctgtccttgccctcattctgtgaggagatccacctacaacatcaggtcctcagaccaagcagcccaaggaatatctcaccaatttcaaatctggctgctccttgcaaggccacagcaagtccctcagcctctgctcccccaccctataatccttctatcacttccactcctcacacccggtctggcttacagtttcgttccgcgactagccctcccccacctgcccgacaatttcctcttaaagaggaggctggagctaaaagcacagtcaagggatcttgcttcaagtgccagaaatctggccactgggccaaggaatgcctgcatcccgggattcctcctaagccgtgtcccatctgtgtggaaccccactggaaatcggatggtccaacttgcctggcagccactcccagagcccctggaattctggcccaaggctctctgactgactcctttccagatcttcttggcttagtggctgaagactga

SEQ ID NO: 23577 - DNA, 388 bp, Homo sapiens
  SIMILAR (152)..(220): 821254mologous to Homo sapiens Human secreted protein, SEQ ID NO: 5576,accession number G01495,Smith-Waterman Score=88.
atcactactccagtgcggtggaattcgggagagcagagcacgtgtgtttttacgagaattatgctgagataggtaacagatgaggatgaaatttgggcttgactgaagtgggggggtgtgtctgtgaagccttgcggaagtacagcccagggcttccgaggcgatccggcagcatcagtcttcagccgctaagccaagaagatctgggaaggagtcaatcagagagccttgtgccagagttccaggggctgtggaagtggctgccaggcagatgcaccccaagtcaataatcacattcagagagataaatggggagtacactggggctgtggattttcccaggctaggagtccgtgcttctgaggaaacagcgctcagagagctgaag

SEQ ID NO: 23578 - DNA, 528 bp, Homo sapiens
  SIMILAR (289)..(513): 681254mologous to Homo sapiens neutral protease large subunit,accession number M27826,Smith-Waterman Score=245.
ccaggagtaagaggagcccagggtggtccctctatccccaggcagtgtgaagagtctgctattggtcctaaatttgcttggatcatctcttcctttcactggaagcaaggcatgttcaacatggaggctccttcttcccttttctttgtcaacatgtgtgcagtaaagaagcagacaacctggggccggccagacagaggattcatctggcagccactcccagagcccctggaactctagcccaaggctctctgactgactccttcccagatcttctcggcttagcagctgaagactgacactgcacgatcgcctcggaagccccctagaccattcacggacgccgagcttcgcgtaactctcacagcggaaggtaagcctgtccccttcttaatcaatacggaggctacccactccacgttaccttcttttcaagggcctgtttcctttgccttcataactgttgtgggtgttgacggccaggcttctaaacctcttaaaactccccaactcgaattccaccacact

SEQ ID NO: 23579 - DNA, 1554 bp, Homo sapiens
  SIMILAR (913)..(839): 361254mologous to Homo sapiens putative p150,accession number U93565,Smith-Waterman Score=40.
tcagggtatcaaaggaacttccttccttcctttcttccttccttccttctttccttccttccttccttccttccttccttccttccttccttctttccctccttctctcttccttttcttcttctctctcttccaccctgaagtcacttcttcctttaatcctaaagtaaaccaatagaaattacttggtgaagaacctggtatagtatattcagggagagaatgagtggctccagggtgtctagactgggatgtttctgacttgttctgtagtgccctaccttctataaatacacctgtgagtgagaacatgcggtgtttggttttttgttcttggggtagtttgctgagaacgatgatttccagcttcatccatgtcccttgggcagtatggccattttcatgatattttcttcccatccatgaggatggaatgttcttccatttgtttgtatcctcttttattttgttgagcagtggtttgtagttctccttgaagagttccttcacatcccttgtaagttggattcctaggtattttattctctttgaagcaattgtaaatgggagttcactcatgatttggctctctgtttgtctgttattggtgtataagaatgcttgtgatttttgcacattgattttgtatcctgagactttgctgaagttgcttatcagcttaaggagattttgggctgagacagtggggttttctaaatatacaatcatgtcatctgcaaacagggacaatttgacttcctcttttcctaattgaataccctttatttctttctcctgcctgattgccctggccagaacttccaacactatgttgcataggagtggtgagagagggcatctctgtcttgtgccagttttcaaagggaatgcttccagtttttgcccattcagtatgatattggctgtgggtttgtcataaatagctcttattattttgagatacatcccatcaatacctaatttactgagagtttttagcatgaaaggcagatgaattttgtcaaaggccttttcttcatctattgagataatcatgtggcttttgtctttggttctgtttatatgctggattacgtttattgattttcgtatgttgaaccagccttgcatccctgggatgaagccaacttgatcatggtggataaactttttgatgtgcttctggatttggtttgccagtattttattgagaattttcacagcgatgttcatcagggatattggtctaaaattgtcttttttggttgtgtctctgccaggctttggtatcaggataatgctggcctcataaaatgagttagggaggattccctctttttctattgattggaatattttcagaaggaatggtaccagctcctcattgtacctctggtagaatttggctctgaatccgtctggtcctggactttttttggttggtaggctattaattattgcctcaatttcagagcctgttattggtctgttcagggattcaagttcttcttggtttagtcttgggagggtgtatgtgtcgaggaatttttccat

SEQ ID NO: 23580 - DNA, 750 bp, Homo sapiens
  SIMILAR (451)..(735): 851254mologous to Gallus gallus this product utilizes exon 5a,accession number L09253,Smith-Waterman Score=410.
ggcgcccagccactccccaccgctaccatggccgaagacgcagacatgcgcaatgagctggaggagatgcagatgcatttgtctacccgttatccttagtgcctagagcagagtagaggctcaataaacactaggaaggaaggagggaaggaaggaaggatggaaggaaggaaggaaggaaggaaggaaggaaggaaggaaggaaggaaggaaggaaggaaggaagggaaaaactgttgtcattgctgtcttacaaaggagaacggaggcacagaacagtcaggacacttgcctgaggccccacagttagggaatgaaatcaccagcattccagcccagagtctgtctccacagtctgcgctgtcaaggactcctgaggccaccctgggccagccctgtccatactacatcctgactttgccactaaattgtcactcaccctctcttttgcataggcttaaatcaagtgatgcttacaaaaaagcctggggcaataatcaggacggagtggtggccagccagcctgctcgtgtagtggacgaacgggagcagatttctaaaacttgctctttggatcccagggtaacaaatgatgcccgagaaaatgaaatggatgaaaacctagagcaggtgagcggcatcatcgggaacctccgtcacatggccctggatatgggcaatgagatcgatacacagaatcgccagatcgacaggatcatggagaaggtgagcacgtggcagtcagcaagt

SEQ ID NO: 23581 - DNA, 715 bp, Homo sapiens
  SIMILAR (288)..(467): 601254mologous to Homo sapiens PRO2550,accession number AF130089,Smith-Waterman Score=155.
tttttttttttttttggagatatatattcacgaagctttattgcagctgtttcccttacccagttgaagtggccagtcattttaatttgcagttctatttacattcccaaggtaaccacgttcagtaactctctagaggctaagctgttaaaatttccatttttatacaaatagcaaagatatttctttctctttctttctttctttctttctttctttctttctttctttctttctttcttttctttctctctttccttccttccttccctccttccttccttcctttctttctttttgtttgagacagagtttcgctcttgaccccgaggctgggagtgcagtggcctgatcctggctcactgcaacctcggcctcccggattcaagcgattctactgcctcagcctcccgagtagctgagactacaggcatgagccaccatgcctagctattttttcttttctctttctttccttccttccttccttccttccttccttccttccttccttccttccttccttccttctttccttctttccttcttttgtagagaaaaggtcttgctatgttgtgcaggctggtcttgaactcctggattgaagccgtcctcctgccttggcctcctgatgtgctgggattacaggcatgagccactgctcccggcctatttctttccttataggattataggatggtcccgcctatgatat

SEQ ID NO: 23582 - DNA, 507 bp, Homo sapiens
  SIMILAR (465)..(1): 1001254mologous to Homo sapiens ribosomal protein L21,accession number X89401,Smith-Waterman Score=822.
gggaataggttccagcagctcaggctccttcccattggttctcacaaagtgtgcttctctgggtggagcaggctggcgctttagttgaacccaggtacctttctctttggcttctttctttttctgatcattttccttcacacgtttcaggaagctatctcggctcttagagtgcttaatgtgctcaatacgcacattaattctcttggcaagaatcttgcccttaacttgtttgtttacaacaatgccaacagcatgctgggtaacattgtagactcttccagttttgccatggtaacacttgtggggcattcctttttgaacagtacccattcccttgatgtctacaatatcacctttcttatagattcgcatatatgtggccaaaggaacaactccatgttttctaaaaggcctagagaacatatatcgggtgcctctcctctttccctttgtgttcgtcattttggcgaattactggaagatggcggttcccggacgcgtggg

SEQ ID NO: 23583 - DNA, 1969 bp, Homo sapiens
  SIMILAR (1120)..(1209): 801254mologous to Gallus gallus SOX21,accession number AB026623,Smith-Waterman Score=133.
atgaaagaaggaaggaaggaaggaaggaaggaaggaaggaaggaaggaaggaaggaaggaaggaaggaaggaaggaaggaaggaaaaagaaaaagaaagaaagaaagaaagaaagaaagaaagaaagaaagaaagaaagaaagagaaagaaagaaagaaagggaaagaaagaaagagatttactacatcttgctatgccgtacgttgatcaggaaaaagacaaagacacctaccatcacgaattctgttcagcaacaaactgaagaatctagacagtgcagtaaggtgcatcgccagtgcaagaaaatgcgagaagcctctgtttctgttgcaagcaacacctggacctccaaggaaaatgagcactttcttgctaggaacagtctcaaacattttcaaggctggagaggctctcctactcgtgcccgccgccttcttcctcccggcgaggattccagggccacaaccagggcagctgcacgccaggccggcctgggtagccgggatgacaccagggtttgccaacgccaaacagggcgcagactccccggcgcgctccggactctccactcgcctaaacctgctctcaagcccccagatatacacacacagccgcggctggacatgcacacccagtgccggctccgggcgcgcacacatgcagggccacctccccgccttccccacccccatctgcttctgtcaaatgagaaagtcaccgaggagaacccaaacactccagccgctgagagccccctttggcacttggcagcacgcggcggcgggctcctcggctcaacttcgaggagtctccgcgacgcaacttttggggacgctttgcatttaagagagaacgaccgaggaggaggagcgctctgcccggccgccgctacctgcggggagctcaccagcaaacgccactgcagacgaaggacccaaagaaccgggtctccgcgggcagccaacattgatttcctccgggccgagggcgagggcccgggaggcctgccggctgcagccgcggcagggcgagagcatgtccaaagccggtggaccacgtcaagcggcccatgaacgccttcatggtgtggtcgcgggctcagcggcgcaagatggcccaggagaaccccccaaatgcacaactcggagatcagcaagcgcttgggcgccgagtggaaactgctcacggagtcggagaagcggccgtttcatcgacgaggccaagcgtctacgcgccatgcacatgaaggagcaccccgactacaagtaccggccgcggcgcaagcccaagacgctgctcaagaaggacaagttcgccttcccggtgccctacggcctgggcggcgtggcggacgccgagcaccctgcgctcaaggcgggcgccgggctgcacgcgggggcgggcggcggcctggtgcctgagtcgctgctcgccaatcccgagaaggcggccgcggccgccgccgctgccgccgcacgcgtcttcttcccgcagtcggccgctgccgccgccgctgccgccgccgccgccgccgcgggcagcccctactcgctgctcgacctgggctccaaaatggcagagatctcgtcgtcctcgtccggcctcccagtgcttaatatgcccaatatgcatattaattctcttggcaagaatcttgcccttaacttgtttgtttacaatgatgccaacagcatgctagatctttgctatgatggtgttgatggcaagggtcccatctgtttctgtgccactcagggatacgaggatattttcaaggctggctatggctctgtggtggactattacaatgatggctctgatttaaccacacctttagaaattgccacagtcatcccaaccttcagcaaccacccgctgatgagtcagcgtccatcaacatggaggcaaaaccctccactagcaaaaagattaccactcactgaagactcagatggtgatgaccattag

SEQ ID NO: 23584 - DNA, 495 bp, Homo sapiens
  SIMILAR (55)..(141): 501254mologous to Mycobacterium tuberculosis SEQ ID NO 13C,accession number AX005119,Smith-Waterman Score=63.
gcggccgcagcggcgtccgtacctccacccaccgggagccccttgaagcatcccggaggggcttctggcgctgcaggagccccgatcggggagccacagcatccgggagccgtggtgtctgtgcgtgcgtggagcctgtgctcatgacataggaagccgaacagaaggagcgtcctcaaatcctttcctacagtcaccaaacccacgctctgttaaaatgacatttcgtggctcctactttgtttccccggagagcaatgagttttctatcaggcctgatttagtttgacaaaagtcaaaaagaaaaactggatttgtccctctgcgagttcagtcagatcgctgggaaaacagaaatgacaaaacaataataacagaaatagaaccaggcatttgatacataattaccatcaccacggctgtcaagctttctggaattacgttcctccagtaactggtgatgatgcttgcaggaggcaaaatgcaatgcagttt

SEQ ID NO: 23585 - DNA, 900 bp, Homo sapiens
  SIMILAR (530)..(432): 451254mologous to Homo sapiens Human secreted protein, SEQ ID NO: 7400,accession number G03319,Smith-Waterman Score=61.
atggctctgaagatgaggagagaagcgggatgggcagtttgtgtggtgaggaggctggctgcagctccggccgccgccgccgccgccgccgcctccttcttgcatgacacagcagaaccgcagctgctgcagcaatttcaagccatccgcccaggaagcgccgcaaccgggactcgggagggcccaggggcacgcgaacaaaatgaggctcaagctgaccaggccgagccggaggaacgctggggcttggcagcagaagggatgggaccagagagaagggtgtggaggagaccccacacaggctccacgcacgcacagacaccacggctcccggatgctgtggctccccgatcggggctcctgcagcgccagaagcccctccgggatgcttcgaggggctcccggtgggtggagggcgtgaagaaggcgtcccctccgctgccggcggagctgatcggctggctagtcaatttccccttagcacgccccgtgcgcccaccctcgctcagcccggggccccctcgccgtcccccggaaggggtctgcggttcctggccaggacgttcggaaggcgagcgggggaaggctaaaaacacagctgaaagcaccccaagacaaaacttacacagaaaatacacaataatagtaacacattatcaaagaaataggaaggggcaaaatatcagtttttcacttgtttgcgaatttcatccttcactggccgattggacgactgtgacagcgttaacttggacatcccctaaagataacagcctcacggaagaatcatggttgcgggaaggaaatgtccatcggggcatggatgagtacgtcagggcacagtcattcctgattttgatgaccttggagaacagtggtggctctgtagtttctaaatga

SEQ ID NO: 23586 - DNA, 2730 bp, Homo sapiens
  SIMILAR (1476)..(1802): 681254mologous to Plasmodium lophurae histidine-rich protein,accession number X01469,Smith-Waterman Score=586.
tcatttccaaccctctgaggcccctttgtggatggcagcaggggcttcagcactgcccccgctctcggctctgctggtgctcgtaccccggcacctgcgcagagaggtcagctccctggctacggggcagccttcgtcttcactgcccgcttggctaacagcttgacgcagcccaccactggcccaggccttggagggatgtttgctttccaggggcctggcaggacgcaaggcaggccgggtacccgtgcaggtggctttgtttctgggcacgtatgtcaccgccttcatctctttcaaagccacccgtgggcttctggtcatattgtgatgaccctcgaaagtgacggatgccgtgaggccgtgggaacaggagctaggaggctgcaggccggccgccttcagtccacagaagccagatttgaggtgggttccggatgtcatgggtgccctggacaggtggatggggtggtctgagggctgacccggaggcttctgagcactgacatggtcttgccagtgtccactgatgatgcgtctgctgctctgtggctcacggggacaggaggaggtgggagcaggagccatctttgcccactcattgttggaggacggccccgttatgggctgttcccgagaggccgcggggtcactggtccggctcaggctctgccaaggagcctccttggggtttctggcgcctgcactcagggacggcaccacctgcgatggaggctgctgtgcagtgtagagtgtggtggaaactccctgcggccggctggggctcacctcagcttcccgagcacagtctgtgatggcactggcgtggcctggcctctccaggaccaaatctcttactcctgaatgctgagtgggcttccactgttgaatactgatacgtagcatccatggcatgcaggtgccattatctagtgaaccaaccctcactgccatgaccattactatcaccatcaccaccactgccaccattgccatcaccatcaccaccactgccaccaccatcactatcaccaccaccaccactgccgtgaccatcactatcaccatcaccaccactgccaccactgccatcaccatcaccaccactgtcaccaccatcactatcaccatcactatcaccaccactgccatgaccatcactatcaccaccaccaccactgccatgaccatcactatcactatcaccaccaccactgccatgaccatcactatcaccatcaccaccactgccatgaccatcactatcactatcaccaccactgccatgaccatcactatcaccatcaccaccactgccatgaccatcactatcaccatcaccaccactgccatgaccatcactatcaccatcaccaccactgccatgaccatcactatcactatcaccaccactgccatcaccatcgctatcaccatcaccaccactgccaccattgccatcaccaccaccatcacatcaccatcaccatcaccaccattgccatcaccatcactatcaccaccaccaccactgccatcaccatcactatcaccaccaccaccactgccatcaccatcactatcactatcactgccatcaccatcactattaccatcaccaccactgccaccactgccatcaccatcactatcaccatcaccaccactgccatgaccatcactatcaccaccactgccaccactgccatcaccatcactatcaccatcaccaccactaccatgaccatcattatcaccaccaccaccactgccaccactgccatcaccatcaccaccatcactgatcaccatcaccatcaccttcattgccatcaccattactatcaccatcaccaccaccaccatcaccatcactatcaccatcaccatcaccatcaccttcattgccatcaccattactatcaccatcaccaccaccaccatcaccatcactatcaccaccactgccaccactgctatcaccatcactatcaccaccatcactaccactgccatcaccactatcaccatcaccatcactaccacccctatcactaccaccagcaccaccatcactaccacccccatcactaccaccatcactactaccactgtcaccaccaccacgactaccaccacccccatcactgccatcaccaccaccactaccaccaacaccactactaccccatcaccatcatcaccaccaccatcaccactatcactaccatcatcatcaccgtcaccaccaccaccttcaccaccaccaccaataccactgcccccaccaccacccccgtcactgccatcaccaccaccaccactactactaccaccatcaccactaccacccccatcaccatcaccactatcactaacatcaccaccaccactgtcaccaccactgtcatcatcaccaccaccttcaccactactatccacccctatcaccatcaccaccaccaccaccctgtcactatcactaccaccatcactactgccaccatcatcaccacgaccacctccatcaccagtattaccaccatcaccaccaccattgttaccactatcattatcaccaccaccgccgccacacatcaccactatcacccctattaccatcactaccatcaccaccatcatcaccaccacacccatagctactaccattaccaccatcatcaccaccaccactgctttcactatcaccaccaccactaccatcaccat

SEQ ID NO: 23587 - DNA, 4685 bp, Homo sapiens
  SIMILAR (423)..(617): 321254mologous to Homo sapiens MN1,accession number X82209,Smith-Waterman Score=56.
tcacccaggtgaggctgcatgctgtcctgtcatcggaagatggcaggaaatgaccagggccaccttcgtgcggggtgacccatcgggcacaatgtgccaggatcccagaaccatctctccttttgaggcctgttcacagtttctcggggccctgggtggctctgagctggggactgtggctgagctgttctgcatcaggacacagagggtcccaagagtgtttatctctcctaaatgctttcggcaaagctgatcactcccttctttgctgttggggttctggggtttggccttctcccagggcgccaacgtcttgtcgtcgtccgcgctgtccaccagggccttgtcagcgggcatgtaccaggcagcgctgtgctctgccatcagcgagtccaggtcaatggtgctcatggcgctcttgaccgcctcggagcagcagctgcccagctcgctgtcgccattctgcgcccctgaggccccgacggcgcactcacccttcttgccacccttcagccccagaggctggtcctcggagatgctgaactgctgcctctgtagctggatctgcgcctgaaggatctccagggggtggatctcgtcgggtggcggggcgccgctgctgctcgtcggggtgcggacctgctccaggcccggagtgcccggatggcccgggcccccaccgccgccgtagctgtcaggggtcgaggtagagttagacatgatgcccaggccgagggcgggcgggggcgccttcggtccgtgttccccggcgcctaccccacggggagggagtttgggcgagccggtcaccaggggactcctgctcgctttaactagtgcctgggggttgtcagagctggacgacacctcgtcctcattggcgtagctcgtgctcacctcgtccgaggcgaactcacccacgtttggcgaactactgtccgacttggccccgccgtccagggacccaatgaggtccggctgatcccccaggagcaactcagcccccttcccccaggatggcgacgtgagcgccttttcgtggggcgtcggtgccccgcgcgtctcgcctgcggagcttcccccgacggctgcgcctgacgcttgctgctgccctgggctcaccccaggtgcgcccccgctgtccggagccgccgagtacttgtcaaagaaggtgccagggctcacgtgaccactgtccctttttctgcgaccccgtccccggccgccgcccccggagaccggcttgccgtcattccccgacgtggattccagggtgtagttgggggagaggctggtgccgtccccctgggctggagggttgggcggccccgaggctttggagccgctgctactggtcccggacgggcctccgggtcctggggccccaggagcagtccctcctgggaagtaatccgagcccgggttgccggccactgccgcgccgtcggtctcgttctggctcagtttcctcttgccctctggcgggttcttcttgttgaaggtcacgttgaggttgggggccccgaggctggcgatcatgttctggcaagcggtggagagcgcagccaggcagctctggccgaacaggttgtccttggagctgggcttgttgaaggagcccagcgagagcgcgcccaatttactggccgaggtgcgctggctgggctggaaatcaggctgcggcgggtaggcacccccgccaccgccgccaccagagctgccaccgccccctcccgcgctggggggcgagttcacgcctggaccgctgtgcggcgtggactgccggccggctgcaccaaacggaaagcccggctggcccccgagcgcagacgtagcaaagtccggcggcgggggccggcgctccgaagcagcgctggggagccccacgcccgccccgggcgactgcagctgacccaggcctcccagactgcccccgaactgcaggcccggtgaaggcagcgcgggcacgtggccctctccgggcatcctcatcggctcctgcagagggccccggaacagcacccccgagccaccaggcggaggagggggcgccaggctggggtcgtgcgggccacagtcagcgggcagacccgagccgcccatcctacggggcagcaggtctccgggcggcggatgcggacctgagaaccacgcgctctcttgcgccaagtgcggcgcctgctgctcgaaggtgcccagacgcccggcgcccgtgctgccgccttcgcgctcaaagttcggctgggccaagccgcccaccgggccgccatgcaccaggccgccctggcccacgtccccggggtggcctagctgagccaggttgggctggcgcagccgctgctgctgattccgcgacgccatctgcttaatcatgagggccgcgttttggcgctgctgctgctgctgctgttgctgttgctgttgctgctgctgctgctgctgttgctgctgctgctgctgctgctgctgctgttgcagggactggtggtccggggccggatgctgcaggggcggccccgaagggaagctgtcgggcacaggcggtgtgaactcgccgggtaggcctgggtaggcggaaggggagaggtgattatccagagcgccgttgtgcatgctgccgttccacgaagcgcagcggtccactcccgcgctgcccggaaagtcgaagcgcggcctcttggccacgttcatgtaggggggcgcgtcgaaatgctgcagccgctggttgggcgcctgctgcggaggaggatgctgcatgctgaaaacaggctcggaataagggtgcatgctccggttctccagccggtggatgggatactcgaattgcgcgtgctggctgggcagcatggggcctccgtcctgcaggccgccgctgggcgtgcccgcctcgccctgctggggccgagggagcgcaggcgggcacgaattttgtcggactagaagcccgggtggcggcggcggctgctgctgtggcggctgctgcgggggctgctgctgagggggtggcggggcctgctggggaggctgcattaacgggtgcctggagcccactgagggctccagacccacaggcatctttctggccccactgaacctctcaaagaacacaccatgctgctgctgctgctgctggggctgctgctgctgctggggctgctgctgcggtggctgggcgtgcattttggacaagcccaccatgcccgcagctctgggcatggccgaggcgcccgggaaagcgcccccaggaacctggcgacccgctgcataatgaggcagctgcccttcggagtcagagggcgaaaacatgtcaaaatgtcccgagggcgcctcgcccgggtaattgtattccagcgagtcgacggctccttggttcgtcaccctccgtggctccagactgtgggaatcggagccgctggaggacggcaggccgtggaaggaggcggctcggttagggctctggtccagcggcaggcatggggccggcacggcgtggctggaggcacctgaactgtggaagtccgggaggttccccggtcgctgcgggccgaagctctcaggcccctggctctccgccatgtgctcatagccctcggcgaagggcggctggctgcccaggcctccggctgcgccgccgtagccgagcaggcgacccccgtgcaggcacgaggccccggggtccgggccaccgaagttgcccccaaagtgggggtgatgctggtggggatgatgacttcccgggtggccgtggtgaggctgctggccgccaaagaagccgtgcacaggctgcgcttgcagcccccctgcgtgcaactccgagtggccgcgcgcgtggaagccgtagggctccatgttcatgcccaagatcgggggttcgcccagcgcgctcatagcaggatccacagggccagggggccccccagtgtggaaagccggggccttaaagtgggtgttcatgctcagtccggtctcgttaaagttcctctcgccctggccagcgttcctgctgttgacctggggctcgaattggtccagcccaaacataccttcaaagccgcggctggcgccgggcaccgacagagcggtccctccccccgccccccggagtccccgcgccccgcagcccgagcctccaccgagcacgatccgctcgcacaatccccgtaggctccgggcgagcggctgctgcttcttcagcgggtcggaggactggaggctccgctcggcatcgccggtgccggcccccgagccgaggacgcagagggggtccgccgcctgccgcttctgttctccgccgttgggtgtctgagttcgccggagtctccgcgcaccgttgcaggcgcgggagggcagcgagacgaggggttgggtcgctccaaggctccggttccctgcctccgcgctgaggtgcttcgcgagtccctctcggaccttgaccttgggccgctgggggaagcctgcagagggtttgacagaagcgcacagcgcaatgtcaaggctgctgcagaggggtcttgaactagggtcttccatttctctgaacttgatttttctcctctgggcctgcaagttctgcagcccttctgagagctgaaggcaaaacccttgccccgagagccttgtcttcttctcgatgaccgtccctgtgccctcattgtccccacttggagacttggtctcaattctcc

SEQ ID NO: 23588 - DNA, 7568 bp, Homo sapiens
  SIMILAR (4091)..(4711): 281254mologous to Homo sapiens dJ353E16.2 (meningioma (disrupted in balanced translocation) 1),accession number AL031591,Smith-Waterman Score=103.
ttttttttttttttcaccattaacgtcatatttattgttatttaactgctcaggaaaacatatacaggtatatacaatatgcaggaatacagaagactgcactttacatatttttttaaaaaagaaagaaaaaaataacactcaatttcatgagctattgtcacagtcttccaaccaagcatttcagaaatgaatttcttttaagagtcaaaaaagattacaggattgcctaacacacagcagagttaagttttcatattttacatgtgcaataacattttcgttttctttcccaaagagtttgctatgcagtactgattaccagtgttcggagtctagtgtgtagggtgtgtttttcatttacttttattctttccattaaaccaaatttaatgaaataacatccttttgcttaaggctatttttaaagctgtttcattctggggtcgtggggagcgagaaagtttttaaaacttcaggggtttctgaggttgccaggaccatgagctaattggcaaagtgttgatgactcaacgctgggaaagtcaaagacagaagttaagacactttgctccccggccttaagcaattaaggagaaatcattcctgtttcaaaagtaaaatgatgaggctctcaaacagctgtacactgcagaatcagaggggtcatggagtcttgcccagaatacggtcaactctcccacagcccatggtggggggaaattcccttccctttccattccttttgtagcagaacgcaggaactgcctcggctcacacctttctcgctgatcaattcatgccacctgctttgtctgccctctgaaggcggggtttgctcctcgtcaagactgcccaggcgagaaccgcagactcagaccccagccaaaaggaccggcagaaggaaagaggggagaagggaggggaaagagtgaggtttttctgaaagctcctctcccttcgctgaaaagttctttgaaataaacaacgtgggtgttgtatggtgagcccagagccttcaggtcacttgctttagaaagcccagatctgcaaactctgaggacctggagggggtgggggagctcaaagtggagcgttttagtaagacacgctcgttaacaaaaactgaaattaaatagataaccatcacggttatatatttgggtgaagtgatatcagttacttcctgtctaacccaccggggaatctatgtgccccccaccacaagccataaatggcttttgcaggcatcagcagcacccaaagttgcctgcccctgccaaccaccactcatctctgctcagagcagttattcctttgtgagatgcttgggacatggctctagttttgcaacagggtgagattccaaaaaaatgttggggagggggcagaggaattccagagttcaaaactaaaaggcgcaggaatcaaagtcatttcattctattctctttctctgtcctctagccctcaggagtctgcagatccctgcaaaggctcagagaaggctgagcaggctgagcaagagggtgcctcatccctcccaggggtggggttgcccaggctggactggggatggaatgggagaggtggaggagatacacgcagtcccctccttcttccctgggatgcccggccaggaacagctttcagaaaagggaaagggctgagaacagcctcctccaactccagcacccaaggcacgggcagcagccttgctccaaagactgcaggctgggagcacaccatcccccatgcagaccaaaggctgcttagcacagcgtgaaaatgcagggcctgggcatttgcgaggaggcccagaaaaggagagaaaacactgctgtcgaacattccaactccttcccacagagcagagctggacacgtcctcacgtccatcgcagagaggggcggcttccagcaggagaagagagaactcaagtggaagggaactgaaggctgagcactgtgtttgcaggaatgaaaatatattttcttagggaacagacaaaacaaaatcccaggcggaatacctaagaggggcattcattgtttggctcctgcctgactgatgacactggggtgtcaatatataacattgtgatgacaattggactttcacccggcaatattccagaactactattctccaggatttccattttaataagcagtgaacaaagcaaaaagaaaataaaaggggagggggtaagaaaaggaaaaagaataaaaaagaaagcaactcttgtcttattatgaaataacaatacttggacatacagcagcatgaaaacaaaacaaggaaagaggtcatctaaaaaatgtatgccaagattaccgaaacatggggagtatctagaggaaaaaggcttaagcaaaagtttgctaactgcagaagggttaacactggtaacatactgtggcagacaagtttcttttttaaaaaaacttttgaggttccccccctttaaattaaccctttccggtccatatgccactaagcaggtaccaacctagaggaaaaaaaaaaaactcatccactcagcaatagtggccctttcaaattaacagaggggtggggtaaggttgagggggaaggaaacagacagggggagaggaagggcctggtagaggaggggatctttcttgtcattcaagttagggcagccacgaatgtcccaaatctgttggagatgtcagaatgcagggaccgccaggtgggcacggaggctcgagccttggcgtcacccacgtcgtctgtgcagtggacagacaggcactgcaagtggctgccaggctgggatgctgaggccttgtttgcagggaggtcgtgggcttctttgctgttggggttctggggtttggccttctcccagggcgccaacgtcttgtcgtcgtccgcgctgtccaccagggccttgtcagcgggcatgtaccaggcagcgctgtgctctgccatcagcgagtccaggtcaatggtgctcatggcgctcttgaccgcctcggagcagcagctgcccagctcgctgtcgccattctgcgcccctgaggccccgacggcgcactcacccttcttgccacccttcagccccagaggctggtcctcggagatgctgaactgctgcctctgtagctggatctgcgcctgaaggatctccagggggtggatctcgtcgggtggcggggcgccgctgctgctcgtcggggtgcggacctgctccaggcccggagtgcccggatggcccgggcccccaccgccgccgtagctgtcaggggtcgaggtagagttagacatgatgcccaggccgagggcgggcgggggcgccttcggtccgtgttccccggcgcctaccccacggggagggagtttgggcgagccggtcaccaggggactcctgctcgctttaactagtgcctgggggttgtcagagctggacgacacctcgtcctcattggcgtagctcgtgctcacctcgtccgaggcgaactcacccacgtttggcgaactactgtccgacttggccccgccgtccagggacccaatgaggtccggctgatcccccaggagcaactcagcccccttcccccaggatggcgacgtgagcgccttttcgtggggcgtcggtgccccgcgcgtctcgcctgcggagcttcccccgacggctgcgcctgacgcttgctgctgccctgggctcaccccaggtgcgcccccgctgtccggagccgccgagtacttgtcaaagaaggtgccagggctcacgtgaccactgtccctttttctgcgaccccgtccccggccgccgcccccggagaccggcttgccgtcattccccgacgtggattccagggtgtagttgggggagaggctggtgccgtccccctgggctggagggttgggcggccccgaggctttggagccgctgctactggtcccggacggcctccgggtcctggggcccccaggagcagtccctcctgggaagtaatccgagcccgggttgccggccactgccgcgccgtcggtctcgttctggctcagtttcctcttgccctctggcgggttcttcttgttgaaggtcacgttgaggttgggggccccgaggctggcgatcatgttctggcaagcggtggagagcgcagccaggcagctctggccgaacaggttgtccttggagctgggcttgttgaaggagcccagcgagagcgcgcccaatttactggccgaggtgcgctggctgggctggaaatcaggctgcggcgggtaggcacccccgccaccgccgccaccagagctgccaccgccccctcccgcgctggggggcgagttcacgcctggaccgctgtgcggcgtggactgccggccggctgcaccaaacggaaagcccggctggcccccgagcgcagacgtagcaaagtccggcggcgggggccggcgctccgaagcagcgctggggagccccacgcccgccccgggcgactgcagctgacccaggcctcccagactgcccccgaactgcaggccggtgaaggcagcgcggcacgtggcctctccgggcatcctcatcggctcctgcagagggccccggaacagcacccccgagccaccaggcggaggagggggcgccaggctggggtcgtgcgggccacagtcagcgggcagacccgagccgcccatcctacggggcagcaggtctccgggcggcggatgcggacctgagaaccacgcgctctcttgcgccaagtgcggcgcctgctgctcgaaggtgcccagacgcccggcgcccgtgctgccgccttcgcgctcaaagttcggctgggccaagccgcccaccgggccgccatgcaccaggccgccctggcccacgtccccggggtggcctagctgagccaggttgggctggcgcagccgctgctgctgattccgcgacgccatctgcttaatcatgagggccgcgttttggcgctgctgctgctgctgctgttgctgttgctgttgctgctgctgctgctgctgttgctgctgctgctgctgctgctgctgctgttgcagggactggtggtccggggccggatgctgcaggggcggccccgaagggaagctgtcgggcacaggcggtgtgaactcgccgggtaggcctgggtaggcggaaggggagaggtgattatccagagcgccgttgtgcatgctgccgttccacgaagcgcagcggtccactcccgcgctgcccggaaagtcgaagcgcgcctcttggccacgttcatgtaggggggcgcgtcgaaatgctgcagccgctggttgggcgcctgctgcggaggaggatgctgcatgctgaaaacaggctcggaataagggtgcatgctccggttctccagccggtggatgggatactcgaattgcgcgtgctggctgggcagcatggggcctccgtcctgcaggccgccgctgggcgtgcccgcctcgccctgctggggccgagggagcgcaggcgggcaacgaattttgtcggactagaagcccgggtggcggcggcggctgctgctgtggcggctgctgcgggggctgctgctgagggggtggcggggcctgctggggaggctgcattaacgggtgcctggagcccactgagggctccagacccacaggcatctttctggccccactgaacctctcaaagaacacaccatgctgctgctgctgctggggctgctgctgctgctggggctgctgctgcggtggctgggcgtgcattttggacaagcccaccatgcccgcagctctgggcatggccgagggcgccccgggaaagccgccccccaggaacctggcgacccgctgcataatgaggcagctgcccttcggagtcagagggcgaaaacatgtcaaaatgtcccgagggcgcctcgcccggtaattgtattccagcgagtcgacggctccttggttcgtcaccctccgtggctccagactgtgggaatcggagccgctggaggacggcaggccgtggaaggaggcggctcggttagggctctggtccagcggcaggcatggggccggcacgcggtggctggaggcacctgaactgtggaagtccgggaggttccccggtcgctgcgggccgaagctctcaggcccctggctctccgccatgtgctcatagccctcggcgaagggcggctggctgcccaggcctccggctgcgccgccgtagccgagcaggcgacccccgtgcaggcacgaggccccggggtccgggccaccgaagttgcccccaaagtgggggtgatgctggtggggatgatgacttcccgggtggccgtggtgaggctgctggccgccaaagaagccgtgcacaggctgcgcttgcagcccccctgcgtgcaactccgagtggccgcgcgcgtggaagccgtagggctccatgttcatgcccaagatcgggggttgccccagcgcgctcatagcaggatccacagggccagggggccccccagtgtggaaagccggggccttaaagtgggtgttcatgctcagtccggtctcgttaaagttcctctcgccctggccagcgttcctgctgttgacctggggctcgaattggtccagcccaaacatacttggcggggggcagagggggatcaatagggcatgacagccggctctccgcggcgcgcctccggccagctactcgttccagcccaggattgggcgctccgggacgctcagcaccgcgggggctcagcgcgcacctccaccccgcctgatgtgagggacggggggcggggtattagctcctctcctgaagctccgattctgcccggggagggcctctcacatcttgcgaggccgcggggcctctaggagccgtgttggggggcccatgccccgggcggttgtcacagccgcgggtgggtctgccggggaggggacgaagccgcggatgaacggagacaaaaagttaagtggggggaatggggagggaagggggttgggagagcagagcgatcaccttctcaagtccgattgggtctgctggggagccctcaggacgccgcccgcagcctcccggagtccgtggcagagctgctaagggcaggggagggagacccttcaaagccgcggctggcgccgggcaccgacagagcggtccctccccccgccccccggagtccccgcgccccgcagcccgagcctccaccgagcacgatccgctcgcacaatccccgtaggctccgggcgagcggctgctgcttcttcagcgggtcggaggactggagcgtccgctcggcatcgccggtgccggcccccgagccgaggacgcagaggggctgcgaggcggcaggcgccgggggctggagccgagggtcggggaaaggcgcggctcctctgctcggcagcgggtgcgctgcgttcggcgcgcagcttccgggccacgtccgccgcctgccgcttctgttctccgccgttgggtgtctgagttcgccggagtctccgcgcaccgttgcaggcgcgggagggcagcgagacgaggggttgggtcgctccaaggctccggttccctgcctccgcgc

SEQ ID NO: 23589 - DNA, 370 bp, Homo sapiens
  SIMILAR (363)..(31): 801254mologous to Homo sapiens Spinocerebellar ataxia type 2 (SCA2) disease associated protein,accession number W60213,Smith- Waterman Score=426.
tcaaacattgatgagagtaaaacaccaccgatgttccacaggcgccttctccactgcggcctcgaacagcaatgcggatcggccaccacccgcgcgccggagaggtctgcccaggccgggcctcccgccgccggaggtcgccgcgaccaccgaggagggagccgtggccgaggacgaggagaccgaggacgaggacggcgaaggcgcggcggcgggcgacgctagaaggccgctgccgccgggcttgcggacattggcagccgcgggcggcggctgctgctgctgctgctgctgctgctgttgctgctgctgctgctgctgctgctgctgctgctgctgctggggcttcagcgacatggtgagggaattc

SEQ ID NO: 23590 - DNA, 1440 bp, Homo sapiens
  SIMILAR (790)..(566): 981254mologous to Homo sapiens hypothetical protein,accession number AL137275,Smith-Waterman Score=418.
tcagagagccttgggccagagttccaggggctctgggagtggctgccaggtgagttgaacagtccgattttcagtggggtcccacacagatgagatgcggcttaataggaatcccaggctgcaggcattccttggcctagtggccagatttccggcacgtgtagcaagctcctgatttaaaattgatgagatgttccttgggccggtcagtctgaggacctgaggttgtaggtggatctttctcatggagcaaagaacaggaggacaggggattgatctcccaagggaggtcccccgatccgagtcacggcaccaaatttcatgcacatctgtgtgaagagaccaccaaacaggctttgtgtgagcaacatggctgtttatttcacctgggtgcaggtgggctgagtttgatcttagaaggtcaaattctctgtccaatagttcctcttctgttaacttagagaaattatcctctccaaaaggattccaccctgacatatcaggtggattgctgatgttcttctgatttgtgaaatttgcaatggcctctttatcagcaactgacctgctgcatataagcatcttgaagtaagtggtggtggtggtggtggtggtgctgctgctgctgctgctgctgctgctgttgctgttgctgctgctgctgttgctgttgctgctgctgctgctgctgctgctggtgaggatgacgatgctgtaaatggagttgctgtaatctccaatctccctgctgtagttgctggagtactctatgctgctgtggcggctgcctacattcaaatgcaactgttcaatcctacagcttgcaacatgcgcctgaaaaagctgctgatactcaacggccagcccatgaaagccgccgggagagacactgtactcttttggtctatggttaccgaattcaccaggagcaaggactttaacaggtgttgctgaactttgaatggtcagcacactgggagtggcagtagtagcagagttggcctttggtctttgtcttggtgcaattgaggtttctgttggtccaatggtatctgttattctggcttttatttggcttttcctagcagctgcttcactagcagtcatcggttcaggaagagctgaaggaatagaagaattacgcagtgtcgtggcagcaggcacagtcttgaaatccaaaagcacaccggcgagcttgtggacctgtacatgcggaagaaagtctctgctagtaaccgcgtcaccggtgccaagaaccatgcatccatccagataaacgtggtggaggctgacaaggtcacaggcaggtttaatggctagtttaaaacgtatgctgtcagtttctccaataagaagcttgacggtgatcatgatggtgatggtcatgtcatgcatgctatccatatgcattatctgatgctgacatttgtctgacagcat

SEQ ID NO: 23591 - DNA, 1379 bp, Homo sapiens
  SIMILAR (1379)..(231): 961254mologous to Homo sapiens josephin MJD1,accession number U64822,Smith-Waterman Score=1855.
tattttaaatgtctttaattgctgaatgcctctttggctaatatttggaagatcattatttagtcctacaaccgacgcattgttccactttcccatcattttgtttgcaaaccgctaaaagtcttatttcctcatctctttgacacattaccaaagtggaccctatgctgtaatcacacaggataatgttggaaagtatgaatatctaaattattttttaaaggtattatttttttccttctggtttcaaaatcatttctgacagtttctaaagacatggtcacagctgcctgaagcatgtcttcttcactcatagcatcacctagatcactcccaagtgctcctgaactggtggctggcctttcacatggatgtgaactctgtcctgataggtccccctgctgctgctgctgctgctgctgctgctgctgctgctgctgctgctgctgctgctgctgctgctgctgctgctgctgctgctgctgctgctgttgctgcttttgctgctgtttttcaaagtaggcttctcgtctcttccgaagctcttctgaagtaagatttgtacctgatgtctgtgtcatatcttgagatatgtttctggaactaccttgcatacttagctgaatagtcctgcggagatctgcttcctcatcttccatgtcaatttcttggcgacttagtgccagagccctctgcaaatcctcctcatcttcgtctaacattcctgagccatcatttgcttctaacattcgttccaggtctgttttatggactctttgctcttttagttgtgctaattcttctccaataagttttggtcgatgcatctgttggaccctaatcatctgcaggagttggtcagcttcgcaatctggcagatcacccttaacaacaaatatagaataaccttcctgttgtaattgagccaagaaaagtgcaagatatgtatctgatattaattctggacccgtcaagagagaattcaagttaaaccactgttttcctaattttctaactgtaaaccagtgttccttataattgcatataaatgatctttcatttataggatcgatcctgagcctctgatactctggactgttgaacaggattagttctaaaccccaaactttcaaggcattgcttataacctgaatagagaaaaaaccactgtcatccatatttccagaaggctgctgtaaaaacgtgcgataatcttcactagtaactcctccttctgccattctcatcctctcctcctcatccagctgatgtgcaattgaggataattccacagggctaaaatattctccttgcaataagttattcaggcaatgttgagcacaaagtgagccttcttgtttctcgtggaagatggactc

SEQ ID NO: 23592 - DNA, 5568 bp, Homo sapiens
  SIMILAR (2298)..(2825): 281254mologous to Homo sapiens MN1,accession number X82209,Smith-Waterman Score=74.
tcaagttagggcagccacgaatgtcccaaatctgttggagatgtcagaatgcagggaccgccaggtgggcacggaggctcgagccttggcgtcacccacgtcgtctgtgcagtggacagacaggcactgcaagtggctgccaggctgggatgctgaggccttgtttgcagggaggtcgtgggcttgcaggctgctaggaggattaagtgagatgacagctggaaagccttcagcataaggtgagccctggctgtcagccccatggcgatgtttctctaacacccctactctgagatgtgcatacttctctccctgctggcagatggcacccctggctccggctaccatgatggtaatgataccgctagctgcaggcttgctggcttcagggatgtgctcacacatcttgctctggcagaggggtgttccctgcaaggcctctgaggacccccgtgtgggctgcatggcctgcccagcaaacagcagctcagcttcaactctgaaaggacagatcatcagggtttggtacttagcaattgctccatggatgctgctgtcactatcaccattgccatcatcatcatcatcatcatcatcatcatcataatcaagcagtgtggctggcagctggtgacggccatgaggaggcaagacacagagttggtttttatctccagcatctgttggtaggaaatacagctcctcatctccgtgcccataagtggttctaagcacgggctcagaaaggccttctttgctgttggggttctggggtttggccttctcccagggcgccaacgtcttgtcgtcgtccgcgctgtccaccagggccttgtcagcgggcatgtaccaggcagcgctgtgctctgccatcagcgagtccaggtcaatggtgctcatggcgctcttgaccgcctcggagcagcagctgcccagctcgctgtcgccattctgcgcccctgaggccccgacggcgcactcacccttcttgccacccttcagccccagaggctggtcctcggagatgctgaactgctgcctctgtagctggatctgcgcctgaaggatctccagggggtggatctcgtcgggtggcggggcgccgctgctgctcgtcggggtgcggacctgctccaggcccggagtgcccggatggcccgggcccccaccgccgccgtagctgtcaggggtcgaggtagagttagacatgatgcccaggccgagggcgggcgggggcgccttcggtccgtgttccccggcgcctaccccacggggagggagtttgggcgagccggtcaccaggggactcctgctcgctttaactagtgcctgggggttgtcagagctggacgacacctcgtcctcattggcgtagctcgtgctcacctcgtccgaggcgaactcacccacgtttggcgaactactgtccgacttggccccgccgtccagggacccaatgaggtccggctgatcccccaggagcaactcagcccccttcccccaggatggcgacgtgagcgccttttcgtggggcgtcggtgccccgcgcgtctcgcctgcggagcttcccccgacggctgcgcctgacgcttgctgctgccctgggctcaccccaggtgcgcccccgctgtccggagccgccgagtacttgtcaaagaaggtgccagggctcacgtgaccactgtccctttttctgcgaccccgtccccggccgccgcccccggagaccggcttgccgtcattccccgacgtggattccagggtgtagttgggggagaggctggtgccgtccccctgggctggagggttgggcggccccgaggctttggagccgctgctactggtcccggacgggcctccgggtcctggggccccaggagcagtccctcctgggaagtaatccgagcccgggttgccggccactgccgcgccgtcggtctcgttctggctcagtttcctcttgccctctggcgggttcttcttgttgaaggtcacgttgaggttgggggccccgaggctggcgatcatgttctggcaagcggtggagagcgcagccaggcagctctggccgaacaggttgtccttggagctgggcttgttgaaggagcccagcgagagcgcgcccaatttactggccgaggtgcgctggctgggctggaaatcaggctgcggcgggtaggcacccccgccaccgccgccaccagagctgccaccgccccctcccgcgctggggggcgagttcacgcctggaccgctgtgcggcgtggactgccggccggctgcaccaaacggaaagcccggctggcccccgagcgcagacgtagcaaagtccggcggcgggggccggcgctccgaagcagcgctggggagccccacgcccgccccgggcgactgcagctgacccaggcctcccagactgcccccgaactgcaggcccggtgaaggcagcgcgggcacgtggccctctccgggcatcctcatcggctcctgcagagggccccggaacagcacccccgagccaccaggcggaggagggggcgccaggctggggtcgtgcgggccacagtcagcgggcagacccgagccgcccatcctacggggcagcaggtctccgggcggcggatgcggacctgagaaccacgcgctctcttgcgccaagtgcggcgcctgctgctcgaaggtgcccagacgcccggcgcccgtgctgccgccttcgcgctcaaagttcggctgggccaagccgcccaccgggccgccatgcaccaggccgccctggcccacgtccccggggtggcctagctgagccaggttgggctggcgcagccgctgctgctgattccgcgacgccatctgcttaatcatgagggccgcgttttggcgctgctgctgctgctgctgttgctgttgctgttgctgctgctgctgctgctgttgctgctgctgctgctgctgctgctgctgttgcagggactggtggtccggggccggatgctgcaggggcggccccgaagggaagctgtcgggcacaggcggtgtgaactcgccgggtaggcctgggtaggcggaaggggagaggtgattatccagagcgccgttgtgcatgctgccgttccacgaagcgcagcggtccactcccgcgctgcccggaaagtcgaagcgcggcctcttggccacgttcatgtaggggggcgcgtcgaaatgctgcagccgctggttgggcgcctgctgcggaggaggatgctgcatgctgaaaacaggctcggaataagggtgcatgctccggttctccagccggtggatgggatactcgaattgcgcgtgctggctgggcagcatggggcctccgtcctgcaggccgccgctgggcgtgcccgcctcgccctgctggggccgagggagcgcaggcgggcacgaattttgtcggactagaagcccgggtggcggcggcggctgctgctgtggcggctgctgcgggggctgctgctgagggggtggcggggcctgctggggaggctgcattaacgggtgcctggagcccactgagggctccagacccacaggcatctttctggccccactgaacctctcaaagaacacaccatgctgctgctgctgctgctggggctgctgctgctgctggggctgctgctgcggtggctgggcgtgcattttggacaagcccaccatgcccgcagctctgggcatggccgaggcgcccgggaaagcgcccccaggaacctggcgacccgctgcataatgaggcagctgcccttcggagtcagagggcgaaaacatgtcaaaatgtcccgagggcgcctcgcccgggtaattgtattccagcgagtcgacggctccttggttcgtcaccctccgtggctccagactgtgggaatcggagccgctggaggacggcaggccgtggaaggaggcggctcggttagggctctggtccagcggcaggcatggggccggcacggcgtggctggaggcacctgaactgtggaagtccgggaggttccccggtcgctgcgggccgaagctctcaggcccctggctctccgccatgtgctcatagccctcggcgaagggcggctggctgcccaggcctccggctgcgccgccgtagccgagcaggcgacccccgtgcaggcacgaggccccggggtccgggccaccgaagttgcccccaaagtgggggtgatgctggtggggatgatgacttcccgggtggccgtggtgaggctgctggccgccaaagaagccgtgcacaggctgcgcttgcagcccccctgcgtgcaactccgagtggccgcgcgcgtggaagccgtagggctccatgttcatgcccaagatcgggggttcgcccagcgcgctcatagcaggatccacagggccagggggccccccagtgtggaaagccggggccttaaagtgggtgttcatgctcagtccggtctcgttaaagttcctctcgccctggccagcgttcctgctgttgacctggggctcgaattggtccagcccaaacataccttcaaagccgcggctggcgccgggcaccgacagagcggtccctccccccgccccccggagtccccgcgccccgcagcccgagcctccaccgagcacgatccgctcgcacaatccccgtaggctccgggcgagcggctgctgcttcttcagcgggtcggaggactggaggctccgctcggcatcgccggtgccggcccccgagccgaggacgcagaggggcttgaccttgggccgctgggggaagcctgcagagggtttgacagaagcgcacagcgcaatgtcaaggctgctgcagaggggtcttgaactagggtcttccatttctctgaacttgatttttctcctctgggcctgcaagttctgcagcccttctgagagctgaaggcaaaacccttgccccgagagccttgtcttcttctcgatgaccgtccctgtgccctcattgtccccacttggagacttggtctcaattctccccccccatccccaaggatactggatgccctgcggcataactgtttctagttctttctgagtctcgtcttccattctcctaatgtcttccatcgtgagatcgatccacttgtcaatccaacaaaaaagctggcgatggaagtttgtaaatatccgtttttcttgcttttgaatgaagttttctactttgctttgcagtccccaccacttgaatttgatggtcaccagcttataggcacacatctggggacagtcagggctgtttgccagctccttcttccagttgggtcccaaagggcctctcttggtcttgactgactggaataatgctgggtcttcatcagctttgtagtctgctggttcaacttgacttctatctgcaatatctatatggacaatttcaacagttttccatgtgtttggatctaaaccatgtacattttctaatgttcccaagtctggtttgtgccatgtttcgattttaatgaagaaatcatctttcatatattcattctgttccttggtgcccacgtctgagggagcttttcccagtataggcat

SEQ ID NO: 23593 - DNA, 963 bp, Homo sapiens
  SIMILAR (963)..(313): 991254mologous to Homo sapiens ataxin-1,accession number X79204,Smith-Waterman Score=1124.
agggtttttctaaacattttacacacattaactcatttattcccctcaataacttcatggggtaggtaccgatatcgtgctcatttcctagatatgctaagtggtactgggaagggtaactaacctgccaagggtagagagtaagtcgtggagccacgaagccaacccaaagggtctgacccagggtcagcacttttaacagcacgtcactggagagcctctgagatgcttctaaaaggacgaatccatctgcttctgtctctggtactgagggctttttagattccggaggctttctgaagaagtgaaacattgctgctgctgctgctgctgctgctgctgctgctgctgctgctgctgctgctgctgctgctgctcagccttgtgtcccggcgtctggctcagactgcccatgttggccagcagagtggaataggcctccagctgggagcgctgggatggagtggtggcccctgcggccgaggccactgcactggtgacggggttggcggttggggggatcagctgtgatgggatgaagctggcataggttccactgtattgggaggacccaatgaactggaaggtgtgcggcaggtgagcgtactgcacgggggacaccggggtccctggctgcggggtggcgtacgcggcaggcagcgtggtggccacggggacagacctgggagcgctgggcggggagtagtccagccctgtggacaatgctttgtgtaaacctattccctgttgtaaaccaagctccaccgaggtccctgccggcccatgcctcccgcccccgtggccccggccaccagggttgcccgggagccatgctgtgccctccacccggtggttgtcgctgggcagggtaggggccttctcctcggaggaccggctggtggcggggatctcgcgcttcttgggaggcaggcattcgttgctccgctcttggttggatttcat

SEQ ID NO: 23594 - DNA, 870 bp, Homo sapiens
  SIMILAR (266)..(415): 361254mologous to Homo sapiens Huntington Disease (HD) gene exon 1,accession number Z68756,Smith-Waterman Score=85.
atggaactagaggagtgggacatagaatttatgttaaaagttcaattggttaatgtcatccaggacagtggcagacctgaagagaaggctgatttgggcctgcaaggtgggcctgccttaaatcacactggaatggcattgacctaccttctccctggagttcctaaagtggggcagcgagccagagaagataaatctctactgcagtcacagccttcttctcctccaactgggataacaactctcagacactctggcaactacagaaacagagagagctctgaatcaatcaagagtttatttgcaaaggttctctccgcctccccctcaactaccaccacctccagtcagtctcgcctccggctatccgctgctccaccctctggcccggtatcctgcctgtccgctgccaccaaggagagcccggacggagcagcgaggaggggagcagccgggagttggggcttcccccctgcccatccctggccgctggcccgggaccgaagccacttgagcgagcagagagtcgtcaccttgtcttctttgccttcaggggtaggagacgcgtggttacttttcgcggggaactggggcaggaatccatggtggcatgaacttggtcgtgccctcggcataaaactgatgtatgtgttttttaagagcatattttccctgcacatgcttctcattatccgagaggcctggactcaatcagtaaaggagcagagaaaccacataattgaaaggagaatgacggtggtgcatacttggaatatttgtgggaaggggattgctgacatcagaaaatgtagtggcctgagtgttaacagcattgaagagaaatcagctttctgtgtttctgtgtattga

SEQ ID NO: 23595 - DNA, 697 bp, Homo sapiens
  SIMILAR (11)..(49): 611254mologous to Homo sapiens small proline-rich protein,accession number M21539,Smith-Waterman Score=52.
tttcgtgccacccgttcgtccccctcccctacctcccatcctttgcccaggagctgccttggcagtcacgccccttccttccgaggagctttctggctgcctaaactggtagaccccctgaattactcctccatctccgctctctttcgcctcctcttctcttagttctccccgcctccccctcaactaccaccacctccagtcagtctcgcctccggctatccgctgctccaccctctggcccggtatcctgcctgtccgctgccaccaaggagagcccggacggagcagcgaggaggggagcagccgggggttggggcttcccccctgcccatccctggccgctggcccgggaccgaagccacttgagcgagcagagagtcgtcaccttgtcttctttgccttcagggagctgctaagaaggacaaataagatagcagagcgaaagagcttttgtctccttagaaggaaggctgagaaactaaagagtgaccagtggttggactcttggcggcgcttaccctgaacctgagtgttaggggagagggaatctgccgttgcggtttctggagctgctcataagcaagaattccctatcctgatcaaggctttaagcctaaaagaaagcagaaataggtcaagggcagcccaggtgcccaatttctctctctcttcacaaggcaccaccagcaataga

SEQ ID NO: 23596 - DNA, 1488 bp, Homo sapiens
  SIMILAR (409)..(705): 771254mologous to Cloning vector pUC1918 beta-galactosidase alpha peptide,accession number U03991,Smith-Waterman Score=398.
atgacgtactcaaaactgtccttgacgacagcaaggcagactggtccgcgaagggtgagggccggagactggaagttagatggcagatggggtccaaagccctcacccctcaccgggggcttgggtgccttggcgaaggatgaagtggttaacccactaaaatatgacgtctgtctggcccccagtgggcacctttgtcaggcctgtgctgggcactgtgacactgatgagaaagacaaggtgcctgcccgctgtaggagctcactgcctgctggccaagacagctggacacaagcagtgtctgagctacaggtcatgcctaagaggcctaaggacattgggaacacagtgagagaggtgagccgctgggcggggcccatcatcgatgtcctcctggactacgtgggcaacgtgcagctctgctcgcggctgaaggaacacatcgacagctttgaggactgggccgtcatcaaggagaaggcagagtcgacctgcaggcatgcaagcttggcactggccgtcgttttacaacgtcgtgactgggaaaaccctggcgttacccaacttaatcgccttgcagcacatccccctttcgccagctggcgtaatagcgaagaggcccgcaccgatcgcccttcccaacagttgcgcacgctgaatggcgaatggcgcctgatgcggtattttctccttacgcatctgtgcgaaacgctggtgaaagtaaaagatgctgaagatcagttgggtgcacgaatgggttacatcgaactggatttccacacggaaacgctggtgaaagtaaaagatgctgaagatcagttgggtgcacgagtggggtacatccgactggatctcaacagggccagcgccaccccaatgactcccggccctcgggctgacgtggggcttctcacgaactcacacagacaagccacccgattcaccccaccgcgacggtaccggggattggtcctgcaaccccgatcctgctcccgtaacgtgaccctggaccggcccccagaatccatcgagaggcctgcaactccgaacgtgcacatgctgagggcaggagccctgtgtcctttatctccaactccctgtgcctaccggggggctggcacaaagcaggtggtgctcggtgttgaaggaacagagtcgacctgcaggcatgcaagcttggcactggccgtcgttttactacgtcgtgactgggaaaacctggcgttacccaacttaatcgccttgcagcacatccccctttcgccagctggcgtaatagcgaagaggcccgcaccgatcgcccttcccaacagttgcgcacctgattggcgaatggcgcctgatgcgaaacgctgggtgaaagtaaaagatgctgaagatcagttgggtgcacgagtgggttacatcgaactggatctcaacagcgacaagctggtgaaccgtctccgggaacttcgatgtgtccagaaggttttcaacggtcattaa

SEQ ID NO: 23597 - DNA, 4116 bp, Homo sapiens; identical to SEQ ID NO: 22133
  SIMILAR (985)..(1113): 771254mologous to Escherichia coli phosphate regulon sensor protein phoR,accession number U73857,Smith-Waterman Score=177.

SEQ ID NO: 23598 - DNA, 2406 bp, Homo sapiens
  SIMILAR (1745)..(1996): 691254mologous to Homo sapiens Amino acid sequence of a human secreted peptide,accession number Y12919,Smith-Waterman Score=263.
atgggtaagtacatgcaaattgctgagtctctgttcattgcatccaaaacgaaagtcaccagcgtgctgtataactcaagaaaatacgagagagagggaaaagcaacatcacagtttgactacaagcggtttccagtagaaagggatggggcaggcaacgcccatttaccagccctctcctgggatctgggcactcgcacggccatcctgcgagggaggctttatcatcctgatgttacggatgaggagctgagaccctcatgggacttgcccgaactcggtgatgcttgcggtggtgaggtgatggcagccatggacacaggccagagagctgacccaagcaatcctggtgacaaggaaggggaccttcaagggctgtggcaggaactctaccagctccaggctaagcagaagaagctcaagagagaagtcgagaagcacaagctttttgaagactatctgattaaggtccttgagaaaatccccgagggctgcacgggatgggaggagccggaggaggtgctggtggaggccacggtgaagcactacgggaagctcttcacagccagccaggacacgcagaagcgcctcgaggccttctgccagatgatccaggctgtccaccggagcctggagtctctggaggaggaccacagggctctcatgttgagcctcaagatccggctgtgtcagctgcagaagaagtgctaccgcaagcaggagcagtggtggcagctgaagcacagcatcacttaccagaaggacattgactttgacacacacaccagcagcagctataatgatcagctgctcggctacatgcaaatgaccatcaccaacatggcccggcagtgctgcccctctgcccacggcgtgcccaagagcatggatctcttctccaagctcgatctgattaagcaagggatcagcaccaaaggaggacagacatggtggggaaattcaaagggattcatgaccatctgggcaatccgggaaggcctcatggacaatgacccaggatttgaaagacaggtggtatctgacaagtgggcattccagaaggagcaaagaaggaatatccttggaaaatacagcatcttctttactttcctgtttctacatcactgggctaagcttgaggaagggcgccccgtggaagacacaaagacacttgggaaggcccccagtgggcacctttgtcaggcctgtgctgggcactgtgacactgatgagaaagacaaggtgcctgcccgctgtaggagctcactgcctgctggccaagacagctggacacaagcagtgtctgagctacaggtcatgcctaagaggcctaaggacattgggaacacatggagcagcagagaagggacatgtagcaggctgaacaatggccccaatgatgtccacgtcctaatccccacaacctgtgactatgttaccgtggcgagagggacttggcaggtggtgcatgaagatgccctcctgccctgtgctccccgagctcagatctctgacaccttctctggcatctccatgtaccagtgccacacactgcggcctcttctgagtgaaacatctttcaacctaatatcagaaaaatgtgacattctatccattcttcagtggaccatcctgaaaacaggatttaccggaggaaaatcgaggaactcagcaaaaggttcaccgccatccgcaagaccaaaggggatgggaactgcttctacagggccttgggctattccatacctggagtccctgctggggaagagcagggagatcttcaagttcaaagaacgcgtactgcagaccccaaatgaccttctggctgctggctttgaggagcacaagttcagaaacttcttcaatgctctgagggccgggcgggcgcagttttacagtgtggtggaactggtagagaaggatggctcagtgtccagcctgctgaaggtgttcaacgacccagagtgcctcggaccacatcgtgcagttcctgcgccctgcttcacgtcggccttcatcaggaaccgagcagacttcttccggcacttcattgatgaggagatggacatcaaagacttctgcactcacgaagtagagcccatggccacggagtgtgaccacatccagatgacggcgttgttgcaggccctgagcattgccctgcaagtggagtacgtggacgagatggataccggccctgactcaacacgtgttccttgaggccgccaccccttccgtttacatgctctataaaacatcccaatacaacatcctttatgcagccgataaacattgattaattttaggccatgcagtggaacctgtcacctaatgggactgcattgtgaatggaccattccggctcttcaattaaataaacaatttagactgtagcaagattgtatt

SEQ ID NO: 23599 - DNA, 2033 bp, Homo sapiens
  SIMILAR (1691)..(1828): 601254mologous to Homo sapiens uKATP-1,accession number D50312,Smith-Waterman Score=118.
  misc_feature (1)...(2033): n = a,t,c or g
agagggtgcggcgacggctgatgaatcgggtgtggcggtcgtccgtaggtgcgagggttcgagggtcggtgatcgtgtgcgtagtggagacggtgggcgacgcatggtcaggagctgagcgacgggtggataggtgtagggagagtcggcgagtgatagttggtgtggagacacaggaggtgtccgtgggaacgtgcggatgtggccgtgctgcgatgacgattctacgagaggtgtgggtgtcggccatacaaataaaattgggtgtgttgtgcatggcgaagcgtgtgtataagacggtgagacgcctatgcgatgagacagtgcatgggagccaggtggacacgcagcccccaatttgtccctccggcctgggcggcccctggtcccgcgcgccagcatgggagagcgagggacctgcccgcggcccgccggcgtgtgcaaggaggtccagccgccgcgcccgctacccggagtctgaggacgggtgtccagggacggagaggcaggtgagagggaggtggctaagctggctatggtgacaggacgatgttggccagaaagagtatcatcccggaggagtatgtgctggcgcgcatcgccgcagagaacctgcgcaagccgcgcatccgagaccgcctccccaaagcccgcttcatcgccaagagcggggcctgcaacctggcgcataagaacatccgtgagcaaggacgctttctacaggacatcttcaccaccttggtggacctgaaatggcgccacacgctggtcatctttaccatgtccttcctctgcagctggctgctcttcgctatcatgtggtggctggtggcctttgcccatggggacatctatgcttacatggagaaaagtggaatggagaaaagtggtttggagtccactgtgtgtgtgactaatgtcaggtctttcacttctgcttttctcttctccattgaagttcaagttaccattgggtttggagggaggatgatgacagaggaatgccctttggccatcacggttttgattctccagaatattgtgggtttgatcatcaatgcagtcatgttaggctgcattttcatgaaaacagctcaggctcacagaagggcagaaactttgattttcagccgccatgctgtgattgccgtccgaaatggcaagctgtgcttcatgttccgagtgggtgacctgaggaaaagcatgatcattagtgcctctgtgcgcatccaggtggtcaagaaaacaactacacctgaaggggaggtggttcctattcaccaactggacattcctgttgataacccaatcgagagcaataacatttttctggtggcccctttgatcatctgccacgtgattgacaagcgcagtcccctgtatgacatctcagcaactgacctggccaaccaagacttggaggtcatagttattctggaaggagtggttgaaactactggcatcaccacacaagcacgaacctcctacattgctgaggagatccaatggggccaccgctttgtgtccattgtgactgaggaagaaggagtgtattctgtggattactccaaatttggcaacactgttaaagtagctgctccacggtgcagtgcccgagagctggatgagaaacccttnccatccttattcagaccctcccaaaagagtgaactgtctcatcaaaattcttctgaggaagcgcaactccccatagaagaaacaatttccataggaggaacaatttctatccgaaggaacaatttcttccctcatggtaccaaaggtgcaatttatgactccagaaggaaatcaaaacacatcggaatcatgacagcaagataaccccaagacagtcttttatcaagttttgacggtttatgctgggcactgccagactgaaccagagctggaacacaataatgtgtccttctacattttattacactaaatgatattcatattcaagcaacagcactttctgtagtaataaaaagtaacacaccaagtggaggattcatggcttatgcttgttt

SEQ ID NO: 23600 - DNA, 1629 bp, Homo sapiens
  SIMILAR (844)..(1446): 951254mologous to Shigella dysenteriae RepE,accession number AF239690,Smith-Waterman Score=994.
  misc_feature (1)...(1629): n = a,t,c or g
atggtggattcgttaattgcgcgcgtaggagtaatggctcgcggtaatgccattactttgcctgtatgtggtcgggatgtgaagtttactcttgaagtgctccggggtgatagtgttgagaagacctctcgggtatggtcaggtaatgaacgtgaccaggagctgcttactgaggacgcactggatgatctcatcccttcttttctactgactggtcaacagacaccggcgttcggtcgaagagtatctggtgtcatagaaattgccgatgggagtcgccgtcgtaaagctgctgcacttaccgaaagtgattatcgtgttctggttggcgagctggatgatgagcaaatggctgcattatccagattgggtaacgattatcgccccacaagtgcttatgaacctgggctatcgcccacaagtgcttatgaatgtgggcagcgttatgcaaagagatcgcggaatgaatttgatggaaatatttctgcgctggctgatgcggaaaatatttcacgtaagattattacccgctgtatcaacaccgccaaattgcctaaatcagttgttgctcttttttctcaccctggtgaactatctgcccggtcaggcgataaaaaagactcccttccccgcgaaactcttcaatgcctgccgtatatccttactggcttccgcagaggtcaatccgaatatttcagcatatttagcaacatggatctcgcagataccgtcatgtttctactaataatcagaccgacgatacgagtgggaccgtggtcccagtctgattatcagaccgacgggtaccgagctcgaattcttaatcatggtcatagctgtttgatcagaaaatctgatggcaccctacaggaacatgacggtatctgcgagatccatgttgctaaatatgctgaaatattcggattgacctctgcggaagccagtaaggatatacggcaggcattgaagagtttcgcggggaaggaagtggttttttatcgccctgaagaggatgccggcgatgaaaaaggctatgaatcttttccttggtttatcaaacgtgcgcacagtccatccagagggctttacagtgtacatatcaacccatatctcattcccttctttatcgggttacagaaccggtttacgcagtttcggcttagtgaaacaaaagaaatcaccaatccgtatgccatgcgtttatacgaatccctgtgtcagtatcgtaagccggatggctcangcatcgtctctctgaaaatcgactggatcatagagcgttaccagctgcctcaaagttaccagcgtatgcctgacttccgccgccgcttcctgcaggtctgtgttaatgagatcaacagcagaactcccatgcgcctctcatacattgagaaaaagaaagccggcagacactcatatcggattttcctttcgcgatatactttcatgacgacggataatctgagggttatctgtcacagattgaagcattctgccgacatggaagccatcacaaacggcatgatgaacctgaatcgccagcggcatcagcaccttgtcgccttgcgtataatatttgcccatggtgaaaacgggggcgaagaagttgtccatattggccacgtttaa

SEQ ID NO: 23601 - DNA, 1767 bp, Homo sapiens
  SIMILAR (1515)..(1279): 981254mologous to unidentified cloning vector 29kD protein essential for the replication of mini F plasmid,accession number AB015619,Smith-Waterman Score=395.
  misc_feature (1)...(1767): n = a,t,c or g
ttagtctgggaccacggtcccactcgtatcgtcggtctgattattagtctgggaccacggtcccactcgtatcgtcggtctgataatcagactgggaccacggtcccactcgtatcgtcggtctgaccgggcagatagttcaccggggtgagaaaaaagagcaacaactgatttaggcaatttggcggtgttgatacagcgggtaataatcttacgtgaaatattttccgcatcagccagcgcagaaatatttccagcaaattcattctgcaatcggcttgcataacgctgaccacgttcataagcacttgttgggcgataatcgttacccaatctggataatgcagccatctgctcatcatccagctcgccaaccagaacacgataatcactttcggtaagtgcagcagctttacgacggcgactcccatcggcaatttctatgacaccagatactcttcgaccgaacgccggtgtctgcaggaagcggcggcggaagtcaggcatacgctggtaactttgaggcagctggtaacgctctatgatccagtcgattttcagagagacgatgcctgagccatccggcttacgatactgacacagggattcgtataaacgcatggcatacggattggtgatgtttttctnctggttacccaggccgtgccggcacgttaaccgggctgcatccgatgcaagtgtgtcgctgtcgacggtgaccctatatcgaggagggggtttctnntgaatcgccagcggcatcagcaccttgtcgccttgcgtataatatttgcccatggtgaaaacgggggcgaagaagttgtccatattggccacgtttaaatcaaaactggtgaaactcacccagggattggctgagacgaaaaacatattctcaataaacccgtctttcattgccatacggaactccggatgagcattcatcaggcgggcaagaatgtgaataaaggccggataaaacttgtgcttatttttctttacggtctttaaaaaggccgtaatatccagctgaacggtctggttataggtacattgagcaactgactgaaatgcctcaaaatgttgtgaaatattttccgcatcagccagcgcagaaatatttccagcaaattcattctgcaatcggcttgcataacgctgaccacgttcataagcacttgttgggcgataatcgttacccaatctggataatgcagccatctgctcatcatccagctcgccaaccagaacacgataatcactttcggtaagtacagcagtggcttccgcagaggtcaatccgaatatttcagcatatttagcaacatggatctcgcagataccgtcatgttcctgtagggtgccatcagattttctgatctggtcaacgaacagatacagcatacgtttttgatcccgggagagactatatgccgcctcagtgaggtcgtttgactggacgattcgcgggctatttttacgtttcttgtgattgataaccgctgtttccgccatgacagatccatgtgaagtgtgacaagtttttagattgtcacactgcaggaagcggcggcggaagtcaggcatacgctggtaactttgaggcagctggtaacgctctatgatccagtcgattttcagagagacgatgcctgagccatccggcttacgatactgacacagggattcgtataaacgcatggcatacggattgggggttnctntangacccgagtnagacgtagcnaccagatgcggttttcccat

SEQ ID NO: 23602 - DNA, 3297 bp, Homo sapiens; identical to SEQ ID NO: 10648
  SIMILAR (2491)..(2928): 981254mologous to Shigella dysenteriae RepE,accession number AF239690,Smith-Waterman Score=760.

SEQ ID NO: 23603 - DNA, 1437 bp, Homo sapiens
  SIMILAR (104)..(60): 531254mologous to Cloning vector pZC320 SopA,accession number U26464,Smith-Waterman Score=43.
  misc_feature (1)...(1437): n = a,t,c or g
atggacgatatcccgcaagaggcccggcagtaccggcataaccaagcctatgcctacagcatccagggtgacggtgccgaggatgacgatgagcgcattgttagatttcatacacgggtcaccgtcgacagcgacacacttgcatcggatgcagcccggttaacgtgccggcacggcctgggtaaccagtctgggacacacggtcccactcgtatagacggtatgattattagtctgggaccacggtcccactcgtatggtcggtctgataatcagtactgggccctcggtcccactcgcatcgtcgatacttcgttatcgacaccagctgccccgatggtggattcgttaattgcgcgcgtaggagtaatggctcgcggtaatgccattactttgcctgtatgtggtcgggatgtgaagtttactcttgaagtgctccggggtgatagtgttgagaagacctctcgggtatggtcaggtaatgaacgtgaccaggagctgcttactgaggacgcactggatgatctcatcccttcttttctactgactggtcaacagacaccggcgttcggtcgaangaaaattgccgatgggagtcgccgtcgtaaagctgctgcacttaccgaaagtgattatcgtgttctggttggcgagctggatgatgagcagatggctgcattatccagattgggtaacgattatcgcccaacaagtgcttatgaacgtggtcagcgttatgcaagcggattgcagaatgaatttgctggaaatatttctgcgctggctgatgcggagggcatccgatatttgctcttccatccacggggattgagagccattactattgctgtatttggtaagcaaaatacgtacatcaggctcgaaccctttaagatcaacgttcttgagcagatcacgaagcatatcgaaaaactgcagtgcggaggtgtagtcaaacaactcagcaggcgtgggaacaatcagcacatcagcagcacatacgacattaatcgtgccgatacccaggttaggcgcgctgtcaataactatgacatcatagtcatgagcaacagtttcaatggccagtcggagcatcaggtgtggatcgatagaaaggcaggagagtgtcttctgcatgaatatgaagatctggtacccatccgtgatacattgaggctgttccctgggggtcgttaccttccacgagcaaaacacgtagccccttcagagccagatcctgagcaagatgaacagaaactgaggttttgtaaacgccacctttatggaaaacaaccccgatcaccggtggaaagggtctgggaccacggtcccactcgtatcgtcggtctgattattagtctgggaccacggtcccactcgtatcgtcggtctgataatcagactgggaccacggtcccactcgtatcgtcggtctga

SEQ ID NO: 23604 - DNA, 774 bp, Homo sapiens
  SIMILAR (1)..(651): 1001254mologous to Cloning vector pZC320 SopA,accession number U26464,Smith-Waterman Score=1138.
atgcgtgatgtgtttggtacgcgattgcgacgtgctgaagacgtatttccaccggtgatcggggttgctgcccataaaggtggcgtttacaaaacctcagtttctgttcatcttgctcaggatctggctctgaaggggctacgtgttttgctcgtggaaggtaacgacccccagggaacagcctcaatgtatcacggatgggtaccagatcttcatattcatgcagaagacactctcctgcctttctatcttggggaaaaggacgatgtcacttatgcaataaagcccacttgctggccggggcttgacattattccttcctgtctggctctgcaccgtattgaaactgagttaatgggcaaatttgatgaaggtaaactgcccaccgatccacacctgatgctccgactggccattgaaactgttgctcatgactatgatgtcatagttattgacagcgcgcctaacctgggtatcggcacgattaatgtcgtatgtgctgctgatgtgctgattgttcccacgcctgctgagttgtttgactacacctccgcactgcagtttttcgatatgcttcgtgatctgctcaagaacgttgatcttaaagggttcgagcctgatgtacgtattttgcttaccaaatacagcaatatctgggaccacggtcccactcgtatcgtcggtctgattattagtctgggaccacggtcccactcgtatcgtcggtctgataatcagactgggaccacggtcccactcgtatcgtcggtctga

SEQ ID NO: 23605 - DNA, 763 bp, Homo sapiens
  SIMILAR (197)..(532): 991254mologous to Cloning vector pZC320 SopA,accession number U26464,Smith-Waterman Score=571.
gctggatagtctgatcgacaatacaagtgggaccgtggtccagaccgataatcagaccgacaacacgagtgggatcgtggtccagactaataatcagaccgacgatacgagtgggaccgtggtcagaactaataatcagaccgacgatacgagtggggacgttggttcccctgcaggtcgactctagaggatcccctttgatgaaggtaaactgcccaccgatccacacctgatgctccgactggccattgaaactgatgctcatgactatgatgtcatagttattgacagcgcgcctaacctgggtatcggcacgattaatgtcgtatgtgctgctgatgtgctgattgttcccacgcctgctgagttgtttgactacacctccgcactgcagtttttcgatatgcttcgtgatctgctcaagaacgttgatcttaaagggttcgagcctgatgtacgtattttgcttaccaaatacagcaatagtaatggctctcagtccccgtggatggaggagcaaattcgggatgccggttgaagatacttcgttatcgacaccagctgccccgatggtggattcgttaattgcgcgcgtaggagtaatggctcgcggtaatgccattactttgcctgtatgtggtcgggatgtgaagtctactcttgaagtgctccggggtgatagtgttgagaagacctctcgggtatggtcaggtaatgaacgtgaccaggagctgcttactgaggacgcactggatgatctcat

SEQ ID NO: 23606 - DNA, 405 bp, Homo sapiens
  SIMILAR (1)..(282): 1001254mologous to Cloning vector pZC320 SopA,accession number U26464,Smith-Waterman Score=484.
atgaaactcatggaaacacttaaccagtgcataaacgctggtcatgaaatgacgaaggctatcgccattgcacagtttaatgatgacagcccggaagcgaggaaaataacccggcgctggagaataggtgaagcagcggatttagttggggtttcttctcaggctatcagagatgccgagaaagcagggcgactaccgcacccggatatggaaattcgaggacgggttgagcaacgtgttggttatacaattgaacaaattaatcatatgcgtgatgtgtttgtctgggaccacggtcccactcgtatcgtcggtctgattattagtctgggaccacggtcccactcgtatcgtcggtctgataatcagactgggaccacggtcccactcgtatcgtcggtctga

SEQ ID NO: 23607 - DNA, 439 bp, Homo sapiens
  SIMILAR (337)..(80): 651254mologous to Plasmid ColBM-Cl139 D protein,accession number J03312,Smith-Waterman Score=246.
agtggtagtggttgggattaggaaattggaaggagagattagggacacagacaagaatgatttggtcacaaaaaactgccagaaggctttgcagaactttcagcggtataccggcatacagcatgtgcatcgcataggaatggcggaacgtatgtggtgtgaccggaacagagaacgtcacaccgtcagcagcagcggcggcaaccgcctccccaatccagactgggccccgggtccccctcgtatcgtcggtctgaatattagtctgggacccacggtccccactcgtatcgtcggtctgattattagtctgggaccacggtcccactcgtatcgtcggtctgataatcagactgggaccacggttcccactcgtatcgtcggtctgatattagttctgggaccatggtcccactcgtatcgtcggtctgattattag

SEQ ID NO: 23608 - DNA, 816 bp, Homo sapiens
  SIMILAR (816)..(562): 1001254mologous to Cloning vector pZC320 SopA,accession number U26464,Smith-Waterman Score=427.
atgcgtttatacgaatccctgtgtcagtatcgtaagccggatgcgtcaggcatcgtctctctgaaaatcgactggatcatagagcgttaccagctgcctcaaagttaccagcgtatgcctgacttccgccgccgcttcctgcatgaccgacgatacgagtgggaccgtggttccagactaataatcagaccgacgatacgagtgggaccgtggtccagactaataatcagaccgacgatacgagtgggaccatggtccaggactaataatcagaccgacgatacgagtgggaccgtggtcagatctgattatcagaccgacgatacgagtgggaccgtggtccagactaataatcagaccgacgatacgagtgggaccgtggtcagatctaataatcagaccgacgatacgagtgggaccgtggtccagtctgattatcagaccgacgatacaagtggaacagatgggcccacgagagaatattttcaaagtgtcaggtcgactctagaggatcccctggatgtggctgcccggcaccggtcgactctagaggatccccctattgctgtatttggtaagcaaaatacgtacatcaggctcgaaccctttaagatcaacgttcttgagcagatcacgaagcatatcgaaaaactgcagtgcggaggtgtagtcaaacaactcagcaggcgtgggaacaatcagcacatcagcagcacatacgacattaatcgtgccgatacccaggttaggcgcgctgtcaataactatgacatcatagtcatgagcaacagtttcaatggccagtcggagcatcag

SEQ ID NO: 23609 - DNA, 1174 bp, Homo sapiens
  SIMILAR (527)..(1141): 981254mologous to Cloning vector pBACe3.6 levansucrase,accession number U80929,Smith-Waterman Score=1066.
aacacctggcactgcttttgggctactgcacaccacagccccttggacagcacacttaaccatctgcattgcctccccaggggcccatgagctggagcagatgcaactcatcctggagaccatccctaatctatctgtgaggtccctcgactataggtgcaccgtcgacagcgacacacttgcatcggatgcagcccggttaacgtgccgcacggcctgggtaaccagactaataatcagaccgacgatacgagtgggaccgtggtcccagtctgattatcagaccgacgatacgagtggaccgtggtcccagactaataatcagaccgacgatacgagtggaccgtggtcccagactaataatcagaccgacgatacgagtggaccgtggtcccagtctgattatcagaccgacgatacaagtggaacacacctcatctcatctcccatcatcccccacactgaggctgttggcacctacgtcatggcctccctctccacaattggtcccacatcattctggctcctgacaacagcgcaggtaaatgtgtcaaaatctgatgacacactcaaaatcaacggagtggaagatcacaaaacgatttttgacggagacggaaaaacatatcagaacgttcagcagtttatcgatgaaggcaattatacatccggcgacaaccatacgctgagagaccctcactacgttgaagacaaaggccataaataccttgtattcgaagccaacacgggaacagaaaacggataccaaggcgaagaatctttatttaacaaagcgtactacggcggcggcacgaacttcttccgtaaagaaagccagaagcttcagcagagcgctaaaaaacgcgatgctgagttagcgaacggcgccctcggtatcatagagttaaataatgattacacattgaaaaaagtaatgaagccgctgatcacttcaaacacggtaactgatgaaatcgagcgcgcgaatgttttcaaaatgaacggcaaatggtacttgttcactgattcacgcggttcaaaaatgacgaatgatgcccttaactcaaacgatatttacatgcttggttatgtatcaaactctttaaccggcccttacaagccgctgaacaaaacaggcttgtgctgcaaatgggtcttgatccaaacgatgtga

SEQ ID NO: 23610 - DNA, 528 bp, Homo sapiens; identical to SEQ ID NO: 5370
  SIMILAR (94)..(297): 911254mologous to Homo sapiens beta-fibrinogen precursor,accession number J00129,Smith-Waterman Score=318.

SEQ ID NO: 23611 - DNA, 795 bp, Homo sapiens
  SIMILAR (795)..(361): 1001254mologous to Escherichia coli o188,accession number L10328,Smith-Waterman Score=746.
ctatcctgtcgtcatggaagtgatatcgcggaaggaaaatacgatatgagtcgtctggcggcctttctttttctcaatgtatgagaggcgcattggagttctgctgttgatctcattaacacagacctgcaggaagcggcggcgggagtcaggcatacgctggtaactttgaagcagctggtaacgctctatgatccagtcgattttcagagagacgatgcctgagccatcccggctacgatacgacgatacgagtgggaccgtggtcccagtctgattatcagaccgacgatacgagtgggaccgtggtcccagactaataatcagaccgacgatacgagtgggaccgtggtcccagacaaatgcggtcaattgcccggtcaggtggtccagcgtaccctgatcaatcacttctccggtttgcggatcaactttgttctgaatcacgccgcccataaattccggcttgttcatcaccattgcatcgaggaaaaccagaatctggcgcaggtgatactgacagcgcgcgccgccaatcacgcccattgagctggtctgaatcaataccggtttaccggccagcggttgatccggcaggcgggaaagccagtcgatggcatttttcagcccacccggtaccgagtagttatattccggcgtgacgatcaccacaccgtcagcctgacggatctgttccgccagagcttcaaccgttgctggaaaaccttcttcctgctgtacgtcagcgtcatacaagggaatgtcggcaatggatggtaacgcattgacttccat

SEQ ID NO: 23612 - DNA, 723 bp, Homo sapiens
  SIMILAR (428)..(466): 1001254mologous to Cloning vector pZC320 SopA,accession number U26464,Smith-Waterman Score=80.
atgaaactcatggaaacacttaaccagtgcataaacgctggtcatgaaatgacgaaggctatcgccattgcacagtttaatgatgacagcccggaagcgaggaaaataacccggcgctggagaataggtgaagcagcggatttagttggggtttcttctcaggctatcagagatgccgagaaagcagggcgactaccgcacccggatatggaaattcgaggacgggttgagcaacgtgttggttatacaattgaacaaattaatcatatgcgtgatgtgtttggtacgcgattgcgacgtgctgaagacgtatttccaccggtgatcggggttgctgcccataaaggtggcgtttacaaaacctcagtttctgttcatcttgctcaggatctggctctgaaggggctacgtgtttgctcgtggaaggaacgacccccagggaacagcctcaatgtatcacggatggtctgggaccacgatcccactcgtgttgtcggtctgattatcggtctgggaccacggtcccacttgtattgtcgatcagactatcagcaacggagtaacctcggtgtgcggttgtatgcctgctgtggattgctgctgtgtcctgcttatccacaacattttgcgcacggttatgtggacaaaatacctggttacccaggccgtgccggcacgttaaccgggctgcatccgatgcaagtgtgtcgctgtcgacggtga

SEQ ID NO: 23613 - DNA, 1104 bp, Homo sapiens; identical to SEQ ID NO: 17216
  SIMILAR (813)..(1088): 1001254mologous to Homo sapiens Protein sequence encoded by clone p199-7 (PL mutet.rsT4),accession number P93369,Smith-Waterman Score=532.

SEQ ID NO: 23614 - DNA, 1440 bp, Homo sapiens
  SIMILAR (1434)..(775): 991254mologous to Escherichia coli K12 sialic acid transporter,accession number AE000401,Smith-Waterman Score=1137.
  misc_feature (1)...(1440): n = a,t,c or g
ttaatattgttccagtttgtccttcacggcggcgatcacttctcgggcgtttttgccggatcgcaggatcaccaccccgcccgccacttcgccttcgccgtttagttcggcaatgccccggcgcatctccgggccaatctggaccttcgcaacatcgcgcagataaacgggcacgccattttcactggcttttaaaacgatgtgattaaagtcgtcgagcgtttgcagatagccgctggcgcgcaccatatattccgcttccgccagttcgatcgacgaaccgcccgcttcctggtttgaagcatccagcgcgctttttacttcggcgagactgatgccatactgcgccaggcgctggggatcgataaccacctgatactctttcaccacaccgcccaccgacgccacttncgcaacgtcagggatggttttcagctcatatttgagaaaccagtcctgtaatgagcgtaaatcggccagatcgtgcttaccgctgcgatccaccagtgcatattcatagatccagccaacacccgtggcatctggccccagctcggcgctgactcccgcaggcagcttaccctgtaccgacgatacgagtgggaccgtggtcccagtctgattatcagaccgacgatacgagtgggaccgtggtcccagactaataatcagaccgacgatacgagtgggaccgtggtcccagacttcccccactaggccattttttgggatttttaaaaaaaaaaggggttttccccccattgggccaagctgattggctatgcgatgttcaccacggtagagaatatccaccattgtgcgtactggtgctttacctgcgtgtttctctttccagtcttccgcttccgggatgtttttacgcagccagagagcaaagatgattggcaaaatgccgataaagaacagcgcacgccagccccagaccggaaccaccaggctatagacctgagcggcaacgacggcccccacagagaagcctgaaatcaaaaaaccactggctttgttacgcagatgttttggccagctttcaatgacataggtggcgctggaaccgtattcacccgccatccccatgccgatgaccagacgagcgataaacatggtgatgtagcctggcgcaaagccgcaggccagcgtcccggccgagaagagaacgatgctggtgaccattgccagacgacgcccgtagcggtcacccatagcgccgagcatcaggccgccgaaccagcgagagataaaggctgcagagatcagacttgccgcctgcaccgtcgtcagcccgaattcaccttgtacttcggtgagtaccagggcgattaaaacgaaatcaaaaccgtcaagcagatatcccaaccaggcagcggaaaatgcgcgccattgtgcaccggtgagatggcgataccacgggatattcgccat

SEQ ID NO: 23615 - DNA, 827 bp, Homo sapiens
  SIMILAR (100)..(2): 1001254mologous to Homo sapiens Protein sequence encoded by clone p199-7 (PL mutet.rsT4),accession number P93369,Smith-Waterman Score=203.
atggacgatatcccgcaagaggcccggcagtaccggcataaccaagcctatgcctacagcatccagggtgacggtgccgaggatgacgatgagcgcattgttagatttcatacacgggtcaccgtcgacagcgacacacttgcatcggatgcagcccggttaacgtgccggcacgctcggagtaaccagtgcggatgttcgactccaaacatcaaagccaacgagaggttcaggttactcctccttgaccccaaacatccagtgagtggagactggcctgttcacagagtaaaatatgtcgtctctaattcggcaaagacggtgatgactgtatatatgcaggccaattccgtaagtaaagtttcatgtaaaactaattaccggatattccaaccaccccctgtgcaggccagccgcatgcacaagggacaggatttattccccactggaagcaactggaaaactggaaaaaaatatacaaaacagcagttctcaagacattgtgtgccggcaacaaaggacagtgatgctggagagatgagaaataagcaagtctgggaccacggtcccactcgtatcgtcggtctgattattagtctgggaccacggtcccactcgtatcgtcggtctgataatcagactgggaccaccggtcccactcgtatcgtcggtctgattattagttgcaacctccgcctcccgatcaagttccactaccacatttgctctgcagccttcaggcagaaacaatacctttgctgagacgccttcttcgtttgtaaaaatgggaatgacatttgcaccatggcttttcacaatggcaagtg

SEQ ID NO: 23616 - DNA, 2188 bp, Homo sapiens
  SIMILAR (368)..(1114): 841254mologous to Cloning vector pZC320 SopA,accession number U26464,Smith-Waterman Score=1077.
actaataatcagaccgacgatacgagtgggaccatggtccagcactaataatcagaccgacgatacgagtgggaccgtggtcagatctgattatcagaccgacgatacgagtgggaccgtggtcagtactaataatcagaccgacgatacgagtgggaccgtggtcagatctaataatcagaccgacgatacgagtgggaccgtgtgtgacaatctaaaaacttgtcacacttcacatggatctgtcatggcggaaacagcggttatcaatcacaagaaacgtaaaaatagcccgcgaatcgtccagtcaaacgacctcactgaggcggcatatagtctctcccgggatcaaaaacgtatgctgtatctgttcgttgaccagatcagaaaatctgatggcaccctacaggaacatgacggtatctgcgagatccatgttgctaaatatgctgaaatattcggattgacctctgcggaagcagatctggctctgaaggggctacgtgttttgctcgtggaaggtaacgacccccagggaacagcctcaatgcatcacggatgggtatcagatcttcatattcatgcagaagacactctcctgcctttctatcttggggaaaaggacgatgtcacttatgcaataaagcccacttgctggccggggcttgacattattccttcctgtctggctctgcaccgtattgaaactgagttaatgggcaaatttgatgaaggtagactgcccaccgatccacacctgatgctccgactggccattgaaactgttgcgcatgactatgatgtcatagttattgacagcgcgcctaacctgggtatcggcacgattaatgtcgtatgtgctgctgatgtgctgattgttcccacgcctgctgagttgtttgactacacctccgcactgcagtttctcgatatgcttcgtgatctgctcaagaacgttgatcttaaagggttcgagcctgatgtacgtattttgcttaccaaatacagcaatagtaatggctctcagtccccgtggatggaggagcaaattcgggatgccttgggaagcatggttctacaaaatgttgtacgtgaaacggatgaagttggtaaagtctgggaccacggtcccactcgtatcgtcggtctgattattagtctgggaccacggtcccactcgtatcgtcggtctgataatcagactgggaccacggtcccactcgtatcgtcggatctggctctgaaggggctacgtgttttgctcgtggaaggtaacgacccccagggaacagcctcaatgtatcacggatgggtaccagatcttcatattcatgcagaagacactctcctgcctttctatcttggggaaaaggacgatgtcacttatgcaataaagcccacttgctggccggggcttgacattattccttcctgtctggctctgcaccgtattgaaactgagttaatgggcaaatttgatgaaggtaaactgcccaccgatccacacctgatgctccgactggccattgaaactgttgctcatgactatgatgtcatagttattgacagcgcgcctaacctgggtatcggcacgattaatgtcgtatgtgctgctgatgtgctgattgttcccacgcctgctgagttgtttgactacacctccgcactgcagtttttcgatatgcttcgtgatctgctcaagaacgttgatcttaaagggttcgagcctgatgtacttattgacagcgcgcctaacctgggtatcggcacgattaatgtcgtatgtgctgctgatgtgctgattgttcccacgcctgctgagttgtttgactacacctccgcactgcagtttttcgatatgcttcgtgatctgctcaagaacgttgatcttaaagggttcgagcctgatgtacgtattttgcttaccaaatacagcaatagtaatggctctcagtccccgtggatggaggagcaaattcgggatgcctggggaagcatggttctaaaaaatgttgtacgtgaaacggatgaagttggtaaaggtcagatccggatgagaactgtttttgaacaggccattgatcaacgctcttcaactggtgcctggagaaatgctctttctatttgggaacctgtctgcaatgaaattttcgatcgtctgattaaaccacgctgggagattagataa

SEQ ID NO: 23617 - DNA, 2305 bp, Homo sapiens
  SIMILAR (2305)..(1859): 971254mologous to Cloning vector pZC320 SopA,accession number U26464,Smith-Waterman Score=729.
agaatccccgaatggagtgagctcttccagcacagctgacaagtcccagaagcagtccctgacccccagctttcagagcccagccaccagcttggggctggatgaaggggtctccgccagctcagctggagccggagccggggagactctgaagcaggaatgtgactccctgggcccccagatggcgagcagcaccacctccaagccgtcatcatcatcctcaggacccaggaccctcccatggccgggacagcccatcagaggctgccggggcccacaggcagccctgccaccagtggtgatcctatccaaagcggcctacagtctcctgggctcccagaagagtggcaagctgccatcctcctcctccctgctgccccacgccgacgtggcctgggtgagctccctgcggccactcctgaacaaggacatgagcagtgaggagcagtccctctactacaggcagtggaccttggcccggcagcaccacgctgactatagcaaccagctggacccggcctctggcacccgaaacttccacccccgacggctcctgctgacagggcccccacagactaataatcagaccgacgataccgagtgggaccgtggtccccgactcataatcagaccgacgatacgagtgggaccgtggttccagactaataatcagaccgacgatacgagtgggaccgtggtcccagatgttatcaggaactggcttctctttcaggcggccatttcctctgttatcccaaaatggctgccagcagcttcctggccagcatctttctgatttctcatcctgtgaaaaggtgggggcctttgtctcagcattccctgcattaaacttgttgaattcaaatggaattttcttgggcccaaacatgtcacactcatttctgagccaaacatgctgcctgccatctggagagacttgtgccaaatatgatgacatcatgaaggtggcgaagcaggctttggagggtcccctcaagggcatcctgggcatcgtgagcaccaggttgtctcctctgactttaacagtgacactcattcttccacttttgatgctgggactggcattgctctcaatgaccactttgttaagctcatttcctgatatgaccatgaatttgggtatgggccactcgcccttaaagacggtttttcggcctttgacgtggaagccccgttttttaataatggactcttgttcccaactggaaccacctctcaaccttatctcggggtattcttttgatttataaagggattttgccgatttgggaccccccatcaaacaggattttcgcctgctggggcaaaccagcgtggaccgcttgttgcaactctctcccgccaacattattatgtaggagccccaataaattttggcactttcaatagggggaccttctagtcctgggtaatgtttcagtatgattccacccatggcaagttccacagtaccatcaaggctgagaacgggaagcttgtcatcagtggaaatcccataaccatcttccaggagtgagatccctatctggggtattctttgattatagggattttgccgattcggaaacaccatcaacaggattttcgctgctggggcaaaccagcgtggaccgcttgctgcacttctctcagggccaggcggtgaagggcaatcagctgttgcccgtctcacttcccaatcagctcttacagattcatcatgacacttcagtgtagcagcttgctcattaacacctggcctgcattcactttcagttgttactaatttgatgatgatcatttgatttattctgatcatcttttgctcaagggcccacatttgcagccacctcatctcagtctcttggaaattgcacccttccacgagcaaaacacgtagccccttcagagccagatcctgagcaagatgaacagaaactgaggttttgtaaacgccacctttatgggcagcaaccccgatcaccggtggaaatacgtcttcagcacgtcgcaatcgcgtaccaaacacatcacgcatatgattaatttgttcaattgtataaccaacacgttgctcaacccgtcctcgaatttccatatccgggtgcggtagtcgccctgctttctcggcatctctgatagcctgagaagaaaccccaactaaatccgctgcttcacctattctccagcgccgggttattttcctcgcttccgggctgtcatcattaaactgtgcaatggcgatagccttcgtcatttcatgaccagcgtttatgcactggttaagtgtttccatgagtttcat

SEQ ID NO: 23618 - DNA, 3226 bp, Homo sapiens
  SIMILAR (2442)..(1717): 991254mologous to Cloning vector pSacBII SacB,accession number U09128,Smith-Waterman Score=1275.
  misc_feature (1)...(3226): n = a,t,c or g
tcagaccgacgatacgagtgggaccgtggtcccagtctgattatcagaccgacgatacgagtgggaccgtggtcccagactaataatcagaccgacgatacgagtgggaccgtggtcccagatcatggcctttgtcttaacgtagtgagggtctctcagcgtatggttgtcgccggatgtataattgccttcatcgataaactgctgaacgttctgatatgtttttccgtctccgtcaaaaatcgttttgtgatcttccactccgttgattttgagtgtgtcatcagattttgacacatttacctgcgctgttgtcaggctttgtttgccgtaatgtttaccggaatagtcagtgtagaataaacggatttttccgtcagatgtaaaggttgcagaaccggaccattcttgcgtctgatctttcaggatcggatcgttggcgtcgaacttatcgctgtctttaaagacacggcccgcgtttttccagctgtcgattgagttgtcgccgaccttttgataaaacatgtagattgatgtgtcatcagcgtctttcgggcttcccgcaagagcaaacacaacgtgatagccgttgtattcagctactgttccgtcagcgttttgcagcggccagctgtcccacacatcaagtccttttgcagactcaatatttttaatcgttgattgatcgaattgaggcacttggtatttttcgttttgctgctgtttnaggatctgcagcatatcatggcgtgtaatatgagagacgccgtacgtttctttgtatgcttttttggtattttctttcgcgaaggcttgattcgctcctcctgccagaagtgcagtcgtaaaagtcagaacgcctttcgtgcatgcatccaggtctactgtagnagatcccctcatggcctttgtcttcacgtagtgagggtctctcagcgtatggttgtcgccgggtgtataattgccttcatcgataaactgctgaacgttctgatatgtttttccgtctccgtcaaaaatcgttttgtgatcttccactccgttgattttgagtgtgtcatcagattttgacacatttacctgcgctgttgtcaggctttgtttgccgtaatgtttaccggaatagtcagtgtagaataaacggatttttccgtcagatgtaaaggttgcagaaccggaccattcttgcgtctgatctttcaggatcggatcgttggcgtcgaacttatcgctgtctttaaagacacggcccgcgtttttccagctgtcgattgagttgtcgccgaccttttgataaaacatgtagattgatgtgtcatcagcgtctttcgggcttcccgcaagagcaaacacaacgtgatagccgttgtattcagctactgttccgtcagcgttttgcagcggccagctgtcccacacatcaagtccttttgcagactcaatatttttaatcgttgattgatcgaattgaggcacttggtatttttcgttttgctgctgtttagggatctgcagcatatcatggcgtgtaatatgagagacgccgtacgtttctttgtatgctttttggttattttctttcgcgaaggcttgagtcgctcctcgtatatgagtgtaggcagttaaaaacagccagatcacatcttgaatggttttctgtttagaattttcttccactagatactctaaatcatcattctcaagttcaaacttccacaaatcatcgatcgtcatttttgaaccgcgtgaatcagtgaacaagtaccatttgccgttcattttgaaaacattcgcgcgctcgatttcatcagttaccgtgtttgaagtgatcagcggcttcattacttttttcaatgtgtaatcattatttaactctatgataccgagggcgccgttcgctaactcagcatcgcgttttttagcgctctgctgaagcttctggctttctttacggaagaagttcgtgccgccgccgtagtacgctttgttaaataaagattcttcgccttggtatccgttttctgttcccgtgttggcttcgaatacaaggtatttatggcctttgtcttcaacgtagtgagggtctctcagcgtatggttgtcgccggatgtataattgccttcatcgataaactgctgaacgttctgatatgtttttccgtctccgtcaaaaatcgttttgtgatcttccactccgttgattttgagtgtgtcatcagattttgacacatttacctgcgctgttgtcaggctttgtttgccgtaatgtttaccggaatagtcagtgtagaataaacggatttttccgtcagatgtaaaggttgcagaaccggaccattcttgcgtctgatctttcaggatcggatcgttggcgtcgaacttatcgctgtctttaaagacacggcccgcgtttttccagctgtcgattgagttgtcgccgacgggggttctttagagtccaccaaacaggtttcaacctcagtccccggtttaacgtgccggctcgggccgacgatacgagtgggaccgtggtcccagtctgattatcagaccgacgatacgagtgggaccgtggtcccagactaataatcagaccgacgatacgagtgggaccgtggtcccagaacatgagaaagtcatacttgagttgctcaggtaactcctctgctacatcaaacagctgatatcttgatttcagtttcagtgctctttccaccacatacccagctgtcanttcttgcgtctgatctttcaggatcggatcgttggcgtcgaacttatcgctgtctttaaagacacggcccgcgtttttccagctgtcgattgagttgtcgccgaccttttgataaaacatgtagattgatgtgtcatcagcgtctttcgggcttcccgcaagagcaaacacaacgtgatagccgttgtattcagctactgttccgtcagcgttttgcagcggccagctgtcccacacatcaagtccttttgcagactcaatatttttaatcgttgattgatcgaattgaggcacttggtatttttcgttttgctgctgtttagggatctgcagcatatcatggcgtgtaatatgagagacgccgtacgtttctttgtatgctttttggttattttctttcgcgaaggcttgagtcgctcctcctgccagaagtgcagtcgtaaaagtcagaactgtggcttgttttacaatttttttgatgttcatgttcat

SEQ ID NO: 23619 - DNA, 1301 bp, Homo sapiens
  SIMILAR (207)..(596): 931254mologous to Homo sapiens Human G-protein coupled receptor,accession number R97222,Smith-Waterman Score=662.
gagagggctctactctgagctcctatttttcaaggctccgggccgcgctcggcgctggcctgctgccccggcgggtccgccggccggaggcgggagtcacaggaagagccctccacaaaaggaggcctcgggggatcaggacagctgcaggtgggtgtgcacactggtgagctgccagcaggggcccagacgcgccaggcctggagatggctggaaactgctcctgggaggcccatcccggcaacaggaacaagatgtgccctggcctgagcgaggccccggaactctacaggcggggcttcctgaccatcgagcagatcgcgatgctgccgcctccggccgtcatgaactacatcttcctgctcctctgcctgtgtggcctggtgggcaacgggctggtcctctggtttttcggcttctccatcaagaggaaccccttctccatctacttcctgcacctggccagcgccgatgtgggctacctcttcagcaaggcgctgttctccatcctgaacacggggggcttcatgggcacgtttgcagactacatccgcagcgtgtgccgggtactggggctctgcatgttacttacaggcggtcctgctgatgcctgctggctgggacgagaggggggtgcggtcagaaagggcctggtgcactgtggaaacaggtcgggtgcacaggtcacgtgtgagagtcagccgcaataccgcacgcgatccagcaaatgggcttgggcatttgctgcagagtcttggaatgcctgctctggagcccggacccaccctgggatctgctttgcgctgggagtttctgcagactgcctcaccccaactaccagtccaacctctgcatcctgcggccgccactccacagcggtcactacggggaagagggagagggcccaaggcaagggcgttgggtctgggaccacggtccacatcgtatcgtcggtcatgattattagtctgggaccacggtccactcgtatcgtcggtctgataatcagactgggaccacggtcccctcgtatcgtcggtctgattattagtctgggaccatggtcacatcgtatcgtcgtctgggaccacggtacacatcgtatcgtcggtctgattattagtctgggaccacgatcccactcgtgttgtcggtctgactatcggtatgggacacggtccacttgtattgtcgatcagactatcagcgtgagactacgacttcatcaatgtctgtcaacggcaagtattgacatgtcgtcgctaactgtagtacggagtaacctacggtatgccgtttga

SEQ ID NO: 23620 - DNA, 1252 bp, Homo sapiens
  SIMILAR (1252)..(1058): 1001254mologous to Cloning vector pZC320 SopB,accession number U26464,Smith-Waterman Score=319.
  misc_feature (1)...(1252): n = a,t,c or g
atgcccaaatcttgtcatggcacagattcatgcctttccctgcagcgactgagaatctctaaattcttggatgatggcagcagttggtctccctggatggtcttcactgaggagctggatgcaatctgggaggcctcaaaatccttcaaaactctgggccattattcggtttcaaaaccgggtttctcaatttctagggatcttgaatgcgatgaggtcgactctagaggatccccgaatgcctatgccaaaagcatccagggtgacggtgccgaggatgacgatgagcgcattgttagatttcatacacgggtcaccgtcgacagcgacacacttgcatcggatgcagcccggttaacgtgccggcaccgctgggtaaccaggtattttgtccacataaccgtgcgcaaaatgttgtggataagcaggacacagcagcaatccacagcaggcatacaaccgcacaccgagtctcacgctgatagtctgatcgacaatacaagtgggaccgtggtccagaccgataatcagaccgacaaacacgagtgggatcgtggtcccagaactaataatcagaccgacgatacgagttgggaccgtggtcccagaactaataaatcagaacgacgatacgagtgggganccgtggtcccagactattaatcagaacgacgatacgagtgggaccgtggtcccagactaataatcagaccgacgatacgagtgggaccatggtcccagactaataatccgaacggacgataccgggttgggacgttgtcccagttctggattttcaggacgccggtacgagtgggaccgtggtcccagacttattaaatcagacggacgttacgagttgggaccgtggtcccagactaataatcagaccgacgatacgagtgggaccgtggtcccagtctgattattacaccggccatttccagtggaacaggggggcccagaaatgatatttctggccagttatgctttctggcctgtaacaaaggacattaagtaaagacagataaacgtagactaaaacgtggtcgcatcagggtgctggcttttcaagttccttaagaatggcctcaattttctctatacactcagttggaacacgagacctgtccaggttaagcaccattttatcgcccttatacaatactgtcgctccaggagcaaactgatgtcgtgagcttaaactagttcttgatgcagatgacgttttaagcacagaagttaaaagagt

SEQ ID NO: 23621 - DNA, 3252 bp, Homo sapiens
  SIMILAR (2608)..(3210): 951254mologous to Shigella dysenteriae RepE,accession number AF239690,Smith-Waterman Score=994.
  misc_feature (1)...(3252): n = a,t,c or g
atggtgatggaaataaaagatgaaagtccttcctatattcctgcagagtacagcacaatccacagcccatcaacacccattaaagattcagattctgatcgattgcgtcgaggttcagatgggaaatcacgtggacggggccgaagaaacaataatccttcacctcccccagattctgatcttgagggattttgccgatttcggaaccaccatcaaacaggattttcgcctgctggggcaaaccagcgtggaccgcttgctgcaactctctcagggccaggcggtgaagggcaatcagctgttgcccgtctcactggtgaaaagaaaaaccaccctggcgcccaatacgcaaaccgcctctccccgcgcgttggccgattcattaatgcagctggcacgacaggtttcccgactggaaagcgggcagtgagcgcaacgcaattaatcagaactcttagacactcagcctctgcatctttatttcctctctgccttcttatcaaccctggggtatttgccaatctaacccctgacgtttggcaatactatgtcctctgcttcccttccactgtcagtcagctggcagaaaaggcacaggcaggagaggaactgagggattttgcgattttcggaaccaccatcaaacaggattttcgcctgctggggcaaaccagcgtggaccgcttgctgcaactctctcagggccaggcggtgaagggcaatcagctgttgcccgtctcactggtgaaaagaaaaaccaccctggcgcccaatacgcaaaccgcctctccccgcgcgttggccgattcattaatgcagctggcacgacaggtttcccgactggaaagcgggcaatcttttgctcatctcacactctttgaacagctatttcagacaaggacattcattaatggtttagaactggaggaacccctaacccagagctcagaaattggcaaagggagatgtccaggtcccaccaagactgaatggggaggagaaggaagaagaaagatgtgtggctggtctcaagccggggatcctctagagtcaaaactggaggtctatgcaaccacagtatctttccatcacccaagcagccaagctctggttgtgggcagcccctctcctttaggcccaaactccagaaagaaggtggcagccaagggtcccaggcnagtctgggaccacgatcccactcgtgttgtcggtctgattatcggtctgggaccacggtcccacttgtattgtcgatcagactatcagcgtgagactacgattccatcaatgcctgtcaagggcaaggattttgccgatttcggaaccaccatcaaacaggattttcgcctgctggggcaaaccagcgtggaccgcttgctgcaactctctcagggccaggcggtgaagggcaatcagctgttgcccgtctcactggtgaaaagaaaaaccaccctggcgcccaatacgcaaaccgcctctccccgcgcgttggccgattcattaatgcagctggcacgacaggtttcccgactggaaagcgggcaggattttgccgatttcggaaccaccatcaaacaggattttcgcctgctggggcaaaccagcgtggaccgcttgctgcaactctctcagggccaggcggtgaagggcaatcagctgttgcccgtctcactggtgaaaagaaaaaccaccctggcgcccaatacgcaaaccgcctctccccgcgcgttggccgattcattaatgcagctggcacgacaggtggtatttttgaatatgtcttatctggcccaatgggagctgaggaacttgcattcagatttgctgtgaacacaattaacagaaacagaacattgctacccaatactacccttacctatgatacccagaagataaacctttatgatagttttgaagcatccaagaaagggattttgccgatttcggataccaccatcaaacaggattttcgcctgctggggcaaaccagcgtggaccgcttgctgcaactctctcagggccagacggtgaagggcaatcagctgttgcccgtctcactgtattatccggataataatcagaccgacgattcgagggggaccgtggttccagacttaaaaacggacggcgaatacgagggggacggtggtccccagactaataatcagaccgccgatacgagtgggaccatggtgttaggttacaaaacatctcagttaagagagctgataaccaaaggttcaaccactgtgggtagtcagtacgtgcatttcttcaagagaattacaaattggaaaaaaccaattcgagcccagccatacccattcaagggactaataatcagacgcacgatacgagtgggaccatggtcccagctatataatcagaccgctgatacgagtgggacggtggtcccagtctcattatcagaccgaccatacgagtgggaccgtggtcccagactaataatcagaccgactatacgagtgggaccgtggtcccagactaataatcagaccgtcgatacgagtgggaccgtggtcccagtctgattatcagaccgacgggtaccgagctcgaattcttaatcatggtcatagctgtttgatcagaaaatctgatggcaccctacaggaacatgacggtatctgcgagatccatgttgctaaatatgctgaaatattcggattgacctctgcggaagccagtaaggatatacggcaggcattgaagagtttcgcggggaaggaagtggttttttatcgccctgaagaggatgccggcgatgaaaaaggctatgaatcttttccttggtttatcaaacgtgcgcacagtccatccagagggctttacagtgtacatatcaacccatatctcattcccttctttatcgggttacagaaccggtttacgcagtttcggcttagtgaaacaaaagaaatcaccaatccgtatgccatgcgtttatacgaatccctgtgtcagtatcgtaagccggatggctcangcatcgtctctctgaaaatcgactggatcatagagcgttaccagctgcctcaaagttaccagcgtatgcctgacttccgccgccgcttcctgcaggtctgtgttaatgagatcaacagcagaactcccatgcgcctctcatacattgagaaaaagaaagccggcagacactcatatcggattttcctttcgcgatatactttcatgacgacggataatctgagggttatctgtcacagattgaag

SEQ ID NO: 23622 - DNA, 1955 bp, Homo sapiens
  SIMILAR (1)..(159): 1001254mologous to Cloning vector pZC320 SopB,accession number U26464,Smith-Waterman Score=269.
atgaagcgtgcgcctgttattccaaaacatacgctcaatactcaaccggttgaagatacttcgttatcgacaccagctgccccgatggtggattcgttaattgcgcgcgtaggagtaatggctcgcggtaatgccattactttgcctgtatgtggtcggggatgtgaagtttactcttgaagtgctccggggtgatagtgttgagaagacctctcgggtatggtcaggtaatgaacgtgaccaggagctgcttactgaggacgcactggatgatctcatcccttcttttctactgactggtcaacagacaccggcgttcggtcgaagagtatctggtgtcatagaaattgccgatgggagtcgccgtcgtaaagctgctgcacttaccgaaagtgattatcgtgttctggttggcgagctggatgatgagcagatggctgcattatccagattgggtaacgattatcgcccaacaagtgcttatgaacgtggtcagcgttatgcaagccgattgcagaatgaatttgctggaaatatttctgcgctggctgatgcggaaaatatttcactctgggaccacggtcccactcgtatcgtcggtctgattattagtctgggaccacgatcccactcgtgttgtcggtctgattatcggtctgggaccacggtcccacttgtattgtcgatccagactatcagcctctgagccatggggaggaagcagacacaaaggaagtggagcattgggtttaactgggattggagttttaccaaatgagcatgcaaagagagcagaccaccgcagaaccaaaggtgtgagccaaggagcgcttctgatgatcaaccatggatttgaagtggggaacgagggaaggagggacaaaccttctgggatagctactctggttatccccggttacaaacgaggacacttgcccgtggccacacagctagcgaggaatggcaaggaacgcagttcctcaccagcaacggaacaaagctggatggagaatgactttgacgagctgagagaagaaggcttcagacgatcaaattactctgagctatgggaggacattcaaaccaaaggcaaagaagttgaaaactttgaaaaaaatttagaagaatgtataactagaataaccaatacagagaagtgcttaaagaagctgatggagctgaaaaccaaggctcgagaactacgtgaagaatgcagaagcctcaggagccgatgcgatcaactggaagaaagtttttcgatatgcttcgtgatctgctcaagaacgttgatcttaaagggttcgagcctgatgtacgtattttgcttaccaaatacagcaatagtaatggctctcagtccccgtggatggaggagcaaattcgggatgcctggggaagcatggttctaaaaaatgttgtacgtgaaacggatgaagttggtaaagatacttcgttatcgacaccagctgccccgatggtggattcgttaattgcgcgcgtaggagtaatggctcgcggtaatgccattactttgcctgtatgtggtcgggatgtgaagtttactcttgaagtgctccggggtgatagtgttgagaagacctctcgggtttggtcagatgcagatgcctacactcaaatgcagaaactcccatataatttgcagcaaatgctgacaccagccctcgtgggcctttcttgtgccgatgaaaggaacccaatgctgggcttaaaacaagttggtacgggtttgcaaacaagttcatttggaacaaaccaaggcaaaaccaaactaaacataatctgggaccacggtcccactcgtatcgtcggtctgattattagtctgggaccacgatcccactcgtgttgtcggtctgattatcggtctgggaccaccgtcccacttgtattgtcgatcagactatcagggtgggactacgattccatcaatgcct

SEQ ID NO: 23623 - DNA, 795 bp, Homo sapiens
  SIMILAR (1)..(354): 1001254mologous to Cloning vector pZC320 SopB,accession number U26464,Smith-Waterman Score=584.
acaccggcgttcggtcgaagagtatctggtgtcatagaaattgccgatgggagtcgccgtcgtaaagctgctgcacttaccgaaagtgattatcgtgttctggttggcgagctggatgatgagcagatggctgcattatccagattgggtaacgattatcgcccaacaagtgcttatgaacgtggtcagcgttatgcaagccgattgcagaatgaatttgctggaaatatttctgcgctggctgatgcggaaaatatttcacgtaagattattacccgctgtatcaacaccgccaaattgcctaaatcagttgttgctcttttttctcaccccggtgaactatctgcccggtcagaccgacgatacgagtgggaccgtggtcccagtctgattatcagaccgacgatacgagtgggaccgtggtcccagactaataatcagaccgacgatacgagtgggaccgtggtcccagactcttggtggctttatgatgggggttctggatgagatagctttggaatcagcagactgcataagctgattgccctctccatatgggaaggccttgtctgattgactaaggcccctgtagaacggagtaacctcggtgtgcggttgtatgcctgctgtggattgctgctgtgtcctgcttatccacaacattttgcgcacgggtattgtggaccaaaatacctggttacccaggccgtgccggcacgttatccgggctgcatccgatgcaagtgtgtcgctgtcgacgagctcgcgagctcggacatgaggttgccctgttct

SEQ ID NO: 23624 - DNA, 5124 bp, Homo sapiens
  SIMILAR (2250)..(1576): 891254mologous to unidentified cloning vector 29kD protein essential for the replication of mini F plasmid,accession number AB015619,Smith-Waterman Score=1030.
ctaataatcagaccgacgatacgagtgggaccatggtccagtactaataatcagaccgacgatacgagtgggaccgtggtcagatctgattatcagaccgacgatacgagtgggaccgtggtcagatctaataatcagaccgacgatacgagtgggaccgtggtcagcactaataatcagaccgacgatacgagtgggaccgtggtccagtctgattatcagaccgacgatacaagtggaacagtgggcccagagagaatattcaggccagttatgctttctggctgcccgctttccagtcgggaaacctgtcgtgccagctgcattaatgaatcggccaacgcgcggggagaggcggtttgcgtattgggcgccagggtggtttttcttttcaccagtgagacgggcaacagctgattgcccttcaccgcctggccctgagagagttgcagcaagacggtccacgctggtttgccccagcaggcgaaaatcctgtttgatggtggttccgaaatcggcaaaatccgccccgccctgccactcatcgcagtagtgttgtaattcatgcagcattctgccgacatggaagccatcacaagcggcatgatgaacgtgtatcgccagcggcatcagcacgttgtcgccttgcgtataatatttgcccatggtgaaaacgggggcgaagaagttgtccatattggccacgtttaaatcaaaactggtgacactcacacagggattgtctgagacgaaacacatattctctataaaccctttagggatataggccaggttttcactgtaacacgccacatcttgcgaatatatgtgtagaaactgccggatatcgtcgtggtattcactccagagcgatgaaaacgtttcagtttgctcatggaaaacggtgtaacaagggtgaacactatcccatatcaccagctcactgtctttcattgccatacggaactccgtatgagcattcatcaggcgggcaagaatgtgaataaaggccggataaaacttgtgcttatttttctttacggtctttaaaaaggccgtaatatccagctgagcggtcgacgatacgagtgggaccgtggtcccagtctgattatcagaccgacgatacgagtgggaccgtggtcccagactaataatcagaccgacgatacgagtgggaccgtggtcccagacatcgatcgtcatttttgaaccgcgtgaatcagtgaacaagtaccatttgccgttcattttgaaaacattcgcgcgctcgatttcatcagttaccgtgtttgaagtgatcagcggcttcattacttttttcaatgtgtaatcattatttaactctatgataccgagggcgccgttcgctaactcagcatcgcgttttttagcgctctgctgaagcttctggctttctttacggaagaagttcgtgccgccgccgtagtacgctttgttaaataaagattcttcgccttggtatccgttttctgttcccgtgttggcttcgaatacaaggtatttatggcctttgtcttcaacgtagtgagggtctctcagcgtatggttgtcgccggatgtataattgccttcatcgataaactgctgaacgttgatatgagtcgtctggcggcctttctttttctcaatgtatgagaggcgcattggagttctgctgttgatctcattaacacagacttgcaggaagcggcggcggaagtcaggcatacgctggtaactttgaggcagctggtaacgctctatgatccagtcgattttcagagagacgatgcctgagccatccggcttacgatactgacacagggattcgtataaacgcatggcatacggattggtgatttcttttgtttcactaagccgaaactgcgtaaaccggttctgtaacccgataaagaagggaatgagatatgggttgatatgtacactgtaaagccctctggatggactgtgcgcacgtttgataaaccaaggaaaagattcatagcctttttcatcgccggcatcctcttcagggcgataaaaaaccacttccttccccgcgaaactcttcaatgcctgccgtatatccttactggcttccgcagaggtcaatccgaatatttcagcatatttagcaacatggatctcgcagataccgtcatgttcctgtagggtgccatcagatttttctagaggatccccgcggcggaagtcaggcatacgctggtaactttgaggcagctggtaacgctctatgatccagtcgattttcagagagacgatgcctgagccatccggcttacgatactgacacagggattcgtataaacgcatggcatacggattggtgatttcttttgtttcactaagccgaaactgcgtaaaccggttctgtaacccgataaagaagggaatgagatatgggttgatatgtacactgtaaagccctctggatggactgtgcgcacgtttgataaaccaaggaaaagattcatagcctttttcatcgccggcatcctcttcagggcgataaaaaaccacttccttccccgcgaaactcttcaatgcctgccgtatatccttactggcttccgcagaggtcaatccgaatatttcagcatatttagcaacatggatctcgcagataccgtcatgttcctgtagggtgccatcagattttctgatcccagcttttttctgctcatgaaggttagatgcctgctgcttaagtaattcctctttatctgtaaaggctttttgaagtgcatcacctgaccgggcagatagttcaccggggtgagaaaaaagagcaacaactgatttaggcaatttggcggtgttgatacagcgggtaataatcttacgtgaaatattttccgcatcagccagcgcagaaatatttccagcaaattcattctgcaatcggcttgcataacgctgaccacgttcataagcacttgttgggcgataatcgttacccaatctggataatgcagccatctgctcatcatccagctcgccaaccagaacacgataatcactttcggtaagtgcagcagctttacgacggcgactcccatcggcaatttctatgacaccagatactcttcgaccgaacgccggtgtcaggacctcatgcacatctaaggtgctgtgactgtgacatgcagctgcaaagaatgatttgcctctacactcacctgcagtccttggagagccgctgcatcggtccattctcaccctgctacgaagagctacctgataccgggtagttgcccgctttccagtcgggaaacctgtcgtgccagctgcattaatgaatcggccaacgcgcggggagaggcggtttgcgtattgggcgccagggtggtttttcttttcaccagtgagacgggcaacagctgattgcccttcaccgcctggccctgagagagttgcagcaagcggtccacgctggtttgccccagcaggcgaaaatcctgtttgatggtggttccgaaatcggcaaaatcccttataaatcaaaagaatagcccgagatagggttgagtgttgttccagtttggaacaagagtccagggtttcagggccgaaaacagactggagggtgccccacacagcgctgccggatgaggtgcaagttagtttctgtgtctggctgacaagtcggacatggcctgcggctgcctccacaagcaagaaaacctttacagctaattttcgtggaccgagaactggaaaaccccaagcttcaccacggaatgaacagacgtcggctgcaacatactctgtggtaaaagtgttaacatcacggcatcctccctggttttgcaccgacgatacgagtgggaccgtggtcccagtctgattatcagaccgacgatacgagtgggaccgtggtcccagactaataatcagaccgacgatacgagtgggaccgtggtcccagaccctttccaccggtgatcggggttgttttccataaaggtggcgtttacaaaacctcagtttctgttcatcttgctcaggatctggctctgaaggggctacgtgttttgctcgtggaaggtaacgacccccagggaacagcctcaatgtatcacggatgggtaccagatcttcatattcatgcagaagacactctcctgcctttctatcttggggaaaaggacgatgtcacttatgcaataaagcccacttgctggccggggcttgacattattccttcctgtctggctctgcaccgtattgaaactgagttaatgggcaaatttgatgaaggtaaactgcccaccgatccacacctgatgctccgcctggccattgaaactgttgctcatgactatgatgtcatagttattgacagcgcgcctaacctgggtatcggcacgattaatgtcactaataatcagaccgacgatacgagtgggaccatggtcccagactacataatcagaccgacgatacgagtgggaccgtggtcccagtctgattatcagaccgacgatacgagtgggaccgtggtcccagactaataatcagaccgacgatacgagtgggaccgtggtccccagactgacggcacgtatcgccgccaatccggtaccgatcagcatcgccaagaacagcgcactgtacaaccagtacgtgcggggtaccgagctcgaattcgtaatcatggtcatagctgtttccttccacgagcaaaacacgtagccccttcagagccagatcctgagcaagatgaacagaaactgaggttttgtaaacgccacctttatgggcagcaaccccgatcaccggtggaaatacgtcttcagcacgtcgcaatcgcgtaccaaacacatcacgcatatgattaatttgttcaattgtataaccaacacgttgctcaacccgtcctcgaatttccatatccgggtgcggtagtcgccctgctttctcggcatctctgatagcctgagaagaaaccccaactaaatccgctgcttcacctattctccagcgccgggttattttcctcgcttccgggctgtcatcattaaactgtgcaatggcgatagccttcgtcatttcatgaccagcgtttatgcactggttaagtgtttccatgagtttcat

SEQ ID NO: 23625 - DNA, 462 bp, Homo sapiens
  SIMILAR (283)..(206): 461254mologous to Homo sapiens Human secreted protein, SEQ ID NO: 4598,accession number G00517,Smith-Waterman Score=87.
ctaagtttggatcaagagcaccttgttagaattaggaatgctggatttggtgtgaacttggtgctgagttacatcatcagccataagcttccagccactggaaatcttcctatagacaacagtcctcacttcccagatgcagagcaagccagagaactttacatctcctgctccaaggctgggctgtattgggaccactagaataacaataacaacatagaatgtatgtacacaggcatgcatgcgtgcatgcgtgtgcacaggcacacacacattcacacactgtcctttagcacgagccacaagatgaatatatgtgctggctagggaattcatctgaagttgcttgccattccaccatcttccagctcctaaaatgctggtgttattgtgtccggaatttagtccttctggtgggttcttggtcttgctgacttcagggatgaagccgtggaccttcat

SEQ ID NO: 23626 - DNA, 756 bp, Homo sapiens
  SIMILAR (725)..(543): 351254mologous to Homo sapiens keratin associated protein 9.5,accession number AJ406949,Smith-Waterman Score=89.
atggttctcagtgaggatgaaggctcaccaggacaaggcaaatgcacatttgtgaccataagtaattcctatcgagcagaagctgctaggtggctactgtgctcttccaccttccaggatcacaaccactctcagtgccccatgcagccacctcagcccctggtcccatcgactgcccaagggctgtggagtgcgggtgcacgggccggactgtgggcagctccacctgtggcccctgtgcgagatccactaggtgaagccagctggactcctgagtctaagcaggctgtaggagagttccctgaggtagaaggaggaaaagaaaaggagactgggggaatgagctctgtgtatgagcatgttcaggggatgggagcaagagaggggtttacatctcctgggaaggcccagggagcccgaccctacgttctggcttccgttagagcaaaaaccctcaccggcacgcggcgagcgtccatgctggtggcgggtgcccagatcggcgcttggagcggggagagcggagcagccgcgcggtcagcggtcccacagcaggaggagcagcagcagcgcggctggcaggctgggcgcgccgacccgggcccggaggggcggggctcgggctgtctttcccgcgttgggacacaggtcctgcaagctgtgcacaggaagccgacttgtttacttgtggttttcaaagtagaagaaaagccgcagcagcttgatgaagacgtctatagtatagttaacctttaa

SEQ ID NO: 23627 - DNA, 1212 bp, Homo sapiens; identical to SEQ ID NO: 9451
  SIMILAR (739)..(1191): 851254mologous to Homo sapiens Similar to ribosomal protein S2,accession number BC001795,Smith-Waterman Score=666.

SEQ ID NO: 23628 - DNA, 1239 bp, Homo sapiens; identical to SEQ ID NO: 1089
  SIMILAR (319)..(885): 731254mologous to Homo sapiens Similar to ribosomal protein S2,accession number BC001795,Smith-Waterman Score=702.

SEQ ID NO: 23629 - DNA, 448 bp, Homo sapiens
  SIMILAR (270)..(446): 961254mologous to Homo sapiens putative p150,accession number U93569,Smith-Waterman Score=317.
actacttgaagaatgcagaagcctcaggagccgatgcgatcaactggaagaaagggtatcagcaatggaagatgaaatgaatgaaatgaagtgagaagggaagtttagagaaaaaagaataagccctaaaagagcgcctgaaagaagcgctaaacatggaaaggaacaaccagtaccagccgctgcaaaatcatgccaaaatgtaaacaccatcgagactaggaagaaactgcatcaactaacgagcaaaataaccagctaacatcataatgacaggatcaaattcacacataacaatattaactttaaatgtaaatggactaaatgctccaattaaaagacacagactggcaaattggataaagagtcaagacccatcagtgtgctgtattcaggaaacccatctcacatgcagagacacacataggctcaaaataaaaggatggag

SEQ ID NO: 23630 - DNA, 1151 bp, Homo sapiens
  SIMILAR (201)..(1148): 951254mologous to Homo sapiens p40,accession number U93564,Smith-Waterman Score=1553.
atgtctccagagtttcttccttctggcaggttcgtggtcttgctcacttcaagaatgatgctgcagaccttagtggtgagtgtttcaacactaaaaggtgttatgtccagagtttgttccttcagaagtatccagggtttcttccttctggcaggttcatggtcttgctcactttaagaatgaagctgcagaccttactgaaacgcagttcctcaccagcaatggaacaaagctggatggagaatgactttgacgagctgagagaagaaggctacagacgatcaaattactctgagctacgggaggacattcaaaccaaaggcaaagaagttgaaaactttgaaaaaaatttagaagaatgtgtaactagaataaccaatacagagaagtgcttaaaggagctgatagagctgaaaaccaaggctcgagaactacatgaagaatgcagaagcctcaggagccgatgcgatcaactggaagaaagggtatcagcaatggaagatgaaatgaatgatatgaagcgagaagggaaggttagagaaaaaagaataaaaagaaatgagcaaagcctccaagaaatatgggactatgtgaaaagaccaaatctacgtctgattggtgtacctgaaagtgatgcggagaatggaaccaagttggaaaacactctacaggatattatccaggagaacttccccaatctagcaaagcaggccaacgttcagattcaggaaatacagagaacgccacaaagatactcctcgagaagagcaactccaagacacataattctcagattcaccaaagttgaaatgaaggaaaaaatgttaagggcagccagagagaaaggttgggttaccctcaaagggaagcccatcagactaacagcggatctctcggcagaaaccctacaagccagaagagagtggggaccaatattcaacattcttaaagaaaagaattttcaacccagaatttcatatccagccaaactaagcttcataagtgaaggagaaataaaatactttacagacaagcaaatgctgagagattttgtcaccaccaggcctgccctaaaagagctcctgaaggaagcgctaaacatggaaaggaacaaccagtaccagccgctgcaaaatcatgccaaaatgtaa

SEQ ID NO: 23631 - DNA, 1524 bp, Homo sapiens; identical to SEQ ID NO: 2166
  SIMILAR (1)..(852): 881254mologous to Homo sapiens p40,accession number U93570,Smith-Waterman Score=1274.

SEQ ID NO: 23632 - DNA, 756 bp, Homo sapiens; identical to SEQ ID NO: 2152
  SIMILAR (642)..(701): 501254mologous to Homo sapiens p40,accession number U93570,Smith-Waterman Score=43.

SEQ ID NO: 23633 - DNA, 3354 bp, Homo sapiens; identical to SEQ ID NO: 2158
  SIMILAR (337)..(1851): 941254mologous to Homo sapiens putative p150,accession number U93563,Smith-Waterman Score=2435.

SEQ ID NO: 23634 - DNA, 1743 bp, Homo sapiens
  SIMILAR (115)..(1740): 811254mologous to Homo sapiens putative p150,accession number U93563,Smith-Waterman Score=2198.
atggggaaaaaacagagcagaaaaactggaaactctaaaaagcagagtgcctctcctcctccagaggaacgtagttcctcaccagcaacagaacaaagctggacggagaatgactttgacgagttgagagaagaaggcttcagacgatcaaactactctgagctacaggaggaaattcaaaccaaaggcaaagaagttgaaaactttgaaaaaaatttagacgaatgtataactagaataaccaatacagcgaagtgcttaaaggagctgatggagctgaaagccaaggctcgagaactacgtgaagaatgcagaagtctcaggagccaatgtgatcaactggaagaaagggtttcagtgatggaagatgaaatgaatgaaatgaagatcaacaaaattgatagaccgctagcaagacgaataaagaaaaaaagagagaagaatcaaatagatgcaataacaaatgataaaggggatagcaccaccaatcccacagaaatacaaactaccatcagagaatactacaaacacctctacgcaaataaactagaaaatctagaagaaatggataaattccttgacacatacactctcccaagactaaaccaggaagaagttgaatctctgaatagaccaataacagaatctgaaattgtggtaataatcaatagtttaccaaccaaaaagagtccaggacccgatggattcacagccgaattctaccagaggtacaaggaggaactggtaccattccttctgaaactattccaatcaatagaaaaagagggaatcctccctaactcattttatgaggccagcatcatcctgataccaaagactggcagagacacaaccaaaaaagagaattttagaccaatatccttgaagaacattgatgcaaaaatcctcaataaaatactggcaaaccgaatccagcagcacatcaaaaagcttatccaccatgatcaagtgggcttcatccctgggatgcaaggctggttcaatatatgcaaatcaataaatataatccagcatataaacagaaccaaagacaaaaaccacatgattatctcaatagatgcagaaaaggcctttgacaaaattcaacaacacttcatgctaaaaactctcaaaaaattaggtattgatgggacgtatctcaaagtaataagagctatctatgacaaacccacagcaaatatcatactgaatgggcaaaaactggaagcattccctttgaaaactggcacaagacagggatgccctctctcaccactcctattcaacatagtgttggaagtgctggccagggcaattaggcaggagaaagaaataaagggtattcaattaggaaaagaggaagtcaaattgtccctgtttgcagacgacatgattgtatatctagaaaaccccattgtctcagcccaaaatctccttaagctgataagcaacttcagcaaagtctcaggatacaaaatcaatgtacaaaaatcacaagcattcttatacaccaataacagacaaacagagagccaaatcatgagtgaactcccattcacaattgcttcaaagagaataaaatacttaggaatccaacttacaagggacatgaaggacctcttcaaggagaactacaaaccactgctcaatgaaataaaagaggatacaaacaaatggaagaacattccatgctcatgggtaggaagaatcaatatggtgaacatggcatactgcccaaggtaa

SEQ ID NO: 23635 - DNA, 1356 bp, Homo sapiens; identical to SEQ ID NO: 2089
  SIMILAR (403)..(1353): 951254mologous to Homo sapiens p40,accession number U93564,Smith-Waterman Score=1552.

SEQ ID NO: 23636 - DNA, 1935 bp, Homo sapiens; identical to SEQ ID NO: 2169
  SIMILAR (1)..(1011): 941254mologous to Homo sapiens p40,accession number U93564,Smith-Waterman Score=1622.

SEQ ID NO: 23637 - DNA, 1224 bp, Homo sapiens; identical to SEQ ID NO: 2168
  SIMILAR (1)..(774): 981254mologous to Homo sapiens p40,accession number U93564,Smith-Waterman Score=1293.

SEQ ID NO: 23638 - DNA, 1269 bp, Homo sapiens
  SIMILAR (667)..(1233): 911254mologous to Homo sapiens putative p150,accession number U93565,Smith-Waterman Score=909.
atggcgaaaaaacagaacagaaaaactggaaactctaaaaagcagagagcctctcctcctccaaaggaatgcagttcctcaccagcaacagaagaaaactggacggagaatgactttgacgagctgagagaagaaggcttcagacaatcaaattattctgagctatgggaggacattcaaaccaaaggcaaagaagttgaaaactttgaaaaaactttagaagaatgtataactagaataaccaatacagagaagtgcttaaaggagctgatggagctgaaaaccaaggctcaagaactacgtaaagaatgcagaagcctcaggagccgatgtgatcaacagcaagaaagggcatcagtactggaagtgttggaagttctggccagggcaattaggcaggaaaaggaaataaagggtattcaattaggaaaagaggaagtcaaattgtccctgtttgcagacgacatgactgtatatctagaaaaccccattgtctcagcccaaaatctccttaagctgataagcaacttcagcaaagtctcaggatacaaaatcaatgtacaaaaatcacaagcattcttatacaccaacaacagacaaacagagagccaaatcatgagtgaactcccattcacaattgcttcaaagagaataaaatacctaggaatccaacttacaagaaagctgaaactggatctcttccttacaccttatacaaaaatcaattcaagatggattaaagacttaaacattagacctaaaaccatcaaaaccctagaagaaaacctaggcgttaccattcaggacataggcatgggcaaggacttcatgtctaaaacaccaaaagcaatggcaacaaaggacaaaattgacaaattggatctaattaaactaaagagcttctgcacagcaaaagaatctaccgtcagagtgaacaggcaacctacaacatgggagaaaactttcacaacctactcatctgacaaagggctaatatccagaatctacaatgaactcaaacaaatttacaagaaaaaaacaaacaaccccatcaaaaagtgggtgaaggacatcaacagacacttctcaaaagaagacatttatgcagccaaaaaacacatgaaaaaatgtccatcatcactggccatcagagaaatgcaaatcaaaaccacaatgagataccatctcacaccagttacaatggcaatcattaaaaagtcaggaaacaacagggatatggatgaaattggaaatcatcattctcagtaa

SEQ ID NO: 23639 - DNA, 2091 bp, Homo sapiens
  SIMILAR (1441)..(2076): 871254mologous to Homo sapiens p40,accession number U93569,Smith-Waterman Score=915.
  misc_feature (1)...(2091): n = a,t,c or g
atgaaactcatggaaacacttaaccagtgcataaacgctggtcatgaaatgacgaaggctatcgccattgcacagtttaatgatgacagcccggaagcgaggaaaataacccggcgctggagaataggtgaagcagcggatttagttggggtttcttctcaggctatcagagatgccgagaaagcagggcgactaccgcacccggatatggaaattcgaggacgggttgagcaacgtgttggttatacaattgaacaaattaatcatatgcgtgatgtgtctggcacgcgattgcgacgtgctgaagacgtatttccaccggtgatcggggttgctgcccataaaggtggcgtttacaaaacctcagtttctgttcatcttgctcaggatctggctctgaaggggctacgtgtttgctcgtggaaggaacgaccgccagggaacagcctcaatgtatcacggatggaggggtctgttctttacgggggtggagggcaggggcacatcagggctcaatacgccttctacttccgggttgaagcagtctctcttcagcccaagtatcgggatattttattgctgattcttgttagtataatttacaacaatcctcattccaatcatctcaggaagagcgcctctcctcctccaaaggaacgcagttcctcaccagcaacggaacaaagctggatggagaatgactttgacgagctgagagaagaaggcttcggacgatcaaattactctgagctacgggaggacattcaaaccaaaggcaaagaagttgaaaactttgaaaaaaatttagaagaatgtataactagaataaccaatacagagaagtgcttaaaggagctgatggagctgaaaaccaaggctcgagaactacgtgaagaatgcagaagcctcaggagccgatgcgatcaactggaagaaagggtatcagcaatggaagatgaaatgaatgaaatgaagcgacaagggaagtttagagaaaaaagaataaaaagaaatgagcaaagcctccaagaaatatgggactatgtgaaaagaccaaatctacgtctgattggtgtacctgaaagtgatgcggagaatggaaccaagttggaaaacactctgcaggataggatccaggagaacttccccaatctagcaaggcaggccaacggattttgccgatttcggaaccaccatcaaacaggattttcgcctgctggggcaaaccagcgtggaccgcttgctgcaactctctcagggccaggcggtgaagggcaatcagctgttgcccgtctcactggtgaaaagaaaaaccaccctggcgcccaatacgcaaaccgcctctccccgcgcgttggccgattcattaatcgcagctggcacgacaggtttcccgactggaaagcgggcagtgagcgcaacgcaattaatgacgcagttctccccagcaagggaacaaagttggaggaagaatgctttgacgagctaagaaaagaagcttcgcacgatcaaattactcgagagaagtgcttaaaggagctgatggagctgaaaaccaaggctcgagaactacgtgaagaatgcagaagcctcaggagccgatgcgatcaactggaagaaagggtatcagcaatggaagatgaaatgaatgaaatgaagcgagaagggaagtttagagaaaaaagaataaaaagaaatgagcaaagcctccaagaaatatgggactatgtgaaaagaccaaatctacgtctgattggtgtacctgaaagtgatgcggagaatggaaccaagttggaaaacactctgcaggatattatccaggagaacttccccaatctagcaaggcaggccaacgttcagattcaggaaatacagagaacgtcacaaagatactcctcgagaagagcaactccaagacacataattgtcagattcaccaaagttgaaatgaaggaaaacatgttaagggcagccagagagaaaggttgggttaccctcaaagggaagcccatcagactaacagcggatctcgtggcagaaaccctacaagccagaagagagtgggggccaatattcgaggagccctcntag

SEQ ID NO: 23640 - DNA, 1710 bp, Homo sapiens; identical to SEQ ID NO: 11861
  SIMILAR (1318)..(1677): 741254mologous to Homo sapiens putative p150,accession number U93572,Smith-Waterman Score=432.

SEQ ID NO: 23641 - DNA, 1902 bp, Homo sapiens; identical to SEQ ID NO: 2162
  SIMILAR (1845)..(1901): 891254mologous to Homo sapiens putative p150,accession number U93565,Smith-Waterman Score=97.

SEQ ID NO: 23642 - DNA, 2784 bp, Homo sapiens; identical to SEQ ID NO: 6553
  SIMILAR (1267)..(2781): 871254mologous to Homo sapiens putative p150,accession number U93563,Smith-Waterman Score=2247.

SEQ ID NO: 23643 - DNA, 834 bp, Homo sapiens
  SIMILAR (1)..(726): 951254mologous to Homo sapiens p40,accession number U93564,Smith-Waterman Score=1178.
atggggaaaaaacagaacagaaaaactggaaattctaaaacgcagagtgcctctcctcctccaaaggaacgcagttcctcaccagcaacggaacaaagctggatggagaatgattttgacgagctgagagaagaaggcttcagacgatcaaattactctgagctacgggaggacattcaaaccaaaggcaaagaagttgaaaactttgaaaaaaatttagaagaatgtataactagaataaccaatacagagaagtgcttaaaggagctgatggagctgaaaaccaaggctcgagaactacgtgaagaatgcagaagcctcaggagccgatgcgatcaactggaagaaagggtatcagcaatggaagatgaaatgaatgaaatgaagcgagaagggaagtttagagacaaaagaataaaaagaaatgagcaaagcctccaagaaatatgggactatgtgaaaagaccaaatctacgtctgattggtgtacctgaaagtggtggggagaatggaatcaagttggaaaacactctgcaggatattatccaggagaacttccccaatctagcaaggcaggacaacgttcagattcaggaaatacagagaacaccacaaagatactcctcgagaagagcaactccaagacacataattgtcagactcaccaaagttgaaatgaaggaaaaaatgttaagggcagccagagagaaagacaagcaaatgctgaccgattttgtcaccaccaggcctgccctaaaagagctcctgaaggaagcactaaacatggaaaggaacaaccggtaccagccgctgcaaaatcatgccaaaatgtaa

SEQ ID NO: 23644 - DNA, 3267 bp, Homo sapiens; identical to SEQ ID NO: 23179
  SIMILAR (712)..(2112): 981254mologous to Homo sapiens putative p150,accession number U93572,Smith-Waterman Score=2372.

SEQ ID NO: 23645 - DNA, 885 bp, Homo sapiens
  SIMILAR (1)..(441): 811254mologous to Homo sapiens p40,accession number U93564,Smith-Waterman Score=607.
atggggaaaaaacagagcagaaaaactggaaactctgaaacgcagagcgcctctcctcctccaaaggaacggagttcctcaccagcaacggaacaaagctggacggagaatgactttgaagagctgagagaagaaggcttcagacgatcaaattactccgagctacgggaggacattcaaaccaaaggcaaagaagttgaaaactttgaaaaacatttagaagaatgtataattagaataaccaatacagagaagtgcttaaaggagctgatggatctgaaaaccaaggctcgagaactgtgtgaagtatgcagaagcctcaggagccgatgcgatcacctagaagaaagggtatcagcgatggaagatgagatgaatgaaatgaatgacggggagaatggaaccaagttgaaaaacactctgcaggatattatccaggagaactcccccaatctagcaaggcaggccaacattcagattcaggaaatacagagaacgccacaaagatactcctcgagaagagcaactccaagacacataattgtcagattcaccaaagttgaaatgaaggaaaaaatgttaagggcagccagagagaaagagaataaaatagctaggaatccaacttacaagggatgtgaaggacctcttcaaggagaactacaaaccactgctcaaggaaataaaagaggacacaaacaaatggaagaacattccatgctcgtggataggaagaatcaatatcatgaaaatggccatactgcccaaggttcaactttgcattactgtgatgaagcatatcctcatcacactttggatcccctgagtttgcaatccactgagagcatcaagataaactcgctgggaacagtaatggataattag

SEQ ID NO: 23646 - DNA, 1853 bp, Homo sapiens; identical to SEQ ID NO: 6903
  SIMILAR (337)..(1851): 941254mologous to Homo sapiens putative p150,accession number U93563,Smith-Waterman Score=2435.

SEQ ID NO: 23647 - DNA, 550 bp, Homo sapiens; identical to SEQ ID NO: 6725
  SIMILAR (1)..(348): 931254mologous to Homo sapiens p40,accession number U93564,Smith-Waterman Score=571.

SEQ ID NO: 23648 - DNA, 834 bp, Homo sapiens
  SIMILAR (121)..(831): 671254mologous to Homo sapiens p40,accession number U93569,Smith-Waterman Score=743.
atggggaaaaaacagaacagaaaaactggaaaccctaaaatgcagagtgcctctcctcctccaaaggaacgcagttcctcaccagcaactgaacaaagctggatggagaatgactttgacgagctgagagaagaaggcttcagacgatcagattactctgagctacgggaggacattcaaaccaaagggaaagaagttgaaaactttgaaaaaaatttagaagaatgtataactagaataaccaatacagagaagtgcttaaaggagctgatggagctgaaaaccaaggctcgagaactacgtgaagaatgcagaagcctcaggagccgatgtgatcaactggaagaaagggtatcagcaatggaagatgaaatgaatgaaacaacaaggcaggccaacattcagattcaggaaatacagagaacgccacaaagatactcctcgagaagagcaactccaagacacataattgtcagattcaccaaagttgaaatgaaggaaaaaatgttaagggcagccagagagaaaggtcgggttaccctcaaagggaagcccatcagactaacagcggatctctcggcagaaaccctacaagccagaagagagtgggggccaatattcaacattcttaaaggaaagaattttcaacccagaatttcatatccagccaaactaagcttcataagtgaaggagaaataaaatcctttagagacaagcaaatgctgagagattttgtcaccactaggcctgccctaaaagagctcctgaaggaagcgctaaacatggaaaggaacaaccagtaccagccgctgcaaaatcaagccaaaatgtaa

SEQ ID NO: 23649 - DNA, 3450 bp, Homo sapiens; identical to SEQ ID NO: 13940
  SIMILAR (382)..(1734): 941254mologous to Homo sapiens unknown,accession number AF148856,Smith-Waterman Score=2207.

SEQ ID NO: 23650 - DNA, 1425 bp, Homo sapiens; identical to SEQ ID NO: 6735
  SIMILAR (157)..(1230): 721254mologous to Homo sapiens putative p150,accession number U93569,Smith-Waterman Score=1259.

SEQ ID NO: 23651 - DNA, 1179 bp, Homo sapiens
  SIMILAR (1)..(843): 701254mologous to Homo sapiens p40,accession number U93568,Smith-Waterman Score=940.
atggggaaaaaacagagcagaaaaaccggaaactctaaaaagcagagcgccactcctcctccaaaggaacgcagttcctcaccagcaacggaacaaagctggacagagaatgactttgacgagttgagagaagaaggcttcagacgatcaaactactctgagctacaggaggaaactcaaaccaaaggcagagaagttgaaaactttgaaaaaaatttagacgagtgtataactagaacaaccaatacagagaagtgcttaaaggagctgatggagctgaaagccaaggcttgggaactacgtgaagaatgcagaagcctcaggagccgatgcaatcaactggaagaaagggtatcagtgatggaagatgaaatgaatgaaatgaagcgagaagggaagtttagagaaaaaagaataaaaagaaatgaacaaagcccccaagtaatacgggactatgtgaaaagaccaaatctacgtctgattggtgtacctgaaagtgacgggaagaatggaaccaagttggaaaacactctgcaggatattatccaggagaacttccccaatctagcaaggcaggccaacattcagattcaggaaataccgagaacgtcaaaagatactcttcagaagagcactccattattggccttattggtcgattcccaagttgaaggacggacatgtttagggccccaaaaaagcgggaacaaaaaaggaacaacagaaagattcaaaaagaagaaggaggacgaaccgcaccaactgggatctgagctgggcatttctgaaagaaacacagcagccccagtcagggactgtgggcgcagctttagcagacttaaacgttcctgcctgctggctctgaagacagcagcagatctcccagtacagcattcgagctatgctaagggacagactgcctcctcaagtaggtacctgacccatgtgcctcctcatggggagacacctcccagcagagatcgacagacatctcatacaggagagctccagctggcatctggtgagtgcccctctgggatgaagcttccagaagaaagaaaaggcagcaatcttttctgttctgcagcctccgctggtgatactcaggcaaacagggtctggagtggacctccagcaaactcgagcagacctacagcagaggggcctgaaggggcctga

SEQ ID NO: 23652 - DNA, 2778 bp, Homo sapiens
  SIMILAR (2137)..(2775): 961254mologous to Homo sapiens putative p150,accession number U93572,Smith-Waterman Score=1087.
atggggaaaaagcagaacagaaaaactggaaactctaaaaagcagagcacctctcctcctccaaaggaacgcagttcctcaccagcaatggaacaaagctggatggagaatgactttgttgagctgagagaagaaggcttcagacgatcaaattactctgagctacaggaggacattcaaaccaaaggcaaagaagttgaaaactttgaaaaaaatttagaagaatgtatgactagaataaccaatacagagaagtgcttaaaggagctgatggagctgaaaaccaaggctcgagaactacatgaagaatgtagaagcctcaggagccgatgcgatcaactggaagaaagggtatcagcaatggaagatgaaatgaatgaaatgaagcgagaagggaagtttagagaaaaaagaataaaaagaaatgagcaaagcctccaagaaatatgggactatgtgaaaagaccaaatctacatctgatgggtgtacctgaaagtgatggggagaatggaagcaagttggaaaacacgctgcaggatattatccaggagaacttccccaatctagcaagtactctctcagaccacagtggaataaaactggaaatcaactccaaaaggaaccctcaaaaccatgcgaatacatggaaattaagtaacctgctcctgaatgcacactgggtcaacaatgaaatcaagatgaaagttaaaaatttctttgaattgaacgataatagtgacacaatctatcaaaatttctcggatacagcaaaagcggtgctagaagaaaagttcctaggactaaatgcctacaccaaaaaacctgaaagagcacagatagagaaagagagaatcctccctaaatcattctatgaagccagtatcaccctaatacccaaaccacgcaaggacataacaaaaaaagaaaactacaaaccaatatccctgatgaacatagaggcaaaaatcctcaacaaaataatagttaaccaaatccaacagcatatcaaaaagataatccaccatgataaactgagtttcataccagggatgcaggggtggtttaatatatgtaagccagtaaatgtgattctccacataaacataattaaaaacaaaaatcatatgatcatctcaatagacacagaaaaagcatttggcaaaatgcagcatccctttatgattaaaaccttcagcaaaattggcacagaagggacataccttaaggtaatagaagccatctatgatagacccacagccaacattatactgaatggggaaaacttgaaagcactccccctgagaactagaccaagacaaggatgcccactttcaccacttttattcaacttagtactggcagtcctagccagagcaatcagacaagagaaagaaataaagggcatccaagtcagtaaagaggaagttaaactgtctctgtttgctgatgatatgattgtatacctagaaaaccctaaagcctcatccaaaaagcttccagaactaaacaaagacacaatataccagaatctctgggatgcattcaaagcagtatgtagagggaaatttacagcactaaatgcccacaagagaaagcaggaaagatccaaaattgacaccctaacatcacaattaaaagaactagaaaagcaagagcaaacacattcaaaagctatcagaagacaagaaataactaaaatcagagcagaactgaaggaaatagagacacaaaaaacccttcaaaaaattaatgaatccaggagctggttttttgaaaggatcaacaaaattgatagaccgctagcaagactaataaagaagaaaagagagaagaatcaaatagacacaataaaaaatgataaaggggatatcaccaccaatcccacagaaatacaaaccaccatcagagaatactacaaacacctctacgcaaataaactagaaaatctagaagaaatggatacattcctggacacatacactctcccaagactaaaccaggaagaagttgaatctctgaatagaccaataacaggagctgaaattgtggcaataatcaatagcttaccaaccaaaaagagtccaggaccagatggatccatagctgaattctaccagaggtacaaggaggaactgctgataagcaacttcagcaaagtctcagcatacaaaatcaatgtacaaaaatcacaagcattcttatacaccaacaacagacaaacagagagccaaatcatgagtgaactcccattcacaattgcttcaaagagaataaaatacctaggaatccaacttacaagggatgtgaaggacttcttccaggagaattacaaaccactgctcaaggaaataaaagaggatacaaacaaacggaagaacattccatgctcatgggtaggaagaatcaatatcgtgaaaatggccatactgcccaaggtaatttttagattcaatgccatccccatcaagctaccaatgcctttcttcacagaattggaaaaaactactttaaagttcatatggaaccaaaaaagagcccgcatcgccaagtcaatcctaagccaaaagaacaaagctggaggcatcacactacctgacttcaaactatactacaaggctacagtaaccaaaacagcatggtactggtaccaaaacagggatatagatcaatggaacagaacagagccctcagaaataatgccgcatatctacaactatctgatctttgacaaacctgagaaaaacaagcaatggggaaaggattccctttttaattaa

SEQ ID NO: 23653 - DNA, 2715 bp, Homo sapiens; identical to SEQ ID NO: 15426
  SIMILAR (1702)..(2712): 941254mologous to Homo sapiens p40,accession number U93564,Smith-Waterman Score=1642.

SEQ ID NO: 23654 - DNA, 1593 bp, Homo sapiens; identical to SEQ ID NO: 7846
  SIMILAR (1533)..(1592): 761254mologous to Homo sapiens putative p150,accession number U93574,Smith-Waterman Score=93.

SEQ ID NO: 23655 - DNA, 547 bp, Homo sapiens
  SIMILAR (1)..(393): 931254mologous to Homo sapiens p40,accession number U93564,Smith-Waterman Score=629.
atggggaaaaaacagaacagaaaaactggaaactctaaaaagcagagcgcctctcctcctccaaaggaatgcagttcctcaccagcaacggaacaaagctggacggagaacgactttgacgagctgagagaagaaggcttcagacgatcaaattactctgagctacgggaggacattcaaaccaaaggcaaagaagttgaaaactttgaaaaaaatttagaagaatgtataactagaataaccaatacagagaagtgcttaaaggagctgatggagctgaaaaccaaggctcgagaactacgcgaagaatgcagaagcctcagtagccgatgcaatcaactggaagaaagggtaccagcgatggaagatgaaatgaatgaaatgaaagaggatgaaatagatatgatgatcgcagacaggaaaggaggaaattatgataaaaagttggagattctgttgccgacatctcatcagggtagtcagaggctggggtccgtccaaatacctttggataacaatggtggtaaccctggccggaaatcctcag

SEQ ID NO: 23656 - DNA, 710 bp, Homo sapiens
  SIMILAR (1)..(357): 941254mologous to Homo sapiens p40,accession number U93566,Smith-Waterman Score=581.
  misc_feature (1)...(710): n = a,t,c or g
atggggaaaaaacagaacagaaaaactggaaactctaaaaagcagagcgcctctcctcctccaaaggaacacacttcctcaccagcaacggaacaaagctggatggagaatgactttgatgagctgagagaagaaggcttcagacgatcaaattactctgagctatgggaggacattcaaaccaaaggcaaagaagttgaaaactttgaaaaaaatttagaagaatgtataactagaataaccaatacagagaagtgcttaaaggagctgatggagctganaaccaaggctcgagaactacgtgaagaatacagaagcctcaggagccgatgcgatcaactggaagaaagaaaatcccctggagggattgcagagattagtgccaccatcaaggacttgaaagatgcaggagtggtgattcccaccacatccctattcaactctcccatttggccagtgcagaagacagacagatcttggagaaagacagtggattattgtaagcttaaccaagtggtggctccaattgtcgctgctgtaccagatgtggtttcattgcttgagcaaattaacacatctcctggtacctggtatgcagccattgacttgacaaatgcctttttctccattcctgtccataaggcccatcagaagcaatttgccttcagctggcaaggccagcaatatacttttactgtcctacctcagag

SEQ ID NO: 23657 - DNA, 895 bp, Homo sapiens; identical to SEQ ID NO: 13746
  SIMILAR (1)..(741): 881254mologous to Homo sapiens p40,accession number U93570,Smith-Waterman Score=1121.

SEQ ID NO: 23658 - DNA, 1941 bp, Homo sapiens; identical to SEQ ID NO: 2182
  SIMILAR (988)..(1938): 961254mologous to Homo sapiens p40,accession number U93569,Smith-Waterman Score=1553.

SEQ ID NO: 23659 - DNA, 1416 bp, Homo sapiens; identical to SEQ ID NO: 15139
  SIMILAR (463)..(1413): 951254mologous to Homo sapiens p40,accession number U93564,Smith-Waterman Score=1552.

SEQ ID NO: 23660 - DNA, 3403 bp, Homo sapiens
  SIMILAR (339)..(416): 461254mologous to Homo sapiens C-terminal binding protein 2,accession number AF016507,Smith-Waterman Score=56.
cttcagagctaggaattcagatatcttgctacagagagtgaatcccaggtgtgtggggcttcagcctttgttagatggatcctggacggagcacagacaagcagtttctgatgccaaaggcaataagaaaagggaaagaatctttgatggaggttgtttggtatgtgagttggagggacatgccaagtgtcaggaggaagtagaagtggttgagtatgacaaaattgacccaactggtatgatcaacttcccattttcttcttttgatcaagatctttctctgaaagcatcactgatcaatcatcttgaatttggcttaattgttcctcagtgctgggctgatcgggcccttggaactcatacccctggggtccaagcagtccacgcaggaaatccacgagaaggttctaacgaagccatgggtgccatgatgtaccacaccatcatcctcaccagggaggacctagaaaagtttaaggccccgagagtgatcgtgcagataggcagtggctacgataacgtggacatcaaggctgccagcgagctcggaattgctgtgtgcaatatcccgtctgcagccgtggaagagacaccggactctaccatctgccacatcctcaatctgtaccagaggaacacatggctgtaccaagcactgcgggggcaggcggttgcagttcgagccaaggcctttggattcagcgtcatattttatgacccctacttgcaggatgggatcgagcgatccctgggcgtgcagagggatttgctgtatcagagcgactgcgtctccttgcactgcaatctcaacgaacataaccaccacctcatcaatgactttaccataaagcagatgaggcagggagcattccttgtgaacgcaccccatggtggcctggtggacaagaaagccttagcacaagctctcaaggagggcaggatacgaggggcagccctctatgtgcgtgagtcggagccctttagctttgctcagggtccgttgaaagatgcaccgaatcttatctgcactcctcacactgcctggtacagcaagcaggcgtcactggagatgagggaggcagctgctactgagatccgccgagccatcacaggtcacatcccagaaagcttaagaaactgtgtgaacaagaattctctgtcacatcagcgccttggagaaaatgcagaagtctccatggacgtttccctggcttaccgtgatgacgcgtttgctgagtggactgaaatggcccatgaaagagaatcactgtccggggcaggtgtttctgggccttcccgggttttccgcctattgccactctgcgcggagagaagcagatatcgaggaacttgtcagcatgagaaagttcatggggagacggggaagaagagccatcatgacatgaaggagcagtcagctcagcccctatttggcttatactatgaaaactggcaaaaagaaaaagcccttttccccacctctggtggaggaacccagcacagatggagccttgatgagcacagagcgaattctgccccgacggtgccctgcccttgcactaacactgctgtgggagtgaaactagtaaaaacaccgagtggtgtttttactagaaatggaaaggaagaaggctgcctagctcacaagccttctagcaaaacagtcagtcaaaccaaagttgggcagggggtagtttttatgggatggtgcatacaagaacatcagagcaaagacatacagattccacatcccatagatgcctgtgaaaaaggcactgttcacttggactgtgacgccgccccatttccaatggccttccgttacctgcggagaaaggatggtgatattcaattgaaacagagaagaaacagaagaaacataacaccaataaaggaaccaaccaacatgaaaaccaagtctcttctacatgtgggagacgtgaagggccatcccctcgatgttgtagatgccaagcgacctgcgacctctgcgttggaccatgccctcacgctgatatcttaccacgtattgcgcaagcggaatctatgcctgtacccacactccctgcgcccccgcaccccgctcctgtgcgcaagtcggaatataaaaccgcggaggagtgagctcttgggtgtccagttggttccgcggcagtctctccgagcagcgcatttgtcttctaggctgcttggttcgtgcctccgagaaagacactatggtttaattaatttctggaatggattatcaacttcaaagatatcatttagttataagaaatttgagactgataggaactcgagatattttcatgatactagtacagatagcaatgctaaaataaatgttgaaattgtagcccacaatgtgatggtattaggaggtgtggcctttgagaaacaattagatcataaggatagagccctcatgaatgggattagcacccttataagaaacagcagagagatgatctctctgctccctgttgcgtgggaacacaaagagaatatggcagtatacaaaccagaaagagtgccctcaccagatataggatttgctgctgccttcatcttggccttaacagcctccataacccatgctcagagcaaaggtgctccccatgcctcttctggggctgcactgactgcaggggtctcctgctgccagctaagtgtgggagaacttgtgcacgtatctcccctccgaatcccaacgatgggtaacgccagctttggctccaaggaacagaagctgctgaagcggttgcggcttctgcccgccctgcttatcctccgcgccttcaagccccacaggaagatcagagattaccgcgtcgtggtagtcggcaccgctggtgtggggaaaagtacgctgctgcacaagtgggcgagcggcaacttccgtcatgagtacctgccgaccattgaaaatacctactgccagttgctgggctgcagccacggtgtgctttccctgcacatcaccgacagcaagagtggcgacggcaaccgcgctctgcagcgccacgttatagcccggggccacgccttcgtcctggtctactcagtcaccaagaaggaaaccctggaagagctgaaggccttctatgagctgatctgcaagatcaaaggtaacaacctgcataagttccccatcgtgctggtgggcaataaaagtgatgacacccaccgggaggtggccctgaatgatggtgccacctgtgcgatggagtggaattgcgccttcatggagatttcagccaagaccgatgtgaatgtgcaggagctgttccacatgctgctgaattacaagaaaaagcccaccaccggcctccaggagcccgagaagaaatcccagatgcccaacaccactgagaagctgcttgacaagtgcataatcatgtga

SEQ ID NO: 23661 - DNA, 3573 bp, Homo sapiens; identical to SEQ ID NO: 5633
  SIMILAR (1501)..(3390): 961254mologous to Homo sapiens putative p150,accession number U93572,Smith-Waterman Score=3179.

SEQ ID NO: 23662 - DNA, 1189 bp, Homo sapiens
  SIMILAR (37)..(114): 341254mologous to Rattus norvegicus ribeye,accession number AF222712,Smith-Waterman Score=42.
  misc_feature (1)...(1189): n = a,t,c or g
atggggaaaaaacagaacagaaaaactggaaactctaaaaagcagagcacctctcctcctccaaaagaatgcagttcctcaccagcaacggaacaaagctggacggagaacgactatgacgagctgagagaagaaggcttcagacaaccaaattactctgagctacgggaggatagtcaaaccaaaggcaaagaaattgaaaactttgaaaaaaatttagaagaatgtataactagaataaccaatacagagaagtgcttaaaggagccgatggagctgaaaaccaaggctcgagaactacgtgaagaatgcagaagcctcaggagccgatgtgatcaactggaagaaagggtatcagcaatggaagatgaaatgaatgaaatgaaagcagatgggcgaggtggcctagggagcggcccgcatccgtggggagacgctgggcctcaacggctttggttgcacggggcaggcattgcagttcgagccaaagcctttggattcagcgtcatattttatgacccctacttgcaggatgtgtgtcgagcggtccctgggcgtgcagagggtctacaccctgcaggatttgctgtatcagagcgactgcgtccccttgcactgcaatgtcaacgaacataacaaccacctcatcaatgactttaccataaagcagatgaggcagggagcattccttncacccaagcccttcaaggagggcacgatacgaggggcagccctcgacatgcatgagtcggagcccttcagctttgctcagggtccgttgaaaaatgccccgaatctcatctgcactcctcacactgcctggtacagcgagcaggcgtcactggagatgagggaggcagctgccacagagatccgccgagccatcacaggttgcatcccagaaagcttaagaaattgtgtgaacaaggaattctttgtcacatcagcgccttggtcagtaatagaccagcaagcaattcatcctgagctcaatggtgccacatacagatatccgccaggcgtcgtgggtgtggctccaggaggactttctgccgccatggaagggatcatccctggaggcatcccagtgactcacaacctcccgacagtggcacatccttcccaagcgccctctcccaaccagcccacaaaacacgtggacaatcgagagcaccccaacgagcaatag

SEQ ID NO: 23663 - DNA, 4554 bp, Homo sapiens
  SIMILAR (1342)..(4140): 981254mologous to Homo sapiens putative p150,accession number U93563,Smith-Waterman Score=4809.
atgccagtctggacaccggcgttcggtcgaagagtatctggtgtcatagaaattgccgatgggagtcgccgtcgtaaagctgctgcacttaccgaaagtgattatcgtgttctggttggcgagctggatgatgagcagatggctgcattatccagattgggtaacgattatcgcccaacaagtgcttatgaacgtggtcagcgttatgcaagccgattgcagaatgaatttgctggaaatatttctgcgctggctgatgcggaaaatatttcacgtaagattattacccgctgtatcaacaccgccaaattgcctaaatcagttgttgctcttttttctcaccccggtgaactatctgcccggtcaggtgatgcacttcaaaaagcctttacagataaagaggaattacttaagcagcaggcatctaaccttcatgagcagaaaaaagctggggtgatatttgaagctgaagaagttatcactcttttaacttctgtgcttaaaacgtcatctgcatcaagaactagtttaagctcacgacatcagtttgctcctggagcgacagtattgtataagggcgataaaatggtgcttaacctggacaggccaaaagtagataaaaccacaaagatggggaaaaaacagagaagaaaaactggaaactctaaaaagcagagcgcctctcctcctccaaatgaatgcagctcctcaccagcaacggaacaaagctggatggagaatgactttgacgagctgagagaagaaggcttcagacgatcaaattactccgagctatgggaggacattcaaaacaaaggcaaacaagttgaaaactttggaaaaaatttagaagaatgtataactagaataaccaatacagagaagtgcttaaaggagctgttggagctgaaaaccaaggctcgagaactacatgaagaatgcagaagcctcaggagccgatgtgatcaactgatagaaagggtatcagtgatggaagacccactgaatgaaatgaagcaagacgggaagtttagagaaaaaagaataaaaagaaatgagcaaagcctccaagaaatatgggactatgtgaaaagaccaaatctacgtctgattggtgtacctgaaagtgatgtggagaatggaaccaagttggaaaacactctgcaggatattatccaggagaacttccccaatctagcaaggcaggccaacgttcagattcaggaaatacagagaatgccacaaagatactcctcgagaagagcaactccaagacacataattgtcagattcaccaaagttgaaatgaaggaaaaaatgttaagggcagccagacagaaagcaccacaccacacctattccaaaattgaccacatagttggaagtaaagctctcctcagcaaatgtaaaagaacagaaattataacaaactatctctcagaccacagtgcaatcaaactagaactcaggattaagaatctcactcaaagccgctcaactacatggaaactgaacaacctgctcctgaatgactactgggtacataacgaaatgaaggcagaaataaagatgttctttgaaaccaacgagaacaaagacaccacataccagaatctctgggacacattcaaagcagtgtgtagagggaaatttatagcactaaatgcctacaagagaaagcaggaaacatccaaaattgacaccataacatcacaattaaaagaactagaaaagcaagagcaaacacattcaaaagctagcagaaggcaagaaataactaaaatcagagcagaactgaaggaaatagagacacaaaaaacccttcaaaaaatcaatgaatccaggagctggttttttgaaaggatcaacaaaattgatagaccgctagcaagactaataaagaaaaaaagagagaagaatcaaatagacacaataaaaaatgataaaggggatatcaccaccgatcccacagaaatacaaactaccatcagagaatactacaaacacctctacgcaaataaactagaaaatctagaagaaatggatacattcctcgacacatacactctcccaagactaaaccaggaagaagttgaatctctgaatagaccaataacaggctctgaaattgtggcaataatcaatagtttaccaaccaaaaagagtccaggaccagatggattcacagccgaattctaccagaggtacaaggaggaactggtaccattccttctgcaactattccaatcaatagaaaaagagggaatcctccctaactcattttatgaggccagcatcattctgataccaaagccgggcagagacacaaccaaaaaagagaattttagaccaatatccttgatgaacattgatgcaaaaatcctcaataaaatactggcaaaccgaatccagcagcacatcaaaaagcttatccaccatgatcaagtgggcttcatccctgggacgcaaggctggttcaatatacgcaaatcaataaatgtaatccagcatataaacagagccaaagacaaaaaccacatgattatctcaatagatgcagaaaaagcctttgacaaaattcaacaacccttcatgctaaaaactctcaataaattaggtattgatgggacatatttcaaaataataagagctatctatgacaaacccacagccaatatcatactgaatgggcaaaaactggaagcattccctttgaaaactggcacaagacagggatgccctctctcaccgctcctattcaacatagtgttggaagttctggccagggcaatcaggcaggagaaggaaataaagggtattcaattaggaaaagaggaagtcaaattgtccctgtttgcagacgacatgattgtttatctagaaaaccccatcgtctcagcccaaaatctccttaagctgataagcaacttcagcaaagtctcaggatacaaaatcaatgtacaaaaatcacaagcattcttatacaccaataacagacaaacagagagccaaatcatgagtgaactcccattcacaattgcttcaaagagaataaaatacctaggaatccaacttacaagggatgtgaaggacctcttcaaggagaactacaaaccactgctcaaggaaataaaagaggacacaaacaaatggaagaacattccatgctcatgggtaggaagaatcaatatcgtgaaaatggccatactgcccaaggtaatttacagattcaatgccatccccatcaagctaccaatgactttcttcacagaattggaaaaaactactttaaagttcatatggaaccaaaaaagagcctgcatctccaagtcaatcctaagccaaaagaacaaagctggaggcatcacactacctgacttcaaactatactacaaggctacagtaaccaaaacagcatggtactggtaccaaaacagagatatagatcaatggaacagaacagagccctcagaaataatgccacatatctacaactatctgatctttgacaaacctgagaaaaacaagcaatggggaaaggattccctatttaataaatggtgctgggaaaactggctagccatatgtagaaagctgaaactggatcccttccttacaccttatacaaaaatcaattcaagatggattaaagatttaaacgttagacctaaaaccataaaaaccctagaagaaaacctaggcattaccattcaggacataggcgtgggcaaggacttcatgtccaaaacaccaaaagcaatggcaacaaaagccaaaattgacaaatgggatctaattaaactaaagagcttctgcacagcaaaagaaactaccatcagagtgaacaggcaacctacaacatgggagaaaattttcacaacctactcatctgacaaagggctaatatccagaatctacaatgaactcaaacaaatttacaagaaaaaaacaaacaaccccatcaaaaagtgggcgaaggacatgaacagacacttctcaaaagaagacatttatgcagccaaaaaacacatgaagaaatgctcatcatcactggccatcagagaaatgcaaatcaaaaccactatgagatatcatctcgcaccagttagaatggcaatcattaaaaagtcaggaaacaacagcaaaatggtggaagcagatgggcctggcaatcttttcactggtgtcctccatttagaaaccaatgaaaagtcgcttaaagcagtatttgggaaatatggtcccatattggaagacaactttttggatggaaaagcaatgaaagtagaacaagttaacaaaccgtcttttcaaagtggtggtaatgtggagatcaccatcttcttggagaaacaggagcccttcaggaagtctgagacaggaaaaaaattttttaagttgttcctgctgacattagcaaacttttttaaatttagtgaccatgatgactatagtgggggccttggtagagatcattctgaacatccaaatgggagttcttacagagatgcatatcagagttatgggaccttctatggtgcaccacctgcatga

SEQ ID NO: 23664 - DNA, 4723 bp, Homo sapiens
  SIMILAR (1760)..(4567): 981254mologous to Homo sapiens putative p150,accession number U93563,Smith-Waterman Score=4773.
atgcacccttcccagaggacaccctatcagtctcgtagtcctgccacaatctttgctactgtgtctaccttcaagtcccacaaatctaacttggaaacaaagcacccccagcaagtccctctcagctctctgggcttggcagccaacataagttcagaggacatcgagtccgaagccgaagataatggcaaatgggaatctgtcgatcgaacaagcttctttcctgcactgacttcattccagcagtccatgatccataagaaaatcatgacagtcttcaagtcagtggagccagaggatggcttgggcaggcccacactcgccttccatgaggaccgatgccagctcagtatccagaactcactggatgcaggaggaggctgtccctccatggcagcacctccagcagaagtacatgagcttgcctctggcctcatctcagcagcagccctgctgctgtctccagcggccagtggaagagtcagcaaacaccagcacattcccactgggtttcctgaccctccaaaagcccttcacaaaggaaaactaacaaccagaaaggacatctacaccgaaaacccatctgtacatcaccatcatcaaagaccaaaagtagataaaaccacaaagatggggaaaaaacagaacagaaaaactggaaactctaaaacgcagagcgcctctcctcctccaaaggaatgcagttcctcaccagcaacagaacaaagctggatggagaatgattttgacgagctgagagaagaaggcttcagacgatcaaattactctgagctacgggaggacattcaaaccaaaggcaaagaagttgaaaactttgaaaaaaatttagaagaatgtataactagaataaccaatacagagaagtgcttaaaggagctgatggagctgaaaaccaaggctcgagaactacgtgaagaatgcagaagcctcaggagccaatgcgatcaactggaagaaagggtatcagcaatggaagatgaaatgaatgaaatgaagcgagaagggaagtttagagaaaaaaagtataaaaagaaatgagcaaagcctccaagaaatatgggactatgtgaaaagaccaaatctacgtctgactggtgtacctgaaagtgacggggagaatggaaccaagttggaaaacactctgcaggatattatccaggagaacttccccaatctagcaaggcaggtcaatgttcagattcaggaaatacagagaacgccacaaagatactcctcgagaagagcaactccaagacacataattgtcagattcaccaaagttgaagtgaaggaaaaaatgttaagggcagccagagagaaaggtcgggttaccctcaaagggaagcccatcagactaacagcggatctctcggcagaaaccctacaagccagaagagagtgggggccaatattcaacattcttaaagaaaagaattttcaacccagaatttcatatccagccaaactaagcttcataagtgaaggagaaataaaacactttacagacaagcaaatgctgagagattttgtcaccaccaggcctgccctaaaagagctcctgaaggaagtgctaaacatggaaaggaacaaccagtaccagccgctgcaaaatcatgccaaaatacagatcaacgagacagaaagtcaacaaggatacccaggaattgaactcagctctgcaccaagcggacctaatagacatctacagaactctccacaccaaatcaacagaatatactttttttcagcaccacaccacacctattccaaaattgaccacatagttggaagtaaagctctcctcagcaaatgtaaaagaacagaaattataacaaactatctctcagaccacagtgcaatcaaactagaactcaggattaagaatctcaatcaaagccgctcaactacatggaaactgaacaacctgctcctgaatgactactgggtacataacgaaatgaaggcagaaataaagatgttctttgaaaccaacgagaacaaagacacaacataccagaatctctgggacgcattcaaagcagtgtgtagagggaaatttatagcactaaatgcccacaagagaaagcaggaaagatccaaaattgacaccctaacatcacaattaaaagaactagaaaagcaagagcaaacacattcaaaagctagcagaaggcaagaaataactaaaatcagagcagaactgaaggaaatagagacacaaaaaacccttcaaaaaatcaatgaatccaggagctggttttttgaaaggatcaacaaaattgatagaccgctagcaagactaataaagaaaaaaagagaggagaatcaaatagacacaataaaaaatgataaaggggatatcaccaccgatcccacagaaatacaaactaccatcagagaatactacaaacacctctatgcaaataaactagaaaatctagaagaaatggataaattccttgacacatacactctcccaagactaaaccaggaagaagttgaatctctgaatagaccaataacaggagctgaaattgtggcaataatcaatagtttaccaaccaaaaagagtccaggaccagatggattcacagctgaattctaccagaggtacaaggaggaactggtaccattccttctgaaactattccaatcaatagaaaaagagggaatcctccctaactcattttatgaggccagcatcattctgataccaaagccgggcagagacacaaccaaaaaagagaattttagaccaatatccttgatgaacattgatgcaaaaatcctcaataaaatactggcaaaccgaatccagcagcacatcaaaaagcttatccaccatgatcaagtgggcttcatccctgggatgcaaggctggttcaatatacgcaaatcaataaatgtaatccagcatataaacagagccaaagacaaaaaccacatgattatctcaatagatgcagaaaaagcctttgacaaaattcaacaacccttcatgctaaaaactctcaataaattaggtattgatgggacgtatttcaaaataataagagctatctatgacaaacccacagccaatatcatactgaatgggaaaaaactggaagcattccctttgaaaactggcacaagacagggatgccctctctcactgctcctattcaacatagtgttggaagttctggccagggcaatcaggcaggagaaggaaataaagggtattcagttaggaaaagaggaagtcaaattgtccctgtttgcagacgacatgattgtttatctagaaaaccccatcgtctcagcccaaaatctccttaagctgataagcaacttcagcaaagtctcaggatacaaaatcaatgtacaaaaatcacaagcattcttatacaccaacaacagacaaacagagagccaaatcatgagtgaactcccattcacaattgcttcaaagagaataaaatacctaggaatccaacttacaagggatgtgaaggacctcttcaaggagaactacaaaccactgctcaaggaaataaaagaggatacaaacaaatggaagaacattccatgctcatgggtaggaagaatcaatatcgtgaaaatggccatactgcccaaggtaatttacagattcaatgccatccccatcaagctaccaatgactttcttcacagaattggaaaaaactactttaaagttcatatggaaccaaaaaagagcccgcatcgccaagtcaatcctaagccaaaagaacaaagctggaggcatcacactacctgacttcaaactatactacaaggctacagtaaccaaaacagcatggtactggtaccaaaacagagatatagatcaatggaacagaatagagccctcagaaataacgccgcatacctacaactatctgatctttgacaaacctgagaaaaacaagcaatggggaaaggattccctatttaataaatggtgctgggaaaactggctagccatatgtagaaaactgaaactggatcccttccttacaccttatacaaaaatcaattcaagatggattaaagatttaaacgttagacctaaaaccataaaaaccctagaagaaaacctaggcattaccattcaggacataggcgtgggcaaggacttcatgtccaaaacaccaaaagcaatggcaacaaaagccaaaattggcaaatggtacctaattaaactaaagagcttctgcacagcaaaagaaactaccatcagagtgaacaggcaacctacaacatgggagaaaattttcgcaacgtactcatctgacaaagggctaatatccagaatctacaatgaactcaaacaaatttacaagaaaaaaacaaacaaccccatcaaaaagtgggcgaaggacatgaacagacacttctcaaaagaagacatttatgcagccaaaaaatacgtgaaaaaatgctcatcatcactggccatcagagaaatgcaaatcaaaaccactatgagataccatctcacaccagttagaatggcaatcattaaaaagtcaggaaacaacagtgatctctaccttatgtctgcaggaaccagttgtttaatgggcagacactgggacagtggacaagaaacgtgtgtccaaaatgtcgtgctggacacgtgcagcccctctgaacaactcttaagagctattgctgatcttgtcccgcaaccctga

SEQ ID NO: 23665 - DNA, 2153 bp, Homo sapiens
  SIMILAR (1197)..(2150): 931254mologous to Homo sapiens p40,accession number U93564,Smith-Waterman Score=1505.
atggacattcttggatgggcttcacgtgctcataagtggaagggccgggccacaggcacgcacgtcttcaacctcatgagagagtacctcatctctctccagtgttgtgccagtgagcaggcagcatcgcctgagcatggagcttctttcagggtctggaagtctcttggatttcagaaactgatcttgtcactgatctgtccccagtgcctgcagtcacttactagggagacatggatgagatttaaaagcaagaagacaaaaggacctgatttaagacttgtcatggatgccaacaaatgggaattcaggcgccacgccttgcgcccggcgcttacctttccgaatgagggcggcgatctcggggtcgaagccctgccggtggcacttcctccagaggcccatgttggtggagttgtactgccggctgcactcgtccgcggggctcatggcgaacagctgccggcgattccgggcccggaggagtttgccctcccagcggtccaggcgcgagcggctcgcccggagcggcaagttgttgttattgttgtaaatgaagccggggtcgacccggcgggtgttgaaggccttgcacctgtccctgtgcttcctggcgtccgtctcgaagcgactgccccgaagcagccgcctcggctcccagcccggcttcgggcgccgctgccctcgggccggaaactaaatgccaagtgtcctcggctgcggtggggcttctttgtgcaggatggtgacgggacagaactcgcctgtctctctgagggggacggggggtgctgtcaggaggcgccactggaccaccggccgcggcggctccgaggcctcgcaggctcggctggtgcccgggaggcgcgagagcccaggctgcgcccaggggactggggaaatcgcattgcccgggtgcgggcgccggaggaagctgctgccgcgctctctcgtccggcgcgggtagctgcagccttggctaaaacccacagacgagaacaccgagcgcgcagccaaaagctagtgatgtcatccgtgcaacaaggaaaactaacaaccagaaaggacatctacaccgaaaacccatctgtacatcaccatcatcaaagaccaaaagtagataaaaccacaaagatggggaaaaaacagaacagaaaaactggaaactctaaaaagcagagcgccttttcctcctccaaaggaatgcagttcctcaccagcaatggaacaaacctggacgcgataatgactttgacgagctgagagaagaaggcttcagaggatcaaattactctgagctacgggaggacattcaaaccaaaggcaaagaagttgaaaactttgaaaaagatttagaagaatgtataactagaataaccaatacagagaagtgcttaaaggagcggatggagctgaaaaccaaggctcgagaactacgtgaagaatgcagaagcctcaggagccgatgtgatcaactggaagaaagggtatcagcgatggaagatgaaatgaatgaaatgaagcgagaagggaagtttagagaaaaaagaataaaaagaaacgagcaaagcctccaagaaatatgggactatgtgaaaagaccaaatctacgtctgattggtgtacctgaaagtgatgtggagaatggaaccaagttggaaaacactctgcaggatattatccaggagaacttccccaatctagcaaggcaggccaacgttcagattcaggaaatagagagaatgccacaaagatactcctcaagaagagcaactccaagacacataattgtcagattcaccaaagttgaaatgaaggaaaaaatgttaagggcagccagagagaaaggtcgggttaccctcaaaggaaagcccatcagactaacagcagttctctcggcagaaaccctacaagccagaagagagtgggggccaatattcaacattcttaaagaaaagaattttcaacccagaatttcatatccagccaaactaagcttcataagtgaaggagaaataaaatactttatagagaagcaaatgctgagagattttgtcaccaccaggcctgccctaaaagagctcctgaaggaagcgctaaacatggaaaggaacaaccggtaccagccgctgcaaaatcatgccaaaatgtaa

SEQ ID NO: 23666 - DNA, 2112 bp, Homo sapiens; identical to SEQ ID NO: 12686
  SIMILAR (2075)..(2110): 911254mologous to Homo sapiens putative p150,accession number U93569,Smith-Waterman Score=56.

SEQ ID NO: 23667 - DNA, 3896 bp, Homo sapiens
  SIMILAR (2433)..(3416): 961254mologous to Homo sapiens putative p150,accession number U93568,Smith-Waterman Score=1608.
  misc_feature (1)...(3896): n = a,t,c or g
atgagtgtccactcctggaagccctcttggatcagacccatccgtagcctttctcccaagcgtcctctagggacccaagggacctctgaagtcccaccagatactcacatctgccagacaaaatttcacagtctttcttcaggaccacttctcttgtcagtccatccagttggaaagctatccgcagttgttggcagagtcttcatacacatactctcccagcgtgagcgacgaagaagacgggtgatttcagcatttccatctgaggtaccgggttcatctcaccagggagtgccagacagcgggtgcaggtcagtgggtgcgcaccccgtgcgcgagccgaagcagggcgaggcattgcctcactcaggaagcccaagggaaggaaaactaacaaacagaaaggacatccacaccaaaaacccatctgtacatcaccatcatcaaagaccaaaagtagataaaaccacaaagattgggaaaaaacagaacagaaaaactggaaactctaaaacgcagagcgcctctcctcctccaaaggaatgtagttcctcaccagcaacggaacaaagctggatggagaatgactttgatgagctgagagaagaaggcttcagacaatcaaattactctgagctacggaaggacattcaaaccaaaggcaaagaagttgaaaactttgaaaaaaatttagaagaatgtaaaactagaataaccaatacagagaagtgcttaaaggagctgatggagctgaaaaccaaggctcgagaactatgtgaagaatgcagaagcctcaggagccgatgcaatcaactggaagaaagggtatcagtgatggaagatgaaatgaatgaaatgaagcgagaagggaagtttagagaaaaaaagaataaaaagaaatgagcaaagcctccaagaaatatgggactatgtgaaaagaccaaatctacgtctgattggtgtacctgaaagtgatgtggagaatggaaccaagttggaaaacactctgcaggatattatccaggagaacttccccaatctagcaaggcaggccaacgttcagattcaggaaatacagagaacaccacaaagatactcctcgagaagagcaactccaagacacataattgtcagattcaccaaagttgaaatgaaggaaaaaatgttaagggcagccagagagaaagacagatcaacgagacagaaagtcaacaaggatacccaggaattgaactcagctctgcaccaagcagacctaatagacatctacagaactctccaccccaaatcaacagaatatacatttttttcagcaccacaccacacctattccaaaattgaccacatagttggaagtaaagctctcctcagcaaatgtaaaagaacagaaattataacaaactatctctcagaccacagtgcaatcaaactagaactcaggattaagaatctcactcaaagccgctcaactacatggaaactgaacaacctgctcctgaatgactactgggtacataacgaaatgaaggcagaaataaagatgttctttgaaaccaatgagaacaaagacacaacataccagaatctctgggacgcactcaaagcagtgtgtagagggaaatttatagcactaaatgcccacaagggaaagcaggaaagatctgaaattgacaccctaacatcacaattaaaagaactagaaaagcaagagcaaacacattcaaaagctagcagaaggcaagaaataactaaaatcagagcagaactgaaggaaatagagacacaaaaaacccttcaaaaaatcaatgaatccaggagctggttttttgaaaggatcaacaaaattgatagaccgctagcaagactaataaagaaaaaaagagagaagaatcaaatagacacaataaaaaatgataaaggggatatcaccaccgatcccacagaaatacaaactaccatcagagaatactacaaacacctctacgcaaataaactagaaaatctagaagaaatggatacattccttgacacatacactctcccaagactaaaccaggaagaagttgaatctctgaatcgaccaataacaggctctgaaattgtggcaataatcaatagtttaccaaccaaaaagagtccaggaccagatggattcacagccgaattctaccagaggtacaaggaggaactggtaccattccttctgaaactattccaatcaatagaaaaagagggaatcctccctaactcattttatgaggccagcatcattctgataccaaagccgggcagagacacaaccaaaaaagagaattttagaccaatatccttgatgaacattgatgcaaaaatcctcaataaaatactggcaaaccgaatccagcagcacatcaaaaagcttatccaccatgatcaagtgggcttcatccctgggatgcaagggctggttcaatatacgcaaatcaataaatgtaatccagcatataaacagagccaaagacaaaaaccacatgattatctcaatagatgcagaaaaagcctttgacaaaattcaacaacccttcatgctaaaaactctcaataaattaggtattgatgggacgtatttcaaaataataagagctatctatgacaaacccacagccaatatcatactgaatgggcaaaaactggaagcattccctttgaaaaccggcacaagacagggatgccctctctcaccgctcctattcaacatagtgttggaagttctggccagggcaatcaggcaggagaaggaaataaaggctattcaattaggaaaagaggaagtcaaattgtccctgtttgcagacgacatgattgtttatctagaaaaccccatcgtctcagcccaaaatctccttaagctgataagcaacttcagcnaactctcaggatacaaaatcaatgtacaaaaatcacaagcattcttatacaccaacaacagacaaacagagagccaaatcatgggtgaactcccattcacaattgcttcaaagagaataaaatacctaggaatccaacttacaagggatgtgaaggacctcttcaaggagaactacaaaccactgctcaaggaaataaaagaggagacaaacaaatggaagaacattccatgctcatgggtaggaagaatcaatatcgtgaaaatggccatactgcccaaggtaatttacagattcaatgccatccccatcaagctaccaatgactttcttcacagaattggaaaaaactactttaaagttcatatggaaccaaaaaagagcccgcattgccaagtcaatcctaagccaaaagaacaaagctggaggcatcacactacctgacttcaaactatactacaaggctacagtaaccaaaacagcatgtgggtaccagaagcagggagcagacacctcggagcctgcaggggcagtgaggggaaaccttccgaacttcccaagcccccaagagtgcagagatgccaggtccacagccatggcttggctggctgcagctgtgcctaagaagggaaagactcacattctcttgcctaatagtacaaggctagcctcagacattctgggagctggactggagaagcgatgttggggattcaccattcaatatgaactttgtgttcagtacagtctctctccttctttgtgtctggtgtctcagtgtcagactgctgttgtccaagcccccaagcaccgtggacatgttcagtggtgtctgatcccatcggcacagagcttggcttctcaggaggctcctcagagtcgcgtaaatagggtttccgatgcccggcctcaccagcttacagacgtgtctgaatctccttttcactcaggccacacttatattcactcttccctcctgaacattcgttag

SEQ ID NO: 23668 - DNA, 4843 bp, Homo sapiens
  SIMILAR (127)..(1005): 1001254mologous to Homo sapiens hypothetical protein,accession number AL110151,Smith-Waterman Score=1539.
atgaaagagaatttcaaacacaggcacgtggtggcgttcattagcagtcaggaagctcaggaagattcaagagaggaagaagaccgactggagtctcggttttactttctttttctcttggagctgagctataagacaacaggactgaacagggagccaactgtttctttgaacagtaaatcaggaacaccaatggaccaaaatgaacacagtcactggggaccacatgcaaagggccaatgtgccagcagatctgagctgagaatcatcctggtgggcaaaacaggaactggcaaaagtgctgcagggaacagcatcctcaggaagcaagcatttgaatcgaagctgggttcccagaccttgactaagacttgcagcaaaagtcagggaagctggggaaatagagagattgtcattattgacacaccagatatgttttcttggaaggaccactgtgaagctctgtacaaagaggtgcagaggtgctacttgctgtctgcaccaggaccccatgtgctgctcctggtgactcagctgggccgctatacctcacaggaccagcaggctgcacagagggtgaaggagatctttggagaggatgccatgggacacacaattgtcctctttacccacaaggaagacctcaatggtggctccctgatggattacatgcacgactcagataacaaagccctaagcaagctggtggcagcatgtggtgggcgaatctgtgcctttaataaccgtgctgaagggagcaatcaggatgaccaagtgaaggaactaatggactgtattgaggatctgttgatggagaaaaatggtgatcactataccaatgggttgtacagcctaatacagaggtctaaatgtggacctgtgggatcagatgaaagagtaaaggaattcaaacagagccttataaagtacatggaaactcaaagaagttacacagccttggctgaagcaaactgcctaaaaggagccttaatcaaaacacaactaccaaaagtagataaaaccacaaagatagggaaaaaacagagcagaaaaactggaaactctaaaaagcagagcacctctcctcctccaaaggaacgcagttcctcaccagcaatggaacaaagctggacagagaatgactttgacgagctgagagaagaaggcttcagacgatcacattactctgagctaccggaggacattcaaaccgaaggcagagaagttgaaaactttgaaaaaagtttagaagaatgtataactagaataacccacacagagaagtgcttaaaggagctgatggagctgaaaaccaaggctcgagaactacgtgaagaatgcagaagcctcaggagccaatgcgatcaactggaagaaagggtgtcagcaatggaagatgaaatgaatgaaatgaagcgagaagggaagtttaaagaaaaaaagaataaaaagaaatgagcaaagcctccaagaaatatgggactatgtgaaaagaccaaatctacgtctgattggtgtacctgaaagtgatgcggagaatggaaccaagttggaaaacactctgcaggataggatccaggagaacttccccaatctagcaaggcaggccaacggattttgccgatttcggaaccaccatcaaacaggattttcgcctgctggggcaaaccagcgtggaccgcttgctgcaactctctcagggccaggcggtgaagggcaatcagctgttgcccgtctcactggtgaaaagaaaaaccaccctggcgcccaatacgcaaaccgcctctccccgcgcgttggccgattcattaatcgcagctggcacgacaggtttcccgactggaaagcgggcaccggtctgaaaagcgcaatattcgcgtgggagtgacccgattttccagctgggtgaggcagcctttgagagagatggtagtgctcttggagagggtgtctacaatcaccttgggggcaacgacagatgagaacatgacatccaaaagggacaagaagggattttgccgatttcggacccaccatcaaacaggattttcgcctgctggggcaaaccagcgtggaccgcttgctgcaactctctcagggccaggcggtgaagggcaatcagctgttgcccgtctcactggtgaaaagaaaaaccaccttggcgcccaatacgcaaaccgcctctccccgcgcgttggccgattcattaatgcagctggcacgacaggtttcccgactggaaagcgggcagaagaattgcatgatgcatcctgtgaaggagatggttctgtcttccacaaccaagttctccagcagtttgggtgtaactgtggtggaataacagaaatcaacaaaggacaagtggctgaggaaaaagtacatgcgggtgtggagtttggggttgatcctgatgatcatgatcatgcccaggtttcccaatacagtgattgtgtagatgggccaggcggtgaagggcaatcagctgttgcccgtctcactggtgaaaagaaaaaccaccctggcgcccaatacgcaaaccgcctctccccgcgcgttggccgattcattaatgcagctggcacgacaggtttcccgactggaaagcgggcagtgagcgcaacgcaattaatggattttgccgatttcggaaccaccatcaaacaggattttcgcctgctggggcaaaccagcgtggaccgcttgctgcaactctctcagggccaggcggtgaagggcaatcagctgttgcccgtctcactggtgaaaagaaaaaccaccctggcgcccaatacgcaaaccgcctctccccgcgcgttggccgattcattaatgcagctggcacgacaggtttcccgactggaaagcgggcaccacttgtcctctgtagatttctgctactcctcaataattgtgccaaaaatgttggctaatatctttaacaaggacaaagccatctccttcctagggtgcatggtgcaattctacttgttttgcacttgtgtggtcactgaggtcttcctgctggccgtgatggcctatgaccgctttgtggccatctgtaaccctttgctatacacagtcaccatgtcttggaaggtgcgtgtggagctggcttcttgctgctacttctgtgggacggtgtgttctctgattcatttgtgcttagctcttaggatccccttctatagatctaatgtgattaaccactttttctgtgatctacctcctgtcttaagtcttgcttgctctgatatcactgtgaatgagacactgctgttcctggtggccactttgaatgagagtgttaccatcatgatcatcctcacctcctacctgctaattctcaccaccatcctgaagatgggctctgcagagggcaggcacaaagccttctccacctgtgcttcccacctcacagctatcacaccaaaagtagataaaaccacaaagatggggaaaaaacagaacagaaaaactggaaactctaaaaagcagagcgcctctccacctccaaaggaacgcagttcctcaccagcaacagaaaaaaggtggatggagaatgattttgacgagctgagagaagaaggcttcagacgatcaaattactctgagctacgggaggacattcaaaccaaaggcaaagaagttgaaaactttgaaaaaaatttagaagaatgtataactagaataacaaatacagagaagtgcttaaaggagctgatggagctgaaaaccaaggctcgagaactatgtgaagaatgcagaagcctcaggagccgatgcgatcaactggaagaaaggggattttgccgatttcggaaccaccatcaaacaggattttcgcctgctggggcaaaccagcgtggaccgcttgctgcaactctctcaagggccaggcggtgaagggcaatcagctgttgcccgtctcactggtgaaaagaaaaaccaccctggcgcccaatacgcaaaccgcctctctccgcgcgttggccgattcattaatgcagctggcacgacaggtttcccgactggaaagcgggcagtgagcgcaacgcaattaatggattttgcggatttcggaacctccctcaaacaggattttcgcctgctggggcaaaccagcgtggaccgcttgctgcaactctctcagggccaggcggtgaagggcaatcagctgttgcccgtctcactggtgaaaagaaaaaccaccctggcgcccaatacgcaaaccgcctctccccgcgcgttggccgattcattaatgcagctggcacgacaggtttcccgactggaaagcgggcaggattttgccgatttcggaaccaccatcaaacaggattttcgcctgctggggcaaaccagcgtggaccgcttgctgcaactctctcagggccaggcggtgaagggcaatcagctgttgcccgtctcactggtgaaaagaaaaaccaccctggcgcccaatacgcaaaccgcctctccccgcgcgttggccgattcattaatgcagctggcacgacaggtttcccgactggaaagcgggcatacaacaagctatgatgatggtgttacagctttgcttggtcgtgatgatggtgtagtgcaggtgcttgcagatggctatgtagtggtcataggccattgctttgagtatgaagatctcaatgtctccaaggaaaccagaagtctgaatcaaggtgctggcaggactctgctgcctctgaaggcagtggaggagaaactttccttgctccacggcttgtggcagcaaaacaccatttccctctgtctgcacatgactttcctccctgtgtgtcttcctgttgtcctttattatctcttataa

SEQ ID NO: 23669 - DNA, 4137 bp, Homo sapiens; identical to SEQ ID NO: 14758
  SIMILAR (2239)..(3768): 941254mologous to Homo sapiens putative p150,accession number U93572,Smith-Waterman Score=2521.

SEQ ID NO: 23670 - DNA, 2108 bp, Homo sapiens
  SIMILAR (1044)..(427): 541254mologous to Mus musculus C-terminal binding protein 2,accession number AB033123,Smith-Waterman Score=455.
ggggatttcctcttaatattttttattttgttgtttgaactcttgatgcaacattgtagagcagggtgttcaggacctgctgtgcccaagggactgataaaggaaaaagctctatttattctttttgtgatttgatgcacagatgaaaaacttaacacacaataacagaagttggtcgttaaataaatccacaccctagtctttccagcgccttccgtaagcaagacgacatcttcagttttctagctcttgtagtttcaacactgcaacatcaatgatgcatatgtcccaagaatccagttaccaaaagacccacccgattcctttttctccttagttccatccaatttttcactgtctcttggtccccaagtgtatctggagtgattaccttctggcattctctgctattgctcgttggggtgctctcgattgtccccgtgttttgtgggctggttgggagagggcgcttgggaaggatgtgccaactgtcgggaggttgtgagtcacttgggatgcctccagggatgatcccttccatggctgcaggaagtcctcctggagccacatcccacgatgcctggccggatatctgtatgtggcaccattgagctcaggatgaattgcttgctggtctattactgacccaaggcgctgatgtgacaaagaattccttgttcacacaattttctttaagctttctgggatgcgacctgtgatggctcggcggatctcggtggcagctgcctccctcatctccagtgacgcctgctcactgtaccaggcagtgtgaggagtgcagatgagattcggggcatctttcaacggaccctgagcaaagctgaagggctctgactcatgcacgtcgagggcataaaaatcgtatcctgccctccttgagggcttgtgataaggctttctcgtccaccaggccgccacgggctgcgttccacaaaggaatgctccctgccctcatctgctttatggtaaaagtcattgatgaaggtggtggttatgttcgttgaagattgcagtgcaaggagacgcagtcgctctgatacagcaaatcctgcagggtgtagaccctctgcacgcccagggaccgctcggatccccatcctgcaaagtaggggtcaataaaatatgacgctgaatccaaaggccttggctcgaactgcaaccgcctgccccgtgcgaccaaagccaatgaggcccagcgtctccccacggatgcgggccgctcccgaggccacctcgcggatctgctccacgctctgaacccgcgtgccttcccgcagtgcctggtacagccacgtgttcctccggtacaggttgaggatgtggcagatggtagagtccgctgtctcttccacggctgcagacgggatgttgcacacggcaattccgagctcgccggcagccttgatgtccacgttgtcatagccactgcctatccgcacgatcactctcagggccttgaacttctccaggtcctccctggtgagggtgatggtgtggtacatcatggcgcccacggcttcgtttagaaccttctcgtggatttcctgcgtcgactgcgcgtcacagaaggccacagtggccaggtccttcaggatgggcatctccacagtgcagtcgcggccgtccagcagcgccaccagggggcgggggtgcagggggccgttcatgatctgggggcggataccttcacaaattctgtccaatcgctgtctcttgactttgtgcttatccacaagggccattctttatggaactttgcaactctcagatcaaaaggcaaagcagtcctctaagaacttaggggaacttgcaggagtctgcgtgcatgacgccactatgaacccaatataaatctgtccacaaactctatagttcacacgatgggctgtccgtctttttaagggaatacaccttcattggttcaaaaccatttaaggtgatgaaaccctcgtcccggacggtcggcgtccacggcgaaaggcgcccaccctggaggcggcggcgcgcgttcccgcccctcccaccccacccggcggcggtggcggtggcggcggctgtgcggcccccccgcagcgcggcatcgcccg

SEQ ID NO: 23671 - DNA, 4018 bp, Homo sapiens
  SIMILAR (1600)..(2472): 831254mologous to Homo sapiens unknown protein,accession number M22333,Smith-Waterman Score=1221.
atggggaaaaaacagaacagaaaaactggaaactctaaaaataagagcgcctctcctcctccaaaggaacgcagctcctcaccagcaacggaacaaagctggatggagaatgactttgacgagctgagagaagaaggcttcagaagatcaaattactctgagctatgggaggacattcaaaccaaaggcaaagaagttgaaaactttgaaaaaaatttagaagaatgtataactagaataaccaacacagagaagtgcttaaaggagctgatggagctgaaaaccaaggctcgagaactacgtgaagaatgcagaagcctcaggagccgatgcgatcaactggaagaaagggtatcagcaatggaagatgaaatgaatgaaatgaatgaaatgaagcgagaaggaaagtttagagaaaaaagaataaaaagaaacgagcaaagcctccaagaaatatgggactatgtgaaaagaccaaatctacgtctgactggtgtacctgaaagtgatggggagaatggaaccaagttggaaaacactctgcaagatattatccaggagaacttcctcaccctagcaagacaggccaatattcacattcaggaaatacagagaacaccattaagatactcctcgagaagagcagccccaagacacatcgtgagattctccaaggttgaaacaaaggaaaaaatgttaagggcagccagagagaaagaaatacaaactaccatcagagaatactacaaacacctttacacaactaaactagaaaatctagaagaaatggaaaaattcctggacacatacaccctcccaagactaaaccagaaagaagttgaatccatgaaaagaccaataacaagttctgaaattgaggcagtcattaatatcctaccaatcaaaagaagtccaggacctgatggattgacagccacattctatcagaggtacaaagaggaactggaacgcagttcctcaccagcaacggaacaaagctggatggagaatgattttgacgagctgagagaagaaggcttcagacgatcaaattactctgagctacgggaggacattcaaaccaaagtcaaagaagttgaaaactttgaaaaaaatttagaagaatgtataactagaataaccaatacagagaagtgcttaaaggagctgatggagctgaaaaccaaggctcgagaactacgtgaagaatgcagaagcctcaggagccgatgcgatcaactggaagaaagggtatcagcaatggaagatgaaatgaatgaaatgaagcaagaagggaagtttagagaaaaaagaataaaaagaaatgagcaaagcctccaagaaatatgggactatgtgaaaagaccaaatctacgtctgattggtgtacctgaaagtgatggggagaatggaaccaagttgaaaaacactctgcaggatattatccaggagaacttccccaatctagcaaggcaggccaaagttcagattcaggaaatacagagaatgccacaaagatattccttgacaagagcaactccaagacacataattgtcagattcaccaaagttgaaatgaaggaaaaaatgttaagggcagccagagagaaaggagcacccagattcataaagcaagtcctgagtgacctacaaagagacttagactcccacacattaataatgggagactttaacaccccactgtcaacattagacagatcaacgagacagaaagtcaacaaggatacccaggaattgaactcagctctgcaccaagtggacctaatagacatctacagaactctccaccccaaatcaacagaatacacatttttttcagcaccacaccacacgtattccaaaattgaccacatacttggaagtaaagctctcctcagcaaatgtaaaagaacagaaattataacaaactatctctcagaccacagtgcaatcaaactagaactcaggattaagaatctcactcaaaaccgctcaactacatggaaactgaacaacctgctcctgaatgactactgggtacataacgaaatgaagctagaaataaagatgttctttgaaaccaacgagaacaaagacacaacataccagaatctctgggacgcattcaaagcagtgtatagagggaaatttatagcactaaatgcccacaagagaaagcaggaaagatccaaaattgacaccctaacatcacaattaaaagaactagaaaagcaagagcaaacacattcaaaagctagcagaaggcaagaaataactaaaatcagagcagaactgaaggaaatagagacacaaaaaacccttcaaaaaatcagtgaatccgggaggaggagccaagatggccgaataggaacagctccggtctacagctcccagcgtgagcgacgcagaagacaggtgatttctgcatttccatctgagggcacagacaaacaaaaagacagcagtaacctctgcagacttacgtgtccctgtctgacagctttgaagagagcagtggttctcccagcacgcagctggagatctgagaacgggcagactgcctcctcaaaaggaaaactaacaaccaggaaaggacatctacaccgaaaacccttctgtacattcaccatcattcaaagacccaaaagtaaataaaacccaccaaagatggggaaaaaaaacagaacagaaaaactggaaactcttaaaacccagagcgcctttccctcctccaaaggaatgcagttcctcaccagcaacggaacaaagctggatggagaatgactttgacaagctgagagaagaaggcttcagacgatcaaattactctgagctacggggaggacattcaaaccaaaggcaaagaagttgaaaactttgaaaaaaaatttagaagaatgtataacttagaataaccaatacagagaagtgcttaaaggagctgatggagctgaaaaccaaaggctcgagaaactacgtgaaagaatgcagaacgcctcaggagccgatgcgatcaactggaagaaagggtatcagcaatggaagatgaaatgaatgaaatgaagtgagaagggaagtttagagaaaaaagaataaaaagaaatgagcaaagccttcaagaaatatggggactatgtgaaaaagaccaaatctacgtccgattggtgtatctgaaagtgatggggagaatggaaccaagttggaaaacactctgcaggatattatcccggagaatttccccaatctagcaaggcaggccaacgttcagattcaggaaatacagagaacgccacaaagatactcctcgagaagagcaactccaagacacatacttgtcagattcaccaaagttgaaatgaaggaaaaaatgttaagggcagccagagagaaaggtcaggttaccctcaaaggaaagcccatcagactaacagcggatctctcggcagaaaccctacaagccagaagagagtgggggccaatattcaacattcttaaagaaaagaattttcaacccagaatttcatatccagccaaactaagcttcataagtgaaggagaaataaaatactttatagacaagcaaatgctgagagattttgtcaccaccaggcctgccctaaaagagctcctgaaggaatcactaaacatggaaaggaacaactggacctcaaagcagatcatccaagaggatggttactcagaggaggaaggttggctgtgcagggcagtcatctacagccacaccctccaggccatcatggccatcgtcaaggccacaggcaacctacagactgactttgccaaccccttccatacggatgatgccaggcaacagtttgcaatgtcttacacagttgtgggccagggtgcactccctgaggacctgtccagatgccacctgcaaactgaagctgtccagcgtcatccggaatctctgggctgcccattggatttgctccatgggatgcctgtttcatcctgctttggttacccacaggacaccagctccacagtttag

SEQ ID NO: 23672 - DNA, 11220 bp, Homo sapiens
  SIMILAR (3220)..(7044): 971254mologous to Homo sapiens putative p150,accession number U93563,Smith-Waterman Score=6524.
  misc_feature (1)...(11220): n = a,t,c or g
ttagctatgccacactaagaaataagatatgaagcttagtttggctggatatgaaattctgggttgaaatttcttgtctttaagaatgttgaatattggcccccactctcttctggcttgtagggtttctgctgagagatccgctgttagtctgatgggcttccctttgagggtaacccgacctttctctctggctgcccttaacattttttccttcatttcaactttggtgaatctgaccattatgtgtcttggagttgctcttctcgagaagtatctttgtggcattctctgtgtttcctgaatctgaacgttggcctgccttgctagattggggaagttctcctggataatatcctgcagagtgttttccaacttggttccattctccccatcactttcaggtacaccaatcagacgtagatttggtcttttcacatagtcccatatttcttggaggctttgctcatttctttttattcttttttctctaaacttcccttctcgcttcatttcattcatttcatcttccatcgctgataccctctcttccagttgatcgcatcggctcctgaggcttctgcattcttcacgtagttctcgagccttggttttcagctccatcagctcctttaagcacttctctgtattggttattctagttatacattcttctaaatttttttcaaagttttcaacttctttgcctttggtttgaatgtcctcctgtagctgagagtaatttgatcgtctgaagccttcttctctcagctcgtcaaagtcattctccatccagctttgttccgttgttggtgaggaactgcgttcctttggaggaggagaggcgctctgcgttttagagtttccagtttttctgttctgttttttccccatctttgtggttttatgtacttttggtctttgatgatggtgatgtacagatgggtttttggtgtggatgtcctttctgtttgttagttttcctttgccgccttgcagtttgatctcagactgcagtgctagcaatgagcgagactccgtgggtgtaggaccctccgagccaggtgcgggatataatcttgtggtgcgccgttttttaagcccgtcggaaaagcgcagtattcgggtatgagtgacccgattttccaggtgccgtccgtcacccctttctttgactcggaaagggaactccctgaccccttgcgcttcccaagtgaggcaatgcctcgccctgtttcggctggcgcacggtgtgcgcacccactctcctgcacccactgtctggcactccctgcccaaggtaggaccatttcttgaaaattctgtccccggtttgtaaccccggtttgcggttacccaaccattctccggggtgcaaattttttcgataccgtcggggtctctgaaccctttcaatttggatactggccctggggcatcggtctggcaggttgggccccgctttttggcgttatttaggcttctggaaaatcgggtcactgccacccgaatattgcgcttttcagaccggcttaaaaagcggcgcaccacaagattatatcccacacctggccttcggagggtcctacgcccacggaatctcgctgattgctagcacagcggtctgagatcaaactgcaaggccgcagcaaggctgggggaggggcgcccgccattgcccaggcttgcttaggtaaacaaagcagccggggaagctcgaactgggtgcagcccaccacagctcaaggaggcctgcctgcctctgtaggctccacctctgggggcagggcacagacaaacaaaaagacagcagtaacctctgcagacttaaatgtccctgtctgacagctttgaagagagcagtggttctcccagcacgcagctggagatctgagaacgggcagactgcctcctcaagtgggtccctgacccctgacccccgagcaagcnttaacttgggaggcacccnccccagcaggggcacactgacacctcacacggccaggtactcccaacagacctgcagctgagggtcctgtctgttagaaggaaaactaacaaacagaaaggacaaccacacccaaaaacccatctgtacatcaccatcatcaaagaccaaaagtagataaaaccacaaagatggggaaaaaacagaacagaaaaactggaaactctaaaaagcagagcgcctctcctcctccaaaggaatgcagttcctcaccagcaatggaacaaagctggacggagaatgactttgacgagctgagagaagaaggcttcagacgatcaaattactctgagctatgggaggacattcaaaccaaaggtaaagaagttgaaaactttgaaaaaaatttagaagaatgtataactagaataaccaatacagagaagtgcttaaaggagctgatggagctgaaaaccaaggctcgagaactacgtgaagaatgcagaagcctcaggagccaatgcgatcaactggaagaaagggtatcagcaatggaagatgaaatgaatgaaatgaagcaagaagggaagtttagagaaaaaagaataaaaagaaacgagcaaagcctccaagaaatatgggactatgtgaaaagaccaaatctacgtctgattggtgtacctgaaagtgatgcggagaatggaaccaagttggaaaacactctgcaggatattatccaggagactttccccaatctagcaaggcaggccaacgttcagattcaggaaatacagagaacgccacaaagatactcctcgagaagagcaactccaagacacataattgtcagattcaccaaagttgaaatgaaggaaaaaatgttaagggcagccagagagaaaggtcgagttaccctcaaagggaagcccatcagactaacagcggatctctcggcagaaaccctacaagccagaagagagtgggggccaatattgaacattcttaaagaaaagaattttcaacccagaatttcatatccagccaaactaagcttcataagtgaaggagaaataaaatactttacagacaagcaaatgctgaccgattttgtcaccagcaggcctgccctaaaagagctcctgaaggaagcgctaaacatggaaaggaacaaccggtaccagccactgcaaaatcatgccaaaatgtaaagaccatcgagactaggaagaaactgcatcaactaacgagcaaaatcaccagctaacatcataatgacaggatcaaattcacacataacaatattaactttaaatgtaaatggactaaattctccaattaaaagacacagactggcaagttggataaagagtcaagacccatcagtgtgctgtattcaggaaacccatctcatgtgcagagacacacataggctcaaaataaaaggatggaggaagatctaccaagcaaatggaaaacaaaaaaaggcaggggttgcaatcctagtctctgataaaacagactttaaaccaacaaagatcaaaagagacaaagaaggccattacatgatggtaaagggatcaattcaacaagaggagctaactatcctaaatatgtatgcacccaatacaggagcacccagattcataaagcaagtcctgagtgacctacaaagagacttagactcccacacattaataatgggagactttaacaccccactgtcaacattagacagatcaacgagacagaaagtcaacaaggatacccaggaattgaactcagctctgcaccaagcagacctaatagacatctacagaactctccaccccaaatcaacagaatatacatttttttcagcaccacaccacagctattccaaaattgaccacatacttggaagtgaagctctcctcagcaaatgtaaaagaacagaaattataacaaactatctctcagaccacagtgcaatcaaactagaactcaggattaagaatctcactcaaagccgctcaactacatggaaactgaacaacctgctcctgaatgactactgggtacataacgaaatgaaggcagaaataaagatgttctttgaaaccaacgagaacaaagacacaacataccagaatctctaggacgcattcaaagcagtgtgtagagggaaatttatagcactaaatgcccacaagagaaagcaggaaagatccaaaattgacaccctaacatcacaattaaaagaactagaaaagcaagagcaaacacattcaaaagctagcagaaggcaagaaataactaaaatcagagcagaactgaaggaaatagagacacaaaaaacccttcaaaaaatcaatgaatccaggagctggttttttgaaaggatcaacaaaattgatagaccgctagcaagactaataaagaaaaaaagagagaagaatcaaatagacacaataaaaaatgataaaggggatatcaccaccgatcccacagaaatacaaactaccatcagagaatactacaaacacctctacgcaaataaactagaaaatctagaagaaatggatacattccttgacacatacactctcccaagactaaaccaggaagaagttgaatctctgaatagaccaataacaggagctgaaattgtggcaataatcaatagtttatcaaccaaaaagagtccaggaccagatggattcacagccgaattctaccagaggtacaaggaggaactggtaccattctttctgaaactattccaatcaatagaaaaagagggaatcctccctaactcattttatgaggccagcatcattctgataccaaagccgggcagagacacaaccaaaaaagagaattttagaccaatatccttgatgaacattgatgcaaaaatcctcaataaaatactggcaaaccaaatccagcagcacatcaaaaagcttatccaccatgatcaagtgggcttcatccctgggatgcaaggctggttcaatatacgcaaatcaataaatgtaatccagcatataaacagagccaaagacaaaaaccacatgattgtctcaatagatgcagaaaaagcctttgacaaaattcaacaacccttcatgctaaaaactatcaataaaataggtattgatgggatgtatttcaaaataataagagctatctatgacaaaaccacagccaatatcatactgaatgggcaaaaactggaagcattccctttgaaaaccggcacaagacagggatgccctctctcaccgctcctattcaacatagtgttggaatttctggccagggcaatcaggcaggagaaggaaataaagggtattcaattaggaaaagaggaagtcaaattgtccctgtttgcagatgacatgattgttgatctagaaaaccccatcgtctcagcccaaaatctccttaagctgataagcaacttcagcaaagtctcaggatacaaagtcaatgtacaaaaatcacaagcattcttatacaccaacaacagacaaacagagagccaaatcatgagtgaactcccattcacaattgcttcaaagagaataaaatacctaggaatccaacttacaagggatgggaaggacctctccaaggagaactacaaaccactgctcaaggaaataaaagaggatacaaacaaatggaagaacattccatgctcatgggtaggaagaatcaatatcgtgaaaatggccatactgcccaaggtaatttacagattcaatgccatccccatcaagctaccaatgactttcttcacagaattggaaaaaactactttaaagttcatatggaaccaaaaaagagcccgcatcgccaagtcaatcctaagccaaaagaacaaagctggaggcatcacactacctgacttcaaactatactataaggctacagtaaccaaaacagcatggtactggtaccaaaacagagatatagaccaatggaacagaacagagccctcagaaataatgccgcatatctacaactatctgatctttgacaaacctgagaaaaacaagcaatggggaaaggattccctatttaataaatggtgctgggaaaactggctagccatatgtagaaagctgaaactggatcccttccttacaccttatacaaaaatcaattcaagatggattaaagacttaaacgttagacctaaaaccataaaaaccctagaagaaaacctaggcattaccattcaggacacaggcaggggcaaggacttcatgtctaaaacaccaaaagcaatggcaacaaaagccaaaactgacaaatgggatctgattaaactaaagagcttctgcacagcaaaagaaactaccatcagagtgaacaggcaacctacaaaatgggagaaaattttcacaacctactcctctgacaaagggctaatatccagaatctacaatgaactcaaacaaatttacaagaaaaaaacaaacaaccccatcaaaaagtgggcaaaggatatgaacagacacttctcaaaagaagacatttatgcagccaaaaaacacatgaaaaaatgctcatcatcactggccatcagagaaatgcaaatcaaaaccacaatgagataccatctcataccagttagaatggcaatcattaaaaagtcaggaaacaacaggtgctggagaggatgtggagaaataggaacacttttacactgttggtgggactgtaaactagttcaaccattgtggaagtcagtgtggcgattccttagggatctagaactagaaataccatttgacccagccatcccattactgggtatatacccaaatgactataaatcatgctgctataaagacacatgcacacgtatgtttattgcggcattattcacaatagcaaagacttggaaccaacccaaatgtccaacaatgatagactggattaagaaaatgtggcacatatacaccatggaatactatgcagccataaaaaatgatgagttcatgtcctttgtagggacatggatgaaattggaaaccatcattctcagtaaactatcgcaagaacaaaaaaccaaacaccgcatattctcactcataggtgggaattgaacaatgagatcacatggacacagtcagaagaacaatatgcagtggggcctgttggagggcggatcggcaggttgacaaataatagacacacacaagatagtgaaagctgggtccggggggtcaccgccttctggtcccgtggtgccaacaatgcactggatataccagcatttattattaagtttagtgagggcaggggtagcctccacactcacgatggcccccctggtcccacttcttctctcaaactgtctttttctcattcctttgactccactggactttgtcgcccccacgacctggtgttgggtctgatcatcccaacaatggttaatattacaagtcaacttgactggcttgaggatgcccagatggctggtgaagcactgttcctggaaggaaaactaacaaccagaaaggacatctacaccgaaaacccatctctacatcaccatcatcaaagaccaaaagtagataaaaccacaaagatggggaaaaaaacagaacagaaaaactggaaacttctaaaaatcagagcgcctcttctcctcctccaaaggaatgcagcttcctcaccagcaatggaacaaagctggaccggagaatgatttttgactttgacgagctgagagcagaaggcttcaaacgatcaaattacttctgagctacgggaggacattcaaaccaaaggcaaagaagttgaaaacctttgaaaaaaaatttagaccgaatgtataactagaataaccaataccagagaagtgcttaaaggagcagctgatggagctgaaaaccaaggctcgagaactacgtgaagaatgcagaagcctcaggatgccgatgcgattcaactggaagaaagggtattcagcaatggaagtgaaaagatgaaacgcatgaaatgaaatgaaatgaagccgagaaggaaagtttagagaaaaaaagaataaaaagaaatgagccaaagccttgaaggaattatgggactatgtgaaaagaccaaatctatgtctgattggtgtacctgaaaggtgacggggagaatggaaccaagttggaaaacactctgcaggatatattatccaggagaacttccaccaatactagcaagggcaggcccaacgttcagtttcaagaaataccgaaaacggcacaaagatacttctcgagaagagcaactccaagacatataattgtcagattcaccaaagttgaaatgaaggaaaaaaggttaagggcagccagagagagaaaggtcgggttacccctcaaaggggaaggccatcagactaaacagtggatctctcggcagaaactctacaagccagaaaagagtgggggccaatattcaacattcttaaagaaaagaattttcaacccagaatttcatatccagccaaactaagcttcataagtgaaggagaaataaataagatcctttacagacaagcaaatgccgagagatttttgtcaccactaggccctgccctaaaagagctcctgaaggaagcgctaaacatggaaaggaacaaccggagaaagcaggaaagatccaaaattgacaccctaacatcacaattaaaagaactagaaaagcaagagcaaacacattcaaaagctagcagaaggcaagaaataactaaaatcagagcagaactgaaggaaatagagacacaaaaaacccttcaaaaaatcaatgaatccaggagctggttttttgaaaggatcaacaaaattgatagaccgctagcaagactaataaagaaaaaaagagagaagaatcaaatagacacaataaaaaatgataaaggggatatcaccactgatcccacagaaatacaaactaccatcagagaatactacaaacacctctacgcaaataaactagaaaatctagaagaaatggatacattcctcgacacatacactctcccaagactaaaccaggaagaagttgaatctctgaatagaccaataacaggctctgaaattgtggcaataatcaatagtttaccaaccaaaaagagtccaggaccagatggattcacagccgaattctaccagaggtacaaggaggaactggtaccattccttctgaaactattccaatcaatagaaaaagagggaatcctccctaactcattttatgaggccagcatcattctgataccaaagccgggcagagacacaaccaaaaaagagaattttagaccaatatccttgatgaacattgatgcaaaaatcctcaataaaatactggcaaaccgaatccagcagcacatcaaaaagcttatccaccatgatcaagtgggcttcatccctgggatgcaaggctggttcaatatacgcaaatcaataaatgtaatccagcatataaacagagccaaagacaaaaaccacatgattatctcaatagatgcagaaaaagcctttgacaaaattcaacaacccttcatgctaaaaactctcaataaattaggtattgatgggaagtatttcaaaataataagagctatctatgacaaacccacagccaatatcatactgaatgggcaaaaactggaagcattccctttgaaaactggcacaagacagggatgccctctctcaccgctcctattcaacatagtgttggaagttctggccagggcaatcaagcaggagaaggaaataaagggtattcagttaggaaaagaggaagtcaaattgtccgtgtttgcagacgacatgattgtttatctagaaaaccccatcgtctcagcccaaaatctccttaagctgataagcaacttcagcaaagtctcaggatacaaaatcaatgtacaaaaatcacaagcattcttatacaccaacaaccgacaaacagagagccaaatcatgagtgaactcccattcacaattgcttcaaagagaataaaatacctaggaatccaacttacaagggatgtgaaggacctcttcaaggagaactacaaaccactgctcaaggaaataaaagaggacacaaacaaatggaagaacattccatgctcatgggtaggaagaatcaatatcgtgaaaatggccatactgcccaaggtaatttacagattcaatgccatccccatcaagctaccaatgactttcttcacagaattggaaaaaactactttaaagttcatatggaaccaaaaaagagcccgcatcgccaagtcaatcctaagccaaaagaacaaagctggaggcatcacactacctgacttcaaactatactacaaggctacagtaaccaaaacagcatggtactggtaccaaaacagagatatagatcaatggaacagaacagagccctcagaaataatgccgcatatctacaactatctgatctttgacaaacctgagaaaaacaagcaatggggaaaggattccctatttaataaatggtgctgggaaaactggctagccatatgtagaaagctgaaactggatcccttccttacaccttatacaaaaatcaattcaagatggattaaagatttaaacgttagacttaaaaccataaaaaccctagaagaaaacctaggcattaccattcaggacataggcgtaggcaaggacttcatgtccaaaacaccaaaagcaatggcaacaaaagccaaaattgacaaatgggatctaattaaactaaagagcttctgcacagcaaaagaaactaccatcagagtgaacaggcaacctacaacatgggagaaaattttcgcaacctactcatctgacaaagggctaatatccagaatctacaatgaactcaaacaaatttacaagaaaaaaacaaacaaccccatcaaaaagtgggcaaaggacatgaacagacacttctcaaaagaagacatttatgcagccaaaaaacacatgaagaaatgctcatcatcactggccatcagagaaatgcaaatcaaaaccactatgagatatcatctcacaccagttagaatggcaatcattaaaaagtcaggaaacaacagcagccagatgccactgactagctcagataacactgctgtcaactgtaaaaaattaagatccaaaccagatgaaattgccaaagagtcagaagctcctccaggcttagccagctttcacctttgctcatcatacatctatggggctcctcttaactcacagatgggctag

SEQ ID NO: 23673 - DNA, 519 bp, Homo sapiens
  SIMILAR (33)..(182): 881254mologous to Homo sapiens dodecenoyl-CoA delta- isomerase,accession number Z25821,Smith-Waterman Score=212.
attgacccttcgctgacgaattcggcacgaggcagctggggctgctcttcccgccggcggaggccctgcaggtgggcatagtggaccaggtggtcccggaggagcaggtgcagagcactgcgctgtcagcgatagcccagtggatggccattccaggtgaggcacggggcatggcgggcgcccgatgatgctggggagaccagaaggttctccacccaaaggttttctgtggacatcgtgacttcgggagactgttgataatcacagccatgtgggtgtcaggaggctgctgtaacaacgcagcacagaccgggtggcccagaccgcagaagctcatctcacggtgctggagaccagaggtgcaaaatcaaagtgtgggcaggactgcacttcctccctgcgttccagggaggctccttcctgccccgcccacttctgctggctccaggcctccctgggcttgtgggcgcctcgctctaatctctgcctccatccttacgcagctttctcccctgtgtt

SEQ ID NO: 23674 - DNA, 1102 bp, Homo sapiens
  SIMILAR (707)..(934): 461254mologous to Homo sapiens dodecenoyl-CoA delta- isomerase,accession number Z25820,Smith-Waterman Score=107.
tagttgcgtgccgccccctccccaggaggcgagctcagcccgcgacctttatcccgcgcgttgcggtcaagatggcgctggtggcttctgtgcgagtcccggcgcgcgttctgctccgcgcgggggcccggctcccgggcgcggccttcgggcggacggagcgggcggccggcggcggagacggcgcagcggccgcttcgggagccagcgggtgctggtggagccggacgcgggcgcaggggtcgctgtgatgaaattcaagaaccccccagtgaacagcctgagcctggagtttctgacggagctggtcatcagccgtggagaagctggagaatgacaagagcttccgcgatgtcattctgacctcggacccgcccgggtgtcttctcggccgggcttgaccctaacggagatgtgtggggaggagccccgcccactacgcttgggtacttgaaaggccggttcaggagctgtggctgcggttgtaccagtcccaactgggtgctggtctccgccatcaacggagccctgccccgctggagggctgcctggtggccctgacctgtgactacaccattctgggcgggcaacccaaggtactgcataggactcaatgagcacccagcctgggcatcatcgccccctttctggttgaaagacaacccctggagaacacccatcgggcaccgggcggcggagtctgcccctgcagctggggctgcctcttccgccgccggcggaggccctgcaggtgggcatagtggaccagggtggtccctggaggagcaggtgcagagcactgcgctgtcagcgatagcccagtggatggccattcccaagccaatggctcacaagtttgaccaaggccataatgcgaaaaggccagggcccacccgcctggtcacgcaagggctatgcggacgtgcagaacttcggtcagcttcatctccaaagactccatccagaagtccctgcagatgtacttagagaggctcaaagaagaaaaaggctaacgattgggctgccacaggcttacggccacacgtgcccctgtgggtcccagggaggtcttaaacaaggtatttttcaacttaaaagtaaa

SEQ ID NO: 23675 - DNA, 3342 bp, Homo sapiens; identical to SEQ ID NO: 6693
  SIMILAR (1)..(1236): 881254mologous to Homo sapiens cytokeratin 17,accession number Z19574,Smith-Waterman Score=1756.

SEQ ID NO: 23676 - DNA, 972 bp, Homo sapiens
  SIMILAR (4)..(924): 971254mologous to Homo sapiens serine hydroxymethyltransferase,accession number L23928,Smith-Waterman Score=1520.
atggtgaacccagatactggctacatcaactatgaccagctggaggagaacgcacgcctcttccacccgaagctgatcatcgcaggaaccagctgctactcccgaaacctggaatatgcccggctacggaagattgcagatgagaacggggcgtatctcatggcggacatggctcacatcagcgggctggtggcggctggcgtggtgccctccccatttgaacactgccatgtggtgaccaccaccactcacaagaccctgcgaggctgccgagctggcatgatcttctacaggaaaggagtgaaaagtgtggatcccaagactggcaaagagattctgtacaacctggagtctcttatcaattctgctgtgttccctggcctgcagggaggtccccacaaccacgccattgctggggttgctgtggcactgaagcaagctatgactctggaatttaaagtttatcaacaccaggtggtggccaactgcagggctctgtctgaggccctgacggagctgggctacaaaatagtcacaggtggttctgacaaccatttgatccttgtggatctccgttccaaaggcacagatggtggaagggctgagaaggtgctagaagcctgttctattgcctgcaacaagaacacctgtccaggtgacagaagcgctctgcggcccagtggactgcggctggggaccccagcactgacgtcccgtggacttttggaaaaagacttccaaaaagtagcccactttattcacagagggatagagctgaccctgcagatccagagcgacactggtgtcagagccaccctgaaagagttcaaggagagactggcaggggataagtaccaggcggccgtgcaggctctccgggaggagagaggaaatgcccatgtccacagcttgtacacactgccccctcactatcttgttatccagtggcatgccaaaggagaactgaattag

SEQ ID NO: 23677 - DNA, 165 bp, Homo sapiens
  SIMILAR (62)..(163): 881254mologous to Mus musculus keratin 16,accession number AF053235,Smith-Waterman Score=147.
ttacgagcacgagctggccctgcagcagactgtggaggctggcgtcaatggcctgtgccgggagatgcttgctctgcgaggtcagaccggtggagaagtgaacgtggagacggatgccgcacctggcgtggacctgagctgcatcctgaatgagatgcgcaacca

SEQ ID NO: 23678 - DNA, 665 bp, Homo sapiens
  SIMILAR (43)..(663): 981254mologous to Homo sapiens keratin 14 (epidermolysis bullosa simplex, Dowling-Meara, Koebner),accession number BC002690,Smith-Waterman Score=1054.
gcgcagccaactgctcgctcgctcacctccctcctctgcaccatgactacctgcagccgccagttcacctcctccagctacatgaagggctcctgcggcatcgggggcggcatcgggggcggctccagccgcatctcctacgtactggccggagggtcctgccgcgcccccagcacctacgggggcggcctgtctgtctcatcctcccgcttctcctctgggggagcctatggattggggggcggctatggcggtggcttcagcagcagcagcagcagctttggtagtggctttgggggaggatatggtggtggccttggcgctggcttgggtggtggctttggcggtggctttgctggtggtgatgggcttctggtgggcagtgagaaggtgaccatgcagaacctcaacgaccgcctggcctcctacctggacaaggtgcgtgctctggaggaggccaacgccgacctggaagtgaagatccgtgactggtaccagaggcagcggcctgctgagatcaaagactacagtccctacttcaagaccattgaggacctgaggaacaagattctcacagccacagtggacaatgccaatgtccttctgcagattgacaatgcccgtctggccgcggatgacttccgcaccaagtatgagacagagtt

SEQ ID NO: 23679 - DNA, 1706 bp, Homo sapiens
  SIMILAR (3)..(128): 641254mologous to Homo sapiens type I keratin 16, K16,accession number S79867,Smith-Waterman Score=117.
  misc_feature (1)...(1706): n = a,t,c or g
atgggggcggcttcagccgcatctcctncgtcctggcgaaggggcctgcgcgtgcccccagcaccaaagggggcggcctgtcagtctccttctcgtttctcctctggggaagcatgcgggctggggggcggctatggcggtggcttcagcagcagcagcagctttggtagtggcttcaggggaggatatggtggtggccttggtgctggcttcggtggtggcttgggtgctggctttggtggtggttttgctggtggtgatgggcttctggtgggcagtgagaaggtgaccatgcagaacctcaatgaccgcctggcctcctacctggacaaggtgcgtgctctggaggaggccaacgccgacctggaagtgaagatccgtgactggtaccagaggcagcggcccagtgagatcaaagactacagtccctacttcaagaccatcgaggacctgaggaacaagatcattgcggccaccattgagaatgcgcagcccattttgcagattgacaatgccaggctggcagccgatgacttcaggaccaagtatgagcacgaactggccctgcggcagactgtggaggccgacgtcaatggcctgcgccgggtgttggatgagctgaccctggccaggactgacctggagatgcagatcgaaggcctgaaggaggagctggcctacctgaggaagaaccacgaggaggagatgcttgctctgagaggtcagaccggcggagatgtgaacgtggagatggatgctgcacctggcgtggacctgagccgcatcctgaatgagatgcgtgaccagtacgagcagatggcagagaaaaaccgcagagacgctgagacctggttcctgagcaagaccgaggagctgaacaaagaagtggcctccaacagcgaactggtacagagcagccgcagtgaggtgacggagctccggagggtgctccagggcctggagattgagctgcagtcccagctcagcatgaaagcatccctggagaacagcctggaggagaccaaaggccgctactgcatgcagctgtcccagatccagggactgattggcagtgtggaggagcagctggcccagctacgctgtgagatggagcagcagagccaggagtaccagatcttgctggatgtgaagacgcggctggagcaggagattgccacctaccgccgcctgctggagggcgaggatgcccatcttcacctcctcctcgtcctcttcgagccgtcagacccggcccatcctcaaggagcagagctcatccagcttcagccagggccagagctcctagaactgagctgcctctaccacagtctcctgcccaccagctggcctcacctcctgaaggcccggaagaagccagagaagggagccccccactactgtggcctaggagcttggaagacaatgctgagacagacatctgagctgtgggctccccaaatctgccagcaaaggactctcaaggatagagatgctttggaatccaccctgccagagacggaggcccgctatagctcccagctggcccagatgcagtgcatgatcaccaacgtggaggcccagctggccgagatccgggctgacctggagcggcagaaccaggagtaccaggtgctgctggacgtccgggcccggctggagtgtgagatcaacacgtaccggggcctgctggagggcgaggacgccca

SEQ ID NO: 23680 - DNA, 2368 bp, Homo sapiens
  SIMILAR (25)..(1131): 991254mologous to Homo sapiens serine hydroxymethyltransferase,accession number L23928,Smith-Waterman Score=1935.
gctaggcagcttcgaaccagtgcaatgacgatgccagtcaacggggcccacaaggatgctgacctgtggtcctcacatgacaagatgctggcacaacccctcaaagacagtgatgttgaggtttacaacatcattaagaaggagagtaaccggcagagggttggattggagctgattgcctcggagaatttcgccagccgagcagttttggaggccctaggctcttgcttaaataacaaatactctgaggggtacccgggccagagatactatggcgggactgagtttattgatgaactggagaccctctgtcagaagcgagccctgcaggcctataagctggacccacagtgctggggggtcaacgtccagccctactcaggctcccctgcaaactttgctgtgtacactgccctggtggaaccccatgggcgcatcatgggcctggaccttccggatgggggccacctgacccatgggttcatgacagacaagaagaaaatctctgccacgtccatcttctttgaatctatgccctacaaggtgaacccagatactggctacatcaactatgaccagctggaggagaacgcacgcctcttccacccgaagctgatcatcgcaggaaccagctgctactcccgaaacctggaatatgcccggctacggaagattgcagatgagaacggggcgtatctcatggcggacatggctcacatcagcgggctggtggcggctggcgtggtgccctccccatttgaacactgccatgtggtgaccaccaccactcacaagaccctgcgaggctgccgagctggcatgatcttctacaggaaaggagtgaaaagtgtggatcccaagactggcaaagagattctgtacaacctggagtctcttatcaattctgctgtgttccctggcctgcagggaggtccccacaaccacgccattgctggggttgctgtggcactgaagcaagctatgactctggaatttaaagtttatcaacaccaggtggtggccaactgcagggctctgtctgaggccctgacggagctgggctacaaaatagtcacaggtggttctgacaaccatttgatccttgtggatctccgttccaaaggcacagaatggtggaagggctgagaaggtgctagaagcctgttctattgcctgcaacaagaacacctgtccaggtgacagaagcgctctgcggcccagtggactgcgggtggggaaccccagcactggacgtcccggtggacttttggaaaaagacttccaaaaagtagctccactttattcacagagggatagagctgaccctgcagatccagagcgacactggtgtcagagccaccctgaaagagttcaaggagagactggcaggggataagtaccaggcggccgtgcaggctctccgggaggaggttgagagcttcgcctctctcttccctctgcctggcctgcctgacttctaaaggagcgggcccactctggacccacctggcgccacagaggaagctgcctgccggaggacccccacctggagagatggatgagctcgtccaaaggggaactgttgacactcgggccctttgagggggtttcttttggacttttttcatgttttcttcacaaatcaaaatttgtttaagtctcattgttagtaattctgggacaggttattaaaggatttaaatttgaacctggctttctcacagctggacataattctaggaaaataaaatactatgtcgccacttggtcataatcatttagatggtggtgtagggcaaagctgttagaaagattgtagcgttttactctccctgggctttccttccgccttgctgcaacagagaggaaatgcccatgtccacagcttgtacacactgccccctcactatcttgttatccagtggcatgccaaaggagaactgaattagcttctgaggcttctgctgtaaatcagaagtgtatgttagtcaagagtaaacaagatgcaccagtatggtgggagggttgctgtcagtagctcaaagtatggtgtagaaatggcctcctccctccatcctgggaagtcccagtcccatcctggtgtgagaatcaaccaggctttcctgctccacctgagataaccaactccctcccgtaatcaggaagccaaatgtcaccttcccaaagaaattttattttcacgtagctgaagtgcaaaacatagatgaccatttttaataagcacaatcaaatttttaaccacagaatgtctacaagaattatagctttaaaaaatacaaccaatttttatatttcaaaaatatttgaactcaaataaattaatttcttaaaaagtaaaaaaaaaaaa

SEQ ID NO: 23681 - DNA, 2474 bp, Homo sapiens
  SIMILAR (1361)..(1435): 961254mologous to Homo sapiens type I keratin 16, K16,accession number S79867,Smith-Waterman Score=119.
tctctcatcccaccccacgagaaacacccacaggtgtggaggggcaggccaccccttcagtcctcggtgctgcaccagcctctcaggccaaggccacgcccaccctgggcagacctcatgccagtgatcgtggggaggtggctcagctggatgaatggagctgccaggcccagcgtgggatctgtggacacaggagagagaactgctgggaacggatccccagccagtcctgtttctacaggccaactgctcgctcgctcacctccctccttggcacgatgagcacctgcagccaccagttcacctcctccagatccatgaagggctcctgcagtatcgggggcagcatcgggggcggctccagccgcatctcctctgtcctggccggagggtcctgccatgcccccagcacctacgggggggcctgtgtgtctccttctctcgcttctcctttgggggagcctgcgggctggggggaggctatggcggtggcttcggcagcagcaccaacttttggagtgtgcttcgggggaggatatggtgcgggccttggtgctggcttcggtggtggcttgggtgctggcttgggtggtggctttgctggtggtgatgggcttctggtgggcagtgagaaggtgaccatgcagcacctcggtgaccgcctggcctcctacctggacaaggtgcgtgctctggaggaggccaacgccgacctggaagtgaagatccgtgactggtaccagaggcagcggcccagtgagatcaaagactacagtccctacttcaagaccatcgaggacctgaggcacaagatcattgcggccaccattgagaatgcgcagcccattttgcagattgacaatgccaggctggcagctgatgacttcaggaccaagtatgaggcacgaactggccctgcggcagactgtggaggccgacgtcaatggcctgcgccgggtgttggatgagctgaccctggccaggactgacctggagatgcagatcgaaggcctgaaggaggagctggcctacctgaggaagaaccacgaggaggagatgcttgctctgagaggtcagaccggcggagatgtgaacgtggagatggatgctgcacctggcgtggacctgagccgcatcctgaatgagatgcgtgaccagtacgagcagatggcagagaaaaaccgcagagacgctgagacctggttcctgagcaagaccgaggagctgaacaaagaagtggcctccaacagcgaactggtacagagcagccgcagtgaggtgacggagctccggagggtgctccagggcctggagattgagctgcagtcccagctcagcatgaaagcatccctggagaaccagctgggaggagaccaagggccgctactgcatgcagctgtcccagatccagggactgattggcagtgtggaggagccagctggcccagctacgctgtgagatggagcagcagagccaggagtaccagatcttgctggatgtgaagacgcggctggagcagaagtattgccaccctaccgcagctctgctggagggcgaggatgcccacctttcctcccagcaagcatctggccaatcctattcttcccgcgaggttttcaccttcctcctcgtcctcttcgagccgtcagacccggcccatcctcaaggagcagagctcatccagcttcagccagggccagagctcctagaactgagctgcctctaccacagcctcctgcccaccagctggcctcacctcctgaaggcctggccaactgctcgctcactcacctccctcctcagcaccatgagcacctgcagccgccagttcacctcctccagctccatgaagggctcctgcggcatcgggggcggcatcgggggcggctccagccgcatctcctccgtcctggccggagggtcctgccgcgccaccagcacctacaggggtggcctgtctgtcgcctcctcctgcttctcctctgggggagcctacaggctggggggcggctatggcggtagcttcagcagcagcagcagcttcagtagtggctttgggggaggatatggtgatggccttggtgctggcttcggtggtggcttgggtggtggctttgctggtggtgatgggcttctggtgggcagtgagaaggtgaccatgcagaacctcaacgacagcctggtctcctacctggacaaggcgcgtgccctggaggaggccaacgctgacctggaggtgaagatccatgactggtaccagtggcagcggcctgctgagatcaaagactacagtccctacttcaagaccatcgaggatctgaggaataaggcaatagaacaggcttctagcaccttctcagcccttccaccatctgtgcctttggaacggagatccacaaggatcaaatggttgtcagaaccacctggaaacaaagttggacatgtagaaatgcaggcgaattctatgccgtga

SEQ ID NO: 23682 - DNA, 365 bp, Homo sapiens
  SIMILAR (2)..(364): 741254mologous to Homo sapiens Human secreted protein, SEQ ID NO: 8117,accession number G04036,Smith-Waterman Score=424.
ggaggatttgctcgacttggacgaggagcttcgctacagcttggctacctccagggccaagatgggtcgccgagctcaacaggagtcagcgcaggccgagaatcacctcaatggcaagaattcctctttgactctgactggagagacttcctctgctaaattacctcgctgccgacagggaggctgggcaggtgattccgtgaaggcttcgaacggtacccaaacaggcaaacaacagctggatctgaacgcatgctatcacaaaacgcatcacagagatttggggctggcttcattggaagaggcagatattcctatcattccggatctggaggaagtacaggaagaagactttgttttgcagg

SEQ ID NO: 23683 - DNA, 464 bp, Homo sapiens
  SIMILAR (217)..(342): 1001254mologous to Homo sapiens Human secreted protein, SEQ ID NO: 8117,accession number G04036,Smith-Waterman Score=211.
cggagatggaggatttgctcgacttggacgaggagcttcgctacagcttggctacctccagccccgagtgcgaacttccccagaacagatcgatcacagggtgataggggagccccggccgggttcgcactcgctcccatcctagagtttttcctttgggacacctcgtcgcagaagttcctgcaaaagccgcactgttttatgcatggaagggagagggccaagatgggtcgccgagctcaacaggagtcagcgcaggccgagaatcacctcaatggcaagaattcctctttgactctgactggagagacttcctctgctaaattacctcgctgccgacaggaggctgggcaggtgattccgtgaaggcttcgaagtttaggaggaaggcttctgaagaaatagaagatttccgcctcagaccacagagcctgaatggatcagattatggaggagatattcct

SEQ ID NO: 23684 - DNA, 935 bp, Homo sapiens
  SIMILAR (519)..(716): 961254mologous to Homo sapiens Human secreted protein, SEQ ID NO: 8117,accession number G04036,Smith-Waterman Score=329.
aggatttgctcgacttggacgaggagcttcgctacagcttggctacctccgtgaggaccaattcgggggccttgggggccaggatttggcgggtggggaggagcgaccccgccggccccgacttctctgaggcgactcagggcggcaggcctcgcgccgcgccgggtgaggcccagaaggaggcagcctcaccgccccgcccccaggccactgtgggctccgccgctgctggcctggggtttgctttctttaaaatcctcagaaagtagaaaacaccctgtccccgccggcgtctaggaccgtgggaaatttccgagcctttctccgttttctagagccccgagtgcgaacttccccagaacagatcgatcacagggtgataggggagccccggccggggtcgcactcgctcccatcctagagtttttcctttgggacacctcgtcgcagaagttcctgcaaaagccgcactgttttatgcatggaagggaggcaggcagggacggcctttcttcccgagggccaagatgggtcgccgagctcaacaggagtcagcgcaggccgagaatcacctcaatggcaagaattcctctttgactctgactggagagacttcctctgctaaattacctcgctgccgacagggaggctgggcaggtgattccgtgaaggcttcgaagtttaggaggaaggcttctgaagaaatagaagagtacgtttccagcattcttattcttatggtatcctatgttgatcttgggcaacagggcaggcttggtggtcatgatctgttccacctatgttgaacactgtgttagaagtctggggctagaattattgatgccctgctgaatccaaggtttggttaatcccgcttcctcaactgaaggtctggaccctggcattgatgcccatgtcctatctcccactgtgtg

SEQ ID NO: 23685 - DNA, 571 bp, Homo sapiens
  SIMILAR (35)..(163): 401254mologous to Homo sapiens MTG8,accession number AF198490,Smith-Waterman Score=72.
tcatgaagtactcagccattcagacactggatggggagatcgacctgaaactcctcaccaaagtgctcgcgccggagcacgaagtccggtaggtacagtggtggcagcaattccccggtctctcaactctggcaatccccataaacccagccgaactccccgggctggccctgtgcctcccctgaaggccctggaatgggagggagaaagtcagcctacagttaagggaaaaggccctttctttgtcttacccagcgaaacccttcttggcaggatgatgtcggctgggactgggaccatctgttcactgaggtgtcctcagaggtcctcactgaagtgggacccactgcagacggagaaggaggaccctgcggggcaggccaggcacacctgagcccgtcacccatgctctagacatgaagaaatgcaatgagcttaaagctaaagaagcttgtaagcagctccgaatttttacctggaatattttgtaataaaaatatttatattcagtcaaccacattggataattcaattgcaataaattgcttcttctgtgccaaaaaaaaaaaaa

SEQ ID NO: 23686 - DNA, 958 bp, Homo sapiens
  SIMILAR (430)..(510): 771254mologous to Homo sapiens Human secreted protein, SEQ ID NO: 8117,accession number G04036,Smith-Waterman Score=101.
tttcgtggaggatttgctcgacttggacgaggagcttcgctacagcttggctacctccgtgaggaccaattcgggggccttgggggccaggatttggcgggtggggaggagcgaccccgccggccccgacttctctgaggcgactcagggcggcaggcctcgcgccgcgccggagggccaagatgggtcgccgagctcaacaggagtcagcgcaggccgagaatcacctcaatggcaagaattcctctttgactctgactggagagacttcctctgctaaattacctcgctgccgacagggaggctgggcaggtgattccgtgaaggcttcgaagtttaggaggaaggcttctgaagaaatagaaggatttccggcctcagaccacagagcctgaatggttcagaattatggaggagatattcctattcattccggatctggaggaagtacaggaagaagactttgttttgcaggtgggcagcccctcccagcattccagataaagcgggtgatgacctaccgtgacctgggacaatgacctcatggaagtactcagccattcagacactggatggggaagattcgacctgaaactcctcacccaaaaggtctcgcgccggagcacgaagtccgggagcgaaacccttcttggcaggatgatgtcgggctggggacctggggccccatctgttccactgaggtgtccctcagaaggtccttcactgagtgggaccccactgcagacggagaaggaggaccctggcgggcaaggccaggcacacctgagcccgtcacccatgctctagacatgaagaaatgcaatgagcttaaagctaaagaagcttgtatgcagctccgaatttttacctggaatattttgtaataaaaatatttatattcagtcaaccacattggataattcaattgcaataccccgcttattctgtgccaaaaaaa

SEQ ID NO: 23687 - DNA, 444 bp, Homo sapiens
  SIMILAR (177)..(290): 311254mologous to Mus musculus high-sulfur keratin protein,accession number D86424,Smith-Waterman Score=50.
atgtccttcaactgctccacaagaaattgctcttccaggcccattggaggacgctgcattgttccagtggcccaagttaccacgacttccaccactgatgctgactgcctgggcggcatctgtttgcccagttccttccagactggctcttggctcctggaccactgtcaagagacctgcttggatgtcagcccctgggaggcatctccagtgtctgccaaccagtgggcggcatctctactgtctgccaaccagtgggaggagtctctactgtctgccagccagcctgtggggtctccaggacgtatcagcagtcctgcgtgtccagctgccgaagaacctgctaagtgtgtaggagccagtgagcgaatcaagactccacgacctgccagctgtttccaggatcttccagcatgctgcttgtccctgaatagctcttcatag

SEQ ID NO: 23688 - DNA, 913 bp, Homo sapiens
  SIMILAR (154)..(552): 401254mologous to Homo sapiens keratin associated protein 4.14,accession number AJ406944,Smith-Waterman Score=215.
cccacgcgtccgcttcagcaagctacctgcagccctctgtctgacatcatgtccttcaactgctccacaagaaattgctcttccaggcccattggaggacgctgcattgttccagtggcccaagttaccacgacttccaccactgatgctgactgcctgggcggcatctgtttgcccagttccttccagactggctcttggctcctggaccactgtcaagagacctgctgtgagcccactgcttgccaaccaacctgttaccggcgaacttcatgtgtctccaacccttgccaggtgacttgctctcgacaaactacctgtatttccaacccctgctcaactacctacagccggccgctcacctttgtctctagtggaagtcagcccctgggaggcatctccagtgtctgccaaccagtgggcggcatctctactgtctgccaaccagtgggaggagtctctactgtctgccagccagcctgtggggtctccaggacgtatcagcagtcctgcgtgtccagctgccgaagaacctgctaagtgtgtaggagccagtgagcgaatcaagactccacgacctgccagctgtttccaggatcttccagcatgctgcttgtccctgaatagctcttcatagctgacccttcttgtgaccgcctgactgctggctactatccatgcacacgctgctttacactctaaattttctgccagccctaacttgtttagggtgctactgtgctgtgatgcctctggtgtgtccagaagctttaccatccacaccccagtctctgatgcttttgacatgttttcaccttgctgctgtatctcctggcctctggctttgtggctcacaaaaacagaacttgtctcaaccatgatttctcaataaacctgcattagttggcattgc

SEQ ID NO: 23689 - DNA, 2019 bp, Homo sapiens
  SIMILAR (6)..(131): 351254mologous to Homo sapiens keratin associated protein 4.7,accession number AJ406939,Smith-Waterman Score=42.
tcagcgctgacgaggtctgccgaggacgcgtttctctctgcagcccggcaccagtctcaaggccatcggctccgacagcgtcacctcctgggaccttcccttcatgtatggtcccagcggcatgcgggcctggtggaggaggtcctggcctgccgcccagggatggccggtccaggcgcagggccgattgtccacttctggcccctcctgggtccctgtccgtcgggaagtcaggaagaagacgccgagtgaggtcacggtgcccacgagggtggattcccctcggcctgaccacgccaggaggtggccgaagggaagagggtggggcaggggctgctctgcaccctctagcagagcggcatccctgcaggtgtttgctctgacgaggagaagccccagagagcagttcgggactgtgcggattggctttagggagccagcttttaaaacgcgttggcccacggcctcctgcggcctggtcactggggacgggagcaggtatgcctggtccctgtgctgggccccacgggatgtaaagaagggccacctgggcacggcggggcctgcggtgcgggctggcctgtgggctccacagggttccatgcaggcattttgctcccataccccgatgtccaagcccggcctgctctcccctggaacgcctggaactagggtggtcaggctggggtggaggagctcccctggaatgttccagagcttcccccactcctgccgttctgagtcaccctgcctccccggaggaggaggaggatcagctgagccgccgcgctcacgtagtgtctggctgtctgcctgtctgcctcgctgtgagcagagtgggatgctgccgataaggcgcacgtgggccctgggaggagcccgaggcagccactcccgcacgtgggcaggaggagggctgctcacaccaccggccgagggaggaggactgcgggctgcgcccctgccccagccaggaccctctgcatcctttccatccttggcccatggtgtgtcctgccacatcttcccactctgtgcctgggccaggcccaggcagcgtcctgcagccagggtgctcacggctgctttgccggctgttcctgcactgcacgtctgcgtcacatccggtttttgtaagtgcccgttacaccctgtgtgcacacttgcggacgtgcacggctgcatcacatccggtttttctgtgatttctttgccacagacctgcgccccctggacatcctggcggaagtggtccctttctgactcctggcaggtggacgcctgcccagagagctgctgtgagcccccctgctgcgccaccagctgctgcgccccggccccctgcctgaccctggtctgcaccccagtgagctgtgtgtccagcccctgctgccaggcggcctgtgagcccagcccctgccagtcaggctgcaccagctcctgcacgccctcgtgctgccagcagtctagctgccagccagcttgctgcacatcctccccctgccagcaggcctgctgcgtgcctgtctgctgcaagccagtctgctgtgtgcccgtctgctgcaagcctgtctgctgcaagcccatctgctgtgtgcccgtctgctctggggcttcctcttcatgctgccagcagtctagccgccagccggcttgctgcaccacctcctgctgcagaccctcctcctccgtgtccctcctctgccgccccgtgtgcaggtccacctgctgtgtgcccatcccctcctgctgtgcccctgcctccacctgccagcccagctgctgccgcccggcctcctgcgtgtccctcctctgccgccccacgtgctcccgcctctcttccgcgtgctgcggcctctcctcaggccagaagtccagctgctgacgggcaggtcccgtttctccagagttgttccagggccatctctgacttccgaaaatccttgcagccctgagccctgtctgagtctcctctgcccatagccactgcacctccagccagcaatgctgagctttcat

SEQ ID NO: 23690 - DNA, 4404 bp, Homo sapiens
  SIMILAR (2652)..(3086): 321254mologous to Homo sapiens dJ885L7.8 (novel protein (translation of cDNA DFKZp434P1115 (Em:AL133063))),accession number AL035669,Smith-Waterman Score=115.
atggacgaaaagcggacccgacttcaaccggaagaagcggacgttccggcctatccaaaagtagccacagtcccgcagtcggaaaagaagccctccaagtatccactctgctctgcagacgcggctgtcagcaccacacctcctgggtcgccgccgcctccgccccctcttccagaaccaccggtgctaaaagtgctgtcatccctcaaacctgcagcccccagcccagccacagcagccacaacagcagcggcagcctccacggcagcttcctccaccgcttcgtctgcttccaaaacagcatcaccgctggagcacatcctgcagactctctttggaaagaagaaatcattcgacccgtccgccagagagcctcccgggtccaccgcaggtctcccccaggagcccaaaaccacagcagaggacggggtgccggcacctccgttgttagatccgatcgtccagcagttcggtcagttctcaaaagataaggctctagaggaagaggaggacgacaggccatacgaccctgaggaggagtacgacccggagagggccttcgacactcagcttgtggagcgagggcggcgccacgaggtggaaagggctcctgaagcagctgcagccgagcgggaagaggtggcctatgaccccgaggatgagaccatcttagaagaagcgaaagtgactgttgatgacctgcccaacaggatgtgtgccgacgtgagaaggaactccgtggagaggcctgccgagccggtggccggggctgcgacgccctccctggtggagcaacagaagatgctagaagagctgaacaaacagatcgaggagcagaagagacagctggaggagcaagaagaagctctcaggcagcagagggccgccgtcggggtctccatggcccacttctcggtgtcggacgccttgatgtctccaccaccaaagtcgtccttgcccaaggcagagctgttccagcaagagcagcagtctgcagacaagcccgcctcactgccccccgccagccaggcgtcaaaccacagggacccccggcaggcgaggcgcctggccactgagaccggtgagggggagggggagcctctctccaggctctcggcacgtggtgcccagggtgccctgcccgagagagatgcttccaggggtggcctcgtgggccaggcgcccatgccagtcccggaggaaaaagagccagcctcttccccctgggcttcgggcgaaaagcccccagcggggtccgagcaggacggctggaaggcagagcctggggagggcacccgccccgccacggttggagacagctcggccaggcctgcccggagggtgctgctgcccacaccgccttgcggcgccctgcagcccggcttcccgctgcagcacgacggtgagagggaccctttcacctgcccggggttcgcgtcgcaggacaaggctctcggctcagcccagtatgaggacccaagaaatcttcattctgctggaaggagcagcagccctgcaggtgaaacagagggggacagagagccacaggccagacccggcgagggcaccgccccgctccccccaccaggacagaaagtggggggctctcagcccccgtttcagggtcagcgggaacctggacctcatgctttggggatgtcagggcttcacggccccaatttcccgggaccaagggggccagcccctccgtttccagaagagaatatcgcttctaacgatgggccacgagggcctccgccagccagattcggagcccagaaggggcccatcccttccttattctcggggcaacatgggccacctccttatggggacagcagaggcccctcaccctcttaccttggtggaccacgaggagtggcaccatcccaatttgaagaacgcaaggatccccatggggagaagagggagttccaggacgccccgtataacgaggtgacgggcgcccccgcccagtttgaagggacagagcaagccccatttctgggaagcagaggcggcgcgcctttccagttcggaggccagagaaggccactgctgtctcagctgaaaggcccccgaggcggcccccctccctctcagtttggaggtcagagaggaccaccccctggtcatttcgtgggcccaagagggccccatcctagtcagtttgaaactgcccggggccctcatcccaaccagtttgaaggacccagaggccaagcgcctaactttatgccaggtcccaggggcattcagcctcagcagttcgaagaccagagggtccattcaccaccaagattcacaaaccaaagggcgcctgcacccctgcagtttggtggactacgggggtccgcacccttttctgaaaaaaatgagcagaccccttcgcgatttcacttccagggccaggccccgcaggtgatgaagccgggccccaggcccctgctggagcttcccagccaccccccgcagcaccggaaggaccgctgggaggaggccgggccgccctccgcgctctcctccagtgcgcccggacagggccccgaggccgacggacagtgggcatcggccgacttccgagaggggaaaggccacgaatacagaaaccagactttcgaagggaggcagagagagcggtttgacgtggggcccaaagagaagccgctggaggagcccgacgcccagggccggggcgtccgaggacaggaggagagagcgctaagcgcgcccgaaactggagccgaaagcgggatttgggaccggccccgggagtgggaccgacaccgggacaaggactccagccgggactgggacagaaaccgggagaggagcgccaaccgcgaccgagagcgcgaggccgaccggggcaaggagtgggaccgcagccgggagcggagcaggaaccgagagcgcgagcgagaccggaggcgcgaccgggaccggtcccggagcagagagcgggaccgagacaaggccagggacagggagcggggccgcgaccgcaagggaccggagcaagagcaaagagagcgctcgggacccgaagcccgaggcctcgagggcctccgacgctggcaccgcctcgcaggcctagacgccccggccgggcagagaccctttttaaagccacgttcgtaagatgcgttgaacaaatagcttttgaaatagccacgatcttagattcaggatagaatattctggacttaaacattactgtaattttgtgtaaatggtttcttacaagatttcacatctttacaattctgatgcttttttaaaaaaactaaactttaatatttccatttaaaattaaaagaaatgggaaattgcctacggagcatattgcttttcagatcatagttatcttttccaataactttattgtaaattttaagggagtttcgttggaccctagagccataccttcactgacatctcatccgtttgtgtttccaaaagctgcttttacaggtcttagccgccgccccggaggccggtgtgggcgtgacctgcaggcgtccaccctgcggctacgggagaagtcttagtagcttgtatctggagtcttgagaaacacaaaccttacaaatgcatctttcttttgtcataaaattggaattacaattttcaactgggaaacagaaacacatttcttagcgtgctcagattttatatatcaccttatcaattttttccaaaacatgatttaaagcaacatctgtcctagtataattgttgcattttaaataacaatttattgaaaaatgttaagttttaccagcctaaaaaaagtaacaaaccaatttaagtgtactttgggggggcggggagggagtccttgatttgaataatcaggagttttgttggtccagtttcgccttctgagcagttcttctgtatcccgggaaaagtacgctcggccccaaactggtatttgtcagacgatacatgtaaaagtttgtccttgaacgtggaacaagacttgtgtaaagttgtggaaacatggcgaggaagacctagctccagtatgcccctggggtcggccgcgtcccggtcagccacaccaagcaggaaaaggcccaggccccggagccctggcacccacaggcccacaaggcaccacagggtcactgagctgtagctccctgttctagcacagaggccgaggcagctccaagccctaaggacatcaagctggtcttgcacgataaatccatcccagcgttctgccgtcctctccagtgtgccaggaaagttctggatttcactgaatttagggtcagctaccattttcttttcccagattatccagagcacttgggcaaaagcctccaccccatttttactagaatgttcaatggcagccttggttccagaggcacttggttgaattttgcccat

SEQ ID NO: 23691 - DNA, 1398 bp, Homo sapiens
  SIMILAR (181)..(324): 421254mologous to Lycopersicon esculentum extensin (class I),accession number X55683,Smith-Waterman Score=102.
ggggggcctaaaggctgcagagcaatgaaagaaatggctacccccagtctggtggggaagacttaggttaaatttttttgtctttatcttcagagcaatgagaagccaatgaagaattttaagcaagggagtaacaatcagttattgatgagatcattctggctcctatgtggaatagattacaagaagccgccgccgccgcccgcgccgggacctgagtccgtggcgccggcgctgagcgggcccccgccgcccgcgcactcccgaggccctcgggcggttgttcgtgccgccgccgccgccaggcccgcgccaccggagccccgcggagccgccgccgccgccggggacggagcccagtgtggccacttactccatcaaggccagcaagagagtctctcagcaagacagatgtcacaatcttatgaaatcacaagagtgacatcccgtcactttgctgtattctcttgcaacgttaaaggcaagtcacaggtgctgcttgcactgaaggcgagaggactgcataaggccgtgaacaccagcagcaactcctcaggcttctacctggcgttgctctcgggattcaaggtgaccagcttgctacttgaggccacgtatgcctttaaccccctgaggcctgacgaggaggaggagagaggggaaaatgcctgctcacctgcacattgtcacgggaacaaaccatccccacagggactggcatttgactttctgcaagtgaccctggcctcatctctttctgaggactgtagacacctcagggagagggacactgtgtcggtttcctgtggctgctgtaacaaattcgcacagactgagagccttcgaacagcaggcatggatcctctcacggctctggaggccagaagcccaggatcaaggtgtcagcgagctctgcaggaggagatctgcatgacctcaaggacagcacaccccagggtggcagcccctggaaagcccagcaggagagccgtcagcggagggatgtcatgggagccagtggcatccctagcaacctgcactctcccaggtcccagccagatcgccagctcagccaagcaggagaaaatggctccctggaaccctccctggattcttccggcagtggagagggaggaggtgctgacgaaatctcacagggaagctgatgagaagcaacagccaagaactgcccactcgtgggagcagcctgtctcttcccacctctgccaggagggtgtggtcaccagaattccccagctggacaaaggaggtcgagggaaggtcacccctcccagcaaactaaagaaggccttcccgcttcctgctcagaaggcccaggccttgttggagtttgaagccaaagcaaaaaagaggcaggaccagtcgacctgggcgtga

SEQ ID NO: 23692 - DNA, 660 bp, Homo sapiens
  SIMILAR (170)..(217): 1001254mologous to Homo sapiens Peptide sequence derived from a human secreted protein,accession number Y40090,Smith-Waterman Score=78.
atggagagcgctcgcggcggtggggcccggcctgcgggcccggggcggcggagaagacccctccctgcgacgcgggagccgcgggagccgccccaggcgccccggggcatgctgggaacccaggcctgggctccgggccagactatgatgagagaagccacctgcatgcaccttcacccagatgacccatgccctgcaggagctggctgctgcccaggatcctttgaggttgccttccctgatgctgcggagaaaatgaagaagtcattacacagcttaaagaaggggtgctactctagggtctgcgacctcccgctggactgcccaggatgtgacagtgactcggggcgccaggctatgttttcttgcatcgtaaacttccagctgccaaaggaggagtcacctattcctggaagttcgcaggaggagtcctcggggccctcgcacagcgagtgcgacagtgttggcgtggactggagggggcagcgggtgagccgaaagctccaagctcctaatcatagcctagtcttgctggtgaccagcctcttccaggagaccaccaagagtcacttgaatagaacaaacgatgctgtatcacccaggaaattcaagagattaggagctctatactggggcaaagtggaagcaggcatcctgtga

SEQ ID NO: 23693 - DNA, 889 bp, Homo sapiens
  SIMILAR (635)..(3): 611254mologous to Homo sapiens Peptide sequence derived from a human secreted protein,accession number Y40090,Smith-Waterman Score=616.
ccagcgcagcacttcccggaacgaggcctgcaactctgatcctccgcggggcgggcccgtcacgttaagaaagaagtagagccgggccagggggcgctggtcttgcttgatcacgcaggagaacgttccgcggtgcgtgagctgagccggccggatccgcgccaggtatccttcggcccgcggcatatctcggaaataggacaagtcctgagtccggagctcctcctgcgaacttacaggaataggtgatctcctcctttggcagctggaagtttacgatgcaagaaaacatagcctggtcggcccggagtcactgtcacatcgtgaactgggcagtccagcgggaggtcgcagaccctagagtagcacccgctgcagaggaaacgccgggcgaactcctggagaccgcagggagggatgcaagcctgggcttctttaagctgtgtaatgaccttcttcattttctccgcagcatcagggaaggcaacctcaaaggatccctgggcagcagccagctcctgcagggcatgggtcatctgggtgaaggtgtcatgcaggtggcttctctcatcatagtctggcggtgagggagggagcaggggctgggggaggcagctccccgcaacaccatgtccctaatgcgaacattctgtttctgagtctctgccctcccaagtctgtataaacccctcaaagactctttgccccacagtcgctatgcttcctgagtccctcccaagtctctatcctcacctctctgtgagtctctatcctccctgagtctctgcccccgaccagtcgctatcctgcttcccctagtctctgcatcatctcatatcctcccctctctgggtttccatcctctgtgagtctccgtcttccaccctct

SEQ ID NO: 23694 - DNA, 612 bp, Homo sapiens
  SIMILAR (1)..(483): 881254mologous to Human endogenous retrovirus K env protein,accession number Y17833,Smith-Waterman Score=760.
atgaagttgccattcaccaagaaggcagagccgccgacttgggcacaattaaagaagctgacacagttagctaaaaaaggccttgagaacacaaaggtgacacaaactccagagagtatgctgcttgcagctttgatgattgtatcaatggtggtaagtctccccatgcctgtaggagcagctgcagctaattatacctactgggcctgtgtgcctttcctgcccttaattcgggcagtcgcatggatggataatcctattgaagtatatgttaataacagtgtatgggtacctggccccacagatgatcactgccctgccaaacctgaggaagaaggaatgacgataaatatttctactgggtatcgttatcctcctatttgtctagggagaacaccaggatgtttaatgcctacaatccaaaattggttggtagaagtacttacttactgtaccaccagtagattcacttatcacatggtgtacccaacagctccaaagagacagcgaccatcgagaacgggccatgatgacgatggcggttttgtccaaaagaaaagggggaaatgggaaaagagagatcagactgttaccgtgtctatgcagaaataa

SEQ ID NO: 23695 - DNA, 1752 bp, Homo sapiens
  SIMILAR (94)..(1581): 881254mologous to Homo sapiens Gag-Pro-Pol-Env protein,accession number AF164611,Smith-Waterman Score=2343.
atggtgctccgggccagggtgaaggtacgctcgagtgtggtcattgaggacaagtccacaagagatcccgagtacgtctacagtcagccttgcgtatggaatgattgggccattattaaagcagctttagaaccatttcaaacagaagaagatagcgtttcagtttctgatgcccctgaaggctgtgtaatagattgtaaagaagaggcggggaggaaatcccggaaagaaatggaaagtttacattgtgaatatgcagtagagctggtaatggctcagtcaatgcaaaatgttgactataatcaattacagcaggtgatataccctgaaacgttaaaattagaagaaaaaggtccagaattagtggggccatcagagtctaaaccacgagggacaagtcctcttccagcaggtcagatgcccgtaacattacaacctcaaacacaggttagagaaaataagacccaaccaccagtagcttatcaatactggctgccggctgaatttcagtatcggccacccccagaaagtcagtatggacatccaggaatgctcccagcaccacagggcagggcgccataccctcagccgcccactatgagacttaatcctacagcaccacctaatagacagggtagtgcattacataaaattattgataagtcaagaaagcaaggagatattgaggcgtggccattcccactaatgttagaactgataccacctggagaaggagcccaagagggagagcctcccacagttgaggccagatacaagtctttttctataaaaatgctaaaagacatgaaagagggaataaaacagtatggacccaactccccttatatgaggacattattagattccattgcacacggacatagactcattccttatgattgggagattctggcaaaatcgtctctctcaccctctcaatttttacaatttaagatttggtggattaatggggcacaagaacaggtccgaaaaaatagggctgctaatcctccagttaacatagatgcagatcaactactgggaactggtcaaaattggagcactattagtcaacaagcattaatgcaaaatgaggccattgagcaagttagagctatctgccttagaacctgggaaaaaatccaagacccaggaaccgcctgcccctcatttaatacaagacaaggctctaaagagccctaccctgattttgtggcaaggctccaagatgttgctcaaaagtcaattgccgatgaaaatgcccgtaaggtcatagtggagttgatggcatacgaaaatgccaatcctgagtgtcaatcagccattaagccattaaaaggaaagtttcccgcaggatcagatgtaatctcagagtatgtaaaagcctgtgatggaatcggaggagctatgcataaagctatgcttatggctcaagcactaatgggagctgctttaggaggacaagttagaacatttggagggaaatgttataattgtggtcaaagtggtcatttaaaaaagaattgcccagcctcaaataaacagaatataactattcaagtgactacaacaacaggagaaaatcagcttcctgtttggatacccactagacatttgaagttctacaatgaatccatcagagatgcaaagaaaagcgcctccacggacatggaaacaccagtcacatggatggataatcctattgaagtatatgttaatgatagtgtatggggtacctggccccacagatga

SEQ ID NO: 23696 - DNA, 470 bp, Homo sapiens
  SIMILAR (398)..(457): 651254mologous to Homo sapiens envelope protein,accession number AF164615,Smith-Waterman Score=66.
gacaagtcgacgagatttccgagtacgtctatagtcagccttgtgacatttgatgttctacaatgaacccgtcggagatgcaaagaatagcacctccacggagacagagacaccgcagtcgagcaccatcggctcacaagatgaacagaatggtgatgtcagaagaacagatgaagttgccatccaccaagaaggcggagccgccgacatgggcacaattaaagaagctgacacagttagctaaaaaaaagcctagagaacacaaaggtgacacaaactccagagaacatgctgcttgcagctttgaagactgtatcaacagtgtctgcaggtgtacccagcagctccgaagagagcgaccatcgagaacgagccatgatgacaacggtggttttgtcgaaaagaagggggaaatgtggggaaaagaaagagatatcagactgttactgtgtctatgtagaaagaagtaa

SEQ ID NO: 23697 - DNA, 1398 bp, Homo sapiens
  SIMILAR (1)..(396): 871254mologous to Homo sapiens putative p150,accession number U93563,Smith-Waterman Score=599.
atgagtgaactcccattcacaattactacaaagagaataaaatacctaggaatccaacttacaagggatgtgaaggacctcttcgaggagaactacaaagcactgctcaaggaaataagagagggcacaaacaaatggaaaaacattccaggctcatggataggaagaatcaatatcgtgaaaatggccatactgcccaaagtaatttatagattcaatggtatccctatcaagataccattgactttcttcacagaattagaaaaaacttctttaaatttcatatggaaccaaaaaagagcctgcattgccaagacaatcctaagccaaaagaacaaagctggatgcatcacaccacctgacttcaaactatgctacaaggctacagtaaccaaaagaggatgccgccccatctgggaagtgaggagcgcctctgcccggccgctccgtctgggaggtgaggagcgcctctgcctggccgctgtgcaatcttccaagtgtgaagtgacagcctttctgcaggtgtacccaacagctccgaagagacagcaaccatcgagaacgggccatgatgacgatggcggttttgtcgaaaagaaaagagggaagcgttgtgcctgtcagcttttccggagaggaaaggacagaaaagttcggggagattggctgcagcagaaaagagcaagctctcaggacattattagaaaggtgaacttaactgctccaggggccacctgtagcactgaggtggtggcttcagtggttatgttaactgaagtgaaccaggaggcaaggaaaagagttactatgctggcaggagtgattgacattgattatgacaaagagttagagtttatgctgtataacacaggttgtaacacattgcgaagaaaagaagggccatggcagtttacaaatgccatggtgatgtcaggaagttaccctgtatggtctaaaaagggaaggaagaacatacttcgtttcttagatgcagaacgagatgtgtcagtggtcaagagcagttttaagcctggtgatgtcatacactatgtgcttgacaggcgccggacactaaacatttctcatgatctacatagcctcctacctgaagtttcaccaatgaagaatcgcaggtttaagacctgtgcagttgttggaaattctggcattctgttagacagtgaatgtggaaaggagattgacagtcacaattttgtaataagtttgtattcagctgctgataaagacatgcctgagactgggaagaaaaagaggtttaattggacttacaattccacatggctggagaggcctcagaattatggtgggaggcgaaaggcccttcttacatggcggtggcaagagaaactggggaagatgcaaaagcggaaaccctag

SEQ ID NO: 23698 - DNA, 825 bp, Homo sapiens
  SIMILAR (535)..(500): 831254mologous to Homo sapiens Human secreted protein, SEQ ID NO: 7681,accession number G03600,Smith-Waterman Score=51.
atggcgtatatggccatcgacacagtccgtggtttacagccaaatgcgtgtggtgatggtattgagtgttctgatgcactttgtgagtggccacacatcaacaggcacgaaggttgtctagtggatgtgtcgctacaaaactggggatctatagatcgaaatgcagcttgcaaccaatctagcaggaagagtggaaaggcaaggcgcttttctgctggcacccttgtagtcacaagaagtcagatatttaacaagtggagtttctatgacaacacaagaaacacaagtctaatagctagaaactcagtttctgagtcgagaggacagccagccgagcttgaagcaccttcaggtggtagagccatcatggcggatatggccatcgacacagtccgtggtttacagccaaatgcctgtggtgatggtattgagtgttctgatgaaccttctgagtggccacacatcaacaggcacgaaggttgtctactggatttgtctgaggagcgcctctgcccggccgccctgtctgggaagtgtacccaacagctccgaagagacagcgaccatcgagaacaggccatgatgacgatcgcggttttgtcaaaaagaaatgggggaaaatggaggcgccgccccggcctcacattaggacataaggagatcgggattccagatcaccccaaaatagacatgcagagaaagtcctcaattgcagatgttataatctccccacagtcctctctgagtatgtctgtgtcaaagggagctactggacagggaacaaacagcagaaagcagagtcctggcacagttgtattcacatga

SEQ ID NO: 23699 - DNA, 4560 bp, Homo sapiens
  SIMILAR (3)..(2756): 961254mologous to Homo sapiens Gag-Pro-Pol protein,accession number AF164614,Smith-Waterman Score=4685.
aaaaaccagtgtgggtaaatcagtggccgctaccaaaacaaaaactggaggctttacatttattagcaaatgaacagttagaaaagggtcatattgagccttcattctcaccttggaattctcctgtgtttgtaattcagaagaaatcaggcaaatggcgtatgttaactgacttaagggccgtaaatgccgtaaacgccgtaattcaacccatggggcctctccaacccgggttgccctctctggccatgatcccaaaagattggcctttaattataattgatctaaaggattgcttttttaccatccctctggcagagcaggattgtgaaaaatttgcctttactataccagccataaataataaagagccagccaccaggtttcagtggaaagtgttacctcagggaatgcttaatagtccaactatttgtcagacttttgtaggtcgagctcttcaaccagttagagaaaagttttcagactgttatatcattcattatattgatgatattttatgtgctgcagaaacgaaagataaattaattgactgttatacatttctgcaagcagaggttgccaacgcaggactggcaatagcatctgataagatccaaacctctactccttttcattatttagggatgcagatagaaaatagaaaaattaagccaccaaaaatagaaataagaaaagacacattaaaaacactaaatgattttcaaaaattgctgggagatattaattggattcggccaactctaggcattcctacttatgccatgtcaaatttgttctctatcttaagaggagactcagacttaaatagtaaaagaatgttaaccccagaggcaacaaaagaaattaaattagtggaagaaaaaattcagtcagcgcaaataaatagaatagatcccttagccacactccaacttttgatttttgccactgcacattctccaacaggcatcattattcaaaatactgatcttgtggagtggtcattccttcctcacagtacagttaagacttttacattgtacttggatcaaatggctacattaattggtcagacaagattacgaataataaaattatgtggaaatgacccagacaaaatagttgtccctttaaccaaggaacaagttagacaagcctttatcaattctggtgcatggcagattggtcttgctaattttgtgggaattattgataatcattacccaaaaacaaagatcttccagttcttaaaaatgactacttggattctacctaaaattaccagacgtgaacctttagaaaatgctctaacagtatttactgatggttccagcaatggaaaagcagcttacacagggccgaaagaacgagtaatcaaaactcaatatcaatcggctcaaagagcagaattggttgcagtcattacagtgttgcaagattttgaccaacctatcaatattatatcagattctgcatatgtagtacaagctacaagggatgttgagacagctctaattaaatatagcatggatgatcagttaaaccagctattcaatttattacaacaaactgtaagaaaaagaaattttccggccgggcgcgggcctttgactaaagcaaatgaacaagctgacttactggtatcatctgcactcataaaagcacaagaacttcatgctttgactcatgtaaatgtagcaggattaaaaaacaaatttgatgtcacatggaaacaggcaaaagatattgtacaacattgcacccagtgtcaagtcttacacctgcccactcaagaggcaggagttaatcccagaggtctgtgtcctaatgcattatggcaaatggatgtcacgcatgtatcttcatttggaagattatcatatattcatgtaacagttgatacttattcacatttcatatgggcaacttgccaaacaggagaaagtacttcccatgttaaaaaacatttattgtcttgttttgctgtaatgggagttccagaaaaaatcaaaactgacaatggaccaggatattgtagtaaagctttccaaaaattcttaagtcagtggaaaatttcacatacaacaggaattccttataattcccaaggacaggccatagttgaaagaacaaatagaacactcaaaactcaattagttaaacaaaaagaagggggagacagtaaggagtgtaccactcctcagatgcaacttaatctagcactctatactttaaattttttaaacatttatagaaatcagactactacttctgcagaacaacatcttactggtaaaaagaacagcccacatgaaggaaaactaatttggtggaaagataataaaaataagacatgggaaatagggaaggtgataacgtgggggagaggttttgcttgtgtttcaccaggagaaaatcagcttcctgtttggatacccactagacatttgaagttctacaatgaacccatcggagatgcaaagaaaagcacctccgcggagacggagacaccgcaatcgagcaccgttgactcacaagatgaacaaaatggtgacgtcagaagaacagatgaagttgccatccaccaagaaagcagagccgccgacttgggcacaactaaagaagctgacgcagttagctacaaaatatctagagaacacaaaggtgacacaaaccccagagagtatgctgcttgcagccttgatgattgtatcaatggtggtaagtctccctatgcctgcaggagcagctgcagctaactatacctactgggcctatgtgcctttcccgcccttaattcgggcagtcacatggatggataatcctatagaagtatatgttaatgatagtgtatgggtacctggccccacagatgatcactgccctgccaaacctgaggaagaagggatgatgataaatatttccattgggtatcgttatcctcctatttgcctagggagagcaccaggatgtttaatgcctgcagtccaaaattggttggtagaagtacctactgtcagtcccatcagtagattcacttatcacatggtaagcgggatgtcactcaggccacgggtaaattatttacaagacttttcttatcaaagatcatttaaatttagacctaaagggaaaccttgccccaaggaaattcccaaagaatcaaaaaatacagaagttttagtttgggaagaatgtgtggccaatagtgcggtgatattacaaaacaatgaatttggaactattatagattgggcacctcgaggtcaattctaccacaattgctcaggacaaactcagtcgtgtccaagtgcacaagtgagtccagctgttgatagcgacttaacagaaagtttagacaaacataagcataaaaaattgcagtctttctacccttgggaatggggagaaaaaggaatctctaccccaagaccaaaaataataagtcctgtttctggtcctgaacatccagaattatggaggcttactgtggcctcacaccacattagaatttggtctggaaatcaaactttagaaacaagagatcgtaagccattttatactgtcgacctaaattccagtctaacagttcctttacaaagttgcataaagcccccttatatgctagttgtaggaaatatagttattaaaccagactcccagactataacctgtgaaaattgtagattgcttacttgcattgattcaacttttaattggcaacaccgtattctgctggtgagagcaagagagggcgtgtggatccctgtgtccatggaccgaccgtgggaggcctcaccatccatccatactttgactgaagtattaaaaggtgttttaaatagatccaaaagattcatttttactttaatagcagtgattatgggattaattgcagtcacagctacggctgctgtagcaggagttgcattgcactcttctgttcagtcagtaaactttgttaatgattggcaaaaaaattctacaagattgtggaattcacaatctagtattgatcaaaaattggcaaatcaaattaatgatcttagacaaactgtcatttggatgggagacaggctcatgagcttagaacatcgtttccagttacaatgtgactggaatacgtcagatttttctattacaccccaaatttataatgagtctgagcatcactgggacatggttagacgccatctacagggaagagaagataatctcactttagacatttccaaattaaaagaacaaattttcgaagcatcaaaagcccatttaaatttggtgccaggaactgaggcaattgcaggagttgctgatggcctcgcaaatcttaaccctgtcacttgggttaagaccattggaagtactacgattataaatctcatattaatccttgtgtgcctgttttgtctgttgttagtctgcaggtgtacccaacagctccgaagagacagcgaccatcgagaacgggccatgatgacgatggcggttttgtcgaaaagaaaagggggaaatgtggggaaaagcaagagagatcagattgttactgtgtctgtgtag

SEQ ID NO: 23700 - DNA, 717 bp, Homo sapiens
  SIMILAR (516)..(593): 501254mologous to Homo sapiens proline rich peptide P- B,accession number D29833,Smith-Waterman Score=76.
atggggctcgtggggaggggaaaacgtatggggctggggtcgctctggaggccggggactcggactcgggtagccgcggaggcctttctcaccatcgcgccaaactctcttcgctacagcagctgccgacaccgccgccgttacacgagcttaactacaacgccgctaacagccaatcctcgcgagaggagccgccggaagtcgtcgaaagtgcaacgcaaaagagccttttggatcatagaggcacagtcacttccggcagctagagcagctactgactctgtttcagccatcttcgataaaggcaaaaaggtgggtttcactgtgctccgccgccgccgcctagcgcgcatcggatcggatttctcttcctggaacctgaccgtgtctgtgtcggcatttggcactcaacgccagtctggagctatccgtgcagtgtgtgtccgtgatttatctgcgcgcctggcccgcgctccctgggaccagctgttccatccgcttccgctcctttcggagttggcgtttggggtgaccggctcattttcaggccagggagatgccggccgggccccaggggaccgcctcctcccggcaggcaggccacgtcgtgtctacttgtttccaggcttgtgccaagtgaaggacccaggaatgctgcgactctggcttcagcaccggcatctgtctgtcagctgggcccagcccaagtatccctga

SEQ ID NO: 23701 - DNA, 900 bp, Homo sapiens
  SIMILAR (121)..(372): 401254mologous to Homo sapiens human protein homologous to DROER protein,accession number D85758,Smith-Waterman Score=84.
aggattggctgttagcggcgttgtagttaagctcgtgtaacggcggcggtgtcggcagctgctgtagcgaagagagtttggcgcgatggctttgactgctcaggttattacagtctcacgaccattttgctggtacagcctaccaagaggcccagaaggcagaacttatgctgactacgaatctggtaaatgaatgcatggaaggtgtttgtaaaatgtatgaagaacatctgaaaacgaatgaatccccaacggtccctccatccacataataccacaagtcagttgtttgatttcatcgatggatctggcagacctcagctgcctggtttaccgagcttgatacccagacatacccagccttataaccaaagactggattaaagacgaagatcctacggtgctcctttcgtcgggcaaggcccaacaggctcgggaaataattgtcgttggaagccactgggggggttggggtggggcttgggacacaggtgtgtaacagcgtgcctgttagtggaagttttgtattcatagtaaatccctgtttcccactttgttatactctagcccaagattgacctgtattagatgaaatgtgaggttcttgttcaatcgggaaacccccgttacctcctcctttttctttcctcctttctattttttcttttttaccttaaacatcttttatgatgatttagatggaagttgttcttcgtcgacttaatgttggttccagtccttcaactgttcatatctactttataacattcacatactaacccttctggggttcaagatggggtggggggtggaaatgcagttttagccatgtcctcaagataaagtaattggtaaaaataaataaatggtcctttagttataaaaaaaaaaaaaaaaaaa

SEQ ID NO: 23702 - DNA, 438 bp, Homo sapiens
  SIMILAR (3)..(266): 981254mologous to Homo sapiens put. HMG-17 protein,accession number X13546,Smith-Waterman Score=456.
  misc_feature (1)...(438): n = a,t,c or g
ccaagagaaaggctgaaggggatgctaagggagataaagcaaaggtgaaggacgaaccacagagaagatccgcgaggttgtctgctaaacctgctcctccaaagccagagcccaagcctaaaaaggcccctgcaaagaagggagagaaggtacccaaagggaaaaagggaaaagctgatgctggcaaggaggggaataaccctgcagaaaatggagatgccaaaacagaccaggcacagaaagctgaaggtgctggagattccaagttgaagtgtgtgcattttttgattaactgtgttacttctggtgactgtacagtttgaaatactattttttatcaagttttataaaaatgcagaattttggtttacnnnnnnnnnnnnnnaaaaagctatgtggtaaccaccacaaaacacttctttgttgttttgggggaag

SEQ ID NO: 23703 - DNA, 1023 bp, Homo sapiens
  SIMILAR (1017)..(850): 731254mologous to Homo sapiens A human SPOIL-II protein (also known as hTANGO 080-II),accession number Y24044,Smith-Waterman Score=191.
ggacggtcaagtgccaaggtttgcatgcttcaggtcgacttttaaagaatccttgtggaaagagtcagaaaaagagcaagagagcttgattcggaggccgtgcctctcagagtggcctcccgatccttgaatcggagcccgtgcctatcagcctggcctcctgatccttgaatcggaggccgtgcctctcagcgtggcctcccaatccttgaatcggaggccgtgcctctcatcgtggcctcccgacctagcatggtggagagcgccccctgccggtagatcctgggccggcacactgagagcggcaggccccgccggaggggccagcgcaggaccggggagaatggagctcacccagtgcctagccctgcgtttactctcagtttcctgctggagagcaatgcctcaaactacacagtccggcggaggcgagtccgccagctctggaagcctctgaggcacagacgaggaaagcgcctgaatgtggatctggggtaccagaagttgccggtggctcttgcccctgtcttcttctttgccttccaagacaccaagctgttcccacccaaggtcctggcacttactctccctgcacctcacaccagccccacatcttcccaaggccagctgctccccatcacctgggtctcctccaaaacccgcacaatgctgcatcctgcatccagtgcctatatcccgctggggtggccaccaccatgcccaggagaaaggctgaaggggatgctgaaggagataagccaaggtgaaggacgaaccacagagaaggcccgcaaagttgtctgctaaacctgctcctccaaatccagaggccaagcctaaaaatgcccctggggtcacactgtcacttcgtggaactgccacaaggttctgaccctgaagggtccacacttgctgattcaaatcattaatagtcccagtaataggtttacacaccaacgtagatggaatgatgtgcatggacatggccgaaagcctctgctcctccacatagcccaagcccat

SEQ ID NO: 23704 - DNA, 2572 bp, Homo sapiens
  SIMILAR (234)..(284): 1001254mologous to Homo sapiens SPOP,accession number AJ000644,Smith-Waterman Score=92.
acgccagcttggacgagggagccgcagtgtatttttgctggccaacgtgcgcactgcgaatgcgtgtgtatttgtgtatcggcggtcccgcaggtcccgggatgttgcggacagtatgaggcaagcgcagggggacggggaccagcagctgtcgccgccgctctcagggggaagagggaacagaaatctttgccccctgactttggaaatctcgtttaaccttcaaactggcgatgtcaagggttccaagtcctccacctccggcagaaatgtcgagtggcccccgtagctgagagttggtgctacacacagatcaaggtagtgaaattcctcctacatgtgggacccatcaataactttagctttttgccgggaggaaatgggttgaagtccattaaaagttcaacattttcatcaggagcaaatgataaactgaaatggtgttttgcgagtaaaccccaaagggtttagatgaagaaagcaaagattacctggtcacttttacctgttacctggtcagctgttccaaagagtgaagttcgggcaaatttcaaattctccatcctgaatgccaagggagaagaaaccaaagctatggagagtcaacggggcatataggtttgtgcaaggcaaagactggggattcaagaaattcatccgtagagattttcttttggatgaggccaacgggctttctccctgaatgacaagcttaccctcttctgcgaggtgagtgttgtgcaagattctgtcaacatttctggccagaataccatgaacatggtaaaggttcctgagtgccggctggcggatgagttacgaggactgtgggagaattccccggttcacagactgctgcttgtgtgttgccggccatgaattccaggctcacaaggctatcttagcagctcgttctccggtttttagtgccatgtttgaacatgaaatggaggagagcaaaaagaatccgagtttgaaatcaatggatgttggagcctgaagtttttaaggaaaatgatgtgcttcatttacacggggaaggctccaaacctgaccaaaatggcctaatgatttgctggcagctgctgacaagtatgccctgggagcgcttaaaggtcatgtgtgaggatgccctctgcagtaaccctgtcccgtggagaacgctgcagaaattctcatcctgggccgacctgcacaagtgcagatcagttgaaaactcaggcagtggatttcatcaactatcatgcttggggatgtcttggagacctctgggtggaagtcaatggtgttgtcacatcccccaacttggtggctgaggcataccgctctctggcttcaagaacagtgcccttttctggggacccccacgcaaaacgccttgaagcaatccctaaagatcctgctttgttgttaaggattccgttttaattttccagaaggcagcagcccactgtttgcttgccattgaaccaccagggtaggacagcgcaatctgtgggagctttttactcttgtttgttgagggggaagagattggcatttttggccccagattttttaaaaacagcactaaataacttgggggggaaacggggggagggaaaatggaaatgaaaaccctgttgctgcgtcactgtgttccctttggcctggctgagtttgatactgtggggattcagtttaggcgctggcccgaggatatcccagcggtggtacttcggagacacctgtctgcatctgactgagcagaacaaatcgtcaggtgcctggagcacaaaggaataaaaaccaagaaaaggactttgagttttaacagaagggaaaaggaaagaaaaaaaaatttttgcaaaatttctcaaaaatcagttgggggattccagtagtatttatatggagagaaacaaattttagtccttttaactgtgcctaaaacctggatatttgtgaaaactcccttacccacccatacaagcatcagaagagcctctcttgttgttagcaccttattgtttgccaagaacagaatacatccttttatccttttatgaaaaatgacaagtgaaggcaaaaggggaaggttatttgatctgggaagatgagtgttctgatgtggtggcttttgcaaaaatcttttattgggtgttggaaaactgggaaaaaataactccatccagaattccatattgtcttgacaagaactatggttctctgttttttaggatattgtggggaaatgtttttggggcatttttctctgattttatttcttctcccccacccctttttctaaaaaacaaacaaaaaaaaaaaaacacacaaaacaaaaacagaacaaaagaagagagaaggaaattttatcaattaaaaatgctgtgtgataaaatcccagcccagattgctcagctgtttgtacctgacttgccgcctgcataggagccagttctgttccttctgactagcccctcttcctccaggggagaacttccaaatgttaatttttttttttttgaaaatataaataattactattttgtaaaaaaaaaaaaaaaaaaaaaaaaaaaaaaaaaaaaaa

SEQ ID NO: 23705 - DNA, 609 bp, Homo sapiens
  SIMILAR (1)..(405): 851254mologous to Homo sapiens proteasome activator PA28 beta,accession number AF079558,Smith-Waterman Score=600.
tttcgacacagaaaaattatatactagaatctgcttaagcaagaggactccataaatgtgacagagatgacttccatcagggcctcagtggacatcctcatcccagaccctccacccaaggatgatgagatggatacagataagcaggagaagaaagaagtccctaagtgtggatttctccctgggaatgagaaagtcctgtccctgcttgccatggttaagccagaagtctggactctcaaagagaaatgcattgtggtgattacatggatccaacacctgatccccaagattgaagatggaaatgattttggggtagcaatccaggagaaggtgctggagagggtgaatgccgtcaagaccaaagtggaagctttccagacaaccatttccaaatggattaccgggccttggtgcatgagcgagatgaggcagcctatggggagctcagggccatggtgctggacctaagggccttttatgctgagctttatcatatcatcagcagcaacctggagaaaattgtcaacccaaagggtgaagaaaagccattaatgtaccccacccgggactagaaggaaaataaatataatatatgttgaaaaaaaa

SEQ ID NO: 23706 - DNA, 1095 bp, Homo sapiens; identical to SEQ ID NO: 20882
  SIMILAR (469)..(1092): 1001254mologous to Homo sapiens Similar to CGI-112 protein,accession number BC002491,Smith-Waterman Score=1115.

SEQ ID NO: 23707 - DNA, 457 bp, Homo sapiens; identical to SEQ ID NO: 20883
  SIMILAR (232)..(396): 941254mologous to Homo sapiens proteasome activator PA28 beta,accession number AF079558,Smith-Waterman Score=260.

SEQ ID NO: 23708 - DNA, 1436 bp, Homo sapiens
  SIMILAR (65)..(148): 921254mologous to Homo sapiens proteasome activator PA28 beta,accession number AF079558,Smith-Waterman Score=128.
  misc_feature (1)...(1436): n = a,t,c or g
aacctgacgctgtggctgagtacgtctgcccgggtcgacccacgcgggcggagacagaagcagcatggccaagccgtgtggggtgcgcctgagcggggaagcccgcatacaggtggaggtcttgagacagaatcttttccaggaggcgtgaggaattcctctacagattcttgccacagaaaatcatatacctgaatcagctcttgcaagaggactccctcaatgtggctgacttgacttccctccgggccccactggacatgcccatcccagaccctccacccaaggatgatgagatggaaacagatgagcaggagaagaaagaaggtaagtgaagataagaggtgactagggaaggggagatggcacattgactactggatgagaaagggcctgaatcccctctttctcacagtcaagattacagtgggcatctaagtcatctttgtctttgtgacacccaccccttcccaccacattcatcttcaggctggacataggtgccactcaataaatgctttttgaatgaatgacacacgccagaagggaatccacacaacatatagatcatttattttcccttctagtccccgggttcagtacatagatgggcttttcttcaccccttggggttgacaattttctccaggttgctgctgatgatatgataaagctcagcatagaaggccctcaggtccagcaccatggccctgagctccccataggctgcctcatctcgctcatgcaccaaggcccggtaatccattacatgagtctccttgggaggccttggcccacaagcatccccacgttctgaagaaagtacttgggaaatgggggtggctgggaaagcttcccactttgggtctttgacgggcatttcaccctttttccagcaccttcttcctggaattgctaacccccaaaaatccattttccatctttcaatcctggggggatcaagggttgttgggatccaatgtaaatcaccaagaatgcaatttctctttgaaaagtcccagacttcctggctttaacccagggcaaagcagggaacaggactttcctcaattccccagggagaaatcccacacttaagggacttctttccttctccctgccttatctgtttccatctcatcatccctggggtggaggggtctggaatgggcatgtccagtggggccccggacgaaaggttcaaggtcaagccacattgaaggggaagtcctctttgcaagaagctggattcagggtatatgattttctgtggcaagaactctgagaagaaattccttcagcctcctggaaaagattctgcctgaagacctccacctgtttgcgggcttccccgctcaggcgcaccccaacacggcttggccatgctgcttcagtagctagaacccnnctcttccggctagtcgcccgggctttca

SEQ ID NO: 23709 - DNA, 1215 bp, Homo sapiens
  SIMILAR (259)..(873): 541254mologous to Mus musculus dynamin,accession number L29457,Smith-Waterman Score=464.
atgaagcaaaaggtggctgcagaggcaggcaggggccagatcctgcaggccaaggtcctgccctctggaacccttagcaggctggcagaagccctttttggggtccagacttatgaccaggatgcctatggcttcctaacccccagtgctcagagcatgaaagttttctgctgtctttggaaacttgtctgcaagcagctcgaaggagacgtggcccaagggctcgccatcgacggcgatgtcaaaaaacacagtgggctggagtggcaagtggagaccattcagaacctggtggactcgtacatggccattgtcaacaagaacatgcaggacctcatgcccaagaccatcatccacctcatgatcaacaacaccaaggagttcatcttctcggagctgctggccaacttgtactcgcgtggggaacagaacacgctgatgggggagtcggcagagcaggcacaggggcgcaacgagatgcggcgcatgcaccacgtgctgagggaggcgcccagcatcatcggtgacatcaagacgaccatcgtcagcacacccacggggtcgcccaagtccagccccacgacgcagtgccgactccccgccgtgcccccagcccggcccgggttgcggagccctgctcctgggcctctgcctgctgcgtccaccctgggggaagcgcccgtcgtaccctccacaccgggggcttcccctgaccccttaggccctccccctgcaggtgccctcgcgcccctcccggggtccccagccccaagacagaatgccatgcggattggcaggagacctcactgtggggttcttggagccaaccctccaggccatcatccggtggtctttgctcctccgtccccccgccaactcgccagagagccagagctgagcgtccttcacatccagacatctgatgctcccctcagccctgcagagagccagcatgctggctgcttttcagatggggaaactgatggccaagagggaaacgtgcttccaatcttccaggaaaaattgaaggctccggatgagaaaaagcaaacaaaggacagtgggaccatgggcgtccccacccccaccacccgcaggccccacactcaaaccagcgcccgtgcccacgcccatgcagccgtcctccgccaggccccaagaacggctgttactttgggggtaattgaaaatgtcgatcattattctagagcataa

SEQ ID NO: 23710 - DNA, 432 bp, Homo sapiens
  SIMILAR (144)..(278): 441254mologous to Homo sapiens high mobility group protein 14,accession number J02621,Smith-Waterman Score=84.
atggatgatgatgatgatgatgatgatgatgatgatgatgatgatgatgatgatagttttagaagtacttggctacatgctgaatataagatttgtagttctcggatgcagcagctgtggccaggcagcccagtttcgggaaggctctcggtgcaccacagcctgcagacacccagcccacaccctccatgccgccaagatgtccaggaggaagcgaaacaaagcccaaaaaggcagcaggaaaggataaatcttcagacaaaacaaaacaaaacaaaaaaacaaatgaaagcagaaaaaggaggaaaagaaaaacaggctgaagtggctgatcaagaaactaaagatttatctgcagaaaatggagacactgaaaacaaggagagtccagcctcggatgaagccacagagaaagacactaagtctgactga

SEQ ID NO: 23711 - DNA, 1677 bp, Homo sapiens
  SIMILAR (900)..(1676): 881254mologous to Homo sapiens putative p150,accession number U93567,Smith-Waterman Score=1146.
acatggatgtttatagcagctgtattcagaattgccagcacttggaagcaaccaagatatttttcagtaggcaaacaggatcagaagcggacctccagaaaactccagcagacctgcagcagaggggcctaatggttagaaggaaaactaacaaacagaaaggaatagcatcaatatcaacgaaaaggacatccacgcaaaaacacaatccaaaggtcaccaacattaaagaccaaagccaatatcatactgaatgggcaaaagctggaagcattccctttgaaaactggcacaagacaaagatgccctctctcaccactcctattcaacatggtattggaagttctggccaggtcaatcaggcaagagaaagaaataaaagtattcaaataggaagagaggaagccaaattgtctctctttgcagatgacatgattgtatatttagaaaaccccatcgtctcagcccaaaatctccttaagctgataagcaacttctgcaaagtctcaggatacaaaatcaatgtgcaaaaatcacaagtgttcctatacaccaataacagacaaacagagagccaaatcatgagtgaactcctattcacaattgctactaagagaataaaatacctaggaatccaacttacaagggatgtgaaggacctcttcaaggagaactacaaactgctgctcaaggaaataagagaggacacaaacatatggaaaaacattccaggctcatggataggaagaatcaataagcctccgctgctgatacccaggcaaacagggtctggagtggacctccagcaaactccaacagacctgcagctgagggtcctgactgctacaaggaaaactaaccaacagaaaggacatccacaccaaaaccccatctgtacatcaccatcatcaaagaccaaaggcagatcaacaagacagaaagttaacaaggatatccaggaattcaactcagctctgccccaagtggacctaatagatatctacagaactctccaccccaaatcaacagaaaatacattcttctcagcaccacaccacacttattccaaaattgatcacatagttggaagtaaagcactcctcagcagatgtaaaagaacagaaattataacaaactgtctctcagaccacagtgcaatcaaattagaactcaggattaagaaactcactcaaaactgctcaactacatggaaactgaacaacctgcttctgaatgacaactgggtacataacgaaatgaaggcagaaataaagatgttctttgaaaccaatgcgaacaaaaacacaacataccagaatctctgggacacatttaaagcattgtgtagagggaaatttatagcactaaatgcccacaagagacagcaggaaagatctaaaactgacaccctaacatcacaattaaaagaactagagaagcaagagcaatcacattcaaaagctagcagaaggcaagaaataactaagatcagagcagaactgaaggagatagggacacaaaaaatccttcaaaaaatcaatgaatccaggagctggttttttgaaaagatcaacaaaattgatagactgctagcaagactaataaagaagaaaagagagaagaatcaaacagatgcaataaaaaatgataaaggggatatcaccaccgattccacat

SEQ ID NO: 23712 - DNA, 1200 bp, Homo sapiens
  SIMILAR (2)..(145): 931254mologous to Homo sapiens unknown,accession number AF148856,Smith-Waterman Score=224.
agccaatatcatactgaatgggcaaaagctggaagcattccctttgaaaactggcacaagacaaagatgccctctctcaccactcctattcaacatggtattggaagttctggccaggtcaatcaggcaagagaaagaaataaaagtattcaaataggaagagaggaagccaaattgtctctctttgcagatgacatgattgtatatttagaaaaccccatcgtctcagcccaaaatctccttaagctgataagcaacttctgcaaagtctcaggatacaaaatcaatgtgcaaaaatcacaagtgttcctatacaccaataacagacaaacagagagccaaatcatgagtgaactcctattcacaattgctactaagagaataaaatacctaggaatccaacttacaagggatgtgaaggacctcttcaaggagaactacaaactgctgctcaaggaaataagagaggacacaaacatatggaaaaacattccaggctcatggataggaagaatcaataagcctccgctgctgatacccaggcaaacagggtctggagtggacctccagcaaactccaacagacctgcagctgagggtcctgactgctacaaggaaaactaaccaacagaaaggacatccacaccaaaaccccatctgtacatcaccatcatcaaagaccaaagactttaaaccaacaaagatcaaaagagacaaagaaggccattacataatggtaaagggagcaattcaacaagaagagctaattatcctacatatatatgcacccaatacaggagcacccagattcataaagcaagcccttagagactcacaaagagacttagactcccacacaataataatgggagactttaacacccctctgtcaacattagacagacccacgagacagaaagttaacaaggatatccaggaactgaactcagttctgcaccaagtggacctaatagacatctacagaactttccaccccaaatcaacagaatatacattcttctcagcaccacatcgcacttattccaaaattgaccacatagttggaagtaaagcactcctcagcaaatgtaaaagaggagaaattataacaaaaatcaaactagaactcaggattaagaaacagacgcaaaaccgctcaactacatggaaactgaacaaccttcttctgaatgactactga

SEQ ID NO: 23713 - DNA, 378 bp, Homo sapiens
  SIMILAR (5)..(166): 831254mologous to Homo sapiens Human secreted protein, SEQ ID NO: 4473,accession number G00392,Smith-Waterman Score=235.
ctagagatgaggttttggtgtggatgtcctttttgtggatgctgatgctattcctttctgttcgttagttttccttctaacagtcaggtccctcagctgcaggtctgttggagtttgctggaggtccactccagaccctgtttgcctgggtatcaccagtggaggctttctttcttgtttcttctgcgtctccataacatgcaggcgctccatgaggctagaaatgccctgctccaagctgtcaatagtgtggtgctgaggatcgtggccactgaagctgttgcgcaggctgcggagagcatctcgaacaagctgcaagtcgctggtcagtagtgatgatgatttccccatgtattccaggacttgtgcattacacat

SEQ ID NO: 23714 - DNA, 873 bp, Homo sapiens
  SIMILAR (355)..(528): 571254mologous to Homo sapiens PRO2221,accession number AF116695,Smith-Waterman Score=163.
atggcagagaaaaaagatccaacaaaggagcctgaaaagaaacatttgctggcttggatgaacaaattgctatatgagttggaccccaaatataagaatgactcaaacacagatggttcagctgttgtgcacaagattataatagcatgtgataagcctgtttcccctccaccatctgccatgattggaagcttcccgaggccctcatcagaagcagatgctggtgccatgctttgtgtacagcctgccagaactaaaatcctcggcattcttgggcttaaagccacatcactccagtatctccgtcttcacactggcaagcctttactaccaaagatagatgaatccacgaagatggggagaaaccagcccaaaaaggctgaaaattccaaaaaccagaacgcctcttctcctccaaaggatcacaactcctcgccagtaagagaacaaaacaggatgcagaatgagtttgacgaattgacagaagtaggcttcagaagggatagatcttccaaaaggaactcagttgtcattaaggctcttccaagacatctcatcaaccaggggagatcacaggagtggagactaggaataggggcgcgggacagccccaaaaccagcgggcggagagggaaaagcccagccggcccaaaccgcacgaccgtccccgaggatgaacaagccgctcgcggccacgacccatcccaacccgccaggcagaccccaggaccccacccccaacccgctcggaaaaagaacccagctgtctctggctacggaccaaatgtgcccatcccttgcaccactgataaaataaccccaggaaagttgataatggaagcagagaatttctatatgaatggaacatcttga

SEQ ID NO: 23715 - DNA, 3507 bp, Homo sapiens
  SIMILAR (1719)..(4): 901254mologous to HERV-H/env62 envelope protein,accession number AJ289709,Smith-Waterman Score=2670.
ttaagctgaagggaggtcttgtggtaaggggtgatattgtggggatgttagaagaaacatttgtcgtatagaatgattggtgatggcctggatacggttttggatgaattgagaaactaaacggaagatacaaggtccaaataaaagaaggagaaaaatgggtattaaaggactaacaattgggaggacccaggacatccaattagagagtgcccaaggggattcagcataattacttgcttggttggcaagtttttgggctctatccttgagtttttttatgttgtcatacactaggccagattgatttaggtaaaaacaacactcttcatttaagaatatacagagtcctcctttttcagcagtgagtaagtcaaggcctcggagttgtccttggaggacaactgcagctaaagagtcaacttgggcctggaggactgataaagtttgtgatatgtctgtgatgctagcagagaagtcattagacaggctacggaaggtcatgacagacgttgaaatgcctgctattccagtaccgagagcaacagtggaggcagaaagtcctaaaccgaccatcaagggaattagtggaataactcttttttgttgtgtcggtgtcatgaggggaacagggagctcttcggtcccatttgcaaattgaattttgggggtaaggaagactagtgtacatgtgcctgtccaattggcaggtaggcacatgtaggtagaggatccacagaggaagaagagaccttgtgcgaggcaaaactggagatgtaaagtaaaaaggtgagaaggagtgctgaaaggggtgtcttgtacccagactcctagggatccagctagggcggcagctgtcagaggttgtaatggggactgatggggtaactgcgtagaggggaaggttcgattttcatggtgtatgagaaaacgtcgagtatctacgagcaatctttcactgttattttcggggctgggtataagtaaacaagaagagggcctgggaggagagtctgatgagcaaggggaagatagccaaggatggagtgaaatacagggcaagtgtcttcctaagcaataattactgctaatgtttttaagtttgtcagtattgatagagggcttgtctgtaatatggagctggaaggctccaattgtttcattgatgtttgtagttggacttcggagatgaagagtaaaggaacatcgagaaggtgaaagattacctaggggaattccagtgggtctttgccaagagatacacaaaggagcggccacaggaatagtagtttgtgttgtgagaggtccaaatatggggggagtagagttgatataaggagaaaggttttttaaataagtgcgaaggagggcggcagcttgctgatgtgaaatgtctggggaagtcttgctggacctgtctagaaagtaaatgagttcttcaggagggtaaaggtgagggctgttaaaggaagttcggaggtgtagggagatgggagatgttgcccagtctgtctgtaaggcggggacagctgtgtaggcatgttcttcagaaatatgagtgagtttaagggaagtgggggagagtacttgcgacttccaggaggaagaggagggattaggctggctgtccgatggacacagctttattctggaatggtgaacccagtggggaggattctgcaggcagacggcagtcggggtactatagatgactaagtagggtccggtccatcgaggttgtagagtttgaggggtcagattcttaacaagaactgatcgtccagctaggttgtcttcatatggctggggatctggagtaggcaagagaagattagcagcctggcgaatttcctgtctagcctgctggagtactggaagatagtcgcctagagggctggtgtctgggatgaggttggggccaagcaagaaagtgcgtccatataaaagttcaaatggactgtatcctgtagcatctcgaggacaggctctgattttgagaagagcaagaggtaaaagtgctgtccaatcctttgtaagttggaggctaaacttggtgaggtgtgcctttaaaagaccattagtccgttccacctttcctgaagattgaggacggtaaggggtatgaaggttccactgaataccaagagcctgagaaactacttgggtgatttggctagtaaaggctggtccgttatcagactgtatagaggtgggaaggccaaaccgaggaattatgtctacatagaagaggttatgaaatgatgacagaatagaatgggcctgtgaggctggaagaagatattttccttggtctaagaaccatttgccttgtgtgggaagagattgataggtggaagtttcagtgggggagtaggtgggagtgactgaagtgaaggagaaaaactggccgtgagggacagaagttggagagctagctgcttgtctagccactttatcaacataagcattgcctagagcaatgggatctgatgccttttgatgccccttgcagtgaatgaccccagcttcttttggaagtaaagcggctttgagcagagtttttattaaagaggcattaatgatggaggacccttgtgtagtgaggaaacctctttcagcccatatgactgcatggtggtgcaggatatggaaggcatatttagaatcagtatagatattgacgcatagtccttttgcaagagtgagggcttgagttaaggcaactagttcagcttgctgagaggtagtggagggaggcagagcagtagcctcaatgatagatgtggaagatactatagcatagcctgccttcgctggtgagtggcgattaggcctggtggaactgccatcaataaaccaagtgtgatcagggtgagaaacagggaagaaggaaatgtggggaaatggggtgaatgtcaggtggatcagagagatgcagtcatgagggtcaggtgtggtatccggaataatgtgggaggccggattgaagtccgggccaggaacaatggtaattgtgggagactcaacaaagtgtaagtatagctgaaggagtccgggagcagaaagtatatgtgtcaggtgtgaggaagaaaatagattttggaaattatgagagctgtagagagtgagttgagcatagtttgtgattttgagggcctctaaaagtattagggcagcagcagcggctgcacggagacatgatggccagcctaaaacagtaagatcaagttgtttggacaaaaaggctacaggacgcgatcctggtccttgtgtaagaattccgactgcacagccctgcacttcggctgtgtgtaatgaagcaggttgggatgagtcagggagagctagagtgggggcagtttctaaagctgtcttcaaggaacagaaagaggagtggggaaaggatttaggatctatggggtcagctaagtttccttttgtgagtttatataatggttttgttaggatggcaaaaccaggtatccaaaggcgaaagtatccaaccat

SEQ ID NO: 23716 - DNA, 1287 bp, Homo sapiens
  SIMILAR (644)..(832): 311254mologous to Homo sapiens haemopoietic progenitor homeobox HPX42B,accession number AF068006,Smith-Waterman Score=47.
atggaagtcctagccagagtattcagacaagagaaagaaatgaaaggcattcatattggaaaagaggaacacaaattgttcctctttgcagacaacatgaccttgtgtttagaaaaaacaaaagactccgtcaaaaaacttgtagagcagccctccagctttggctccgtggactggctctgcctgagcagctgctcagggtcgacccacacccccaggcctgccgacgtctcccccgggagcctccctggcccgggccagacgttcggcacccgggagccccctcaggctgtcagtaccaaggaggctagctcgtcaaatctgcatgcgccggagaggactgtggctgggttgaccttcaccacggagcaggtccgtgccttggagggcgtcttccggcaccaccagtacctgggccctctggagcggaattggctggccagggagatgcagctctcagaggtccagataaaaacctggtttcaaaatcgccggatgaaacacaaacggcaaatgcaggactcccagctaaacggccccttatcggggtctctccacgggccccctgctttccactcaccatcttctggccttgccaatggcctgcagctgctgtgcccttgggcacccctgcctgggtcccctggctgccccttggctccttctggggtctccgacaaatggatcaagaggccctggcctcttcgtgggcttcctgctgcgggcagcctctggcataccaccccccacgcccaggaagtggtgcgcataagctgggaccagccctgtccacggggccccggggcctgtgtgctctgccagagacaggggatgcatttgaggaaacgcctccgactacatgcctcccacacaagcggtctgtgcagatcgcatctgacgcctacccggaggactcagctgttctgtttacatcgtggcggcacctctcaccctgaccctcgcaaaggttctggagatttctggagaatatatttgttaaagtcacctcttcacttaaaaaaaaaaaaaaaaaaaaaaaaaggacaaaaagcaatagatactggtgaagtgtggagaaaagggaactcttatacactgttggtgggaatgtacattagtacaaccattgtggaaaatactgtagagatttatcagaaaactaaaaatacagctaccatattcatcagcaatcccactactgagggtctatccaaaggaatagaaaccagtgaatatatcaaagggataccggcactggcatgtttatcacagctctattctcgatag

SEQ ID NO: 23717 - DNA, 1334 bp, Homo sapiens
  SIMILAR (136)..(750): 631254mologous to Homo sapiens haemopoietic progenitor homeobox HPX42B,accession number AF068006,Smith-Waterman Score=617.
atggaagcgtttgatgctaattacacattccagtcaggaccctcagctgcaggtttgttggtgtttgctggaggtccactccaggccctgtgtgcctgggtatcagcagtggaggctgcagaacagtggatattgcagccctccagctttggctccgtggactggctctgcctgagcagctgctcagggtcgacccacacccccaggcctgccgacgtctcccccgggagcctccctggcccgggccagacgttcggcacccgggagccccctcaggctgtcagtaccaaggaggctagctcgtcaaatctgcatgcgccggagaggactgtggctgggttgaccttcaccacggagcaggtccgtgccttggagggcgtcttccggcaccaccagtacctgggccctctggagcggaattggctggccagggagatgcagctctcagaggtccagataaaaacctggtttcaaaatcgccggatgaaacacaaacggcaaatgcaggactcccagctaaacggcccccttatgggttcttttccaggggccccctggctttccactcaccattttttggcccttgccaaaggcctgcaagttgctgtgcccttgggcaacccctgcctgggtcccctggctgcccccttggctccttctggggtaccccgacaaatggatcaagaggccctggcctcttcttgggctggctgctgcgggccagcctctggcataccaccccccacgcccaggaagtgggatagatcttccaaaaggaactcagttgtcattaaggctcttccaagacatctcatcaaccaggggagatcacaggagtggagactaactacagtacaagaaacaacaatggaaaaacaaggtgtgcctctagtggaaaatattgcaggaaagccgtggaagagaagattggaaagcagtaagtcaaggtctcggcggttttggaggacaactgcagctaaagagtcaaaatgggcctggaggactgataaagtttgtgatatgtctgtgatgctagcagagaggtcattaaaaaggctacggaaggtcgtgacagaagtcgaaatgcctgctattccagtactgagagcaatagtggaggcagaaagtcctaaaccgacaagcaagggaattagtggaataactcttttttgtcgtgtcggtgtcatgaggggatctgggagctcttcggtcctatttgcaatttgaattttgggagtaaggaaaactagtgtgcatgtgcctgtccaattagcaggtagacacatgtaggtagaggatctacagaggaagaagagaccttgtgcgaagcaaaa

SEQ ID NO: 23718 - DNA, 239 bp, Homo sapiens
  SIMILAR (3)..(98): 1001254mologous to Homo sapiens SNAP43,accession number Z47542,Smith-Waterman Score=161.
gcaatgtgcagaatatacacaaggaagataaacctttaagtctgagtatgcctgtaattacagaagaagaagagaatgaaagtttgagtggaacagaggatccccctaccagctgcttgtcatccaattatgtatccaaacagcctggctatggccataacaatgctgtgtgctccccaaaccacattcactttctttctgggcacataagaacacgaagtttcccagtatctcttctg

SEQ ID NO: 23719 - DNA, 1906 bp, Homo sapiens
  SIMILAR (49)..(924): 941254mologous to Homo sapiens SNAP43,accession number Z47542,Smith-Waterman Score=1423.
gtccgttagaggcgtgcgggcttcggaggcgtgcgggcttcgggtgccatggggactcctcccggcctgcagaccgactgcgaggcgctgctcagccgcttccaggagacggacagtgtacgcttcgaggacttcacggagctctggagaaacatgaagttcgggactatcttctgtggcagaatgagaaatttagaaaagaacatgtttacaaaagaagctttagctttggcttggcgatattttttacctccatacaccttccagatcagagttggtgctttgtatctgctatatggattatataatacccaactgtgtcaaccaaaacaaaagatcagagttgccctgaaggattgggatgaagttttaaaatttcagcaagatttagtaaatgcacagcattttgatgcagcttatatttttaggaagctacgactagacagagcatttcactttacagcaatgcccaaattgctgtcatataggatgaagaaaaaaattcaccgagctgaagttacagaagaatttaaggacccaagtgatcgtgtgatgaaacttatcacttctgatgtattagaggaaatgctgaatgttcatgatcattatcagaacatgaaacatgtaatttcagttgataagtccaagccagataaagccctcagcttgataaaggatgatttttttgacaatattaagaacatagttttggagcatcagcagtggcacaaagacagaaagaatccatccttaaagtcaaaaactaatgatggagaagaaaaaatggaaggaaattcacaagaaacggagagatgtgaaagggcagaatcattagcgaaaataaaatcaaaggcccttttcagttgtcatacaggcatccaaatcaagaaggcatcgtcaagtcaaactcgactcttctcctcttgattctgcatctggtcaagggcaagtaaaagccactaggaaaaaagagaagaaagaaagattgaaaccagcaggaaggaagatgtctctcagaaacaaaggcaatgtgcagaatatacacaaggaagataaacctttaagtctgagtatgcctgtaattacagaagaagaagagaatgaaagtttgagtggaacagagttcactgcatccaagaagaggagacaacactgaacaaagagcctggtgtagtttttaattttgagttttctgacagaagaaaagattgatattttgtgtattgaacaggaagactgccagtattaaaaaaaatccttctgggaatcttgtaggttattttcttggaaattgccaatacggtagttctagaataaaagtacaaaaaaattagaataagaattctttaacattttctttaatgatttgcataaatggagataaaacttgtatttagtatgtaatagaaaaaattctgttattcgcagattgttactatttcctataaggttttgtgatactatactgtcctaatacagtctggtaatactattctattttatttaaaatattttttattgaaatattaatgtttattacatgcaaataactaattattttgtatctatcagtcggataatggattttttattttgtatatttattctattttgtatattggtaagtgcaataaagtttttgccttgctttattttttaatacataaaacttacattctcataacgtgattgataacttaggaagttcacaatgtattttctacttctgcaattaaatattctttagtgcttgtttattattactaaatactaattaagtactaacaagtacttaaatactaatgtattaagtatttaagtactttctaataaaatctttaacaataataatgtaaatttcagaatgtgtctctggtacagaatagttgatattaacagaaaaaaa

SEQ ID NO: 23720 - DNA, 447 bp, Homo sapiens
  SIMILAR (13)..(315): 861254mologous to Homo sapiens Human EGF-like homologue protein (PRO217) encoded by DNA33094 cDNA,accession number Y08065,Smith-Waterman Score=571.
  misc_feature (1)...(447): n = a,t,c or g
atntcggaacgaggngtgaactgtgacaaagcaaactgctcaaccacctgctttaatggagggacctgtttctaccctggaaaatgtatttgccctccaggactagagggagagcagtgtgaaatcagcaaatgcccacaaccctgtcgaaatggaggtaaatgcattggtaaaagcaaatctgtctgcgagcctggctgtggtgcacatggaacctgccatgaacccaacaaatgccaatgtcaagaaggttggcatggaagacactgcaataaaaggtacgaagccagcctcatacatgcccttaggccaagcaggcgcccagctcaggcagcacacgccttcacttaaaaaggccgaggagcggggggatccacctgaatccaatttacatctgggttgaactcccgacatctggaaacgttttaagttacaccaagttcatag

SEQ ID NO: 23721 - DNA, 2009 bp, Homo sapiens
  SIMILAR (103)..(1260): 661254mologous to Homo sapiens 17-SEP-1998 Human PRO217 protein encoding cDNA, UNQ191,accession number Z52203_cd1,Smith- Waterman Score=1236.
  misc_feature (1)...(2009): n = a,t,c or g
ccctggttgagggagctgcagggcagcataatatctgacggcgccaggttgcgtaggtacggcgctaggagttttcccggcagcgatgaggtcctgagcagcatggtccggaggagcgccttccctggcgccgcgctctggctctggagcatactcctgtgcctgatggcactgcggacggaggccgggccgccgcaggaggatagcctgttcctatggatcgatgctcaccaagcaagagtactcataggatttgaagaagatatcctgattgtttcagaggggaaaatggcaccttttacacatgatttcataaaagcgcaacagagaatgccagctattcctgtcaatatccattccatgaattttacctggcaagctgcagggcaggcagaatacttctatgaattcctgtccttgcgctccctggataaaggcatcatggcagatccaaccgtcaatgtccctctgctgggaacagtgcctcacaaggcatcagttgttcaagttggtttcccatgtcttggaaagcaggatggggtggcagcatttgaagtggatgtgattgttatgaattctgaaggcaacaccattctccaaacacctcaaaatgctatcttctttaaaacatgtcaacaagctgagtgcccaggcgggtgccgaaatggaggcttttgtaatgaaagacgcatctgcgagtggcctgatgggttccacggacctcactgtgagaaagccctttgtaccccacgatgtatgaatggtggactttgtgtgactccttggtttctgcatctgcccacctggattctatggagtgaaaatgtgacaaagcaaactgctcaaccacctgctttaatggagggacctgtttctaccctggaaaatgtatttgccctccaggactagagggagagcagtgtgaaatcagcaaatgcccacaaccctgtcgaaatggagggttactgcattgggtaaaagcaattgtaagttgttcccaaagggttacccagggagacctcttgttcaaagcctgtcttgcgagcctggtttgtgggtgcacaatggaaccctgccatggaacccaacaattgccattgttcaagaaggttggcatggaagacactgcaataaaaggtacgaagccagcctcatacatgccctgaggccagcaggcgcccagctcaggcagcacacgccttcacttaaaaaggccgaggagcggggggattcaccntggaatccaattacatctggtgaactcccgacatctgaaacgttttaagttacaccaagttcatagctttggttacccttcagtgtgtgaatggtcaaaataatgtcccattaccacttaagaaatactggccctgaattttaataagctttcattataaatcactgagctgataatttactccttccttttaaagttttctaaagtacgtctgtagcatgatggtatagattttcttgtttccagtgcctttgggaccagattttatattatgtccaattgatcaggttaaaattttccagtgtgtagttggcagatattttcaaaattacaatgccatttatggtgtcctgggggcaggggaaccataagaaaaggttaaaattgggcaaaaatgcgtaagtcacaagaatttggatggtgcagttaatgttgaagttacagcatttcagattttattgtcagatatttagatgtttgttacatttttaaaaattgctcttaatttttaaactctcaatacaatatattttgaccttaccattattccagagattccagtattaaaaaaaaaaaaaattacactgtggtagtggcatttaaacaatataatatattctaaacacaatgaaatagggaatataatgtatgaacbbttttgcattggcgybtgaagsvratataatatattgtaaasaaaacacagctcttacctaataaacattttatactgtttgtatgtataaaataaaggtgctgctttagttttctg

SEQ ID NO: 23722 - DNA, 1297 bp, Homo sapiens
  SIMILAR (406)..(465): 701254mologous to Mus musculus type I inosine monophosphate dehydrogenase,accession number U00978,Smith-Waterman Score=71.
tgtcgggtcgcggggtctcgcggcacatggcggactacctgatcagcggcggcaccggctacgtgcccgaggatgggctcacagcgcagcagctcttcactggtgcagcagctcgcgaccgcctcacctacaacaatttcctgattctcccaggattcatagacttcatagctgataaggtggacctgacctcagccctgacttggaagatcacgctgaagatgccactgatctcctcccccatggacgctgtgacagaagctgacatggccatcgcaatggctctgatgggaggtattggtttcattcaccaccactgcaccccagagttccaggccaatgaggtgcggaaggtcaagaagtttgaacggggctttatcatggaccccgtggtactaagcccctcacacactgtggggcgatgtgctggagggcaagatgcggcatggcttctctgggcatccccatcactgagacaggcaccatgggcagcaagctggattcccacaagcagctgctgtgcggggcagctgtgggcacccgtgaggatgacaaataccgcctggacctgctcacccaggtgggcgttgacgtcatagtcttggacttgtcccaagggaattcattgtatcagatggccatggtgtattacatcaaacagaagtacccccacctccaggtgattggggggaacatggtgacagcagcccaggcgaagaacctgattgacgctggtgtggaagggctgcacgtgggcatgggctgcagctccatctgcatcacccaggaagtgatggcctacagctggccccagggcactgctgtgtacaaggtggccgagtatgcccggcactttgaccatggggaacatggcaaggccctggcccttggagcctccacagtgatgatgggctcccttctggccgccaccacggaggtccccagcaagtacttcttctcagatggggtgtggctcaagaagtaccggggtatgggctcactggatgccctggagaagagcagcggcagccagaaacaatacttcatggagggggataagttgaagatcgcgcagggtgtctccagctccatccaggacaaagggtccattcagaagttcgtgtcctacctcatagcgggcatccagcatggctgccaggatactggggtctgcaacctgtctgtccttttgtccatgatgtactcaggggagcgaaagtttgagaagtggaccatgttggcccagatcaagggtggcgtccaaggcctgcactcttacaagaagaggctgtactga

SEQ ID NO: 23723 - DNA, 1011 bp, Homo sapiens; identical to SEQ ID NO: 21477
  SIMILAR (883)..(1008): 1001254mologous to Homo sapiens Human secreted protein clone yd61_1 protein sequence SEQ ID NO:156,accession number Y73467,Smith -Waterman Score=223.

SEQ ID NO: 23724 - DNA, 1828 bp, Homo sapiens
  SIMILAR (25)..(513): 991254mologous to Homo sapiens epididymal secretory protein (E12),accession number AJ278478,Smith-Waterman Score=941.
atgacccgatggtccagttacctgttgggatggacaaccttccttctctattcctatgagtcaagtggagggatgcatgaggaatgtgtctttcctttcacctacaagggatctgtttacttcacttgcacccatattcatagcttatccccttggtgtgccaccagagccgtgtacaacggccagtggaagtactgccagagtgaagattacccacgctgtatcttccctttcatctatcgaggaaaggcttataacagctgcatctcccagggcagcttcttaggcagtctgtggtgctcagtcacctctgtcttcgatgagaaacagcagtggaaattctgtgaaacgaatgagtatgggggaaattctctcaggaagccctgcatcttcccctccatctacagaaataatgtggtctctgattgcatggaggatgaaagcaacaagctctggtgcccaaccacagagaacatggataaggatggaaagtggagtttctgtgccgacaccagtaatctggggatgggggttggaccgacgccgcgacaccaccgacgcgcctccacccgccactcccgcccaccgcccgccgaccccgacggcgggggagaaagaccaaggacagcggacgaccgccaggacgacgccaccgaggacgacgggacgcgatgcagaggacggcagaccaggacccaggccaccaatgcgaacgccaaccacaagaaaagcaaccgaacaaagccaccaccacgacacaaacccaacaaagcaaaaagacacacaaaaaaagaaacaccccaaaacacctgggaacacaggacaaaaatccagattcgggtcgcccaaagctctttaggagggcctgtattacgagtaccgggacacgtggggaactatggactcgttcgcgggaacatccagcgaaacgaaggaaggcggagtggaaagcaaaggctcagaccatgggaccgcatgctaagcccagactggcacagggctcagcgtatagcccaggtttggaagcctgagcaggaggatggcttaagcataggatttggagaccagcctgggccacacagtgacacctcgtctcgacaacaagtgaggaggagcaaggccacagagatgcatgtgggtggccgtgtagactttgatgactttgtggagctgatgacccccaaattgcttgcagaaacagctgggatgatcggtgtccaggagatgcgggatgccttcaaggagtttgacacgaatggagatggggagatcaccctggtggagctacagcaggccatgcagagactcctgggggagcggctcaccccccgggagatctctgaggttgtccgggaggctgatgttaatggagacggcacagttgactttgaaggtgacattgacggggcgtgggggcgccatggaacgcagggccctcactggccctggggactgggtgacgtcaggggtgagcctctggtgattggctaacctcacaatgcgtaagatcaaagggcctaaagaaactataactcattttccagaagttacagatggggagtgtgtctttccattccactataaaaatggaacatattatgactgcatcaagtccaaggcaagacacaagtggtgctcgttaaacaagacctacgaaggatactggaagttttgcagtgcagaagattttgcaaactgtgtatttcccttctggtacagacgcttgatctactgggagtgtactgatgatggggaagcatttgggaaaaaatggtgttcactgaccaagaattttaacaaggaccgaatttggaaatactgtgaatga

SEQ ID NO: 23725 - DNA, 1709 bp, Homo sapiens
  SIMILAR (1318)..(1356): 611254mologous to Lycopersicon esculentum extensin (class I),accession number X55682,Smith-Waterman Score=49.
  misc_feature (1)...(1709): n = a,t,c or g
ttttttttttaatttatgaagaaaaagaggtttaatgaactcacagttccatgtggctgggaggcctcacaatcatggtggaaggcaaaaggcacatcttacatggcagcagacaagagagaatgagagccaagcaaaaggggaaaccccttattaaaccatcagatctcgtgagacttattcactaccnacccagaacagtaagggagaaaatgccccctatgattcaaattatctccccaccaggtcccctccccacaattaagggagcctacaatttaaggtgatatttggatggggacacagcccaaaccatatcattctctcccctggcccctccccaaatctcatgtcctcctcattttaaaaatcaatcaatgccttccccaaaaagtccccccaaagtctttaactcatttccagcattaactcaaaaggtccatacttccaaagtctcatctgaaacaaggcaagtcccttcccacctatgagcctgtaaaatcaaaggctagttagttacttcttagatacaacgggaggtacaggcatttggctgaaatacacccattttcaagtgggagaagttggccaaaaacggaagtggctaaaggccccatgcaagtctgaaatccagcagggcagttaaatcttaaagctccaaaatggtctcctttgactccatgtctcacatccaggtcacactgatgcaggaggtgggttcccatggtcttgggcagctccacccctatggcattgcagggtacagcctacttctcggttgcttttacacggctggcgttgagtgtctgtggcttttccaggctcacggtacaagctgtcagtgggtctaccattctgggatctggaggatggtggccctcttctcatagctccactaggcattgccccagtagagactctgtgtgggggctctgactccacattcccttctaccctgtcacatcccactaactctgggaagttgttgattatctggtgtcgtggtggcaaaaccacttcccgaggccagaagtccaaagtcagggtgtcagcaggattggttacttcttggggactcctggggagagcctggtccgggctccgggcgaagagtctggtctgtgtccctcgctaagcttctgctggctgttggcagtccttggcgttcttttgctggaagctgcttgactccagtctctgcttccattgtcacatggccattttgcttttgtgcatctgtgtcttaacatggcattcttctctctgtgcctctttgtctcttcttttcttataagaacaccaagtcatattgggattaaggggcccccaccccctctcccagcatgcccctcaccctaacctaatgacatcctgcaatgganccctatttcctaaataaagtcacattcctgaggttcctaggaaggacataaattttggggggatgctatgcaaccccagtataccctacatgactttcaatttaaagtaggctgtgttattggagctatacagtagtcctcccttcttcgcgggggatacgtttcaagacccccagtagatgccagagatgtcggttagtactgaaccctatatatagtatgttttttcctatacatacatacctgtgataaagttttatttataaattaggcacaataagagattaacaacaataatgaataataaacaactatgacacattaaaa

SEQ ID NO: 23726 - DNA, 453 bp, Homo sapiens
  SIMILAR (423)..(452): 901254mologous to Homo sapiens clathrin coat assembly protein -like,accession number D63643,Smith-Waterman Score=46.
  misc_feature (1)...(453): n = a,t,c or g
ttctgatcgctctcggaccatcgagatcctccgancgacccacgcgnncgccagtacccacccggtcggcccggcacagccatgatctttgcgatcctaatctttaacaaccacgggaagccgcggctctccaaggtctaccagccctacagtgaagatacacaacagcaaatcatcagggagactttccatttggtatctaagagagatgaaaatgtttgaaatttcctagaaggaggattattaattggaggatctgacaacaaactgatttatagacattatgcaacgttatattttgtcttctgtgtggattcttcagaaagtgaacttggcattttagatctaattcaagttcacaatattcttgcagaaatggtgatggggggaatggtattggagacaaatatgaatgagattgtacacaaatggatgcacaaaataagctggaag

SEQ ID NO: 23727 - DNA, 456 bp, Homo sapiens
  SIMILAR (284)..(451): 1001254mologous to Homo sapiens clathrin coat assembly protein-like,accession number D63643,Smith-Waterman Score=288.
  misc_feature (1)...(456): n = a,t,c or g
aattgatgacatctgaccangcggnggtagatggacggatcgcaggcgagattacgaggcgaggctcgcgcgcccgcccccgccctggcccccagtgcccacccggtcggcccggcacagccatgatcaaggcgatcctaatcttcaacaaccacgggaagccgcggctctccaagttctaccagccctacagtgaagatacacaacagcaaatcatcagggagactttccatttggtatctaagagagatgaaaatgtttgtaatttcctagaaggaggattgtatttgtggaaacattagacaaatgttttgaaaatgtctgtgagctggatttgattttccatgtagacaaggttcacaatattcttgcagaaatggtgatggggggaatggtattggagacaaatatgaatgagattgttacacaaattgatgcacaaaataagctggnaat

SEQ ID NO: 23728 - DNA, 403 bp, Homo sapiens
  SIMILAR (64)..(402): 591254mologous to Homo sapiens clathrin coat assembly protein -like,accession number D63643,Smith-Waterman Score=275.
cgaggctcgcgcgcccgcccccgccctggcccccagtgcccacccggtcggcccggcacagccatgatcaaggcgatcctaatcttcaacaaccacgggaagccgcggctctccaagttctaccagccctacagtgaagatacacaacagcaaatcttcagggaaactttcctttgggatctaagaaagaagaaaaaggttggaatttcctaaaaggaggattattaattggaggatctgacaacaaactggattatagacattatgcaacggtatattttgtctttcgggggggatttttcaaaaagggaactgggctttttaaatctaattcaggaatttggggaacctttagacaaatgttttgaaaaggtctgggagctggatttgattttccatgtag

SEQ ID NO: 23729 - DNA, 599 bp, Homo sapiens
  SIMILAR (1)..(162): 901254mologous to Homo sapiens Apg12,accession number AB017507,Smith-Waterman Score=245.
atgtcggaggagccgcagtctgtgttgcagcttcctacttcaattgctgctggaggggtaggacttacggatgtctccccagtcacaaccaccccggagcccccgtcttccgctgcagtttccccgggaacagaggaacctgctggcgacaccatagaaaaaaaaagaaagattgttgaaacagaccaaggttttggcactggaggtatgttaggtttcctggggatgcccacccggtcggcccggcacagccatgatcaaggcgatcctaatcttcaacaaccacgggaagccgcggctctccaagttctaccagccctacgtgagtatccagccgccgctgatccgggcgagggggagtcgttggcgacgggcagcgcccagcgcggctttctcagagcgaccccctccggcgcgctgcggcccttgtcccgtcccggccgcctggcgctcgccagctgtcagcctcctgagtgaagatacacaacagcaaatcatcagggagactttccatttggtatctaagagagatgaaaatgtttgtaatttcctagaaggaggattattaattggaggatctgacaacaaactgatttatc

SEQ ID NO: 23730 - DNA, 1319 bp, Homo sapiens
  SIMILAR (92)..(685): 681254mologous to Homo sapiens clathrin coat assembly protein -like,accession number D63643,Smith-Waterman Score=586.
  misc_feature (1)...(1319): n = a,t,c or g
gggaaggatcgcaggcgagattacgaggcgaggctcgcgcgcccgcccccgccctggcccccagtgcccacccggtcggcccggcacagccatgatcaaggcgatcctaatcttcaacaaccacgggaagccgcggctctccaagttctaccagccctacagtgaagatacacaacagcaaatcatcagggagactttccatttggtatctaagagagatgaaaatgtttgtaatttcctagaaggaggattattaattggaggatctgacaacaaacgtgatttatagacattatgcaaccgctatattttgtcttctgtgtggattcttcagaaacgtgaacttggcattttagatctaattcaagtatttgtgggaaacattagacaaatgttttggaaatgtcctgtgagctgggatttgattttccatgttagacaaggttccacaatattctttgcagaaatggtgatggggggaatggtattggagacaaatatgaatgagattgttacaccaattgatgcacaaaataagctggaaaaatctgaggctggcttagcaggagctccagccccgtgcctgtatcagctgtaaagaatatgaatcttcctggagatcccaagaaatattaacattgggtgacatcagtattaaaagtgccaaacctgccctctttttaaataaaaatgttaaaaagggccactcccaggtaaaatccagggggaagagtcatctaagtttaccatgcagttggtttaccaaaaatagaggaggagagtcttaacttttgctcttgggatttaagtcaaaggtactgtataggaagttgtgtaaaatccagtatggaaagttcaatgttgctgttcttgctcagtgattttaaaggaaattgagtagttcctatgtgatttttttttttcttcttttctaaactggcattccctgtgccccaccttacggcatgcccnctatgtattgggctactacagtgtttttaaaaagtgttttcagatatttctataattatgtacaaccctaaaatgttgggtgttttgtatgggatcacaagtgcagcattccttaattccttctgctatatgtcacacagttgttatttggagaaccaaagtatgtattgcatgaaaccaattatgacttttctctcttagtttaaataaactccaaggtaactggacttctaaagcaccctttctgtttgcctgatatctactttagcaataattttttttacaaccctctgactcaccaaacgtaaataaaagtatattttatcactaaaaaaaaaaaaaaaaaa

SEQ ID NO: 23731 - DNA, 726 bp, Homo sapiens
  SIMILAR (496)..(723): 1001254mologous to Homo sapiens kruppel-like zinc finger protein,accession number Z19002,Smith-Waterman Score=438.
atggatgctgggtcctgggatagggattttggacatgtatgctgggacctgggaccgggatgccagacacggatgctgggccccgggacggggatgccggacatggatgccgggccccgggacggggatgacggacatggatgccgctgggcccagggacggggatgccggacatggatgccgctgggcccagggacggggatgccggacatggatgccgctgggccccgggatggggatgccggacatggatgccgctgggccccgggacggggctgctggacatggatgccgctgggccccgggacggggatgctggacatggatgctgggccccgggatggggatgccggccatggatgccgctgggcagaaatgtttaatccaggtgagaaacaccagactggtagtgtttgcgatttctgtggtgtagatactcccaccatggctaattccaagctgctggtgtggtcactgaaggcggagttgagaaaaggtgagaagccctttgagtgtaagctctgccaccagcgctcccgggactactcggccatgatcaagcacctgagaacgcacaacggcgcctcgccctaccagtgcaccatctgcacagagtactgccccagcctctcctccatgcagaagcacatgaagggccacaagcccgaggagatcccgcccgactggaggatagagaagacgtacctctacctgtgctatgtgtga

SEQ ID NO: 23732 - DNA, 1156 bp, Homo sapiens
  SIMILAR (817)..(1155): 1001254mologous to Homo sapiens promyelocytic leukemia zinc finger protein; kruppel-like zinc finger protein; PLZF,accession number AF060568,Smith-Waterman Score=639.
atggatgctgggtcctgggatagggattttggacatgtatgctgggacctgggaccgggatgccagacacggatgctgggccccgggacggggatgccggacatggatgccgggccccgggacggggatgacggacatggatgccgctgggcccagggacggggatgccggacatggatgccgctgggcccagggacggggatgccggacatggatgccgctgggccccgggatggggatgccggacatggatgccgctgggccccgggacggggctgctggacatggatgccgctgggccccgggacggggatgctggacatggatgctgggccccgggatggggatgccggccatggatgccgctgggcagcttgcaagtggtcactcgccctgagctggatttgggcagggggattggatgggcagtcctccaggctgctgttggaaatttctcagagaaggacctgctgtgctgcacggaccttcctggaagtccaacccaggggctctttgagagagggggaatcaggaagtgtaggagtgagcaaagtgattctgggcagaaacctgaatggatatgacaaggacgagggatcctttgtccgggagctgtggcccatcagccctctcgctgcttctaaccgcttgctgctgctgttggtccccatgtgtgcccagagtcactggcttcaaacacagctgcactgcaccattcctctgtctgatcctcccaccggccatgtttcctcctggcccagagtgttcacagacactattccatcttccggattccgccattcacctggtgttctgggcactgacatggccgtcttctgtctgctgtgtgggaagcgcttccaggcgcagagcgcactgcagcagcacatggaggtccacgcgggcgtgcgcagctacatctgcagtgagtgcaaccgcaccttccccagccacacggctctcaaacgccacctgcgctcacatacaggcgaccacccctacgagtgtgagttctgtggcagctgcttccgggatgagagcacactcaagagccacaaacgcatccacacgggtgagaaaccctacgagtgcaatggctgtggcaagaagttcagcctcaagcatcagctggagacgcactatagggtgcacacag

SEQ ID NO: 23733 - DNA, 360 bp, Homo sapiens
  SIMILAR (40)..(195): 651254mologous to Homo sapiens promyelocytic leukemia zinc finger protein; kruppel-like zinc finger protein; PLZF,accession number AF060568,Smith-Waterman Score=166.
atgggactgagcattgctcaggcacagagactctgggaagcgggtgccaaagcctttgtctgtgatcagtgcggtgcacagttttcgaaggaggatgccctggagacacacaggcagacccatactggaaaggggtcccaggaggaagggagttgcctgatgacagggagcgctgaaaatgtcactaaagctattggagtgggaaaagccaggtgggagaccaggtaccgttgggaagccaacgggagagtaggggaagccactcaaccagatgcaaatgttgagatgctggttctcatccactgtgttgtcggctgcaagagtcttgcagtccagaaacggcatacctctggcggctga

SEQ ID NO: 23734 - DNA, 1371 bp, Homo sapiens
  SIMILAR (679)..(936): 731254mologous to Homo sapiens kruppel-like zinc finger protein,accession number Z19002,Smith-Waterman Score=317.
atgtttacacattctgaaagcagttctaagtctgtcatcgtcagattgtctctgacccgcgcgggtgccaaagcctttgtctgtgatcagtgcggtgcacagttttcgaaggaggatgccctggagacacacaggcagacccatactgggggattggatgggcagtcctccaggctgctgttggaaatttctcagagaaggacctgctgtgctgcacggaccttcctggaagtccaacccaggggctctttgagagagggggaatcaggaagtgtaggagtgagcaaagtgattctgggcagaaacctgaatggatatgacaaggacgagggatcctttgtccgggagctgctgaggagccccatccacaagatctctggggaaaaaacaaaaggcccagaccaccacattcagaccttcagcttatttcaagaacagggcatgtgcctgagttggtcaccatcatatccccagcagtggcccatcagccctctcgctgcttctaaccgcttgctgctgctgttggtccccatgtgtgcccagagtcactggcttcaaacacagctgcactgcaccattcctctgtctgatcctcccaccggccatgtttcctcctggcccagagtgttcacagacactattccatcttccggattccgccattcacctggtgttctgggcactgacatggccgtcttctgtctgctgtgtgggaagcgcttccaggcgcagagcgcactgcagcagcacatggaggtccacgcgggcgtgcgcagctacatctgcagtgagtgcaaccgcaccttccccagccacacggctctcaaacgccacctgcgctcacatacaggtaggaaagaggattcggctttaaaggatgagatccagggtggactgaaggaaagggatgaaacagtagaagaggtgaagggagttcaagatgaacaaagccagggggagccaggggaagtctgtttcaccaggacagtgctgggcctcattgagaatagcagtcgacactgcattagagagctcctggtgggaaatccagcaggccagtccaggatgtggggtattttgggagtgaagatgctatggagaactttcctggtgcctgaaattacgcaaggagcaaatctggaagccatccacagtgatgttttcatgagccacactggtgacgggcagagcagtcaaggccaccctgcagggcagaagcggtgctggctggagggggtccagtgcaccatctgcacagagtactgccccagcctctcctccatgcagaagcacatgaagggccacaagcccgaggagatcccgcccgactggaggatagagaagacgtacctctacctgtgctatgtgtga

SEQ ID NO: 23735 - DNA, 639 bp, Homo sapiens
  SIMILAR (443)..(526): 401254mologous to Homo sapiens kruppel-like zinc finger protein,accession number Z19002,Smith-Waterman Score=41.
atggggcccaaggctgcatgtcagcaccaactgcccaggtcctgctcgacaggaccaggaagtttgcatggtggctggtggaggctgataatctcagatggcccacgtgcaattaaaccttatgaaaagacaggactagattgggaagatgtgagtgtgtggaagctgcacagtgggatgaagacgtacgggtgcgagctctgcgggaagcggttcctggatagtttgcggctgagaatgcacttactggctcattcagggacttacaccttgtatcttcatgcttcccttcagctttgtacgctacttaaggttcagagtgtggcgggtttcatgaactatctgcctaccaggctctgtgcacttaacagtgaagactgctacaacatccctgccctcaaggagcttaagtctagagtgggagatgagtatgactatgcaatcatcatacaagatgaccagcattttggccagggtgcccagtttgagctcatttaccaaaggaagggaaagggaagtacccccaagcagccagcagtcagcactggggcctctagggaagagtggattggtgttgttttgctgtggtttgctgtgcgttttccagaatctctcttggatgactatcagattcagtga

SEQ ID NO: 23736 - DNA, 2407 bp, Homo sapiens
  SIMILAR (1035)..(1598): 971254mologous to Homo sapiens promyelocytic leukemia zinc finger protein; kruppel-like zinc finger protein; PLZF,accession number AF060568,Smith-Waterman Score=964.
tttcgtgctaacctcgcagcagagaggagttgagggctatgagagcggttactgcgaactgccgggcgatgctgtcgctgccgccgtgatacggagagcaacagttccccagcaacacccctccccgacacaggcacacaccccccgacaggcacgcacacccaccccacagtgcccggctcggctgcgcctcctctattggcccaggaagcccacccagccccgccacgcagagcccagaaggaaagaaagcctcatgcctgagccgaggggagcaccatggatctgacaaaaatgggcatgatccagctgcagaaccctagccaccccacggggctactgtgcaaggccaaccagatgcggctggccgggactttgtgcgatgtggtcatcatggtggacagccaggagttccacgcccaccggacggtgctggcctgcaccagcaagatgtttgagatcctcttccaccgcaatagtcaacactatactttggacttcctctcgccaaagaccttccagcagattctggagtatgcatatacagccacgctgcaagccaaggcggaggacctgtgatgacctgctgtatgcggccgagatcctggagatcgagtacctggaggaacagtgcctgaagatgctggagaccatccaggcctcagacgacaatgacacggaggccaccatggccgatggcggggccgaggaagaagaggaccgcaaggctcggaacctcaagaacatcttcatctcgaagcattccagcgaggagagtgggtatgccagtgtggctggacagagcctccctgggcccatggtggaccagagcccttcagtctccacttcatttggtctttcagccatgagtcccaccaaggctgcagtggacagttcgctgaccataggacagtctctcctgcagggaactcttcagccacctgcagggcccgaggagccaactctggctgggggtgggcggcaccctggggtggctgaggtgaagacggagatgatgcaggtggatgaggtgcccagccaggacacgccctggggcagccgagtccagcatctcaggagggatgggggacaaggttgaggaaagaggcaaagaggggcctgggaccccgactcgaagcagcgtcatcaccagtgctagggagctacactatgggcgagaggagagtgccgagcaggtgccacccccagctgaggctggccaggcccccactggccgacctgagcacccagcacccccgcctgagaagcatctgggcatctactccgtgttgcccaaccacaaggctgacgctgtattgagcatgccgtcttccgtgacctctggcctccacgtgcagcctgccctggctgtctccatggacttcagcacctatggggggctgctgccccagggcttcatccagagggagctgttcagcaagctgggggagctggctgtgggcatgaagtcagagagccggaccatcggagagcagtgcagcgtgtgtggggtcgagcttcctgataacgaggctgtggagcagcacaggaagctgcacagtgggatgaagacgtacgggtgcgagctctgcggggaagcggttcctggatagtttgcggctgagaatgcacttgctggctcattcagcgggtgccaaagcctttgtctgtgatcagtgcggtgcacagttttcgaaggaggatgccctggagacacacaggcagacccatactggcactgacatggccgtcttctgtctgctgtgtgggaagcgcttccaggcgcagagcgaccttgcagcagcacatggaggtccacgcgggcgtgcgcagctacatctgcagtgagtgcaaccgcaccttccccagccacacggctctcaaacgccacctgcgctcacatacaggcgaccacccctacgagtgtgagttctgtggcagctgcttccgggatgagagcacactcaagagccacaaacgcatccacacgggtgagaaaccctacgagtgcaatggctgtggcaagaagttcagcctcaagcatcagctggagacgcactatagggtgcacacaggtgagaagccctttgagtgtaaagctctgccaccagcgctcccgggactactcggccatgatcaagcacctgagaacgcacaactgcgcctcgccctaccagtgcaccatctgcacagagtactgccccagcctctcctccatgcagaagcacatgaagggccacaagcccgaggagatcccgcccgactggaggatagagaagacgtacctctacctgtgctatgtgtgaagggaggcccgcggcggtggagccgagcggggagccaggaaagaagagttggagtgagatgataggaaggactatgacaaataaaaaaggaaaagaaaaaa

SEQ ID NO: 23737 - DNA, 245 bp, Homo sapiens
  SIMILAR (3)..(197): 661254mologous to Arabidopsis thaliana putative protein,accession number AL162506,Smith-Waterman Score=216.
aagaagaggaggaggaggaggaggaggagaaggaggaggaaaaagaagaagaaggagaagaagaggaagaagaagaagaagaagaagaagaagaagaagaagaagaagaagaagaagaagaagaagaagaagaagatgttgttgttgagtcttccgatgatcaggccaagactaccacatcctcgttgggcttcatctccatcctctatggttgccaaaccatagtgtgcattagagtcgcttag

SEQ ID NO: 23738 - DNA, 456 bp, Homo sapiens
  SIMILAR (426)..(295): 521254mologous to Mus musculus AT motif-binding factor,accession number D26046,Smith-Waterman Score=117.
cctgggcgtgaggccgctgacaggctcagtggcggcggctgacggctgcaggcggcagggagctgagacatctgttgcccacgcggctgcctgccctccgaggaaaggcctccacacgtcacagctgcggctgcggcagcagcagcagcaacagccttgtttggagctgactggggatgcaggccccaggcaggcagtctgggagaaggtttgccaggaagagcctcctttgtcccccaaagtcacgcggcagcagctcaggcccaaggagccaggatggctgaggttgggtttgggtgggattgctgcattcttcttcttcctcttcttcttcttcttcttttcttcttcttcttcttcttcttcttcttcttcttcttcttcttcttcttcttcttcttcttcttcctcttcctcttcttcttctttcctcttcctcttcttcttctttggctt

SEQ ID NO: 23739 - DNA, 378 bp, Homo sapiens
  SIMILAR (161)..(292): 501254mologous to Homo sapiens KIAA0383,accession number AB002381,Smith-Waterman Score=103.
atagtgattcccctgatggagccgagcaaagtaaattaaaaaccttctggaaagaattctccattctagatgccattaagaatacttttgatgcatggcgaggaggaggaggaggaggaggaagaagaagaagaagaagaagaagaagaagaagaagaagaagaagaagaagaaggaagaagaagaagaagaagaagaagaggaagaagaagaagaagaagaagaaatacttcaaataaaaacaaaacattataccaccaaagagcaagaaaaagaagaacagggtataaagctagtgcaaggaagtaataatgatcagagcaggaaaaaaaaggagaatataaaaacactggggaaaaaaactcaatgaaacaaagt

SEQ ID NO: 23740 - DNA, 159 bp, Homo sapiens; identical to SEQ ID NO: 2961
  SIMILAR (54)..(113): 601254mologous to Oryza sativa similar to RING-H2 finger protein RHA1a (AF078683),accession number AP000616,Smith-Waterman Score=62.

SEQ ID NO: 23741 - DNA, 2502 bp, Homo sapiens
  SIMILAR (1509)..(1694): 671254mologous to Arabidopsis thaliana putative protein,accession number AL162506,Smith-Waterman Score=211.
atggaggtcttgtccatcgacaacttggcaggacacaaagtattttaccaaaaggaatctcacagctggaagcagcagaagcaagacttgatgtcaggaaaaaggctttctgctgctaaccctctacctgcccttcttctccctgttctctggacaacaggacaggctcccagccctggccctggtggtgaccccatcctgcagctctgggatgatgctcagcaaatggcaggttctccgaggacaaagaagaagggctgtaccagaaactcacaagcagcaaggctttccttccagagcaggggtgggcagggtagcctcactgagaagatgatatttgagcaaagatttggaggaggcaagggagagagtcgcaaagatgccattgccatcattgttgttgacatcgtcacactgcagccttgcaggacagtcgagtgggtgccgacacgtcccttccgttccctgcaaggccatttccagggaggcttacgaagacagcagatgatggtgatggaaggagtctgggtgctgagctgtgccatggacctgacctctccccgggactgcctgcccttctgtgtttcacttcctgtcctcctcttaagtgctcccctgtgcagctgctccacagctggtggctctccggtcacctccccccaccacttccctgttgaagggggcctggggagagtcagaaggtgctacatcaatgagcctgtggtgaccactctgggctgggagtccgtgtgctgggtcagcttctggctcctgctgaggattcgctatagcaccagtggacaggcagcttgtcatgcggaaagtcaggaactaaatccacgtggatttggctgtctggggcacagaaatgtcacctgggtcaaatgcctgctccctgctctccagccggaaggctccgttcccttcttggaactcctagagccttttatctttgcctctgcctctaagacatttgttgcagccaaccttgtgacttgggtggcttgttttctgctggttcaggccgccttccagctgagtgagtataggcagggggtcggcatccctgtggctgatagaactggagatgctccgaccttggggctttcatatgaggctgatgttgcagaaggtcatggcttcttcctggatcaagaatctgtcattcagattattccagagcccctgccccagttctacttatgcctcctggatgctgagctgacaggcgtgcaaggcgagcctgcactgccctccatgcagattttctcctccccagaggctgccactggagtccacaatgacaggggagctgaacatttcccagtcagtcgccagccctcagcagagcttggcctgaggcccatgcaggcatctcaggagaggaaaatcaactttcctggacccagccctggctttccacctaagcgacagaacaagactctgtcaagaagagagaagaaagaagaagagaaggaggagaaggaggaggaggaggaagaagagggggggaggaggagaaagaaaaagaagaggaagaggagaaggaggaagaggaggaggaggaagaagaagaaggaggagaagaagaagaagaagaagaagaagaagaagaagaagaagaagaagaagaagaagaagaagaaaaatggctttaccagtatgatcctgaagacaaagcacagtcaaagcaatggctatcaagaggtggaagtggtccagtcaaagcgaaagcagactggtggagagcaaaggaaatccatagtctccagccacgacaggttattccaggaataccgagcatgtgatgtgtggctgcagaagcagcacacgaaggctagaaaatgtcctgggacctggaagaaccagatcagggctcttcctagcattccttatctcacccttcctgaaaaacgggagaactgttccttcctaccctactcccagactcaatttaccctgaagctaaggaaaagttgcattcttctctgtatctcagacaacaagagcttgctgaagaataattttactgaaggtggccatgatattggtgtttttcacctcttggtaataagcaaagatccccgcaaccagagaatccgggcagaacatgaattctcagaactggtgggactttccaaccagttgcttctcatgcagaggcagaaaaatgaggggatcaacagcccaggcctcaggggcacccttcttggcccttacagctttctctggcactgtttggcacagaagcagcagagcccctgggctcctgggtactgtgtggccttgcatcagttatctcagtgtaaccagtggggacaaatggccagtgaccacgcatgcaccccttccagtgatgctgggaaaatagggaggaacattgaagagaaagacctcttctccacacctttgtctaatgatgttcttctgcaggaggaaggagaactgcagaatactggtcctatattggggagtggagaatccaaggcttttaaggggtag

SEQ ID NO: 23742 - DNA, 845 bp, Homo sapiens
  SIMILAR (637)..(482): 421254mologous to Leishmania major probable glycine-rich cell wall structural protein 2 precursor,accession number AL160371,Smith-Waterman Score=100.
ttaggaacaaaagcctgttttccacttgatatacagtgggaaggtgtgggaaatgctcacttccagcatccaggtgtctatgacagcagggacaacagaggaccacatgtagatgggaatacgcttcctgtgacccatgatggctttggtgctggaataaatgattgctgggtgggcaaggccacgggcttcagggtgtccaaagggcagaggttctcgcaggcctctgctccagcatttctgacccgtggggtttttctgggctgccctggcaaacaggtccctctgccctcttgccctgcttccatgtgctttgcagccgtcatcaatgtttttctgctcattgtccatctccctcgtggatcgaggggtgccaggcaggccaggagtgtgtctggtccacagctgagtttcccagcacctagagcggagcttggcccatagcaggtgctcagtaaataccaggaggaagcaacggcctggaggccgaggggccaccgccacctccactgcccgtcgctgcagtcctggctctggctccggaggcctggctgtggcctcctgtgctttcaccatctgtgcactgcgctggccaggcgtgccctgctctagggtgcccatctggacgccaagctgacagcacatccggctcgagcagggcatcttacaaaccatcgttagacctgtcaggcttccagcaattttgtttggttttggtttggtttggccccactcctctccctcatttccacaatgcaccattggttccacagccctgtgcattgcgatggtaccagggtatgaaactgggcggtgagggtcatcatgggccatcttggagactg

SEQ ID NO: 23743 - DNA, 439 bp, Homo sapiens; identical to SEQ ID NO: 18593
  SIMILAR (293)..(436): 771254mologous to Homo sapiens neutral protease large subunit,accession number M27826,Smith-Waterman Score=186.
  misc_feature (1)...(439): n = a,t,c or g

SEQ ID NO: 23744 - DNA, 416 bp, Homo sapiens
  SIMILAR (142)..(234): 901254mologous to Human endogenous retrovirus tripartite fusion transcript PLA2L,accession number Z14310,Smith-Waterman Score=156.
  misc_feature (1)...(416): n = a,t,c or g
caggaattctgcacgagcctcnnnnnnnnnnnnnnnnnnnnnnnnnnnnnnnnnnnnnnnnnnnnnnnnnnnnnnnnatgtgcatgaaatttggtgccgtgactcggatcgggggacctcccttgggagatcaatcccctgtcctcctgttctttgctccatgagaaagatccacctacaacctcaggtcctcagactgaccggcccaaggaacatctcatcaattttaaatcaggagcttgctacacgtgccggaaatctggccactaggccaaggaatgcctgcagcctgggattcctattaagccgcatctcatctgtgtgggaccccactgaaaatcggactgttcaactcacctggcagccactcccagagcccctggaactctggcccaaggctctctgactgactcctt

SEQ ID NO: 23745 - DNA, 751 bp, Homo sapiens; identical to SEQ ID NO: 10177
  SIMILAR (133)..(297): 941254mologous to Homo sapiens Human secreted protein, SEQ ID NO: 5210,accession number G01129,Smith-Waterman Score=278.

SEQ ID NO: 23746 - DNA, 453 bp, Homo sapiens; identical to SEQ ID NO: 440
  SIMILAR (152)..(238): 601254mologous to Homo sapiens Human secreted protein, SEQ ID NO: 5576,accession number G01495,Smith-Waterman Score=70.
  misc_feature (1)...(453): n = a,t,c or g

SEQ ID NO: 23747 - DNA, 462 bp, Homo sapiens; identical to SEQ ID NO: 23458
  SIMILAR (462)..(382): 811254mologous to Homo sapiens Human secreted protein, SEQ ID NO: 5576,accession number G01495,Smith-Waterman Score=99.

SEQ ID NO: 23748 - DNA, 741 bp, Homo sapiens; identical to SEQ ID NO: 8283
  SIMILAR (435)..(25): 661254mologous to Homo sapiens reverse transcriptase,accession number L27428,Smith-Waterman Score=471.

SEQ ID NO: 23749 - DNA, 366 bp, Homo sapiens; identical to SEQ ID NO: 10185
  SIMILAR (103)..(216): 811254mologous to Homo sapiens Human secreted protein, SEQ ID NO: 5576,accession number G01495,Smith-Waterman Score=150.

SEQ ID NO: 23750 - DNA, 783 bp, Homo sapiens
  SIMILAR (91)..(327): 961254mologous to Escherichia coli RecC1004,accession number AF176618,Smith-Waterman Score=406.
atggaattttgtatttcattaggccggaaaataactttttcaaacatttttccctacaacggggccaattggaaggttttcttaaaaaagtcccaaccattattgaatgcactggttgagcaggatgatgccgaacgcttgttccgccgcttccgagcggcaggggatttaccgtatggcgcttttggtgaaattttctgggaaacacagtgccaggagatgcagcagcttgccgacagagtcattgcctgtcgccagccggggcagagtatggaaattgatctcgcctgcaacggtgtgcagataactggctggttgccgcagctttgggatgctgaagggatcagcttcagtgtcttcagctttgggatgctgaagggatcagcttcagtgtcttcagctttgggatgctggagcttgctacacatgctggaaatctgccactgggccaaggaatgcccacagcacggtattcctcctaagccacgtcccatctgtgtgggaccccaccgaaaatcggactgttcatctcacctggcagccactcccagagcccctggaactctggcccaaggctctctgactgactccttcccagatcttctcggcttagcggctgaagactgacactgcccgatcgcctcagaagcctcttagtctgggtagacactttcactagatgggtagaggcctttcctacagggtctgacaaggccaccacggtcatttcttcccttctgtcagacataattccttggtttggccttcccacctctatacagt

SEQ ID NO: 23751 - DNA, 513 bp, Homo sapiens
  SIMILAR (308)..(508): 731254mologous to Homo sapiens neutral protease large subunit,accession number M27826,Smith-Waterman Score=227.
ttttatgcctgctaggactccggctcttgggtttcccgacattgtcattgttttggatcttctcttcagcttggtctttgctcttgctgcggctcttgccagcgctatggctgcggctgcaggctcttgtccttgctggggctcctgcttttctctttcttgctccggctccgactctggctccggctccggctcttgctccgggagcgggagcccgacctgaggagacatgggatacctgttgtgtccatgtgacttcatgctggcagccactcccagagcccctggaactctggcccaaggctctctgactgactccttcacagatcttctcggcttagcggctgaagactgatgctgcccgatcgcctcggaagccccgtagaccatcacggacgccgagcttccggtaactctcacagtggaaggtaagcccgtccccttcttaatcaatacggaggctacccgctccacattaccttctttccaagggcctgtttcccttgcctccat

SEQ ID NO: 23752 - DNA, 1161 bp, Homo sapiens
  SIMILAR (528)..(388): 551254mologous to Mus musculus N-formylpeptide receptor-like 2,accession number AF071180,Smith-Waterman Score=126.
tcagctaaacttaaccagctgcctttctcttaacttcaaggctacaaggatgtagtagccagtgatgatagccagagggagaaagaagccaaagaaaaagtgggctgttgtgaccagcgtttggtgccatggaatgataatctctttccaaagttggtgacttccttgagtttcattctgcagatcatactggttgtacaaagagggtgacactttccaccacgagtttccttgaagatcaagtagggaacagagaaacaaattgccaaaagccaggtcctcaagggccccagagttgcctttgctggtgtgcaattgttccaggactagattggccacaggatcacaagtcagtggtccatggagatgagggtcagaaggaagacacgtgttgactgtgcaggacatgtggaatccaactacccaaatgacaaggccattgccagccaagcctaggaagaaagtcactgtgtagatgatcatggaaaagatgtcaagagcagacttgaccctctccaaagagtcatcacaatagtcaaacatggacgtgggactctccacagtcaacagtgacaatgcagacacattctccatgctactgctctcttgattgtagctggaggtcatgggtgagtttgctctcagattccgagctccaccaacttgtgttctgagctctatgtgtttatttgagcaatagttaggctggactgagtccaggattgaattggatttgataattaatccaactgtgtcagcaacaacataaacattcagctggtacaaagctgcgacttgtgaatttcctactgacattaaagaagacttgtgaattccgtaatgagactgaagaagtctttcatgatggtgacagagaatggtgtcaattcctaaagtttggtcaatctctctgacacccactcccagagcccctggaactctggcccaaggctctctgactgattccttcccagatcttctcggcttagtggctgaagactgacactgcccgatcacctcggaagcccccctcagggcggaatacagaacctcgccattgtcatctccacctccaacactcatttgttcattttcgggccaatagccagagtaactacaaaggctgatggtcaccagcaggaagatagttaccagcttcat

SEQ ID NO: 23753 - DNA, 708 bp, Homo sapiens
  SIMILAR (397)..(507): 571254mologous to Human T-cell lymphotropic virus type 2 gag polyprotein,accession number AF326584,Smith-Waterman Score=147.
atgagaacacatggacccaaggacgggaacatcacacatcagggcctgttggaggacacatgtgacatttggtgccaaagacccgggacaggaggactccttcaggagactggccccctgtccttgccctcattctgtgaggagatccacctacaacatcaggtcctcagaccaagcagcccaaggaatatctcaccaatttcaaatctggctgctccttgcaaggccacagcaagtccctcagcctctgctcccccaccctataatccttctatcacttccactcctcacacccggtctggcttacagtttcgttccgcgactagccctcccccacctgcccgacaatttcctcttaaagaggaggctggagctaaaagcacagtcaagggatcttgcttcaagtgccagaaatctggccactgggccaaggaatgcctgcatcccgggattcctcctaagccgtgtcccatctgtgtggaaccccactggaaatcggatggtccaacttgcctggcagccactcccagagcccctggaattctggcccaaggctctctgactgactcctttccagatcttcttggcttagtggctgaagactgatgctgcccgatcgcctcggaagccccctacaagaccatcacggatgccgagcttcgcgtaactctcacagtggagggtacacatccagatggccggttcctg

SEQ ID NO: 23754 - DNA, 726 bp, Homo sapiens
  SIMILAR (546)..(238): 601254mologous to Mus musculus hematopoietic zinc finger protein,accession number AF118566,Smith-Waterman Score=302.
tcagaaggaacgaactctggacacgccgcctttaagaactgtgacactcaccacgagggtccgtggcttcattcttgaagtcagtgagaccaagaacccaccaattccagacacagtattactggcagccactcccagagctcctggaactctggcccgaggctcactgactgactccttcccagatcttctcagcttagcagctgaagactgacactgcccgatcacctcggaagcctgtttaagttgcgtttccgagttgacgtgcacatcacagatttcacagtgaaatgttttattttggaggcctgtgtttcctttattaacaggtcctttgcctttcactcctgccctaggaaaggctttgatagtgccacttccattccgggcttctaacatggttttgtgcttagtaccactgttgtgcgcctccagctgcgaggcagagttgacagcaaccttgcatagcgaacagtaaagaagccgttttgccttttcttcctcggtctcagtagaaggacatgagctattgccagtggctgtcgttgggcttttttccactttagaggtgatctcagttgtcataaccctgcttttgcggatttcccccgttgtcgtcgttgatattgctggtgtccctgcagtaccgtcttgacttgggtcaggcaactgagggttaagctccttgggcagggctgtcaaggttttattgaggagggtgctcat

SEQ ID NO: 23755 - DNA, 1593 bp, Homo sapiens; identical to SEQ ID NO: 10188
  SIMILAR (1452)..(751): 851254mologous to Mus musculus protocadherin,accession number AF281899,Smith-Waterman Score=1033.

SEQ ID NO: 23756 - DNA, 433 bp, Homo sapiens; identical to SEQ ID NO: 21038
  SIMILAR (268)..(351): 821254mologous to Homo sapiens neutral protease large subunit,accession number M27826,Smith-Waterman Score=116.

SEQ ID NO: 23757 - DNA, 534 bp, Homo sapiens; identical to SEQ ID NO: 15685
  SIMILAR (322)..(251): 831254mologous to Homo sapiens Human secreted protein, SEQ ID NO: 5576,accession number G01495,Smith-Waterman Score=93.

SEQ ID NO: 23758 - DNA, 1604 bp, Homo sapiens
  SIMILAR (1)..(459): 1001254mologous to Salmonella typhi RcsB,accession number AB000683,Smith-Waterman Score=749.
atgcctggcgataagtacggcgatggcattaccttaatcaagtacatcaagcgccatttcccaagcctgtcgatcattgttctgactatgaacaacaacccggcgattcttagtgcggtattggatctggatatcgaagggatcgtgctgaaacaaggtgcaccgaccgatctgccgaaagctctcgccgcgctgcagaaagggaagaaatttaccccggaaagcgtttctcgcctgttggaaaaaatcagtgctggtggttacggtgacaagcgtctctcgccaaaagagagtgaagttctgcgcctgtttgcggaaggcttcctggtgaccgagatcgctaaaaagctgaaccgcagtattaaaaccatcagtagccagaagaaatctgcgatgatgaagctgggtgtcgagaacgatatcgccctgctgaattatctctcttcagtgaccttaagccagataagacgcgttagtgtcttatctggcatttgcaccgattgccggatgcggcgtaaacgccttatccggcctacgattcccattatttcaacaaattacattaaagtaggccagataagacgcgtcagcgtcgcatctggcatttgcgctgaatgccggatgcggggtaaacgctttatcgtcctaggaattccgggatttctggacctctcggggtataacgcagcgtctgggaagcgccaaagcttgcatgcctgcagccgcgtaacctggcaaaatcggttacggttgaaacgttttccttcaattcatgggccttttaatgaagcttcacaagaagcggcgcgtcgtaagtcgattgagaaagagctggaatgggtacgtcaaggtactaaaggccgtcagtcgaaaggtaaagcacgtctggcgcgctttgaagaactgaacagcaccgaatatcagatcactgtattacacacaggaggaaaatcagagttaggaagggggcttccgaggcgatcgggcagtgtcagtcttcagccgctaagccgagaagatctgggaaggagtcagagagccttgggccagagttccaggggctctgggagtggctgccagtttatgagctaggaaccctccatgcaggctctgaacctggtggagctcttccttgggtttctgctgagatgtctgctgttagtctgatgggcttccctttacagatattgggtacatgtagaagggagaggtctttggggacctggtcgagaaaaagtggctatgtgatgagtggcagggatgggaagtcagtgaagaagtcaaagctcttggacagaaagaagagtcagagcaaaaagcttatggaaccaagaggatgctcacctggagactgcactgccgcttctagattaccatgggtagcaagtacccaagaacaccctttccaaatggctctaagcccatctccagacctgtgcaggcttttcctaagatatatcttccaaaaaatggaccttgtcattggtgtgcatatacctgaacccaagcattggccaaggggcaacggtttgcagctcctggttatcaccactctactatctgtttcaacgggtttgactatattagatcccacaaataagtga

SEQ ID NO: 23759 - DNA, 1785 bp, Homo sapiens
  SIMILAR (1229)..(1717): 921254mologous to Homo sapiens neutral protease large subunit,accession number M27826,Smith-Waterman Score=767.
ggggcttccgaggcgatcaggcagcatcagtcttcagccactaagccaagaagatctgggaaggagtcagtcagagagcctcgggccagagttccaggggctctggcagtggctgtcagactttcaaacttaacaccagtggtttgtcagtggctttcaagccttcagcgacagactgaaggctgcattgtcagcttccctacttttgaggtttggggactcagactggcttcctagctcttcagcttgcaaatgtcttatgctgggacttcactttgtgattgtaggtaacatctgtgctacactcaaggagaaatactcctcaatgctccatttagatgtgaccatgaagaaaaatggggagaaaagaacaaggctccaaaaaagaaagaagggaatgcctccacatccggcttatgaggacctaaacatagctgccatcactctccctgccaatgttgtccttcatcagccaagtggcttcagaacttcagggcagctggaccccgtttggtggtctcttgacacggacgcgcatgaaatttggtgccaagacccgggacttggatcaggggacttcccttgggagatcactcccctgtcctcctactctttgctccatgagaaagatccacctacgacctcaggtcctcagaccgaccagcccaagaaacatctcaccaatttcaaatccaagacaaaggagacaggttttatccatggacccaaaactccggcaccggtcacggactgggaaggcagccttcccttggtgtttaatcattgcagggacacctctctgattattcacccatgtttcaagggtgtcagaccacgcagggatgcctgccttggtccttcacccttagcggcaagtcccgcttttctggagaaggggcaagatttaattaacctcgccttcaaggtgtacaataatagaaaaaagttgcaattccttgcctccactgtgagacaaaccgcagccacatctccagcacacaagaacttccaaatgcctgaaccgcagcggccaggcgttcctccagaacctcctcccacaggagcttgctacatgtgccggaaatctggccactgggccaaggaatgcccgcagcccgggattcctcctaagccgcgtcccatctgtgtaggaccccaccgaaaatcggactgttcaactcacctggcagccactcccagaggccctggaactctggcccaaggctctctgactgactccttcccagatcttctcggcttagtggctgaagactgacactgcccgatcgcctcggttgaagccccctagaccatcacagaagccgagcttcgggtaactctcacagtggagggtaagtccatcccctgtttaatcgatacgggggctacccactccacgttgccttcttttcaagggcctgtttcccttgcccccataactgttgtgggtattgacggccaagcttcaaaacccctgaaaactcccccactctggtgccaacttggacaacactcttttatgcactcttttttagttatccccacctgcccactccccttattaggccgaaatattttaaccaaattatctgcttccctgactattcctggagtacagctacatctcattgctgcccttcttcccaatccaaagcctcctttgtgtcctctaacatccccacaatatcaccccttaccacaagacctcccttcagcttaatctctcccactataggttcccacgccgcccctaatcccacttgaagcagcctgtaacgagatgac

SEQ ID NO: 23760 - DNA, 977 bp, Homo sapiens
  SIMILAR (341)..(424): 461254mologous to Homo sapiens PTD003,accession number AF078858,Smith-Waterman Score=52.
cccaccacctccccgggtcctccgcacaggcggcggcgctagccttactgcgcaggcgccaggtacacctcggaggcctcaggagggggagccagtaactccgggtcgttcactagggctccgctctagctgccaagcttccgtttctctactgctccccgtaatagttgcctgcgcgagcttggagccgggtagagggcgggccttccgggacgagggcgcgtggaatacccgcgtttccgctgccgtaatttcctctcaggcgcaattactctcttccatattggttaacagtagaaggctcagtttctctgctcatcacacggccttcggcactgtagctttgggtgaatatgccttccgcatgttttcgtctcagtgcccggctatttgggtgaagtcacccaggcctactaattcccaagtcttatgaaagtggtgaaactgtttagtgaaactggcccttggccaagaagaaggagacttatgattgggtatccaaatcaccacacttacggctggaactcatggcaggacggctccgatttcttgggactcttacagaggatgaggcattcagggattttatggggatggaggcaaaaacggacttaaaggaagctttcgtgggaaagggaggaaacccaaaggaaagggagaaggggaaaagagcagccaaaaagggaaatagttgtttggtcccttcaaggaggggagactttctttcctcagtggcggagagaagaaagttgcatttattgtctttcccacatattggaggagatgtcatcttcctaaatggaagtttatttgggaggaacacgagtcatctccttggtgaaatctaatccggttacattggtggctgggtttcttgaacacattcctaactgtgcaaaattatcttggccttggccgtgtaatgtgaggtttacctgattctctaatgaaataaatacctaagttattgtttgaaa

SEQ ID NO: 23761 - DNA, 1887 bp, Homo sapiens
  SIMILAR (324)..(680): 451254mologous to Homo sapiens TERA,accession number AF212220,Smith-Waterman Score=207.
ccatgaggaggaacaagccccggcagcgcggcgtgcgggaggcgcggcctgcgggaggcgccgggccgggctggcgcggggcccgttgttccggcgcaggtgagggaggtggcggcgagcgacgcggttcacctcccgctgccctcgccctcgccccggcgagcggcccccgcaggaactttcctcccgacgcgagatgtcttatttaccaacaaatccaccagggagcattcttacttgctggctcggcgtctctctcggcagtcaccggagtgcccgagggggaagcacgatttacggaagactattgcccagaagaaaagatgtttggttttcacaagccaaagatgtaccgaagtatagaggggtgctggtatttcaggagctaagtcctccagttctcgattcactgacagtaaacgctatgaaaaaggacttccaagagctgttttggattgcatgagactcgttcaggagacatctggcaatgcctgtgtcctgcttgtgaaaagatggaagaagttgccagcaggatcaaaaaaaaaactggaatcatgtggtagatgcaagggctggacccagttctaaagactacatttgaaccaaaagaaagtgaaaactctatctggggaacaggattaaaaggcacccagatcagtaaactgcagaaggaatttaaaccgttctaattctgatgctcacagtaccacctcaagtgcctccccagctcaatctccttgttacagtaaccagtcagatgacggctcagatacagagatggcttctggttctaacagaacaccagttttttcctttttagatctcacttactggaaaagacagaagatatgttgtgggatcatctataaaggccgttttggggaagtcctcattgacacacatctcttcaagccttgctgcagcaataagaaagcagctgctgagaagccagaggagcaggggccagagcctctgcccatctccactcaggagtggactgagtgtccagacctctcactggttgtcagctggaggcccccgcttagttccttgccagctgggtgctccctgcatggcctggctgctgactggaccactgacatgattactgtcactaccagcaagtgtcgagagccaagctgccagcaagaggggtcttttcagagaagaaaagcctttcccaagcggctgccgaagatggcggaggtgcaggtcctggtgctttgatggtcaaggcccatctcctgggcccgcctggcgggccatcgtggctaaaccaggtactgctgggccggaaaggtggtggtcgtacgctgtgtagccaacaccatttctgccaatttctacagaaacgaggttaaagtacctggctttcctccgcaagcggaatgaacaccaacccttcccgaaggcccctaccacttcgggggcccccagccgcatcttcgtggcggacccgtgcgaggtatgcatgccccacaaaacccagccgaggccaggccgctctggacccgtctcaaggtgtttgacggcaatccccccgccctacgacaagaaaaagcgggatggtggttcctgctgccctcaaggtcgtgcgttttgaagcctacaagaaagtttgccctatttggggcgcctgggctcccgaggttgggctggaagtaccaggcagtgacagccccccctggaggagaagaggaaagagaaagccaagatccactaccggaagaagaaacagctcatgaggctacggaaacaggccgagaagaacgtggagaagaaaattgacaaatacacagaggtcctcaagacccacggactcctggtctgagcccaataaagactgttaattcctcaaaaaaaaaaaaaaaaaaaagggcggccgct

SEQ ID NO: 23762 - DNA, 500 bp, Homo sapiens
agacaacccccatcccctgctgtagcgggacagttggagggtcatgggtgggtgaagtgtttggctgagggaaactcagaccaaagagcagcggcaagaaagcagttgggtccccacaaaacgcccgaagtcaaggtgagggtcacacaacgactcttgacgattccggcgagttcatcctggtgcacatcccactccatgcctctctcttctggttggacaatagttacatccttacgaaaaggaggcaagctgctgggccttggtggatccactcaaccttgttaccaagggacatgccgccatgctatgtgaaaaggggggttttgttgtttgtttttaatttaagtatctaattcgtttcacgaaagaatgatcaataccggcccagagtaaacttgataagtaattaaactgtcagggcatagagttcccataaaggtgcttgttctttcaatacacaaataaagggatgcaaaagtcaaaaaaaaaaaaaaaaa

SEQ ID NO: 23763 - DNA, 2286 bp, Homo sapiens
  SIMILAR (1133)..(1225): 1001254mologous to Homo sapiens Human secreted protein (clone k213-2x),accession number Y17222,Smith-Waterman Score=149.
ctatacttccttattggtatagaggctgtaagacgcagcaatttgtctttcacttcggagaggatatctcgacactgccctgagcactggacctctaaaaactttactaatgtgactgttctctgaatcttcagtgtttatctcccatcctctggcattcaggtatcttaccaaggccttcaccatactagctatctcttcctcatcctgtcctataagtaggatgttgtcaataaactggatcagtgtggtgttcttgacttcgggcgttttgtggggacccaactgctttcttgccgctgctctttggtctgagtttccctcagccaaacacttcacccacccatgaccctccaactgtcccgctacagcaggggatgggggttgtcttccgatcgacctcggggggcaaaggcaaaagtccctagctgcttcggaaccgctcctcgagtcctgaagccgctccacgcctcctcgcccaccacttggtccccgcaggacgtggcagtctcgggctccagcgcccggctggcggctcgggtcgcctgtgggcgggacgcaaaggccgcgacttccgccttcctgcttccggtctggcggtgagtggggagtgggatccgatcccgtggggctatgtaggggaagttggtggctgcagctgccagtggttttctcctggtgtccagcagaaacggcggcggcgcaaggtgtggctgggccaaccgcaggatctcccaggaccctccgctctggccgacaaggggcccgcgcttgccaaggccgacgggcagagagtgaacgtggcctccgtgggtctgcagccccgataggccaattgtacagaatttaaaccgtctcgtcagatgtgtacaggcataacccaagaatacagactaccacgggtcatctgaagtcgtgattgggtcactaataacaccaggacaaagttaagggatcactactcaagcataagccccagttttcattaagactgctgtgaagatgtttgatataaaggcttgggctgagtatgttgtggaatgggctgcaaaggacccctatggcttccttacgaccgttattttggcccttactccactgttcctagcaagtgctgtactgtcttggaaatttggccaagatgattgaggccagggagaaggagcaaaagaagaagcaaaaacgccaagaaaacattgcaaaagctaaacgactaaaaaaggattgaaggactgaacaggctttgcaaccagaggaaaatcatttggaaaattacacagcttttggaagaatccactaaagtttcttctttggatttcttgacagtatgatttagtaaatgaaatttgaccaaatggaagaatcatgttagttctgacctcaatactatagtaacttttaggcgtgggtgtagaagtttataggtttctattgacagttattgtaaattagcatttactgtggtacaaattctttataactgacttagtcatttgccgcttagcaggttatatactgaaatgaaaacatctttgtgggaaaaagtgactttagattatgaactcaattcaaatgaactctatttaaaatggggtcctattttggacaaaggaaattaagaatgtaaaagtcagaacagtcttgaggtaaaaagtgtgctttggcttaaaagggatacagtatattaattacatcttttattattattgggtatttcttagaatcatttctggctttctcaaaacaaaataatattaatgagcacttctatttgctgcatttttcttattacagcctttgagacagctggtaattataagtcattttccattttttaaaacataattttataaagaattctcttatctcgactatgtagaataccacctactgggacagaacaatttttgtactcacaaacactgccattttctttagaggatggcttgagaggagtaacactatggtttaaagcttgcagtaaaaatgccaaacactgtagtaccttggaacccagtttattcttgtgctaagcagaactgtaaaatagttaaaatgtcttatcaagtaattcgccgattacaaagacaccatttgttttttatttcattctttgttttaactcatgtggtagtgatatttaatactttctgatcaaacaggttcaaagtaaaacgttaaatttcacatttcttttaaagaactcttaaagtgtaacagttacgccatacttcataagtggtaaagaaaggtataaaatttggaaacattttgttgggcatagta

SEQ ID NO: 23764 - DNA, 1220 bp, Homo sapiens
  SIMILAR (796)..(1026): 451254mologous to Onchocerca volvulus dynein light chain 1 protein DLC-1,accession number AF153718,Smith-Waterman Score=139.
  misc_feature (1)...(1220): n = a,t,c or g
atgtcttacaaggtcacccaagaaatcagcaaagaattgaggtggatttcagcagttctagtcacatgggacttgagaggggagactggcaccagggtctgcattgcaatgggagtgtcaaggatgcagtatagtataatggctaagattgtaggcagtggaaacaatctggagttgaatcctgccgctgacaaactggataatcttggggcccagtgcggactcgcctccgtgaaggtgagcgcccgggctgcgccaccctttgccccggccaccctcgtggcgctgctggaggcccgggctgcggagctgccgctgcccccgcccccgggagtctctctgcgctgcgtggaggcccctgatgtcaggggccggggaagagggggtggagagggctcgggcgtgacgcggctcctcctgccgccaccgccaccctctggggcgtccttcctgcagcgaggacgcccagtcactccggcgctgttccaggccgggtgggggagggcggccgaccggccggggcctgcggacctggccggcggcgcgggcgggaggtcggggggaaggaggatgcttcctcgttccccaggtgctgcccttcgggaccgcagcgctctggaggatgggatagtggagggatacggcccacttggagagcccgaagagggaagtagaagctctttcctggagagtaaggtggcttttaattactgtaacaaagttgctcctttggactttgggaatgaggcagtggagcagtgtcacaccatgtctgaccggaaggcagtgatcaagaacgcagacatgtctgaggacatgcaacaggatgccgttgactgcgcccacgcaggccatggagaagtacaatatagagaaggacattgctgcctatatcaagaaggaatttgacaagaaatataaccctacctggcattgtatcgtgggccgaaatttttggcagctacggtccnacacaccgaagacaagcacttcatctatttttacttgggtcaagttgcaatccttcctcttcaagtcaggctaggtgggccatggtgaaggtgtcagtggcggcggcagcgatggcaagcaggcggcgttgctgggactgttttgcactggagccagcatcaggaatgtcctctccaatgggctngtgctactgcatggactgtatactcgatttcatgtgtatgtcgcagtaaacaaaaccaaacctc

SEQ ID NO: 23765 - DNA, 427 bp, Homo sapiens
  SIMILAR (102)..(407): 991254mologous to Homo sapiens TERA,accession number AF212220,Smith-Waterman Score=546.
ggcacgagggttgaggaggagggagcgcttgagggggactggcctggcgtgcactccgcacctcggggacattattgcgcgtggaacggctgcttttggaagattctgatgctcacagtaccacctcaagtgcctccccagctcaatctccttgttacagtaaccagtcagatgacggctcagatacagagatggcttctggttctaacagaacaccagttttttcctttttagatctcacttactggaaaagacagaagatatgttgtgggatcatctataaaggccgttttggggaagtcctcattgacacacatctcttcaagccttgctgcagcaataagaaagcagctgctgagaagccagaggagcaggggccagagcctctgcccatctccactcaggagaggcgactgaggtttttatg

SEQ ID NO: 23766 - DNA, 780 bp, Homo sapiens
  SIMILAR (529)..(777): 921254mologous to Mus musculus Tera,accession number U64033,Smith-Waterman Score=422.
atgactagcaagaagagtattccttcagttggatatgaagtgtttgaaaggagatatgatcaacgctctaagaatggaaacaggcaggtgagggaggcggcggccagcgacgcggttcacctcctgctgtcctcgccctcgccccggcgagctgcccccgacgcgagatgtcttatttaccaacaaatccaccagggagcattcttatttgctggctcggcgtctctctcagcagtcaccggagtgccggagggggaagcgcgatttacggaagactattacccagaagaaaagatgtttgtttttcacaagccaaagatgtaccgaagtatagagggctactgtatttgcagagctaagtcctccagttctcgattcactgacagtaaacgctatgaaaaggacttccagagctgttttggattgcatgagactcgttcaggagacatctgcaatgcctgtgtcctgcttgtgaaaagatggaagaagttgccagcaggatcaaaaaaaaaaactggaatcatgtgtaaccagtcagatgacggctcagatacagagatggcttctggttctaacagaacaccagttttttcctttttagatctcacatactggaaaagacagaagatatgttgtgggatcaactataaaggccgttttggggaagtcctcattgacacacatcccttcaagccttgctgcagcaataagaaagcagctgccgagaagccagaggagcaggggccagagcctctgcccatctccactcaggagtggtga

SEQ ID NO: 23767 - DNA, 1114 bp, Homo sapiens
  SIMILAR (276)..(833): 401254mologous to Homo sapiens TERA,accession number AF212220,Smith-Waterman Score=273.
  misc_feature (1)...(1114): n = a,t,c or g
atctttctagacaaggcagtcgatgaggagggagcgcttgagggggactggcctggcgtgcactccgcacctcggggacattattgcgcgtggaacggctgcttttggaaggcacaacttcctgaatggaccatgactcccaccaaagatccctgtctctgattcaccaaacagccttcaacccctgaaaccaggacgagaagttgacaacatctgagtggacagctaattgacctaagacttcagaccaggcctactattgcccagaagaaaagatgtttggttttcacaagccaaagatgtacccgaagtatagaggggtgctggtatttcaggagctaagtcctccagttctcgattcactgacagtaaacgctatgaaaaaggacttccaagagctgttttggattgcatgagactcgtttcaggagacatcttgcaatgcctgtgtcctgcttgtgaaaagatggaagaagttgccagcaggatcaaaaaaaaaactggaatcatgtggtagatgcaagggctggacccagtctaaagactacattgaaaccaaagaaagtgaaaactcttatctgggaacaggattaaaaggcacccagatcagtaaactgcagaaaggaattttaaacgtcaataattcctgatgctcacagtacccaccctcaagtgccctcccccagctcaatcccccttgtttacagttaaccagttcagatggacgggctcagatacaggggtgggcttctcnggttctaaccggaaccacccagttttttcctttttagatctccacttactggaaaagacagaagatatgttgtgggatcgatctataaaggccgttttggggaagtcctcattgacacacatctcttcaagccttgctgcagcaataagaaagcacgctgctgagaagccagaggagcaggggccagagcctctgcccatctccactcaggagtgggtgactgaggtttttatgtagaaggggaacaaaaaaaaatatctgaattttgaaaaaccacaaagctacaaacttgaccctcttttttttttgagacggagttttgctccttgttacccaggctggagtgcagtggcgtgatct

SEQ ID NO: 23768 - DNA, 1090 bp, Homo sapiens
  SIMILAR (3)..(1055): 1001254mologous to Homo sapiens pp60 c-src-1 protein,accession number K03218,Smith-Waterman Score=1867.
gtgcctactgcctctcagtgtctgacttcgacaacgccaagggcctcaacgtgaagcactacaagatccgcaagctggacagcggcggcttctacatcacctcccgcacccagttcaacagcctgcagcagctggtggcctactactccaaacacgccgatggcctgtgccaccgcctcaccaccgtgtgccccacgtccaagccgcagactcagggcctggccaaggatgcctgggagatccctcgggagtcgctgcggctggaggtcaagctgggccagggctgctttggcgaggtgtggatggggacctggaacggtaccaccagggtggccatcaaaaccctgaagcctggcacgatgtctccagaggccttcctgcaggaggcccaggtcatgaagaagctgaggcatgagaagctggtgcagttgtatgctgtggtttcagaggagcccatttacatcgtcacggagtacatgagcaaggggagtttgctggactttctcaagggggagacaggcaagtacctgcggctgcctcagctggtggacatggctgctcagatcgcctcaggcatggcgtacgtggagcggatgaactacgtccaccgggaccttcgtgcagccaacatcctggtgggagagaacctggtgtgcaaagtggccgactttgggctggctcggctcattgaagacaatgagtacacggcgcggcaaggtgccaaattccccatcaagtggacggctccagaagctgccctctatggccgcttcaccatcaagtcggacgtgtggtccttcgggatcctgctgactgagctcaccacaaagggacgggtgccctaccctgggatggtgaaccgcgaggtgctggaccaggtggagcggggctaccggatgccctgcccgccggagtgtcccgagtccctgcacgacctcatgtgccagtgctggcggaaggagcctgaggagcggcccaccttcgagtacctgcaggccttcctggaggactacttcacgtccaccgagccccagtaccagcccggggagaacctctaggcacaggcgggcccagaccggcttctcggctt

SEQ ID NO: 23769 - DNA, 1699 bp, Homo sapiens
  SIMILAR (791)..(1696): 1001254mologous to Homo sapiens dJ823N20.1 (v-src avian sarcoma (Schmidt-Ruppin A-2) viral oncogene homologn(a tyrosine- protein kinase (EC 2.7.1.112))),accession number AL133293,Smith- Waterman Score=1612.
atgcgcccctgcgccctctgctggcgctctgcggtcaccgcagccccggagagggccgttttggagagccgcggcggtgccccagacactccacgcagacttcactccttcactcagacccgttcactctccccacaggcacacgctgggccacacacacggctacacccccgccagggacacgcacacatgcggggtggaggcagggtcacagacacccgcagacacatccccaacgcagatgtacccagatacaaactcacatgcacaggtggagtgaccacctttgtggccctctatgactatgagtctaggacggagacagacctgtccttcaagaaaggcgagcgggctccagattgtcaacaacacaaaaggagactggtggctggcccactcgctcagcacaggacagacaggctacatccccagcaactacgtggcgccctccgactccatccaagctgaggagtggtattttggcaagatcaccagacgggagtcagagcggttactgctcaatgcagagaacccgagagggaccttcctcgtgcgagaaagtgagaccacgaaaggtgcctactgcctctcagtgtctgacttcgacaacgccaagggcctcaacgtgaagcactacaagatccgcaagctggacagcggcggcttctacatcacctcccgcacccagttcaacagcctgcagcagctggtggcctactactccatgtcccactgcccgcctttctctgcagctggctggtatggagggggctgccctgaggagccccagaaacacgccgatggcctgtgccaccgcctcaccaccgtgtgccccacgtccaagccgcagactcagggcctggccaaggatgcctgggagatccctcgggagtcgctgcggctggaggtcaagctgggccagggctgctttggcgaggtgtggatggggacctggaacggtaccaccagggtggccatcaaaaccctgaagcctggcacgatgtctccagaggccttcctgcaggaggcccaggtcatgaagaagctgaggcatgagaagctggtgcagttgtatgctgtggtttcagaggagcccatttacatcgtcacggagtacatgagcaaggggagtttgctggactttctcaagggggagacaggcaagtacctgcggctgcctcagctggtggacatggctgctcagatcgcctcaggcatggcgtacgtggagcggatgaactacgtccaccgggaccttcgtgcagccaacatcctggtgggagagaacctggtgtgcaaagtggccgactttgggctggctcggctcattgaagacaatgagtacacggcgcggcaaggtgccaaattccccatcaagtggacggctccagaagctgccctctatggccgcttcaccatcaagtcggacgtgtggtccttcgggatcctgctgactgagctcaccacaaagggacgggtgccctaccctgggatggtgaaccgcgaggtgctggaccaggtggagcggggctaccggatgccctgcccgccggagtgtcccgagtccctgcacgacctcatgtgccagtgctggcggaaggagcctgaggagcggcccaccttcgagtacctgcaggccttcctggaggactacttcacgtccaccgagccccagtaccagcccggggagaacctctag

SEQ ID NO: 23770 - DNA, 1484 bp, Homo sapiens
  SIMILAR (233)..(433): 971254mologous to Canis familiaris Rab12 protein,accession number Z22818,Smith-Waterman Score=341.
atggatccgggcgccgcgctgcagaggcgggccgggggcggcggcggtctgggcgcgggctccccggcgctgtcgggcggccagggccgccggaggaagcagccccccaggccggccgacttcaagttgcaggtcatcattatcggctcccgcggcgtgggcaagaccagcctgatggagcgcttcaccgacgacaccttctgcgaggcctgcaagtccaccgtgggtgtgtgacttcaaaatcaaaactgtagagctaagaggaaagaaaattagattacagatctgggacacagcaggtcaggagagattcagcagcattacctcagcttattacagaagtgccaaggggatgatattagtatatgatatcactaagaaggagacatttgatgatttgccgaaatggatgaagatgattgataagtatgccttcagaagatgcagatcttctcttagttggaaataagttggactgtgaaacggacagagaaatcaccaggcagcagggggaaaagtttgcacagcagatcactgggatgcggttctgtgaagcaagtgccaaggataacttcaatgtggacgagatatttttgaaacttgtcgatgacattctgaaaaagatgcctctggatattttaaggaatgagttgtccaatagtatcctgtcgttacaaccagagcctgagataccgccagaactgcctccaccaagaccacatgtccgatgctgttgatttcctactttggagacaaagtggaaatgattcctggaaaggggaaaaaacgttctattctgcactacaatcattttgacaattttccctttcgcactttgtaattccaagtcagggctattacactaacttgtaaatatgccatatatgcaatcctgggtaagttttggttataagttacctatttccctccaaattattatatttcattcattacccccagtgtctagtgtccatacactgggaaccctggtacttctaatatgaaggaatggggagaaatgaaaggtattaatgtttcttgaaaataaattaatataaattgtccttattaattatattatgaggaccagaagatattcctgataagagagaaccgtggtgctttgccttaccgttttaaagaaaaatttgtaaaactaaagactttttggaaaaaaagccattcttaagtgctttttctttatttacaagacatttcccccagtggtagcatctgaagtattggagtgtttctgccacgaagcaaagctccattcatggccgtcatggaaggttatttattaatgttacataatggtagaatattactagttagagggttggatttgacttggtcctaaggccacagaatctctctcatggcttcctaagggatgtacctttatgcttttaagaactacaaagattcaataaagaaagaaatgtttttgaaactatagaaaaagattttaaaacacgctgtat

SEQ ID NO: 23771 - DNA, 493 bp, Homo sapiens
  SIMILAR (260)..(493): 1001254mologous to Homo sapiens glutathione transferase M4,accession number M96234,Smith-Waterman Score=415.
  misc_feature (1)...(493): n = a,t,c or g
gtgggcgnnccatcgagncccttngnattgtagatcactagtccagtgcgggggaattcgcagaatcgacaccaaccagcatcatgtccatgacactggggtactgggacatccgcgggctggcccacgccatccgcctgctcctggaatacacagactcaagctacgaggaaaagaagtatacgatgggggacgctcctgactatgacagaagccagtggctgaatgaaaaattcaagctgggcctggactttcccaatgtggggagacagaagaggagaagattcgtgtggacattttggagaaccaggctatggacgtctccaatcagctggccagagtctgctacagccctgactttgagaaactgaagccagaatacttggaggaacttcctacaatgatgcagcacttctcacagttcctggggaagaggccatggtttgttggagacaagatcacctttgtagatttcctcgcctatgatgtcctn

SEQ ID NO: 23772 - DNA, 432 bp, Homo sapiens
  SIMILAR (12)..(251): 1001254mologous to Homo sapiens glutathione transferase,accession number M63509,Smith-Waterman Score=432.
  misc_feature (1)...(432): n = a,t,c or g
aaanccgtccgctggggtactggaacatccgcgggctggcccattccatccgcctgctcctggaatacacagactcaagctacgaggaaaagaagtacacgatgggggacgctcctgattatgacagaagccagtggctgaatgaaaaattcaagctgggcctggactttcccaatctgccctacttgattgatgggactcacaagatcacccagagcaacgccatcctgcggtacattgcccgcaagcactaaagccagcctgaccttccttcctgttagtggttgtgtctgctttaaagggcctgcctggcccctcgcctgtggagctcagccccgagctgtccccgtgttgcatgaaggagcagcattgactggtttacaggccctgctcctgcagcatggtccctgccttatgcctacctgatggaag

SEQ ID NO: 23773 - DNA, 263 bp, Homo sapiens
  SIMILAR (1)..(222): 1001254mologous to Homo sapiens glutathione S-transferase (AA 1-218),accession number X08020,Smith-Waterman Score=400.
  misc_feature (1)...(263): n = a,t,c or g
ctgaatgaaaaattcaagctgggcctggactttcccaatctgccctacttgattgatggggctcacaagatcacccagagcaacgccatcttgtgctacattgcccgcaagcacaacctgtgtggggagacagaagaggagaagattcgtgtggacattttggagaaccagaccatggacaaccatatgcagctgggcatgatctgctacaatccagaatttggcttggngaagatctctgcctacatgaagtccagccgctt

SEQ ID NO: 23774 - DNA, 416 bp, Homo sapiens
  SIMILAR (3)..(152): 1001254mologous to Homo sapiens glutathione S-transferase (AA 1-218),accession number X08020,Smith-Waterman Score=269.
tgtgtggggagacagaagaggagaagattcgtgtggacattttggagaaccagaccatggacaaccatatgcagctgggcatgatctgctacaatccagaatttgagaaactgaagccaaagtacttggaggaactccctgaaaagctaaagccctttgaagcctcagctacccactatccttcgtgaacatcccctcccatcattacccttccctgcactaaagccagcctgaccttccttcctgttagtggttgtgtctgctttaaatgcctgcctggcccctcgcctgtggagctcagccccgagctgtccccgtgttgcatgaaggagcagcattgactggtttacatggccctgctcctgcagcatggtccctgccttaggcctacctgatggaagtaaagcctcaaccac

SEQ ID NO: 23775 - DNA, 264 bp, Homo sapiens
  SIMILAR (3)..(101): 931254mologous to Homo sapiens glutathione S-transferase (AA 1-218),accession number X08020,Smith-Waterman Score=168.
  misc_feature (1)...(264): n = a,t,c or g
ggtattgggacatccgcgggctggcccacgccatccgcctgttcctggaatacacagactcaagctatgaggaaaaaaagtacccgatgggggacgcccctcgcctgtggagctcagccccgagctgtccccgtgttgcatgaaggagcagcattgactggtttacaggccctgctcctgcagcatggtccctgccttaggcctacctgatggaagtaaagcctcacccccnnnnnnnnnnnnnnnnnnnnnnnnnnnnnnnnn

SEQ ID NO: 23776 - DNA, 481 bp, Homo sapiens
  SIMILAR (39)..(479): 941254mologous to Homo sapiens glutathione transferase,accession number M63509,Smith-Waterman Score=765.
cccccggtctgtctgcagaatccacagcaaccagcaccatgcccatgacactggggtactggaacatccgcgggctggcccattccatccgcctgctcctggaatacacagactcaagctacgaggaaaagaagtacacgatgggggacgctcctgattatgacagaagccagtggctgaatgaaaaattcaagctgggcctggactttcccaatctgccctacttgattgatgggactcacaagatcacccagagcaacgccatcctgcggtacattgcccgcaagcacaacctgtgcggggaatcagaaaaggagcagattcgcgaagacattttggagaaccagtttatggacagccgtatgcagctggccaaactctgctatgacccagattttgcactccctgaaatgctgaagctctactcacagtttctggggaagcagccatggtttcttggggacaagatcacctttgtgga

SEQ ID NO: 23777 - DNA, 714 bp, Homo sapiens
  SIMILAR (220)..(711): 801254mologous to Bos taurus class mu glutathione S- transferase,accession number AF249588,Smith-Waterman Score=720.
atgcccatgatactggggtactgggacatccgcgggctggcccacgccatccgcctgctcctggaatacacagactcaagctatgaggaaaagaagtacacgatgggggacgctcctgattatgacagaagccagtggctgaatgaaaaattcaagctgggcctggactttcccaatgggatgctggggagcctggtggcccaactgagcttcgccggtttcccatccatccagctgccctacttgattgatggggctcacaagatcacccagagcaacgccatcttgtgctacattgcccgcaagcacaacctgtgtggggagacagaagaggagaagattcgtgtggacattttggagaaccagaccatggacaaccatatgcagctgggcatgatctgctacaatccagaatttgagaaactgaagccaaagtacttggaggaactccctgaaaagctaaagctctactcagagtttctggggaagcggccatggtttgcaggaaacaagatcacttttgtagattttctcgtctatgatgtccttgacctccaccgtatatttgagcccaagtgcttggacgccttcccaaatctgaaggacttcatctcccgctttgagggcttggagaagatctctgcctacatgaagtccagccgcttcctcccaagacctgtgttctcaaagatggctgtctggggcaacaagtag

SEQ ID NO: 23778 - DNA, 381 bp, Homo sapiens
  SIMILAR (88)..(198): 971254mologous to Homo sapiens glutathione S-transferase GSTM5-5,accession number L02321,Smith-Waterman Score=195.
tcccgatattcccgggtcgacgatttcgtcaaagtctgagccccgctccgctgatgcctgtctgcagaatccgcaccaaccagcaccatgcccatgactctggggtactgggacatccgtgggctggcccacgccatccgcttgctcctggaatacacagactcaagctatgtggaaaagaagtacacgctgggggacggtaatggcaccctcgtgtccgggccctgcccactcacgctgagttggcaccaagcaacccatggtggccacctgtggctgcctctgcaggcctcccctgctggagctgcaggctgtcccttccctgagccccgaagccagtggctgaatgaaaaattcaagctgggcctggactttcccaat

SEQ ID NO: 23779 - DNA, 1342 bp, Homo sapiens
  SIMILAR (440)..(856): 551254mologous to Rattus norvegicus glutathione S-transferase Yb-1 subunit (EC 2.5.1.18),accession number M11719,Smith-Waterman Score=386.
ggggctgaacactcggaggtggcggtggatcttactccttccagccagtgaggatccagcaacctgctccgtgcctcccgcgcctgttggttggaagtgacgaccttgaagatcggccggttggaagtgacgaccttgaagatcggcgggcgcagcggggccgagggggcgggtctggcgctaggtccagcccctgcgtgccgggaaccccagaggaggtcgcagttcagcccagctgaggcctgtctgcagaatcgacaccaaccagcatcatgtccatgacactggggtactgggacatccgcgggctggcccacgccatccgcctgctcctggaatacacagactcaagctacgaggaaaagaagtatacgatgggggacgctcctgactatgacagaagccagtggctgaaatgaaaaattcaagctgggcctgggactttcccaatctgccctactttgattgatggggctcacaagatgcacccagaggcaacgccattcctgtgctacatttgcccgcaagcacaacctgttgttgggggagacaggaaggagggagaagatttcgtcttgggacattttgggagaaccaggctatggacgtctccaatcagctggccagagtctgctacagccctgactttgagaaactgaagccagaatacttggaggaacttcctacaatgatgcagcacttctcacagttcctggggaagaggccatggtttgttggagacaagatcacctttgtagatttcctcgcctatgatgtccttgacctccaccgtatatttgagcccaactgcttggacgccttcccaaatctgaaggacttcatctcccgctttgaggtttcctgtggcataatgtgatggtcaattttctgcatcaacttgactgggctaagggatgctcagatggcaggtaaaatcattgtgcttgtgagggtgtttccagaagagatttgcctttgaatcagaagacagcaaagatttccttcagcaatgaaggaggcatccaccaaactgtcagggcccagagagaagaaaaagacaggaagggtgaatttgacctctctgactgggacatccatctctgcctatcctgggacctccacactcctggttctctggccttcagacttgatcagggactaacaccatcgcctcccacccccacctttgttctgaggcctttagcctctgaatgataccactggctttcctgcttctctatcctgcagtcggcagatcatgggacttcttcactccaaaattgtgtgagccaattcccataacagatagataaatttataaataaacacacaaatttcctac

SEQ ID NO: 23780 - DNA, 1276 bp, Homo sapiens
  SIMILAR (180)..(770): 341254mologous to Homo sapiens glutathione S-transferase GSTM5-5,accession number L02321,Smith-Waterman Score=201.
atagataccgtatgatttgattaacctcagcttggcacgaggcctcgtgccacgctccgctgatgcctgtctgcagaatccgcaccaaccagcaccatgcccatgactctggggtactgggacatccgtgggctggcccacgccatccgcttgctcctggaatacacagacgtcaagctatgaggaaaagaagtacacgatgggggacgctcctgaattatgacagaagccagtggctgaatgaaaaattcaagctgggcctgggactttcccaatctgccctacttgattgatggggctcacaagatcacccagagcaatgccatcctgcgctacatttgcccgcaaggcacaacctgtgtgggggagacagaaggagggagaagatttcgtgttgggacattttggagaaccaggttatgggataaccacatggagctggtcagactgtgctatgacccagattttgagaaactgaagccaaaatacttggaggaactccctgaaaagctaaagctctactcagagtttctggggaagcggccatgcttcttggggagacaagatcacctttgtagattttctcgtctatgaatgtccttgagacgaaaccaagtatttgagcccaagtggcttggacgccttcccaaaatctgaaggacttcatctcccgatttgaagggcttggagaagatctctgcctacatgaagtccagcccgcttcctcccaagaacttgtgttctcaaagatggctgtctggggcaacaagtagggctttgaaggcccagggaggtgggagtgaggagcccaatacttcaagcttgctggcccaaggctgttgcagcgcagtgggaacttcttgcatcccaagcaacctgcctccttcgttcccttttcttcctgttttattcccaatcttttaatcccaagacttcaattgtccctcttcactcccccctaaacccctgtccccatgcaggcccctttgaagcctcagctacccacttatccttcgtgaacatccccctcccaacactacccttccctgcactaaagccagcctgacctttccttcctgtttagtgggttgtgtctgctttaaagggcgctgcctggcccctcgcctgtggagctcagccccgagctgtccccgtgttgcatgaaggagcagcattgactggtttacaggccctgctcctgcagcagtggtcccctgccttaggcctacctgatggaagtaaagcctcaaccacatttaaaaaaaaaaaaaaaaaa

SEQ ID NO: 23781 - DNA, 431 bp, Homo sapiens; identical to SEQ ID NO: 22178
  SIMILAR (167)..(69): 451254mologous to Synechocystis sp. UDP-N-acetyl-D- mannosaminuronic acid transferase,accession number D90913,Smith- Waterman Score=73.

SEQ ID NO: 23782 - DNA, 328 bp, Homo sapiens
  SIMILAR (154)..(276): 751254mologous to Cercopithecus aethiops beta- glucuronidase,accession number AF084552,Smith-Waterman Score=165.
ggcaggccagatggggctcaggctgtcggggcgctcacacctggcgctttggctgtcgtaggtgcggctgactgcacagaagtcactggggcctttgacttctacacactccctgtggggctccgcactgtgcccgtcaccgagagccagtgggctctgtatgtggatgtgatccgtgtgaacagctactactcttggtatcgcaactacgggcacctggagttgattcagctgcagctggccgcccagtttgagaattggtgtaagacatcacaatcccattattcagagcgcgtatggagtggaaacgcttgtagggtttcaccag

SEQ ID NO: 23783 - DNA, 490 bp, Homo sapiens
  SIMILAR (284)..(466): 981254mologous to Homo sapiens SMA3,accession number BC002622,Smith-Waterman Score=330.
  misc_feature (1)...(490): n = a,t,c or g
tgaggggnnnnnattgannnatcgtagtccctagtccatgtggtggaattcnnnnnnnnnnnnnnnnnnnnnnnnnnnnnnnnnnnnnnnnnnaactcaagctccatgaggagatgtttcattgtcgagagcagtcatgatggcctgcactccacacaatgcaacagagtgaaagagcaggttctgcttctttggtgtagtcctgaagcttcctaagaaacttcacatcaggtgatggataggagcaaccctgtaaaaccagccttagactatttttcaaacagatggtgattgctcacaccaaagccttggacccctcccagcctgtgacctttgtgaccaactccacctacgcagcaaacaagggggctctgtatgtggatgtgatccgtgtgaacagctactactcttggtatcgcaactacgggcacctggagttgattcagctgcagctggccgcccagtttgagaattggtgtaagacatcacc

SEQ ID NO: 23784 - DNA, 939 bp, Homo sapiens
  SIMILAR (757)..(894): 931254mologous to Homo sapiens Human GUS protein fragment,accession number W93828,Smith-Waterman Score=234.
cagtatgcattgtggggcattcccgtttgtgtgacccaggtcatgtccctccctaagccctggtctctcttgcctcctgcagggctggtgaattaccagatctccatcaagtgcagtaaccagttcaagttggaagtgtgtcttttgaatgcagaaaacaaagtcgtggacaaccaggctgggacccagggccagtcttcctgctgtagggcaggccagatggggctcaggctgtcggggcgctcacacctggcgctttggctgtcataggtgcggctgactgcacaggacagagaggatgggagggtgtctgagcctttcccggactgacggaacctgtgtcttctctcttttgtggacaggatggtgattgagcccccacagcatgtgagtactgagtcatgtggtcttgtggttgctgaatgggctctgctgctctggtcctaggctctgtatgtggatgtgatccgtgtgaacagctactactcttggtatcgcaactacgggcacctggagttgattcagctgcagctggccacccagtttgatttggttttttattcttgcgatagtttactgagaatgatgatttccaatttctccctggctgtctttaccctagcatcagtgagtcctgcagtcactacatcccccagtgaggacagatattttggtcaccatcaagtggatctttatttttatctaacatttacaattctgccagttcttactcgtaattctctttgccttgaatcccaggatccacctctgatgttcagtgaagagtaccagaaaagtctgctagagcagtaccatctgggtctggatcaaaaacgcagaaaatacgtggtaggaaagctcatctggaattttgccgatttcatgactaaccagtgtaagcagcagtttagcgcatgggataatgtacccgtcctcatt

SEQ ID NO: 23785 - DNA, 687 bp, Homo sapiens
  SIMILAR (16)..(132): 1001254mologous to Homo sapiens SMA5,accession number X83301,Smith-Waterman Score=199.
atgtccccggcagggctggtgaattaccagatctccgtcaagtgcagtaaccagttcaagttggaagtgtgtcttttgaatgcagaaaacaaagtcgtggacaaccaggctgggacccagggccagctgaagggcaggccagatggggctcaggctgtcggggcgctcacacctggcgctttggctgtcgtaggtgcggctgactgcacagaagtcactggggcctttgacttctacacactccctgtgggcgtccgcactgtgcccgtcaccgagagccagtggcccattcactcctgtgttcaagagctatttcaggaagtgaacctcatttctggcagtgttcagtccagtgacctcagctctgtgtacccggcagggtggctacgcctctgggggagttggattcaggggatggtgattgctcacaccaaagccttggacccctcccagcctgtgacctttgggaccaactccacctacgcagcagacaaggcggctctgtatgtggatgtgatccgtgtgaacagctactactcttggtatcgcaactacgggcacctggagttgattcggctgcagctggccgcccagtttgagaattggtgtaagacatcacaatcccattattcagagcgcgtatggagtggaaacgcttgtagggtttcaccaggtaagcggtgttga

SEQ ID NO: 23786 - DNA, 629 bp, Homo sapiens
  SIMILAR (234)..(196): 1001254mologous to Homo sapiens Ig lambda-like gene/beta- glucuronidase exon 11 homolog,accession number S82637,Smith- Waterman Score=73.
tggagcaggaacacctctgcccaatcccccatagtcctgatgagctcccagaggaggcccgagagcgtgaagcaggtctgccacatctacaacctgaggtccgtgaccaccttcaggtagcacttgttggctgtgtggatgtcctcatcattggggttgagtttgaaggtgccctgggcccactcctcaaccacactggttagtcatgaaatcggcaaaattccagatgagctcttccaaccacgtattttctgagtttttgatccagacccagatggtactgctctagcagacttttttggtagtcttcactgaacatcagaggtggatccttccttctttcattccatcattcattctctcatcaaatcctggcccctccagattcttctctcaaggagccctgacctggctgggcatgagacagtatggtcaccccagggggaagagccctacggaaggggcagacacgagaataggggccttgggaatccagccggaggtgggattggatttggggaggacctgacaggcagaaggaaccacctgagcctgaaggccaggaaatggagccttttccaggaagtgagggctgcaggggacctcttgaccaccctaggcccgtcctg

SEQ ID NO: 23787 - DNA, 822 bp, Homo sapiens
  SIMILAR (336)..(386): 1001254mologous to Homo sapiens SMA3,accession number BC002622,Smith-Waterman Score=91.
acccggtcacgtcaaccgcccaacggctgaggagtgcggcagcgcgccagaaactggcgggcagctccgcccgcggccgggatgcactaggcaaagccagctgggctcctgagtccggtgggtacttggagaacttactacgtctagctggaggattgtaaatgcaccaatcagcatgctgtgtctagctcaagaactcaagctccatgaggagatgtttcattgtcgagagcagtcatgatggcctgcactccacacaatgcaacagagtgaaagagcaggttctgcttctttggtgtagtcctgaagcttcctaagaaacttcacatcaggtgatggataggagcaaccctgtaaaaccagccttagactatttttcaaacagatggtgattgctcacaccaaagccttggacccctcccagcctgtgacctttgtgaccaactccacctacacagcagacaagggggctctgtatgtggatgtgatccgtgtgaacagctactactcttgggtatcgcaactacaggcacctgcaattgattcagctgcagctggccgcccagtttgagaattggtgtaagacatcacaatcccattattcagagcgcgtatggagtggaaacgcttgtagggtttcaccaggtaagcggtgttgaacttcctgcttgtgtattctctctgcctcagccaattaaactgtgttgtctctgcagtgcgttttatcacaagaacatgaccttcaagcacaagaacaccttgtactccaccactaaaaacagaaatgacatctaccttcactgcttccctatttctctccat

SEQ ID NO: 23788 - DNA, 718 bp, Homo sapiens
  SIMILAR (272)..(409): 971254mologous to Homo sapiens Ig lambda-like gene/beta- glucuronidase exon 11 homolog,accession number S82637,Smith- Waterman Score=244.
cgtgagtctggagaaacagttacggccatcccagccctggccaaggggaaaatgccggaagactccagggtgggaggaagcgcgtcccaaggcccaggatctgcgaggcgacttggggaaaacgcaggcaggacctgctgaagctcacacccgtggaccacccagactgcctgccgctacaggatgccctccgcatctcccaggacttctttccggcatcagtgtggacattgaccccactggactgcagtcacagtggactcccaaggggcaggatccacctctgatgttcagtgaagactaccagaaaagtctgctagagcagtaccatctgggtctggatcaaaaactcaaaaaatacgtggttggagagcttatctggaattttgccgatttcatgactaaccagtgtaagcggcagtttggctcatgggataatgtacccgtcctcattttttcaggttgccttgcccattctggacacttagattgtaagaatattggaaacaaagcgaggagctggtttaatccatgcaggttgcgttgaggatttcctaggaaaagtgagttgtgcttagtaagtaggaaagcagtcaggcccctgcttcccaaatacagtcaaaaagcaaacaggagagtctgctatagtgagatgtaaatggctagcttgcctttttcttgtctatttcatagccaaggaggaaggaaaaactggaaa

SEQ ID NO: 23789 - DNA, 699 bp, Homo sapiens
  SIMILAR (682)..(593): 961254mologous to Homo sapiens unnamed protein product,accession number AK025150,Smith-Waterman Score=159.
tttgaaatacagcttgtacttgcaatagtacttgggtgttgaacttgttaagagtgcatatcctttttttcagatccatctatcatttcctagttgtatgtggttgtgtgggttatttctcctcttttacattgattttctcaccttgatgtgtggagacaagccgttgatttgtaagaaacaccaattatcagcttccacttgtgcttcacaatctgctgaggcgctttaacacttttgatggaaattgagcaagggccttgtgatctctcctgtgccagccgtgaagtgtccactgcacgcagcttggcagaactattttcagggccataggatgttatggcagtattaataattatcaccaaataactattacagaaaacttcctcagaaagtaaaattagggtgaaggtatcacaggttggcactattttcattccctaccaagaaactgacacctgagaaagtatctctttgttgcaggtttttggaaatgggctatattttttgaatcataaccgatatgtactgccataaacaagaggatttcaagccagctccatctgggtcgaaaattattttatttattacttaagcttctcagccttttaccctcctctggaataatgagtgtatcccaaaagtaaatccataatgaggtccagtttttccttcatccttggactggttagtcatgaa

SEQ ID NO: 23790 - DNA, 1508 bp, Homo sapiens
  SIMILAR (277)..(666): 1001254mologous to Homo sapiens SMA3,accession number X83299,Smith-Waterman Score=718.
ggtcgacgacgtggcagccgggatgcactaggcaaagccagctgggctcctgagtccggtgggtacttggagaacttactacgtctagctggaggattgtaaatgtaccaatcagcatgctgtgtctagctcaagaactcaagctccatgaggagatgtttcattgtcgagagcagtcatgatggcctgcactccacacaatgcaacagagtgaaagagcaggttctgcttctttggtgtagtcctgaagcttcctaagaaacttcacatcaggtgatggataggagcaaccctgtaaaaccagccttagactattttttaaacaggctggtgaattaccagatctccgtcaagtgcagtaaccagttcaagttggaagtgtgtcttttgaatgcagaaaacaaagtcgtggacaaccaggctgggacccagggccagctgaaggtgctgggtgccaacctctggtggccgtacctgatgcacgaacaccccgcctacctctactcgtgggaggatggtgattgctcacaccaaagccttggacccctcccagcctgtgacctttgtgaccaactccacctacgcagcagacaagggggctctgtatgtggatgtgatccgtgtgaacagctactactcttggtatcgcaactacgggcacctgggagttgattcagctgcagctggccacccagtttgagaattggtgtaagacatcacaatcccattattcagagcgcgtatggagtggaaacgctttgtagggttttcaccaggtaagcggtgttgaactttctgcttgtgtattctctctgggcagagatgccacttgcctcccccaccatgccatctctgaagaatattacagaccattttggagcatggtgaataagaaattttcaccttaggagttcagttgaatagtcatttttatatttgtgactgcaagtcactcttaggggctgtacttccttagtactggtagcattattatccaatggacttttatagctttcattaggttttcttttgtttttgttctttaaagaacgttttacttatcttagtatttcatttttcatctatattatgaggcagtaagagtcttctgtttttccaaagttgagactgctttatatttatttcgtattgtctacagctgtagtgttcaatacattagccactagccacatgtggttatttaaataagataaaataaaaattggccgggcgtggtgggtcacgccggtaatcccagcactttgggaggccgaggcgggcagatcattaggtcaggagatcgagaccatccttactaagacggtgaacccccatctctattaaaaatacaaaaaattagccgggcgtggtggcgggcgcctgcagtcccagctactcaggaggctgaggcaggagaatggcgtgaacctgggaggcagagtttgcagtgagccgagatggcgccactgcactccagcctggggacagagcgagactccatctcaaaa

SEQ ID NO: 23791 - DNA, 697 bp, Homo sapiens
  SIMILAR (326)..(694): 1001254mologous to Homo sapiens b55C20.2 (Spinal Muscular Atrophy SMA3 LIKE protein),accession number AL021368,Smith-Waterman Score=683.
tgtttcatagggcaaggatctagaggaggaggggaaagctgcctggctaatactacttagcgaagggattgtcatcagaagatttctgtgactcacactccttctctgatattttatggatatattggagccgcgctataaactacaccaagtacgtgcttattgatcagtattgatcgcctaaagcttggccagcttactgcacgacaatcacagtctcccatttgttcatcttttatgttaaaaagctcgcacatttgacttggaagcaatgtttgaacaaactcgaagaacagctgtggaaagaagttgcaaaacactggggctggtgaattaccagatctccatcaagtgcagtaaccagttcaagttggaagtgtgtcttttgaatgcagaaaacaaagtcgtggacaaccaggctgggacccagggccagctgaaggtgctgggtgccaacctctggtggccgtacctgatgcacgaacaccccgcctacctgtactcgtgggaggatggtgattgctcacaccaaagccttggacccctcccagcctgtgacctttgtgaccaacgtcacctatgcagcagacaagggggctctgtatgtggatgtgatccgtgtgaacagctactactcttggtatcgcaactacgggcacctggagttgattcagctgcagctggccacccagtttga

SEQ ID NO: 23792 - DNA, 1787 bp, Homo sapiens
  SIMILAR (320)..(622): 931254mologous to Homo sapiens SMA5,accession number X83301,Smith-Waterman Score=509.
gcaaagccagctgggctcctgagtccggtgggtacttggagaacttactacgtctagctggaggattgtaaatgcaccaatcagcatgctgtgtctagctcaagattttctccatccccttattttgggccagtggctgtcattacatatgagatgagtctcttgaagactacagatgaactcaagctccatgaggagatgtttcattgtcgagagcagtcatgatggcctgcactccacacaatgcaacagagtgaaagagcaggttctgcttctttggtgtagtcctgaagcttcctaagaaacttcacatcaggtgatggataggagcaaccctgtaaaaccagccttagactatttttcaaacaggctggtgaattaccagatctccgtcaagtgcagtaaccagttcaagttggaagtgtgtcttttgaatgcagagaacaaagtcgtggacaaccaggctgggacccagggccagctgaaggtgctgggtgccaacctctggtggccgtacctgatgcacgaacaccccgcctacctgtactcctgggaggatggtgattgcttcacaccaaaagccttggaccccctcccagcctgtgacctttgtgaccaactcccacctacgcagcagacaagggggctctgtatgtggatgtgatccgtgtgaacagctactactcttggtatcgcaactacgggcacctggagttgattcagctgcagctggccgcccagtttgagaattggtgtaagacatcacaatcccattattcagagcgcgtatggagtggaaacgcttgtagggtttcaccagggctcggtgaattaccatatctccgtcaagtgcagtaaccatgttcaagttggaaggtgtgtcttttgaatgcagaaaacaaagtccgtggacaaccaggctgggacccagggccagctgaaggtgctgggtgccaacctctggtggccgtacctgatgcacgaacaccccgcctacctgtactcgtgggaggatggtgattgctcacaccaaaagccttggacccctcccagcctgtgacctttgtgaccaactccacctacgcagcagacaagggggctctgtatgtggatgtgaccccgtgtgaacagctactactctgggtatcgcaactacgggccacctgggagttgattcggctgcaggccctgcagctggccgccccagtttgagatttggtgtaaggaccatcacaatcccattattcagagcgcgtatggagtggaaacgcttgtagggtttcaccagtctttcccagggaactccgatgaagtgttccaacaaaatgagcgagtgaaccaagaagaggatgacattagatccaggagatacaacagaggagataatctccaggatgcctgtgaagaaagatccctggatcccaggatgattataggacaagttgttcataatccagcaggccagaagacttccagggaaactcatttcaagatgaaaatggaccagccgcagtggctcacgcctgtaataccagcactttgggaggctgaggcgggcggatcacttgaggtcaagagtttgaaactagcctggccaacgtggcaaaactccatctctattaaagatacaaaaattagccaggcatagtggtgcatgcctgtagtcccagctacttgggatgctgaggcaggaagaattgcttgaacctgggaggcagagtctgcggtgaccgagatcatgccactgcactccagcctgggtgacagagccagactccgtctctact

SEQ ID NO: 23793 - DNA, 426 bp, Homo sapiens; identical to SEQ ID NO: 20693
  SIMILAR (183)..(290): 801254mologous to Homo sapiens glyoxalase II,accession number X90999,Smith-Waterman Score=155.

SEQ ID NO: 23794 - DNA, 444 bp, Homo sapiens; identical to SEQ ID NO: 20695
  SIMILAR (103)..(336): 881254mologous to Homo sapiens glyoxalase II,accession number X90999,Smith-Waterman Score=351.

SEQ ID NO: 23795 - DNA, 633 bp, Homo sapiens; identical to SEQ ID NO: 9889
  SIMILAR (85)..(255): 1001254mologous to Homo sapiens glyoxalase II,accession number X90999,Smith-Waterman Score=299.

SEQ ID NO: 23796 - DNA, 620 bp, Homo sapiens; identical to SEQ ID NO: 20696
  SIMILAR (93)..(263): 1001254mologous to Homo sapiens glyoxalase II,accession number X90999,Smith-Waterman Score=299.

SEQ ID NO: 23797 - DNA, 1587 bp, Homo sapiens
  SIMILAR (497)..(979): 421254mologous to Homo sapiens glyoxalase II,accession number X90999,Smith-Waterman Score=209.
gctcggcagtccagcccggcccggtcatggtggtgggccgaggctgctcgcgccgcagcctcgccgcgctgggagccgcctgcgcccgccgaggcctcggtccagccctgctgggagttttctgccacacagatttgcggaagaacctgaccgtggacgagggcaccatgaaggtagaggtgctgcctgccctgaccgacaactacatgtacctggtcattgatgatgagaccaaggaggctgccattgtggatccggtgcagccccagaaggtcgtggacgcggcgagaaagcacggggtgaaactgaccacagtgctcaccacccaccaccactgggaccatgctggcgggaatgagaaactggtcaagctggagtcgggactgaaggtgtacgggggtgacgaccgtatcggggccctgactcacaagatcactcacctgtccacactgcaggtgggggtctctgaacgtcaagtgcctggcgaccccgtggccacacttcaggacatatttgttacttcgtgagtaagttgggagggctcggagccctttgtcgtgttcacaggtgacaccttgtttgtgggctggctgcggggaagttcttatgaagggactgcgggatgagatgtgtaaagctcttcttgaggtctttgggccggctccccccggacacagtaggcagcgcctccctgcgggccgggagagtctactgtggccaacgagtacaccatcaaacaaacctcaaagtttgcacgcccacgtggaaaccggcaatgcccgccatccgggaaaaagctgccctgggcccaaggagaagtacagcatcggggagcccacagtgccatccacccctggcagagggagtttacctacaacccccttcataaaagtgagggaagaaagacggtgcaagcagcacgacaggtgagacggacccggtgaccaccatgcggcccgtgcgcagggagaaggaccaagttcaaagatgccccgggacctgaggccgcccctgcaccttcagcaggatttggggattaaggctcttttagacagactcttctgagtggaggggcagagcggtcctgggacctaggagcaagcctggcccgaggcttgtggattgaagaggaaggctggcactgcacttcatagacacatgcatgccctccccccggaggggtcactggtctgttccgcaataactcgccagtacccctctgggatgcccacggaaagccaggccgtgtgtgaaggaggcagggcagactgctttctccggcttttcttctcccactacccccaccccagcgcaaagagtttgttctattgttcagcaaatattcttaggccagaatcttaaatgtttccattctataacaaacactgtgctcatttgtcaacatggagaaacctgatctctactaaaaatacaaaaattagctgggcgtggtggcatgtgcctgtagtcccagctactctggaagctgaggcacgagaatcgcttgaacatggaagcagaggttgcagtgagccaagatcatgccattgcactccagcctgagtgacagagtgagactttgtctca

SEQ ID NO: 23798 - DNA, 753 bp, Homo sapiens
  SIMILAR (163)..(507): 861254mologous to Homo sapiens NADH:ubiquinone oxidoreductase B22 subunit,accession number AF044956,Smith-Waterman Score=572.
atgcccggcctactcaaagacattattaagagaaaagagaactggaatgtggagcagagagtgctggatatttccacacggcaagagcaagagtttttcactgtgaagccacctgtggtccccggtctcagagcctctccaggcctgttccttctgctcattagggacaaataccgatactttgcttgtttgatgagagcccggtctgaagaacatacgaacgaaaaggatatgatgaaggccatccggctgctgaaggaggctgaggaagaattctggtaccatcagcatccacagccatgcatcttccctgactctcctaggggtacctcctatgtgacacacgagtgctacaaggtcccagaatggtgcttagatgactggcatccttctgagaaggcaatgtatcctgattactttgccaagagaaaacagtggaagaaactgcggagggaaagctggaaaagagaggttaagcagctgcaggaggaaacgccacctgccggaaaggaagaatgtaagctccatgaaggcatgaattatgttgtgctcacttgtatccctggtgccattaaacagtacctggcatgtagcaggtattcaaaaacaccaggtccccgcgacagctgttgggaggtgcagtcggacaatcaatgttggtggtggctggattccggggcccatggtcttgtcaccagcttcaagggtgtgatgatgacagtggaggctaccaccatggcagcagttttctga

SEQ ID NO: 23799 - DNA, 756 bp, Homo sapiens
  SIMILAR (326)..(646): 371254mologous to Homo sapiens NADH:ubiquinone oxidoreductase B22 subunit,accession number AF044956,Smith-Waterman Score=106.
ttcccgcgtcgacgatttcgtgctcggtcacccgcagcaggcgtgcagtttcccggctctccgcgcggccggggaaggtcagcgccgtaatggcgtccttggcgtcgggaccctacctgacccatcagcaaaaggtgttgcggctttataagcgggcgctacgccacctcgagtcgtggtgcgtccagagagacaaataccgatactttgcttgtttgatgagagcccggtttgaagaacataagaatgaacaggatatggcgaaggccacccagctgctgaaggaggccgaggaagaaattctggtaccgtcagcatccacagcccatacatcttccctgactctccttgggggcaccctccttatgagagataccgattgctacaaggtccccagaatggtgcttagatgactggcatccttctgagaaaggcaatgtatccatgattactttgccaagagagaacagtggaagaaactgcggagggaaagctgggaacgagaggtttaagcagcttgcaggaggaaactgccacctggtgggtccttttaacttgaagctttgccccctggcccgaaaaggaaggtgattttgcccccactgtggtggttatattgtgaccagacccccgggagcggcccatgttagaaagagagagacctcatctttcatgcttgcaagtgaaatatgttacagaacatggcacttgcccctaataaaaaatcagtgaaatggtaaaaaaaaaaaaaaaaaa

SEQ ID NO: 23800 - DNA, 510 bp, Homo sapiens
  SIMILAR (320)..(397): 461254mologous to Triticum aestivum amylase (, 1 could be 2 or 3),accession number M26770,Smith-Waterman Score=65.
tcttcatccccttccttggcaccttccatttaagccaaacattagaaatgtaaagatatggcttgtttctggagtttccagtttggtgcattcgtcgagtcaggggggcttctttggacaatgctgtctgcagccctgggcccactcgaaggggaggcgatggactgtaggtctgtggagctcagcacagggctgtgccacggacttgggtgtcagtgaagtcacgctcattttcagacggaattctcctccccgatgtgaacaatgaaccgacggtgtcattttcataggattgtcctggagcccacggagatgcgggcttgggattcaacgtgatgctgagcggatcttttttgctttagaccaggcctcatgtggcttcactattcatccacacatagatgctgcagagacaccgaggggactcacaaatgcacctgtgcagaaggtgtcaacgtggacaatcgcaggcagagaaactcccatgagcccgtgtgccacatgcagtga

SEQ ID NO: 23801 - DNA, 1560 bp, Homo sapiens
  SIMILAR (914)..(964): 821254mologous to Cloning vector pCD341 lac repressor,accession number AF053122,Smith-Waterman Score=59.
atggtgcacctgggggccccggtaatggcgctgaatctccaggggaagcacctatgtgatagcacggcctcgtcactattgccgaggagaagggaatccaacagcgatgacacggcccgggaagacgcccgccagaaacggccagcgaacacagacatgcgaacccaggaactccaaacccgcgaaaccggccagggcacggcccgggaaaccgaggtggccaccccgctctccgggcccagcgcgggtgactcgccgccagccgccagtgagatgtcctgcggtcagctcgtcctcgctctcctcctcctcttcttcctcctcgtctggaacacagggaccaagtccggctcggggcgggtggcccggctcgcgcagctcgcccatgactgcgatgggggtctcgcccttggcctgtgctacgcggtgctcgatcagagatctgtggtccaggccactccacaagcgcccaaacccggcccggtgcagccgctgaccgtgcagggcctccagccagtccacgtggctcaagagagctcaggcaacgagatcaccgctagaaggcagagcgcgagatcccggccacgcggcgacaggaccgcgcccagccgccgcgtgacgcggagaccgaagcatgcgcccgagcgagcgcccatacagcagggcaacatagtgaccgtgcgtgccccaactgcccggaaaaaatggcggccggcggtcggcacacccacaggggcacacccggtgtgcaccgcaaaaggcaccggcggcaggccaacaccaacccaagcccacactaggtacaccgaacgtgaccctatccgaaactccgctgaactcaccggtagccgcccctgtaccgggcgcgaacgaagcggcgtcgaagcctgtaaagcggcggtgcacaatcttcttggcgcaaacggggtccagtgggctgatcattaactatccgctggatgacccaggatgccattgctgtggaagctgcctgcactaatgttccggcgttatttcttgatgtctctgaccagacacccatcaacagtattattttctcccatgaagacgatgtgtggcggacaccgctggttgcaccgactaacctcaatactaggtcgagccagccggcccggcatcaccgcgccggcgctgtgcggcgacaccacatgacggtggctcgtagcgcgacggcgcacgctcggttgcgccgacacgcaaagcctcaggggcgagagaggatcaaaccctcgggggcgagagagggatcagaacccctcgggggcgagagcgggatccgaacccctcgggggcgagagcgggatccgaacccctcgggggcgaaagcgggatccgaacccggccggattcccgagactcttcccaggtgcaaaggggaaacagaggcaaagtgctgggctcggggcaatttccatactgctcagggatcttggccaagaggggggcgttcaagatgggagcccctcgaagcccctgccctctcccaacaggcccatggcggagagctccctctaccggcagcggctagaagtcatcgct

SEQ ID NO: 23802 - DNA, 309 bp, Homo sapiens
  SIMILAR (119)..(208): 931254mologous to Homo sapiens HP1Hs alpha=25 kda chromosomal autoantigen,accession number S62077,Smith-Waterman Score=136.
gtggcttgtggtgcggcctcaccatacaggaacagggcagacgttagcgtgagtgatcactctcaatcccggggacccggtggccttagtctttcaggtggaacggtgtgcgacatgggaagaaaccaagcggacagctgacagttcttcttcagaggatgaggaggagtatgttgtggagaaggtgctagacaggcgcgtggttaaggacaagtggaatatctactgaagtggaaaggcttttctgaggagcacaatacttgggaccagaaaagatcatttgggcacagattcctgtggtgatttaat

SEQ ID NO: 23803 - DNA, 355 bp, Homo sapiens
  SIMILAR (354)..(253): 321254mologous to Cauliflower mosaic virus cell-to-cell transport protein,accession number M32812,Smith-Waterman Score=61.
gcttgtggtgcggcctcaccatacaggaacagggcagacgttagcgtgagtgatcactctcaatcccgggaaggagtccaggtcatcctgagaagagttcgcttgtccagagtccaagatgcagatttgttggatttctgtaagccactcgaagccacatattcatttctgatgacagctttacacttgtgctggaagaacacccactgtgacaactgctgcctatgtttagtctgtccaggagcctctaccaactagcatgtttgcagaaaaacctacactgttcttgttagcagctatgtaaatattagatctttctgagtttctcttctcagatctgccaatttctttgggg

SEQ ID NO: 23804 - DNA, 433 bp, Homo sapiens
  SIMILAR (411)..(205): 341254mologous to Vitis vinifera putative proline-rich cell wall protein,accession number AJ237984,Smith-Waterman Score=87.
cttagtgtggtggaattcttggcgttgcgcagaaggcggcggcggtggtggcttgtggtgcggcctcaccatacaggaacagggcagacgttagcgtgagtgatcactctcaatcccgggtaagtggcagacagtcttatctacccatagtaggtcttgaactgactccatttgggcccgttattgtgtgaaatgaatggacggcggggtggggggatagtgaaggggcagcggtgggtcgggccaaccaatagaagaacagggggcgggatgttttaatccccgtaggttctttggagctgtgcagccgaagactttgactggcttgtgtataggccaattgggtctgccttgagctgccgactgatcggcccttgggccatcggaatgtgggagacgggttttccccttctgagcagcgtctcactgagcc

SEQ ID NO: 23805 - DNA, 2347 bp, Homo sapiens
  SIMILAR (929)..(1213): 691254mologous to Mus musculus modifier 1,accession number X56690,Smith-Waterman Score=342.
tcaatgctcttgttcgttgtcctctcttgtcggcgttctgcttttgttcccggcccgtgttggttctctgctgggttcggttcttctgcttcttcgggctttctcgtccttctgcatgttctttcccctcttcctttctctgtgtgtggctttcttgctctctttgttagcgtgccgctttcctcctttctctgtttcgtctctgtcttctgtgtgtctgcggtggcctgctcttccttgtcttggctcgctttcgcttgtcgctcggtagccgtccgctcctgttcctgtcgcgttctcgtgcgcttctccgtttctgtgtctccctgtattctttgttgtgtgctcttctggtgttttctcggcccttgggttccagcccgtggtgaagacggcaggagtaggcagtgaacctacggcgcctgcgtgttggcgggagtttgtcctagctttgcgcatgcgtagtgggcggagaaaaaaggtccggtcccaggattggttgcgcaggcgcagggaaggatccgttttggcgggcggttggcgttgcgcagaaggcggcggcggtggtggcttgtggtgcggcctcaccatacaggaacagggcagacgttagcgtgagtgatcactctcaatcccggggacctggtggccttagtctttcaggtggaacggtgtgcgacatgggaaagaaaaccaagcggacagctgacagttcttcttcagaggatgaggaggagtatgttgtggagaaggtgctagacaggcgcgtggttaagggacaagtggaatatctactgaagtggaaaggcttttctgaggagcacaatacttgggaacctgagaaaaacttgggattgccctgagctaatttctgaatttatgaaaaagtataagaagatgaaggaggggggaaattaataaagtcagggagaagtcagaaagtagcaagaggaaatccaatttctcagacagtgcggaggacatcaaatgtaaaaaaaagagagagcagagcaatgatatcgctcggggctttgagagaggactggaaccagaaaagatcattggggcaacagattcctgtggtgatttaatgttcctaatgaaatggaaagacacagatgaagctgacctggttcttgcaaaagaagctaatgtgaaatgtccacaaattgtgatagcattttatgaagagagactgacatggcatgccttttcctgaggatgcggaaaacaaagagaaagaaacagcaaagagctaaaggaggggatggtctctgtcatttctctttgtacataatacattcacctccctgcctcctctcctttctacccacccctttctatcctaaacacatccataaaaaatgtgcttatcactgtgctccacaggagaaatgttgggtattggttctcttgtaacataactgatggtctgattaatgataagtgtctctctgtgaagaccaggcatttacatactgagtgtaatacccacaattttttttttcctttgccctgatctcttccttctgcttccctgtgaccctcaaagatgagtttcaactttttaatcaccttagagtcttgatcttttcagggttggtcgctttttaggttgggggattttgttacaatgatgttgaattttggtttcttgctttggttcttagaacatgttgctgactagctggccttttgttctgacatgttgagatggaaaaggatgttgcccatctgttaaaaagccaatagcaactgcctacctgttgggggccttcccaacctggttcagctctacccaggagaatacagggtttctggtgtggtcttctgggccaccctctgttgttcatcctcactcatcctcccagaattactccatcctttggaagatttgaaattttacactgaaatctgtcaagacactctttttagccccaggactttcggtattgcttttagcactccccacttctgcttctgtaaagtgatatcaatttgtgataaaatgacaagattattaactgtgcagatttgtagctatagtacatgaggatgatggggtagggtacaattgtctttattatcatatatggtatgtatgtatgatttctttccattcctcatatttagactgagtatttatgtacgtgtgagtgattgcctggtgcttgcttgtgcccaggagctaggcaccctccaaccctgccaacttttgtggcctcccaaagcattcctgttaccaaagaggcttcaaacctgaccctcacttctcagtggacccgagtttcccttccatgccattattttcagtggggaagttttagaggtgagctgttggccacat

SEQ ID NO: 23806 - DNA, 325 bp, Homo sapiens
  SIMILAR (6)..(161): 1001254mologous to Homo sapiens HSPC118,accession number AF161467,Smith-Waterman Score=266.
  misc_feature (1)...(325): n = a,t,c or g
ccgcgatggtaggcggcggcggggtcggcggcggcctcctggagaatgccaaccccctcatctaccagcgctctggggagcggcctgtgacggcaggcgaggaggacgagcaggttcccgacagcatcgacgcacgcgagatcttcgatctgattcgctcctgagcctggcctttgacccctcagcctgcatactggtatcctggtcccagctcctgccagggctgttaccgttgttttcttgaatcactcacaatgagaaactaacattttgctttttgtaataaagttaatttatattcnnnnnnnnnnnnnnnnnnnnnttt

SEQ ID NO: 23807 - DNA, 945 bp, Homo sapiens
  SIMILAR (673)..(942): 981254mologous to Homo sapiens HSPC118,accession number AF161467,Smith-Waterman Score=448.
atggtcatttatccacttgacaaacatttcacgagcccctgccggtccaagctgtggggacgccgtactcccgggcctatgtgccccctgagacctggttctggcctctacgtttcagcccgctactggctcgcacgacccagcgccgccgtggtcccttctcagcgccttctgctccagcgaccatcatgttcccgggtccgagcagccagggccgcggtcaccgcttctctcgcacctcaggccgagaacccacaacgcggcgtgtccctcgcgcgactccgtcgccacgccacgcccccttcccgttctccggaagtgcgcgggttggagcggaagcgcacgcctgctaggatcagcggtggtggttccgcgatggtaggcggcggcggggtcggcggcggcctcctggagaatgccaaccccctcatctaccagcgctctggggagcggcctgtgacggcaggcgaggaggacgagcaggttcccgacagcatcgacgcacgcgagatcttcgatatccgccgctgctgggcgcgggcggaggagttgaacgtagtagagcaggtgcgggttcaggtgagtcacttccgaggggagcgagttgttccagagagtcagaaaggtttctgtgcagcaggagctggcgtgctctatgctcacgaacaccgaagggttagcgaccccgagagtacagtggctgtggctttcacaccaaccattccgcactgcagcatggccacccttattggtctgtccatcaaggtcaagcttctgcgctcccttcctcagcgtttcaagatggacgtgcacattactccggggacccatgcctcagagcatgcagtgaacaagcaacttgcagataaggagcgggtggcagctgccctggagaacacccacctcttggaggttgtgaatcagtgcctgtcagcccgctcctga

SEQ ID NO: 23808 - DNA, 470 bp, Homo sapiens
  SIMILAR (6)..(158): 961254mologous to Homo sapiens HSPC118,accession number AF161467,Smith-Waterman Score=253.
ccgcgatggtaggcggcggcggggtcggcggcggcctcctggagaatgccaaccccctcatctaccagcgctctggggagcggcctgtgacggcaggcgaggaggacgagcaggttcccgacagcatcgacgcacgcgagatcttcgatatccgccgctgctgggcgcgggcgggttccgggggcttgcggtggggggagcagtgatatcgagcagctggtggagccgcatcccagcagggcgttcctggcagagggttctaagtgggcaagggcgcagagtcccttttccttcacttcccacaatttgattcgcttccttaatgaccccggagcattcactgacgctagaggagttgaacgtagtagagcaggtgcgggttcaggttagcgaccccgaaagtacagtggctgtggctttcacaccaaccatttcgcactggagcatgggcacccttattggggtgtgcg

SEQ ID NO: 23809 - DNA, 738 bp, Homo sapiens
  SIMILAR (38)..(559): 421254mologous to Homo sapiens HSPC118,accession number AF161467,Smith-Waterman Score=200.
cgcacgctcgcataggatcagcggtggtggttccgcgatggtaggcggcggcggggtcggcggcggcctcctggagaatgccaaccccctcatctaccagcgctttggggaagcggcctgtgacggcaggcgaggaggacgagcaggttcccgacagcatcgacgcacgcgaagtctttcgatctgattcgctcccatcaaatgaccccggagcatcccactgacgctagaggagttgaacgtagtaagagcaggtgcggcgttcaggttagcgacccccgagagtacagtggctgtgggctttccaaaaccaacccattccggcacttgcaggcatggcccacccttaattggtctgtccaatcaaggtcaaagcttctgcgctcccttccttcagcgttttcaagatgggacgttgcacatttactcccgggggacccattgcctcaagagcatgcagttgaacaagcaactttgcagattaaggaagcggggtgggcaactgcccttggaagaacacaccaccttttggaggttgtgaattcagtgcctgtcgagcccggctcctggaacctgggcctttgtacccctcagcctggcataattggtatcctggtcccagctcctgccagggctgttaccgttgttgtgggtgggtcactcacaatgagaaactaacattttggctttttgtaataaagttaatttatattcagttcccaaaaaaaaaaaaaaaaa

SEQ ID NO: 23810 - DNA, 1005 bp, Homo sapiens
  SIMILAR (34)..(903): 701254mologous to Homo sapiens protocadherin gamma B3 short form protein,accession number AF152519,Smith-Waterman Score=983.
ctgcatcgtgaagtccactctagaggatccccgatcaaaacacatgatctagattctggatttaatggagaaatcctatgccaactaaaaggaaacttcccctttaaaatcgttcaagataccaaaaacacatacaggttggtgacagatggagccctggaccgggagcagatcccagaatacaatgtgacgatcacagctaccgacaaaggcaatccaccgctctcctccagcaagaccatcactctgcacatccttgatgtcaacgacaacgttcccgttttccaccaggcctcctacaccgtgcatgtagctgagaacaatccgcctggagcctccattgcgcatgtcagagcctcggatcccgacttgggacctaatggccttgtctcctactacatcgtggccagtgacctggagccgcgggagctgtcgtcctacgtgtccgtgagcgcgcggagcggggtggtgttcgcgcagcgagccttcgaccacgagcagctgcgtgccttcgagctcactctgcaggcccgcgaccagggctcgcctacgctcagcgccaacgtggcagacaccaacgataacccacccaccttcccccactcatcctactcagtctacatcgctgagaacaaccccagaggggcctccattttcttagtgactgcacaggaccacgacagtgaggataatgcccagatcacttattccttggccgaagacaccatgcagggggctccagtgtcctcctatgtctccataaactctgacactggagtcctgtacgcgctgcaatcctttgattatgagcagttgagagaactacaactaagagtgactgcacatgacagcggggacccgcctctcagcagcaacatgtcacttgacctgttcgtgcttgaccagaatgacaaccacgccgagatcctgtacccggcccttcccacagattgttctacttgcatggagcttgcaccccgcttcgcagagcctgcttacctgtga

SEQ ID NO: 23811 - DNA, 2588 bp, Homo sapiens
  SIMILAR (1350)..(2585): 1001254mologous to Homo sapiens protocadherin gamma A7 short form protein,accession number AF152514,Smith-Waterman Score=2099.
tttcgttaaactcaagcctctatcctgctggattctgagctccccttcctaagacagaggggtccacccggatacacccgcattctgaagcacttcccgagatcggcgcctaagcaagagaagcaggacgactatggcggctcagccgaggggcggggactacagaggatccttcctgctctccatcctcctggggaccccctgggaagcctgggcaggacgtattctctactccgtgtcggaggagacggacaaagggtcctttgtgggagacatcgccaaggacctggggctggagccccgggagctggcggagcgcggagtccgcatcatctccagaggtaggacgcagcttttcgccctgaaccagcgcagcggcagcttggtcactgcgggcaggatagaccgggaagagatctgcgctcagagtgcgcggtgtctggtaaactttaacatcctgatggaagataaaatgaatctttaccctatagacgtggaaataatagatattaatgacaacgttccaagattcttgacggaagaaataaatgtaaaaataatggagaatacagctcctggggttcggtttccgttaagcgaggctggggatccagatgtgggcacgaactccctccagagttaccagctcagccccaatcgccacttctccctggctgtgcaaagtggagacgatgaaactaagtacccggaactggtgctggagcgggtgctggaccgggaggaagagcgggttcaccacctggtcctcacagcctctgatggcggcgacccgccccgatccagcaccgcccacatccaggtgacagtggtggatgtgaatgaccacacgcctgtcttctctctgcctcagtaccaagtaactgtccccgagaatgtgccagtgggtacaagactgctcacggtacatgctatcgacctggacgagggagtcaatggggaagtgacatattcttttcggaaaataactcctaaacttccaaagatgtttcatctgaactcgcttacaggagaaatatcaactttagaaggattagattatgaagaaactgccttctatgaaatggaggttcaggctcaagatggtcctggtagtctgacaaaggcaaaagtactgatcacagttttagatgtaaatgataatgctccagaagtgactatgacgtctttaagtagctcaatccctgaagacacacctcttgggacagtcattgctcttttctacctacaagacagagattctggaaagaatggtgaggtgacctgcaccattccagaaaacctaccttttaaattagaaaaatcaatagataattattatagattgaaaaacaaccaaaaacttggaccgggaaacactctctttgtataacatcacactgaaagccacagatggtggaactcctcccttgtccagggaaactcacatattcatgcaggtggcagacaccaacgataacccacccaccttcccccactcatcctactcagtctacatcgctgagaacaaccccagaggggcctccattttcttagtgactgcacaggaccacgacagtgaggataatgcccagatcacttattccttggccgaagacaccatccagggggctccagtgtcctcctatgtctccataaactctgacactggagtcctgtacgcgctgcaatcctttgattatgagcagttgagagaactacaactaagagtgactgcacatgacagcggggacccgcctctcagcagcaacatgtcactgagcctgttcgtgctggaccagaatgacaacccgcccgagatcctgtacccggccctccccacagatggttctactggcatggagctggcaccccgctccgcagagcccggctacctggtgaccaaggtggtggcggtggacaaagattcaggccagaacgcctggctgtcatacctcctgcttaaggccagcgagccaggactctttgcggttgggctgtacacgggcgaggtgcgcacggctcgggccctgctggacagagatgccctcaagcagagcctcgtggtggccgtccaggaccacggtcagcctcctctgtcagccaccgtcacactcaccgtggctgtggctgacagcatccccgaagtcttggccgacctgggcagccttgagccctccgacggtccttacaactatgacctcacgttgtacctggtggtggcggtggccacagtctcctgcgtcttcctagccttcgtcctcgtactgctggcgctcaggctgcggcgctggcacaagtcacgcctgctgcaggcttcagaaggtggcttggcgaacgtgcccacctcgcactttgtgggcatggacggggtgcaggctttcctgcagacctattcccatgaggtctccctcaccgcggactctcggaagagtcacctgatcttcccccagcccaactatgtagacatgctcatcagccaggagagctgtgagaaaaatgattctttgctaacatccgtagattttcaggaatgtaaagaaaacctgccaagtattcaggtgagcccagcccttcctttatttccatga

SEQ ID NO: 23812 - DNA, 371 bp, Homo sapiens
  SIMILAR (315)..(353): 611254mologous to Takifugu rubripes surfeit protein 5,accession number Y15172,Smith-Waterman Score=40.
  misc_feature (1)...(371): n = a,t,c or g
atttcggcacnaggggctgactaggttttcggaccgcggcgccnggcgaangagagactgcggcgggagggccaggccgtgggagagacgcgggaaagnaaggnttcaaagnctcttnaccaccccgccctaggccgacccgnggacccggcgtctggtcccaggtctccccgctgcgctgcttgaggctcagcatggccagcagagagccctgccccagagcaaggagacgctgctgcagtcctacaacaagcggctgaaggacgacattaagtccatcatggacaacttcaccgagatcatcaagaccgccaagattnaaggacgagacgcaggtntcacgggccactcaagggttgaacaaggacaat

SEQ ID NO: 23813 - DNA, 860 bp, Homo sapiens
  SIMILAR (383)..(502): 921254mologous to Homo sapiens Surf5b,accession number AJ224639,Smith-Waterman Score=180.
gcggggctgagaggctgcggcggctgactaggttttcggaccgcggcgcggcggggaagagagactgcggcgggagggccaggccgtgggagagacgcgggaaagtgcgggtcgcagaggcacttgtaccaccccgccctatgccgacccggcggacgcggcgtctggtgtgcgggcgctggggcgggtcccaggtctccccgctgcgctgcttgaggctcggccatggcccagcagagagccctgccccagagcaaggagacgctgctgcagtcctacaacaagcggctgaaggacgacattaagtccatcatggacaacttcaccgagatcatcaagaccgccaagattgaggacgagacgcaggtgtcacgggccacttcagggtgaacaggacaattacgagatgcatgtgcgagccgccaacatcgtccgagccggcgagtccctgatgaagctggtgtccgacctcaagcagttcctgatccttcaatgacttcccctccgtgaacgaggccattgaccagcgcaaccagcagctgcgcacactgcaggaggagtgcgaccggaagctcatcacgctgcgagacgagatctccattgacctctacgagctggaggaggagtattactcgtccagtccaggaccatccttggtctcccagcagttgtccgagcagcagctcctcagctctgcctggacagcctggcccaaggtcactctctcctcattggcacctggtccccagtattcagtgaatggacctgctgccatcattgcacatccaggcacctgtgcctctgctggcatctcatcctcactgctaccagagccggtgctcctagtgccggtattttag

SEQ ID NO: 23814 - DNA, 1263 bp, Homo sapiens
  SIMILAR (646)..(1263): 711254mologous to Homo sapiens protocadherin gamma A5 short form protein,accession number AF152512,Smith-Waterman Score=772.
atgatagaagatataaatgataacccacctcattttccccaaaatagcattgttttacaaatcaatgaactagcaattccaggcattcggtttggcctggaatctgctatagatgcagatgtagggcctcactctctccagagttaccagctcagttctaatgaacatttctctctgatgatggacaagactaaaggcaagaacgctccagaattagtgctggagaagcccctgggccaggagcaacagagctctcatctcctggtcctggaagcaatggacatgggtgacccagtcccaactggcactgctgcaattcaaattgaggtcactgatgccaacgataatgccccagtttttagccaggatgtatacaaagtcagccttagagagaatgtgcccccaggcacctctgtactaaaggtgacagccactgaccaggatgagggtgtcaatgcggagatcacctactctttcaaatccctacgagatgatattggaaatatgtttgtgctagaccatcaaaatggggaaattaaatccaaagacttaatagacttcgaatttcgtagcagttataccatgagagtagaagctaaggatggtggaggcatgaccagcgaatgtaaaattatagtagaaatccagatccgctacaggattcccgaggaaatgcccaagggctccgtagtggggaacctcgccacggacttggggttcagcgtccaggagttaccgactcgaaaactgcgcgtcagttcggagaagccttacttcaccgtgagcgcagagagcggggagttgcttgtgagcagcaggctagacagggaggagatatgcgggaagaagccagcttgtgctctggaatttgaggctgttgctgaaaatccactgaacttttatcactacccgcctttccgggatgaagagttaaaagtaaaagttaatgaaaatgcggctgcagggacacggttagtgcttcccttcgcgcgggatgcggatgtgggtgtgaactctctccggagttaccagctcagctccaatctgcacttctctctggatgtggtaagcggaactgatggacaaaagtatccggagctggtgttggaacagcccctagaccgcgagaaagagactgttcacgacctcctcctcacagctttagatggcggagacccggtactctccggcaccacgcacatccgtgttacggtcctcgacgcaaacgacaatgcgcccctgttcaccccatccgagtacagc

SEQ ID NO: 23815 - DNA, 2530 bp, Homo sapiens
  SIMILAR (115)..(2391): 771254mologous to Homo sapiens protocadherin gamma B5 short form protein,accession number AF152521,Smith-Waterman Score=2922.
tttcgtctggaactggaactaaagcccgttctgagatccttaaatctacaatacagaggttatttgtaacctggcgtctccaggctggtgagcaagctgaggagagcaagagggatggggagcggcgccggggagctgggccgggctgagaggctgccagagctctttctcttcctgctgactttgttctgcccggcgctctgtgagcagatccgctacaggattcccgaggaaatgcccaagggctccgtagtggggaacctcgccacggacctggggttcagcgtccaggagttaccgactcgaaaactgcgcgtcagttcggagaagccttacttcaccgtgagcgcagagagcgcggagttgcttgtgagcagcaggctatacagggaggagatatgcgggaagaagccagcttgtgctctggaatttgaggctgttgctgaaaatccactgaacttttatcacgtgaatgtggagatcgaggacattaatgaccacacgccaaaattcacgcaaaattcctttgagctgcaaataagtgagtctgcacagcctggcacacgatttatattaggatctgcccatgatgcggatattggtagcaacacactgcagaattaccaactcagtcccagtgatcatttctcactgataaataaagagaaatcagatggcagtaaataccctgagatggtattgaagacacctttggacagagaaaagcagaaatcctaccacttgactttgactgccttggactttggagctccacccctaagcagcactgcacagatacacgttctagtgactgatgccaatgataatgctccagtgttcagtcaagacgtatacagggtgagcctttcagaaaacgtgtacccggggaccacggtgctacaggtgactgccacggaccaggatgagggtgtcaatgccgagattactttctctttcagtgaagctagccagatcacccaatttgacctgaactctaacaccggggaaattactgttttaaatacattagattttgaagaagtcaaagaatattccatagttttggaagcaagggacggtggaggaatgattgcgcaatgcacagtggaggtagaagtcatagatgaaaatgacaacgccccagaagtgatattccagtctctacccaacctaattatggaggacgccgagctgggaacacatattgctttgctcaaagtccgtgacaaggattccagacacaatggagaagtgacttgtaaattggaaggtgatgttccatttaaaatattaacttcttcaagaaacacgtataaattagtgacagatgctgttctagaccgcgagcagaatccagagtacaatataaccgttacggcaacagatcggggcaagcctcccctctcctccagttccagcatcaccctgcacattggtgatgtaaatgacaacgctccggttttctcacagtcttcctatatagtccacgtggccgagaacaacccgcctggagcctctatttcacaagtcagggcttctgatccggacttggggcccaacggccaagtctcttactgcatcatggccagtgacctggagcagcgggagctgtcatcctacgtgtccataagcgcggagagcggggtggtgttcgcgcagcgcgccttcgaccacgagcagctgcgcgccttcgaactcacactgcaggcccgcgaccagggctcgccagcgctcagcgcgaacgtgagcctgcgcgtgttagtggacgaccgcaacgacaatgcgccacgggtgctgtaccccgcgctgggtcccgacggctctgcgctcttcgatatggtgccgcacgctgcagagcctggctacttggtgaccaaggtagtggcggtggacgcagactcaggacacaacgcctggctgtcctaccacgtgctgcaggctagcgagcccgggctcttcagcctggggctgcgcacgggcgaagtgcgcacagcgcgtgccttaggcgacagggacgccgtccgccagcgccttctggtcgccgtgcgtgacggtggacagccaccactctcggccactgccacgttgcacctggtcttcgccgacagcttgcaggaggtgctgccggatatcactgaccgccccgacccctctgacctccaggctgagctgcagttttacctagtggtggccttggccttgatctcagtgctcttcctcgtgggccatgattctggccattgccttgcgcctgcgaacgctcctccagccccgcctcctggagctgcttccagcctgggtttctgtgtttaaaatccgaatccgtgggtttccccccaactacagcgaggggactttgccttattcctacaatctatgtgttgcacatacaggaaagacggagtttaatttcctaaaatgtagtgagcagttgagttcaggacaagacatactttgcggtgattcatctggggccttatttccactttgtaattccagtgaattgacttcccatcaggtgagtttcctt

SEQ ID NO: 23816 - DNA, 273 bp, Homo sapiens
  SIMILAR (128)..(250): 921254mologous to Homo sapiens peroxisomal integral membrane protein,accession number Y12860,Smith-Waterman Score=192.
  misc_feature (1)...(273): n = a,t,c or g
gngctcctttccnaactccactggctgcggcatctgtgggaaaagtgtggctgggtcttcgaggagccgcaccaatggcttccgtgctgtcctacgaaagcctggtccacgncgtggccggagccgtggagtggttaatntgttgctaacaactccactctgggtggtaaacaccagactgaagnttcaaggagcaaaatttaggaattaagacattgtaccaacaaactacaaaggtatcattgatgctttntcatcagatcattcgcgatg

SEQ ID NO: 23817 - DNA, 1236 bp, Homo sapiens
  SIMILAR (237)..(178): 601254mologous to Drosophila melanogaster similar to C. elegans R10H10.6 and S. cerevisiae YD8419.03c,accession number AF017096,Smith-Waterman Score=62.
tgctctttgaaggtatgcatggtatgtgtttccatggacttcttcgtattctcatagtatgggttccatcctatgctcaccaccatcttctgaccatctctacttccagcactggcccaaccataataaatgccactggatatatcggctggcagattatctaccacttgctcaggaaaattagctgtgggggatgcccagctgcttgtagccacggccgaagccccataccacttggtcccggcaggagtatgacagatgcttcgtaatgcagtctgctcgaggcatgggctgcagcccggtccctgcgtcctacagagacaccgtccacgcggtgcccggaccccggaccagccacggggtgggaaggggcgtgagctctgccgcgggggtgcaccaggggcccgacgatgccgatgacacgccacggaggatccctgatgccagcgactcaggagctgggtctcccaaccattttcattttctttctttccttctttccctaccttttaaaatattttatgtttgtttgtttatttagaggtagagtttccctcttgttgcccaggctggagtaacaactgggcaaaaagctctggaaaagctctggaggcaaattgagtccacagagctacagtccaccctttaccctgggtcttagagaactcatctcagaggctttcactcttagttcttagcttccctcctgcagtactgatccatccttcgtttgtctcctttgctggtgcaatcttattttctcggcctcttaatggttagcctgctccaagactcagtcattgagattcttctgtcagtccatacacacttccctagtcaaagatgcggaccctgagcgggcacgtgtgaacacggctctctaccccgcagtctctaggagaccaggaggtggcggagtctcggcccttaccccgaattcctccaacaactttccgccaatggcccattcctctctgccccacagtcatgacagtggaccccaacccacactacctccctctcagacccatccctcaggcatatagacccagccacacttttcccacagatgccgcagccagtggagttaggaaaggagcaccggagctcagggtgtgagagtcgcaatccccgccctctcaaacccgcccgcctgccctagaaccacttccgggtctaatggccttcttttactctggtgacaaagatggggaaactcaatgagactccagtctc

SEQ ID NO: 23818 - DNA, 425 bp, Homo sapiens
  SIMILAR (118)..(171): 1001254mologous to Homo sapiens dJ408N23.2 (solute carrier family 25 (mitochondrial carrier; peroxisomal membrane protein, 34kD), member 17 (PMP34)),accession number Z98048,Smith-Waterman Score=83.
tcggcacagggcggggattgcgactctcacaccctgagctccggtgctcctttcctaactccactggctgcggcatctgtgggaaaagtgtggctgggtcttcgaggagccgcaccaatggcttccgtgctgtcctacgaaagcctggtccacgccgtggccggagccgtggtgagacggggtcttcacgcccgggccgcaacgggttataaggcttctcgggggccagtcccgggatatgcctgagggatgggtctgagagggaggtagtgtgggttggggtccactgtcatgactgtggggcagagaggaatgggccattggcggaaagttgttggaggaattcggggtaagggccgagactccgccacctcctggtctcctatagactgcggggtagagagccgtgttcacacgtgcccgct

SEQ ID NO: 23819 - DNA, 1079 bp, Homo sapiens
  SIMILAR (239)..(892): 931254mologous to Homo sapiens peroxisomal integral membrane protein,accession number Y12860,Smith-Waterman Score=1036.
gggcggggattgcgactctcacaccctgagctccgtgtgcttctttcctaactccactggctgcggcatctgtgggaaaagtgtggctgggtcttcgaggagccgcaccaatggcttccgtgctgtcctacgaaagcctggtccacgccgtggccggagccgtgggaagcgtgacagcaatgacatgtggtttttcccctggatactgctagtatcttcgacttcagtgttgatttttaaaagaaaatccaaaactacacacatggtggtcctggagatcattaaagaagaaggactcctggcaccatatcgagggtggtttccagtgatttccagtctctgctgctccaattttgtctatttctacacttttaatagcctcaaagcactctgggtcaaaggtcaacattctaccactggaaaagatctggtagttgggtttgttgcaggagtggttaatgtgttgctaacaactccactctgggtggtaaacaccagactgaagcttcaaggagcacaatttaggaatgaagacattgtaccaacaaactacaaaggtatcattgatgcttttcatcagatcattcgcgatgaaggaatctcggctttatggaatggcacatttccctcattgctgttggtcttcaatcctgccatccagttcatgttttatgaaggtttaaaacggcagcttttaacctttgctttccagctttcttccttggatgtgttcatcattggtgcagtagccaaagcgattgccaccacggtgacctatcccctgcagacggtacccctctttcctcagtttgggcgtcatagactaaacccagaaaacagaacattgggaagtcttcggaatattctctatcttcttttacaaatattcagaactccttcagaaagagaacccttctatacttcagtcaccctgagtgtgctttcatcagtggcatatcctatgatgcctcttagcaatataacatctgcctatagaataggagtactggagaagggagggggcagtggaaaaagtgataatagtgatgatgatgatgataatgatgatggtggtgttg

SEQ ID NO: 23820 - DNA, 2454 bp, Homo sapiens
  SIMILAR (85)..(1359): 681254mologous to Escherichia coli K12 putative ATP-binding component of a transport system,accession number AE000350,Smith- Waterman Score=1362.
  misc_feature (1)...(2454): n = a,t,c or g
atgcattcgtcagtgtcatctgccttttccagtaaatgggttggcattcaatttccaaagggggatcctctagaatcgactacggcattcactactaatgttattggtgtggtaaacgatgagactgtagatggcaaccaaaaagtggatgaacgaggtacaacaaataacactcatattatcaaccatggccagcagaatgttcatggcggggtatctaatggaagtcttattgaatctggtggatatcaagatataggaagtcataacaattttgtggggcaggctaataatacaaccattaacggtggcagacagtcaattcatgacgggggtatttccacaggtacgacaatcgagagtggcaatcaggacgtttataaagggggtatcagcaatggaacgacaattaagggcggtgcttcacgcgtagagggagggagtgcgaatggaatactcattgatggtggtagccagatagtaaaagttcaagggcatgctgatggtacaacgataaataagtctggctctcaggacgtagtacaaggaagtctggcaacgaacacaaccataaatggtggtcgacagtatgttgaacagagcacagtagaaacaacaaccattaaaaatggcggtgagcaaagagtatatgagagccgtgcgctggacacgacgattgaaggcggaactcagtctctgaatagtaagtcaacggcaaaaaatacgcatatctattctggtggcacgcaaattgttgataacaccagcacctcggatgttattgaagtttattctggtggcgtgcttgatgttaagggtgacataaacgcatatggttcggcaaacaagacgattattaaagataaaggaacaatgtcagttttaaccaatgctaaagctgatgcgacccgaatagataatggcggggttatggatgttgcaggaaacgcgacaaataccataattaatggtggcacacagaatattaataattatggcatagccacaggcaccaatatcaacagcggaacgcaaaatatcaaaagcggcgggaaagctgacacaacaattatatcctccgggagccggcaggttgttgagaaagatggtacggcaattggcagcaatattagcgccggaaaatcgctgattgtctataccggccccattgcacatggggttaaccaggagacgggcagtgctttagttgccaacacgggtgcagggactgatatcgaaggatacaacaagctctctcacttcactattaccggaggggaggctaattatgttgtgctggaaaataccggcgaactgacggtagtggctaaaacctcggcgaaaaatactaccattgatactgagcaacncgnagtgccgcgcgtgccgtttgctatcaacgtactgacccacagcagacagcgatatcgacgtaacttacgcttctatgctgatgacccaacgattcgcgtcgtggcccgacctaccattgggtacgcgaaagctgaagaggaacgcgtggtggataaccgcatgcatgaccgtttttgtgaactccgcaccgccgcgggccatcctgtcgaaggaggacggccgttggtaattaaaggcataactcacccagcggaaaccgctctacagaggtttaaatttcttatgtaccaggttgttgcgtctgatttagatggcacgttactttctcccgaccatacgttatccccttacgccaaagaaactctgaagctgctcaccgcgcgcggcatcaactttgtgtttgcgaccggtcgtcaccacgttgatgtggggcaaattcgcgataatctggagattaagtcttacatgattacctccaatggtgcgcgcgttcacgatctggatggtaatctgatttttgctcataacctggatcgcgacattgccagcgatctgtttggcgtagtcaacgacaatccggacatcattactaacgtttatcgcgacgacgaatggtttatgaatcgccatcgcccggaagagatgcgcttttttaaagaagcggtgttccaatatgcgctgtatgagcctggattactggagccggaaggcgaaaccaaagccctgctgactcccggcaaactgaaaaacttcctcgtcgagaaaatgcgtaccctcggtactgcagcctgcccgccgtaccatatcgcgtttgtgattggcggtacgtctgcggaaaccaacctgaaaaccgtcaagttagcaagcgctcactattacgatgaactgccgacggaagggaacgaacatggtcagggttccgcgatgtccagctggaacaggaactgctggaagaggcccagaaactcggtcttggcgcgcagtttggcggtaaatacttcgcgcacgacattcgcgttatccgtctgccacgtcacggcgcatcctgcccggtcggcatgggcgtctcctgtccgctga

SEQ ID NO: 23821 - DNA, 1386 bp, Homo sapiens
  SIMILAR (1)..(600): 931254mologous to Escherichia coli lysophospholipase L2 (aa 1 -340),accession number X03155,Smith-Waterman Score=975.
atgggcggtgcgatctccacattatttctgcaacgccatccaggtgtatgtgacgccattgcgctaactgcgccaatgtttgggatcgtgattcgtatgccgtcatttatggcacggcagatcctcaactgggccgaagcgcatccacgtttccgtgatggctatgcaataggcaccgggcgctggcgcgcgttgccgtttgctatcaacgtactgacccacagcagacagcgatatcgacgtaacttacgcttctatgctgatgacccaacgattcgcgtcggtgggccgacctaccattgggtacgcgaaagtattctggctggcgaacaggtgttagccggtgcgggtgatgacgccacgccaacgcttctcttgcaggctgaagaggaacgcgtggtggataaccgcatgcatgaccgtttttgtgaactccgcaccgccgcgggccatcctgtcgaaggaggacggccgttggtaattaaaggtgcttaccatgagatcctttttgaaaaggacgcaatgcgctcagtcgggctccaagccatcgtcgatttttcaacaggcataactccccagaggaaaccgtctacagagctgtatgtcttcgtcataactagtcaagcctttcaaatctctttacaattcaatcctctcacctgcaggtcctgtgcttcttccctcacaatcatgtctgaggacaccctgaaatggaggctgtgggccagcttaccgaatggaaaggcagacaagaacctgaagtcagctagcaatttctccaacaaagacgaaggaaatttagattttaccaaccaggtccagagacggagccagagttgcttcaccttctttccatttagccgggcaaacttcacctgggtgagaagctacgtactgtgctgctttgattttacgcagcaggtcagacgcgtcacggccaatgccttcagcggtaacttcgattgcctggatgataccctgcgggtcaacaacgaaggtcgcacggtcagccagaccttcatcttcacgcatgttgtcgaagttacgggtcagggcgccagtcgggtcgccgatcatcgcatatttgattttagcgatggtttcagagctgctgtgccatgctttgtgggtgaagtgagtatcggtagatactgcgtatacgtctacgcccagtttctgcagttcttcgtagtggtcagcaacgtcacccagttcggtcgggcatacgaaagtaaagtcagccgggtagaagaagaagacgctccagcggccttcggtatctttttcggtgatttcgatgaattcgccgtttttgaatgcctggtttttaaaaggtttaattttggtgttatcaacgacatctatacttcctccgtgtttcgatga

SEQ ID NO: 23822 - DNA, 1609 bp, Homo sapiens
  SIMILAR (85)..(1359): 681254mologous to Escherichia coli K12 putative ATP-binding component of a transport system,accession number AE000350,Smith- Waterman Score=1362.
  misc_feature (1)...(1609): n = a,t,c or g
atgcattcgtcagtgtcatctgccttttccagtaaatgggttggcattcaatttccaaagggggatcctctagaatcgactacggcattcactactaatgttattggtgtggtaaacgatgagactgtagatggcaaccaaaaagtggatgaacgaggtacaacaaataacactcatattatcaaccatggccagcagaatgttcatggcggggtatctaatggaagtcttattgaatctggtggatatcaagatataggaagtcataacaattttgtggggcaggctaataatacaaccattaacggtggcagacagtcaattcatgacgggggtatttccacaggtacgacaatcgagagtggcaatcaggacgtttataaagggggtatcagcaatggaacgacaattaagggcggtgcttcacgcgtagagggagggagtgcgaatggaatactcattgatggtggtagccagatagtaaaagttcaagggcatgctgatggtacaacgataaataagtctggctctcaggacgtagtacaaggaagtctggcaacgaacacaaccataaatggtggtcgacagtatgttgaacagagcacagtagaaacaacaaccattaaaaatggcggtgagcaaagagtatatgagagccgtgcgctggacacgacgattgaaggcggaactcagtctctgaatagtaagtcaacggcaaaaaatacgcatatctattctggtggcacgcaaattgttgataacaccagcacctcggatgttattgaagtttattctggtggcgtgcttgatgttaagggtgacataaacgcatatggttcggcaaacaagacgattattaaagataaaggaacaatgtcagttttaaccaatgctaaagctgatgcgacccgaatagataatggcggggttatggatgttgcaggaaacgcgacaaataccataattaatggtggcacacagaatattaataattatggcatagccacaggcaccaatatcaacagcggaacgcaaaatatcaaaagcggcgggaaagctgacacaacaattatatcctccgggagccggcaggttgttgagaaagatggtacggcaattggcagcaatattagcgccggaaaatcgctgattgtctataccggccccattgcacatggggttaaccaggagacgggcagtgctttagttgccaacacgggtgcagggactgatatcgaaggatacaacaagctctctcacttcactattaccggaggggaggctaattatgttgtgctggaaaataccggcgaactgacggtagtggctaaaacctcggcgaaaaatactaccattgatactgagcaacncgnagtgccgcgcgtgccgtttgctatcaacgtactgacccacagcagacagcgatatcgacgtaacttacgcttctatgctgatgacccaacgattcgcgtcgtggcccgacctaccattgggtacgcgaaagctgaagaggaacgcgtggtggataaccgcatgcatgaccgtttttgtgaactccgcaccgccgcgggccatcctgtcgaaggaggacggccgttggtaattaaag

SEQ ID NO: 23823 - DNA, 1782 bp, Homo sapiens
  SIMILAR (744)..(4): 981254mologous to Escherichia coli Acriflavin resistance protein D,accession number D90845,Smith-Waterman Score=1197.
ttacgcctcctcttcatgacgggcaaagcggcttttggtccacaatgccaggcggtcgaacagcaaataaatcaccggcgtggtaaacagcgtcagcacctggctgacaatcagaccgccgaccatgccgatacctaacggacgacgcagttccgcgccgaccccggtactcaacatcagcggcagcgcgccaagcagagccgccagagtggtcatcaggatcggacgaaaacgcaacagacaagcctggtagattgcctcgcgcggcgacatgccttgctcgcgctcagcagccagcgcgaagtcgatcatcatgatggcgttcttcttcacgataccgatcagcaaaataatgccgataatcgcaatcacatccagttcgctaccagcaatcagcaacgccagcagtgcgccaacccctgcggtgggtagcgtcgagagaatggtgatcgggtgaataaagctctcgtacagaatgccgagcacgatatacatcgccaccaccgccgcgacaatcagccagacagtgctgcccagcgccgactggaaggcgagggtgctgccctggaactgcgtggtgatatccaccggcagattcagcgtcttttcggtgtccataatcgcctgcaccgcatcgcccagcgaatagttattcggcacgttaaaggagatggtcgttaccgggaactgatccaaatggttgatggagagcggcgcaaaacgctgctcaattttgggcattgagattacggcgcggagtttgcggtacaggttatgccatgtctttcgcagattggcagtggttcgctgccggttgatcgccccatgatggacgcggtagccaccttgagtcattaaccgcccgctggcgtgaattggcagtgccggtgattggtcgtatttatgacggacgattggggctggatttacgctgccttgaagatgagcaacggtttttggagatgttggtgaaatgattattgcgactggcggacacgttgaccacggcaaaacaaccttattgcaggcgattactggcgtaaatgctgaccgtctgttgttgaggttgaccccccggtaaaggagggtttttgggaaaaacgtttttgttggggaaaactgtttttcacccccgtcgaattcgagctcggtacccacggctaacggcaggttttcggcaatcatggtcacggctttcagtgcacaagcgtcagtgatcggcgtggcggcaatagaaacatatgcttcgatagcgtgcgttaaggcatccatacccgttgcggcggtcagtgacttcggcataccaatcatcagagaggagtcattgacagaaagcagcggagtgacatgtttatcaacaatcgccattttgatatgacgcgcttcgtcagtgatgatgcagaaacgggtcatttcagaggccgtacccgccgtggtattgatggcgatcatcggcagctgcggttttgcagagcggtcaacgccttcgtaatcgcgaatatcgccgccattggctgccaccagcgcaataccttttgcgcagtcgtgtggagaaccaccgcctaaggagatcacgctatcgcaattattctctttaagtaatttcaaacctgcggcgacgttttccgtggtggggttaggttgggtgccatcataaataacgctaaaaatattgcgttcttccagtgctttttgcacatcgcccgccatacctaatttcgttaacatattgtcagtgacaattaaggtacgggtaaatccataatctgccatcatattcat

SEQ ID NO: 23824 - DNA, 1344 bp, Homo sapiens; identical to SEQ ID NO: 17897
  SIMILAR (1299)..(1343): 1001254mologous to Escherichia coli Membrane-associated ATP- hydrolase amsA,accession number D90735,Smith-Waterman Score=74.

SEQ ID NO: 23825 - DNA, 2054 bp, Homo sapiens
  SIMILAR (168)..(1034): 1001254mologous to Escherichia coli lysophospholipase L2 (aa 1-340),accession number X03155,Smith-Waterman Score=1548.
ttccaaatcagaatcgactccagcgtacggcaggtggtgcctttgccattcgtacccgcaacggtaaacacaaatggcgctggtttcaggacgccaagacgcgccgcgaccaggctcacgcgctcaaggccgagatcgatagttttacacgtcaaatagacctttctcaccatgaccgggtggtagtcatctgcccggggcgtattgagagctacgtaaaatatgcggaactggcctatgacctgttccatttggggtttgatgtcttaatcatcgaccatcgcgggcagggacgttccggtcgcctgttagccgatccgcatctcgggcatgttaatcgctttaatgattatgttgatgatctggcggcattctggcagcaggaggttcaacccggtccgtggcgtaaacgctatatactggcacattcgatgggcggtgcgatctccacattatttctgcaacgccatccaggtgtatgtgacgccattgcgctaactgcgccaatgtttgggatcgtgattcgtatgccgtcatttatggcacggcagatcctcaactgggccgaagcgcatccacgtttccgtgatggctatgcaataggcaccgggcgctggcgcgcgttgccgtttgctatcaacgtactgacccacagcagacagcgatatcgacgtaacttacgcttctatgctgatgacccaacgattcgcgtcggtgggccgacctaccattgggtacgcgaaagtattctggctggcgaacaggtgttagccggtgcgggtgatgacgccacgccaacgcttctcttgcaggctgaagaggaacgcgtggtggataaccgcatgcatgaccgtttttgtgaactccgcaccgccgcgggccatcctgtcgaaggaggacggccgttggtaattaaaggtgcttaccatgagatcctttttgaaaaggacgcaatgcgctcagtcgcgctccacgccatcgttgattttttcaacaggcataactcacccagcggaaaccgctctacagaggttgttgcgtctgatttagatggcacgttactttctcccgaccatacgttatccccttacgccaaagaaactctgaagctgctcaccgcgcgcggcatcaactttgtgtttgcgaccggtcgtcaccacgttgatgtgggacaaattcgcgataatctggaaattaaagagggcgataacggcggccagtgcttcctcttcctgtggaccggtcgcttcaacttcaatctgccgtcctttggcagaatccaacatcagcagcgcaataacgctgttggcttcagcctcgtaattgcaggtgccgatgagtggcaggaaattgaagattttggacatgaaagacttgaatggctaaagaaatatggtgattttgataatggcattccggtcgatgacaccattgcacgcgttgaaagcaaagtggcacagctggcaacggcgttcgaacgtagcggactgcataacgtcgataacgtctccacgatttcgcgttcgatgatgaataaagccatcgaaaaaggcgtggcggcggaaaacgtcatcttcttccccaactggtcggaaattgcccgttttcagcatgttgcagatgccgatgttgatgcccttcgtaaccagcttgacctgccggataacaaaaaaatcattctttactccggcaatattggtgaaaagcaggggctggaaaacgttattgaagctgccgatcgtctgcgcgatgaaccgctgatttttgccattgtcgggcagggcggcggcaaagcgcggctggaaaaaatggcgcagcagcgtggactgcgcaacatgcaatttttcccgctgcaatcgtatgacgctttacccgcactgctgaagatgggcgattgccatctggtggtgcaaaaacgcggcgcggcagatgccgtattgccgtcgaaactgaccaatattctggcagtaggcggtaacgcggtgattactgctgaagcctacacagaactggggcagctttgcgaaaccttccgggggtacgagcagagttag

SEQ ID NO: 23826 - DNA, 2410 bp, Homo sapiens
  SIMILAR (1591)..(1860): 981254mologous to Escherichia coli lysophospholipase L2 (aa 1 -340),accession number X03155,Smith-Waterman Score=490.
atggggggagcagatatagcggggcccaggcgggaacacaacgcgaagcaccccaccgttggccttggaagcgccgcacagacaacgtgtctccccggaccaaaacagaagggggaccccacgcggcaccaacccgtggataaacgaaacgacgtggggccccgccagcacttttggtgctggcgagttgagatccacaaggaaaagcgtatgaaaacgggaccgttaaacgaaagtgagttggaatggctggacgatattctgaccaaatacaacactgaccacgccatccttgatgtggcggagctggacggtttattgacggcggtgttgagttctccgcaagagattgaaccggaacagtggctggttgccgtgtggggtggggctgactatgtgccgcgctgggcgtcagagaaagagatgacgcgctttatgaatctggcttttcaacatatggccgataccgcagagcgtctgaacgaattcccggagcagtttgagccgttattcggcttgcgagaagttgatggcagcgagctgacgattgtggtcccacctggtggtagaacagccaccaatgctctttcttgtggctctctctttggagaggaaacttctcccagaggtccctctgcagacagcacctcacagtccattggcggtggttctccacacgactgcgcaaaaggtattgcgctggtggcagccaatggcggcgatattcgcgattacgaaggcgttgaccgctctgcaaaaccgcagctgccgatgatcgccatcaataccacggcgggtacggcctctgaaatgacccgtttctgcatcatcactgacgaagcgcgtcatatcaaaatggcgattgttgataaacatgtcactccgctgctttctgtcaatgactcctctctgatgattggtatgccgaagtcactgaccgccgcaacgggtatggatgccttaacgcacgctatcgaagcatatgtttctattgccgccacgccgatcactgacgcttgtgcactgaaagccgtgaccatgattgccgggatatccactttcttcgccagttcacggatggcgttaatgcaggcttcagcaccttccgcgtcgtttttacctgtcacgttcacgcccattgcagcggcacagtcacgcagacgtgcagcggcgactgggtaccgagatcgatggttatgtcatggtgatgtgttgctacagatttgcgccaacacccaggacacggttatccatgcgctgcgcgatatcatcaaacacaacagctgcccggacgactgttcggtccagcacgacgccgttattgacgacggctgcgactttatcgactacctggggggcagcgaaactgtcgtagctctcaatacgccccgggcagatgactaccacccggtcatggtgctgtgcgcgaaaacggacaaagcgcaccggaatgtcatccacaccagtaaactctgcttcatcacgctgacgccagaaatcagtcagcggtcccatggtaaaagcagcaaacgcgttttctcttgtttcccagtctttttgctgctgaaacatcggcgtattgtggcacaaaaatatgcggaactggcctatgacctgttccatttggggtttgatgtcttaatcatcgaccatcgcgggcagggacgttccggtcgcctgttagccgatccgcatctcgggcatgttaatcgctttaatgattatgttgatgatctggcggcattctggcagcaggaggttcagcccggtccgtggcgtaaacgctatatactggcacattcgatgggcggtgcgatctccacattatttctgcaacgccatccaggtgtatgtgacagccattgcgctaactgcgccaatgtttgggatcgtgattcgtatgccgtcatttatggcacggcagatcctcaactgggccgaagcgcatccacgtttccgtgatggctatgcaataggcaccgggcgctggcgcgcgttgccgtttgctatcaacgtactgacccacagcagacagcgatatcgacgtaacttacgcttctatgctgatgacccaacgattcgcgtcggtgggccgacctaccattgggtacgcgaaagtattctggctggcgaacaggtgttagccggtgcgggtgatgacgccacgccaacgcttctcttgcaggctgaagaggaacgcgtggtggataaccgcatgcatgaccgtttttgtgaactccgcaccgccgcgggggtaccgagacgatggtatacaacaggaggtttttccgatgcttatctttatcccgattctcatttttgtcgcgctggtcattgtcggcgcgggtgtcaaaatcgtaccgcagggctatcagggtttacgccgtctattactctagatagagagtaa

SEQ ID NO: 23827 - DNA, 3399 bp, Homo sapiens; identical to SEQ ID NO: 7346
  SIMILAR (322)..(2382): 911254mologous to Homo sapiens pM5 (3' partial),accession number U91318,Smith-Waterman Score=3192.

SEQ ID NO: 23828 - DNA, 14934 bp, Homo sapiens; identical to SEQ ID NO: 17048
  SIMILAR (5137)..(9693): 931254mologous to Homo sapiens polycystic kidney disease 1 protein,accession number L43619,Smith-Waterman Score=7485.

SEQ ID NO: 23829 - DNA, 714 bp, Homo sapiens; identical to SEQ ID NO: 1218
  SIMILAR (121)..(603): 981254mologous to Homo sapiens nuclear pore complex interacting protein NPIP,accession number AF132984,Smith-Waterman Score=820.

SEQ ID NO: 23830 - DNA, 310 bp, Homo sapiens
  SIMILAR (140)..(310): 911254mologous to Homo sapiens pM5 (3' partial),accession number U91318,Smith-Waterman Score=261.
ttcatgcctgtcacctctgtcaaacccagtcgaatgttctgtgactggtccctgctgtgctacaaggattggttttatgccagaaatccttgagattaagggagacgtaagcactcctctttccgatcagcacatggagcacccctcttggcacacagcaagcaccacagtgcgtgtaaccaactccaatgccaatgcggccagtcccctcatagttgctggctacaatgtgtctggctctgtccgaagtgatggggagcccatgaaaggcgtgaagtttcttctcttttcttctttagtaactaaagag

SEQ ID NO: 23831 - DNA, 4713 bp, Homo sapiens; identical to SEQ ID NO: 20445
  SIMILAR (808)..(1581): 941254mologous to Homo sapiens Polycystic kidney disease 1 polypeptide (polycystin),accession number R87539,Smith-Waterman Score=1288.

SEQ ID NO: 23832 - DNA, 3723 bp, Homo sapiens
  SIMILAR (3207)..(4): 981254mologous to Homo sapiens pm5 protein,accession number X57398,Smith-Waterman Score=5455.
tcaagtccgccttgtcttctgtttcttggcttgtctctttgcatcttctgggccgctattgtcagaggctgcctggccgagcgcgcggactccctgtagccggcttgtcaactgcagcagcaaaggaatgagcttgtcatggttgtaaccggccagcagaaccagcagcgtcaatggcagggcaatgtaggatccttgtgcgatgtcctgttcaggcagcttcctcgtgggattaaaaatcaaggtggtgtgtttatggtagcccactgcggtgaaagaaacttgaggcaagatgtagtcatactgggatctggggagtgtggagtccagaagcacaacatagttctcgccgtctctgagcagtggggggaaatggaagaacagggactggccaagggaaactgtctggattggattgtcgaggttttcgcttttgtaaagcttgacccataatgtaggaaggtattcagaggaagtgatcacatttccacttaaatcaaattgattaatctgccggaaaactatgatgtttacatcatcgatgtcattattcccaacctcaatcaccctatggtgggggagcgcccgctcaatgtggtcgttgccttctgccttgagctgaacgtggtacacacatcccggcagcaatccacgtaatctgaacttgccctcttcgtctgtcacggtgtcttctccgtaaatgctgcagtcgttctggcccaccgcttccatggcaaccccttgttcgggctctccgtttaaggaagacactgtgccatagcaactgtaagcggttcggtaccccgtgatggtgatcttcaggttctggccttcctgcacctcgatcatctgtgaggatggctcaaaccggaactccttcatcatgggtttgaagtaatactggccagggctcaggtttgagaatgtcagaatgccgttgtcctgggtcaagaggttggaacgaaacaggccaccgctcagggataagaggactcccgggaggggctggtcatcctcagcttttatctcaaagcttacgcctgccagggcataggccttgaagtctccgatggttccttccaccgcagtcagaacatagccctccttctgtgaggtcaccgtgtactccaggtcactgtgcagggggccaacactgtaggcacctttgtcatcagtaaagactgtgatcagcggtgaacttgcccccttttcactgatgacaatctcgactccttccaactcggggtggatctggccttctaaaaacaggcctgccttcccatggatctcgatcagcttccctgggcagctttctccactgacaacggcttccattgaagggggataaaagagcagctctttagatgacggtgtaacagtgattttctctccagaccgcgcccagtaagagaaatcatacgagaaggggccttgtaactcatctaccatctcctgcacgggaggcttggtcattctttcttcgccttcctcattgccgtttttctccctctcctgcctgcgggcctcgatctcagccagctgctgctccctccgcagctcctgcacagacttcagagggcctaagaccaaggcgggttcactgtcgatggaagacttgatagtcacagtgacatccatcattttgtcggtggtgatagttccaaggacatggtggcgaatggctgtcaatgtaaagatactaggtgaagacgtgtcatagatatagaacgcttgctcaaaccggtggcaggagcgaggggtcactttgtacacaccaggcttggacaggcagaatcggttgactcctttgaagaggctataaatccccacattctcacgcccatttccatcctgataaaattccagagtgatggcgtgagacagggaacatctcagcatgtagcccgtctgcctgaactcaactgcagacatgtcatcctccagcacttccacctccaggctcttgttcttccagcaccaatcctcatgcatgatgcttattttgtattttccagggagcacgttgtcaaaggtgaaagtcatggcgttgaccttgccggagagctggaggctccgcttctcaccctggcggctcagggactgtagagtcaccagcaagtcaccacaggtgttcaagcaagagactttcccagaaactgatgccaagaactgtacaaaggccacatccatcatgggcctgttggtcacagtaagaggaaatgtctggggtttcaacgtcagccctgctctggtttctgcctcaggaaccatcacctgcactttgtaagtccctggttttgctttaaaacaaaatgatccatgagcatctgtctccacggtgaccaaagacttgtccttgtcttgagatgacaggacaactttgtatttattcatctgcttgacggtgtcggggaagcgaatgattgatatctgaccacagacactgaaccctgttgcaataatgtcagccagctgaggtgtgttcggtgcaattttgatggtgaccgtttcaaagtagaggtgctctttctgagcatggatggtgtatgtccctgtggttatgttctcaaggcggaatgagccatcagcttttgttttaactttgatttggttattcagggtgactactgcttctggaacaccatctccttcgggtccgttcaagaccctcccggtgacggagaatcccatgacgtggaacacgggctcgattttcaagctgtcatgctccactgtgaagtcaagtctggaaggcgccacatcaaaggtaatcctctcccctcgatagaacggaatcacagtgtagcccccacttggcaaggaatagaaagagaacgagccatcttctctggagaccgtgtagcacaaatacaccagactctcgtcttggggctggaacccaggcactggtgagacattgcagcccaggacatcctctttagttactaaagaagaaaagagaagaaacttcacccctttcatgggctccccatcacttcggacagagccagacacattgtagccagcaactatgaggggactggccgcattggcattggagttggttacacgcactgtggtgcttgcctctttcaacgcccaggttggatgagttgcgaggatttcataatctccaggcagaactttaaaaaatgcaaactttccgccagcgctgtgtagctgtggcctggatctttgcttcggtcccagtgtttctcagagacacctgaactcccgcaggacccaggggctgccatttgctgaggaccttgccattcacagagaacccagtgaagacaaagttgatgtccccaccctttgtgcagatgtcactgactccatccacatggagctccacggtcgtcggctcaaaactccaccctaggggaggctcaatcttcagaatgaaatcccccttatcatacaaagggatcataaagtaaccattattaggggcacagtctgtctggtatttcaaagtcccatgcttggtgtacagctttatctcgatgagagagtagttgatctccacgtccgacttgacgaagccaccgcagcccaccacgatgtcctccgagccgtgcgccggccccacgccgctcagcagcagcaccaccgcggcggtgaccaccgcgggccccagcggccccgcgccctggcccaccagcatggcccgacctcccccagctagacccaccgccggcagccgggtcccgcccctca

SEQ ID NO: 23833 - DNA, 1163 bp, Homo sapiens
  SIMILAR (350)..(1117): 721254mologous to Homo sapiens nuclear pore complex interacting protein NPIP,accession number AF132984,Smith-Waterman Score=959.
aggaattcggcacgagccatcgtcatcgtgggactgactttggtggaagtccttggttacttatcattactgtgtttctgagaagttataaatttgccatctccctctgcacaacttacctttgggttatcaatactctggctgaccatcgtcatcgtgggactgactttggtggaagtccttggttacttatcattactgtgtttctgagaagttataaatttgccatctccctctgcacaacttacctttgtgstgtctttcctgaagactatcttcccgtctcaaaatggacatgatggatccacggatgtacagcagagagccaggaggtccaactgccgtagacaggaaggaattaaaattgtcctgggaagacatctttactttatggagacaggtggaaaccaaagttcgagctaaaatccgtaagatgaaggtgacaacaaaaggccacccgccttaccaaaataaaggaaagaaggaaaaccgcccaagaccattggaggaaactaagcatgaaagaacgtgagcacagagaagaggagaggcaggtgtcagaggcagaggaaaatgggaaattggatatgaaagaaatacacacctacatggaaatgtttcaacgtgcgcaagcgttgcggccggcgggcagaggacttactacagatgcaaaatcaccccttctgcaagaaagcctctttgcaaccgggtcagaatggcggcagcggagcatcgtcattcttcaggattgccctactggccctacctcacagctgaaactttaaaaaacaggatgggccaccagccacctcctccaactcaacaacattctataattgataactccctgagcctcaagacacctcccgagtgtctgctcactccccttccaccctcagctctaccctcagcggatgataatctcaagacacctgcggagtgtctgctctatccccttccaccctcagcggatgataatctcaagacacctcccgagtgtctgctcactccccttccaccctcagctccaccctcagcggatgataatctcaagacacctcccaagtgtgtctgctcactccccttccaccctcagcggatgataatctcaagaaactaaggaagaataaataaataatataaaaataaaatgaatactgcag

SEQ ID NO: 23834 - DNA, 1149 bp, Homo sapiens
  SIMILAR (1)..(918): 1001254mologous to Homo sapiens AmMaid G protein coupled receptor amino acid sequence,accession number Y30313,Smith-Waterman Score=1630.
atgagtcagcaaaacaccagtggggactgcctgtttgacggtgtcaacgagctgatgaaaaccctacagtttgcagtccacatccccaccttcgtcctgggcctgctcctcaacctgctggccatccatggcttcagcaccttccttaagaacaggtggcccgattatgctgccacctccatctacatgatcaacctggcagtctttgacctgctgctggtgctctccctcccattcaagatggtcctgtcccaggtacagtcccccttcccgtccctgtgcaccctggtggagtgcctttacttcgtcagcatgtacggaagcgtcttcaccatctgcttcatcagcatggaccggttcttggccatccgttacccgctactggtgagccacctccggtcccccaggaagatctttgggatctgctgcaccatctgggtcctggtgtggaccggaagcatccctatctacagtttccatgggaaagtggaaaaatacatgtgcttccacaacatgtctgatgatacctggagcgccaaggtcttcttcccgctggaggtgtttggcttcctccttcccatgggcatcatgggcttctgctgctccaggagcatccacatcctgctgggccgccgagaccacacccaggactgggtgcagcagaaagcctgcatctacagcatcgcagccagcctggctgtcttcgtggtctccttcctcccagtccacctggggttcttcctgcagttcctggtgagaaacagctttatcgtagagtgcagagccaagcagagcatcagcttcttcttgcaattgtccatgtgtttctccaacgtcaactgctgcctggatgttttctgctactactttgtcatcaaagaattccgcatgaacatcagggcccaccggccttccagggctacagaagaagtttccaaaaatctggttgccatgaaagaaattctgtatggcacaaatgaaaaagagcctcagacagaagcagtagctcaacttgctcaagaactctataatagtgggctccttagcaccctggtagctgatttacagctcattgactttgaggccagcttggggctccacggcctggagcaggcagtggacttggcactgcccatcgcacaagcccag

SEQ ID NO: 23835 - DNA, 2492 bp, Homo sapiens
  SIMILAR (132)..(1163): 741254mologous to Homo sapiens MO25 protein,accession number AF113536,Smith-Waterman Score=1177.
tttcgtggggagcggcgcggcctgggagacacagagccttcaggcgccggggcgggggcacaggcggaagacaacggaagacagccccgtagcacaggcggagtgcagcggaggcccctgccgctgccgtcatgccgttcccgtttgggaagtctcacaaatctccagcagacattgtgaagaatctgaaggagagcatggctgttctggaaaagcaagacatttctgataaaaaagcagaaaaggctacagaagaagtttccaaaaatctggttgccatgaaagaaattctgtatggcacaaatgaaaaagatcctcagacagaagcaggagctcaacttgctcaagaactctataatagtgggctccttatcaccctggtagctgatttacagctcattgactttgagggcaaaaaagacgtggctcaaattttcaacaatattctcagaagacaaattggtaccgagaactcctactgttgaatacatctgcacccaaacagaatatttttgttcatgttattgaaagggtatgaatctcccagaaatagctctaaatttgtggaataatgttaagagaatgcatcagacatgaaccacttggcaaaatcattttgtggtcggaacagttttatgatttcttcagatatgtcgaaatgtcaacatttgacatagcttcagatgccatttgccacattcaagggtttacttacaagacataaattgctcagtgcagaatttttggaacagcattatgatagatttttcagtgaatatgagaagttacttcattcagaaaattatgtgacaaaaagacagtcactgaagcttctcggtgaactactactagatagacacaacttcacaattatgacaaaatacatcagtaaacctgtggaacctcaaatttaatgatgaacctgctgcgagacaaaagtcgcaacatccagtttgaggcctttcacgtttttaaggcagtttgtagccaatcctaacaagacgcagcccatcctagacatcctcctcaagaaccaggccaaactcatagagttcctcagcaagtttcagaacgacaggacggaggatgagcagtttaacgacgagaagacctatttagttaaacagatcagggatttgaagagaccagctcagcaagaagcttaatctccaataaacatctatgttaaatccaaattcagcatttgctgttagctattcagcatcagggcactctttatttgatttcatggagggaacattactgctaatctgctgttaagtgaacggtttttcattttacccttttgtttttcagtccaggttggagatcgtagctgctgctgcttgcacactagggcacatgtgggctttgtcttgatctttgtgtcatttcagaattcaaagactgtgctacgggagttctgaacatggctgggttcatgaaggcaaatgtatggatgagagtgtggtttaggaaagagggcactgatatcagattagacctatgtgtttgcacccatctttgttggcgatctgattgcagtgcggtaagtgcacacctggcatccctgcgtcagatcgtgcaccttcaggtcgcgcaccttcgctgaaggaagatgacgcatagctttatctgaaatcagaggggagctatccaaaatgggagtttgggggcagctaatgttgacatgcgaataaattgatactgaaacttatccacttcttaaaagtgtttagaagcctcataagatcataaggaaaatgtatatatgcttttcacagctttctagaattttttgacatttgattttcttgagacttgtaaacctggatatgttgaagggtatttgttaattttaccttttccaaagatacctttaaaacagtagagcctagcaatgacacccttgcattttcatttcaacactgccttcaagggtttccttttgtatataattcttagaatgctcatttcttttaaatggtttaatttgtacagcagagggaatgttattgtaggtaggtatgtaactattaacctaatactgagttttttgcaaaaaacaatggaatgctcatatgtaattggaaatacttcagatcacatgaaaatgctgatttaacatttaagtatcacagcattaaaagaaaaagaaagtagaccagtcctttgtattcagttacctaatggggtgccatcaataaggctgcggatacagcccggggagctcagtcaggccacaccttcctggcatcctattgggccttatttcatttttaaatgagttaatgaatctgccagatctgtgaatgatagaggattatgctaaattaatgctgattctttgtgtgtgtgggaaatctctgtagagcaccctttcttttcttaggactaaggaacccagtacaataggttgtggaactgaataatttaaaactttggcttctcttaggaaaagacgacttcctagtcataggtgtcctatgggg

SEQ ID NO: 23836 - DNA, 420 bp, Homo sapiens
  SIMILAR (3)..(140): 951254mologous to Homo sapiens basic-helix-loop-helix protein, bHLH,accession number AJ249545,Smith-Waterman Score=225.
  misc_feature (1)...(420): n = a,t,c or g
ggggtaaaggctactttgacgcacacgctcttgccatggacttcatgagcataggattccgagagtgcctaacagaagttgcgcggtacctgagctccgtggaaggcctggactcctcggatccgctgcggagtcagcttaaaacctctgcaccctgaaggtagccatacagatgccgacagatccacaaaggaacaataaagctatttgagacacannnnnnnnnnnnnnnnnnnnnnggggggggccctttaaaaaaaacaaatttaaaaacccgggggggggaaataaaaattttttttaaggggccccaaaaattaaattcgggggccgggttttaaaaannnnnnnnnnnnaaaaaccggggggtaccccaaaaaaaagcgccgtgtgggaagnnnnngnnnnnnngnnnnnnnt

SEQ ID NO: 23837 - DNA, 2539 bp, Homo sapiens
  SIMILAR (779)..(1015): 411254mologous to Homo sapiens basic-helix-loop-helix protein, bHLH,accession number AJ249545,Smith-Waterman Score=121.
tcggcgtccgagcttccggccgggctgtgccccgcgcggtcttcgccgggatgaagcgcccctgcgaggagacgacctccgagagcgacatggacgagaccatcgacgtggggagcgagaacaattactcggggcaaagtactagctcctgtgattagattgaattctccaacaacaacatctcagattatggcaagaaagaaaaggagagggattatagagaaaaggccgtcgggatcggataaataacagtttatctgagttgagaagacttgtgccaactgcttttgaaaaacaaggatctgcaaagttagaaaaagctgaaatattgcaaatgacagtggatcatttgaagatgcttcaggcaacagggggtaaaggctactttgaccgcacacgctcttgccatggacttcatgagcataggattcccgagagtgcctaacagaagctgcgcggtacctgagctccgtggaaggcctggactcctcggatccgctgcgggtgcggcttgtgtctcatctcagcacttgcgccacccagcgggaggcggcggccatgacatcctccatggcccaccaccatcatccgctccacccgcatcactgggccgccgccttccaccacctgcccgcagccctgctccagcccaacggcctccatgcctcagagtcaaccccttgtcgcctctccacaacttcagaagtgcctcctgcccacggctctgctctcctcacggccacgtttgcccatgcggattcagccctccgaatgccattccacgggcagcgtcgccccctgcgtgccacttctctccacctctctcttgtccctctctgccaccgtccaacgccgcagccgcaacagccaccgcggctgcacacagcttccctctgtccttcgcgggggcattccccatgcttcccccaaacgcagcagcagcagtggccgcggccacagccatcagcccgcccttgtcagtatcagccacgtccagtcctcagcagaccagcagtggaacaaacaataaaccttaccgaccctgggggacagaagttggagctttttaaatttttcttgaacttcttgcaatagtaactgaatgtcctccatttcagagtcagcttaaaacctctgcaccctgaaggtagccatacagatgccgacagatccccaaaggaacaatacccctatttgagacacaaacctcacgagtggaaatgtggtattctcttttttttctctcccttttttgtttggttcaaggcagctcggtaactgacatcagcaacttttgaaaacttcacacttgttaccatttagaagtttcctggaaaatatatggaccgtaccatccagcagtgcatcagtatgtctgaattggggaagtaaaatgccctgactgaattctcttgagactagatgggacatacatatatagagagagagtgagagagtcgtgtttcgtaagtgcctgagcttaggaagttttcttctggatatataacattgcacaagggaagacgagtgtggaggataggttaagaaaggaaagggacagaagtcttgcaataggctgcagacattttaataccatgccagagaagagtattctgctgaaaccaacaggttttactggtcaaaatgactgctgaaaataattttcaagttgaaagatctagttttatcttagtttgccttctttgtacagacatgccaagaggtgacatttagcagtgcattggtataagcaattatttcatcagttctcagattaacaagcatttctgctctgcctgcaggcccccaggcacttttttttttggatggctcaaaatatggtgctgctttatataaaccttacatttatatagtgcacctatgagcagttgcctaccatgtgtccaccagaggctatttaattcatgccaacttgaaaactctccagtttgtaggagtttggtttaatttattcagtttcattaggactatttttatatatttatcctcttcattttctcctaatgatgcaacatctattcttgtcaccctttgggagaagttacatttctggaggtgatgaagcaaggagggagcactaggaagagaaaagctacaatttttaaagctctttgtcaagttagtgattgcatttgatcccaaaacaagatgaatgtatgcaatgggatgtacataagttatttttgcccatgcctaaactagtgctatgtaatggggttgtggttttgtttttttcgatttcgtttaatgacaaaataatctcttaatatgctgaaatcaagcacgtgagagtttttgtttaaaagataagagacacagcatgtattatgcacttcatttctctactgtgtggagaaagcaataaacattatgagaatgttaaacgttatgcaaaattatacttttaaatatttgttttgaaattactgtacctagtcttttttgcattactttgtaacctttttctatgcaagagtctttacataccactaattaaatgaagtcctttttgactatt

SEQ ID NO: 23838 - DNA, 1419 bp, Homo sapiens
  SIMILAR (800)..(1087): 351254mologous to gallid herpesvirus 1 ICP4,accession number AF192997,Smith-Waterman Score=83.
atgcccggcaacttgaccaggaaggaatcctcctcccccctcacagacaggcactgccacacatcttcccagttctcacataggttcaatgccatctctccctttccacctgctgaacttggctgtgaccatgtggcctcagctgctgcggatcccctgggcgtgccaggggtagcaactcagtgggcagggggcctgtccgcagctctggcggctccccgcaggccccactcatgccggcggttgcaggtactgggtgctcttggcattctcaagagcgcaggaagagtcaattttaggtgttttgggccactaagtatccgcggcaagccgaagaccccgctctgggagcaagagaagccgaagctgcagacagggtcagcgggatcccagcagaagagggtgatgctgaagccttcccggggcgcggaccgagtgctagggcgaggtagtcagcgacccgctgagaccgaccgagagacgacggatctgaggcagagaaagaggatgaaggaaggaaaagagagaacactaagagcggcccgcggagagacgcggagaagcaacgggaatctagcccggcagactgtacccgagggctgccgaagtcagacccaagcactacaggttgtgcggaacgcgaggacccctccctgtatccccaacctggaccgacccccggaagcctgctcctccgggtctacaggtggcatgatgcccttgcgagtcgcccccagtcctgtggcgtctggcgaatcctcgcacctgagcagcggacggggcgatagggggttggtgcgctgcaaagtcgaggagctgcgtttccagcctgtcgccttccccgagttcatcccgccacccaccagcccccgtgccgactccgagagcggagactggtgttgcacagtcctagctaatccctcgaaaacaggaagcggaggctgggagcagcggaagacagaatgccgcccaaggccggacccagaacccgcagcaaagaggatctgcaaccttgtcctcctcactgctggccaagagtccacgccgcggaggtcgcagctgactaggagtcccgcggccgagcggcgcacagaggagcaaggagaggaccggaagaaccgtgctcttggctgcaatttgtttccaagagtgccaagacatgcccgagactctcagcgcgctctcagagcatcaactcaagcaccgaaaaaatctacctttgccttcccggggattcattctggggctgtttgctccaagaggcggatttgtggggtccagggcgaaccctttcctcttccctttgccagtcagtgctcctcctgcctaaaaattttaccctcaccaggaccaacgaaagagctgacctcttacctcctccacagcggctgtggctttctagacaagctgcgtgtctga

SEQ ID NO: 23839 - DNA, 350 bp, Homo sapiens
  SIMILAR (3)..(62): 1001254mologous to Homo sapiens Human secreted protein, SEQ ID NO: 7970,accession number G03889,Smith-Waterman Score=93.
ccaagaagctggagaaactaaaaaagcggactcagagggccattgccgagctgatccgtgaaaggctgaaaggccaggaagacagcctagcctctgcagtggatgctgccaccgaacaaaagacctgtgactccgactgaggcatgccctgccccaccactcgcccatcaagtctgaaacccccatggatgaggtcagctccttgtctgctgggtggcccctgccattctgaatggaggcagaaccagcaacaactctgggcgtgcctgtgtctgcacatgtggatgtacatatgtctgtatatatgtatatattttgaactttctaaaaaaaaatctggaaatagaaac

SEQ ID NO: 23840 - DNA, 1157 bp, Homo sapiens
  SIMILAR (405)..(596): 981254mologous to Homo sapiens Human secreted protein, SEQ ID NO: 7970,accession number G03889,Smith-Waterman Score=328.
tcagctggtggaattccgcgggcaagatggaggcgactacggctggtgtgggccggctataggaagaggcgttgcggcgaaaggaacggctgaaggccctacgggagaaaaccgggcgcaaggtgagaagtgtggagtgagggtcgcagttgaggcgtccagcgttcggggtccgggtcgcgcttgaggagagcaaagggctaataaggaaagacagctgccgagggcgcgcatgcgcgggcgctaacgcatgcgcgagaagacggcgccctcccacgatgtctggggctgcttggcgtgggactcctctggcgctggtgcggtcgtcgcgcacgcgcggtgtgtgggcttggcagtggtcagcgacccgcagtccatctgactcctgcttcccgggtgttgctcgtgacaaggaagatggggagccaaagaccaagcatctcagagaagaggaggaagaaggcgagaagcacagggaacttaggctgcggaactatgtcccggaggatgaggacctgaagaagaggagggtgccccaggccaaaccggttgcagtggaggagaaagtgaaggagcagctggaggccgccaagcccagagcccgtcatcgaggaggtggacctggccaacctcgctcctcggaagcctgactgggacctcaagagagatgtggccaagaagctggagaaactaaaaaagcggactcagagggccattggccgacttgatccgtgaaaggctgaaaggccaggaagacagcctagcctctgcaagtggatgctgccaccgaacaaaaggacctgtgactccgactgaaggcatgccctgcccccaccacttcgcccatcaggccttgtcctgcaggggaatggtcttgggccagggatgggggctaggcttgccatcacctccaagtttggcttctgagcagagactccctgcccatcaacgtctgaaacccccatgaatgaggtaaggtcctttgtttggtgggtggcccctgccattttgaatggaggcagaaccagcaacaactctgggcgtgcctggtgtctgcacatgtggatgtacatatgtctgtatatatgtatatatttttgaactttctaaaaaaaaaatctggaaatagaaacaagtaaacccctgtgtgtggcaaa

SEQ ID NO: 23841 - DNA, 585 bp, Homo sapiens
  SIMILAR (60)..(425): 831254mologous to Homo sapiens RPOM_HUMAN,accession number AC004449,Smith-Waterman Score=494.
  misc_feature (1)...(585): n = a,t,c or g
aagggaccgtcggtggcgtctgcggccccaggaggagctcatccgccagcccccaggagcaagaccaagaccgcaggaaggactggggccacgtggagctgctggaggtgctccaggcgcgggcactcttcaccgccgtgcccctgtctgaggaggatcgggccactgttctgaaggccgtgcacaaggtgaagcccaccttcagcctcccgctgcagctgccgcccccggtcaacacctccaagctgctcagggacgtgtatgccaaggatgggcgtgtgtcctacccgaagctgcacctgcccctgaagaccctgcagtgcctctttgagaagcagctccacgtggagctggccagcaggatgtgcgtggtgtccgtggagaagcccacgttgccaagcaaggaggtcacgcacgcgcggaaganccctgaagaccctgcgggaccaatgggagaaagcactgtgccgggagctacgggagaccaagaaccgcctagagcgccaggtgtacgagggccggttctcactgtaccccttcctgtgcctgctggacgagtgcgaggtggtgcggatgctcctgcag

SEQ ID NO: 23842 - DNA, 3835 bp, Homo sapiens
  SIMILAR (2562)..(3653): 691254mologous to Homo sapiens RPOM_HUMAN,accession number AC004449,Smith-Waterman Score=1116.
  misc_feature (1)...(3835): n = a,t,c or g
atgcgcaggcgcgggccggtggggtggcctggagcggcgtgcgtaatgtcggcactttgctggggccgcggagcggcggggctcaaacgagccctacggccttgcggccgcccgggactccccggcaaagaagggaccgccggtggcgtctgcggccccaggaggagctcgtccgccagcccccaggagcaagaccaagaccgcaggaaggactggggccacgtggagctgctggaggtgctccaggcgcgggtgcggcagctgcaggctgagagcgtgtcggaggtggtggtgaacagggtggatgtggcgcggctcccagaatgtggcagtggagatggtagcctccagccacccaggaaggtccagatgggggccaaggatgccaccccggtgccctgtggccgctgggcaaagatactggagaaggataagcggacccagcagatgcgtatgcagcggttgaaggcgaagctgcagatgccattccagagcggggagttcaaggcgctgaccaggcgcctgcaggtggagccccggctcctgagcaagcagaatgggtgggtgcctggaggactgcacgcgccaggcccccgagagcccctgggaggagcagctggcccggctgctgcaggaggcccctgggaagctgagcctcgatgtggagcaggccccgtcggggcagcactcgcaggcccagctctcaggtcagcagcagaggctcctggccttcttcaagtgctgcctgctcactgaccagctgcccctcgcccaccacctgctggtcgtccaccacggccagcggcagaagcggaagctgctcacgctggacatgtacaacgccgtgatgcttggctgggcgcggcagggtgccttcaaggagctggtatatgtgttattcatggtgaaggatgccggcttgactccggacctgctgtcctatgcggctgccctccagtgcatggggaggcaggaccaggacgccgggaccatcgaaaggtgtctggaacagatgagccaggaggggctgaagctgcaggcactcttcaccgccgttctgctgtctgaggaggatcgggccactgttctgaaggccgtgcacaaggtgaagcccaccttcagcctcccgccgcagctgccgcccccggtcaacacctccaagctgctcagggacgtgtatgccaaggatgggcgtgtgtcctacccgaagctgcacctgcccttgaagaccctgcagtgcctctttgagaagcagctccacatggagctggccagcagggtgtgcgtggtgtccgtggagaagcccacgttgccaagcaaggaggtcaagcacgcgcggaagaccctgaagaccctgcgggaccaatgggagaaagcactgtgccgggcgctgcgggagaccaagaaccgcctagagcgcgaggtgtacgagggccggttctcactttaccccttcctgtgcctgctggacgagcgcgaggtggtgcggatgctcctgcaggtcctgcaggcgctgcccgcccaaggtgagtccttcaccaccctggcccgggagctgagtgcgcgcactttcagccggcacgtggtgcagaggcagcgggtcagtggccaggtgcaggcgctgcagaaccactacaggaagtacctctgcttgctggcctccgacgccgaggtgcccgagccctgcctgccgcggcagtactgggaggagctgggggcgcccgaggccctgcgggagcagccctggcccctgccagtgcagatggagctgggcaagctgctggcggagatgctggtgcaggctacgcagatgccatgcagcctggacaagccgcatcgttcctctcggcttgtccccgtgctctaccacgtgtattccttccgcaacgtccagcagatcggcatcctgaagccgcacccggcctacgtgcagctgctggagaaggccgcggagcccacgctgaccttcgaggcggtggatgtacccatgctttgccccccgctgccctggacatcgccgcactctggtgctttcctggtcaggccccaccaagctgatgtgcacggtggaaggcgccacgcaggcaccaggagttgctggaaacctgcccgcccaccgcgttgcatggcgcactggacgccctcacccaactgggcaactgcgcctggcgcgtcaacgggcgcgtgctggacctggtgctgcagctctttcaggcccaggggctgcccccagctaggcgtgccggccccgccctccgaggcgccccagccgcccgaggcccacctgccgcacagcgccgcgcccgcccgcaaggccgagctgcgccgtgagctggcgcactgccagaaggtggcccgggagatgcacagcctgcgggcggaggcgctgtaccgcctctcgctggcgcagcacctgcgggaccgcgtcttctggctgccgcacaacatggacttccgcggccgcacctacccctgcccgccgcacttcaaccacctgggcagcgacgtggcgcgggccctgctggagttcgcccagggccgcccgctcggcccgcacggccctgnattggctcaagatccacctggtcaatctcacggagttgaagaagcgggagccgctgcggaagcgcctggcctttgcggaggaggtgatggatgacatcctggactccgcggaccaaacccttgacgggccgaaagtggtgggatgggcgcgggaggaaccctggcagacgctggcctgctgtatggaggtggcgaacgctgtgcgcgcctccgaccctgccgcctatgtctcccacctccccgttccatcaggaagctacttgcaacggcctgcagcattatgctgctctgggccgcgacagcgtgggcgccgcctcccgtcaacctggagccctcggatgtgccgcaaggacgtgtacagcggcgtggccgcgcaggtggaggtgttccgtaggcaggacgcccagcggggcatgcgggtggcacaggtgctggaaggtttcatcacccgcaaggtggtgaagcagacggtgatgacggtggtgtacggggtcacgcgctatggcgggcgcctgcagattgagaagcgcctccgggagctgagcgactttccccagaagttcgtgtgggaggcctctcactatctcgtacgccaggtcttcaagagtctacaggagatgttctcggggaccccgggccatccagcactggctgaccgagagtgcccgcctcatctcccacatgggctctgtggtggagtgggtcacacccctgggcgtccccgtcatccagccctatcgcctgggactccaaggtcaagcaaatagggaggtgggaattcagagcatcaccttacacccacaacggagacatcagccgaaagcccaacacacgtaagcaggaaggaacggctttcccgcccaattttcatccactcgctggactcctcccacatgatgctcaccgccctgcactgctacaggagtcctccgctctgccacaggaagggcctgaccttcgtctctgtgcacgactgttactggactcacgcagctgatgtctccgtcatgaaccaggtgtgccgggagcagtttgtccgcttgcacagcgagcccatcctgcaggacctgtccagattcctggtcaagctggttctgctctgagccccagaagatcttggaggccagccagctgaaggagacactgcaggcggtgcccaagccaggggccttcgacctggagcaggtgaagcgttccacctacttcttcagctgacaccccgtgagccttgtcagggggtaaataaagctcttttgccacccaaaaaaaa

SEQ ID NO: 23843 - DNA, 805 bp, Homo sapiens
  SIMILAR (191)..(481): 851254mologous to Homo sapiens Lsm4 protein,accession number AJ238096,Smith-Waterman Score=415.
acggctgttattaaaatgttttattcagacagctttattgaggtataatcgacttacaataaatgtcacatgtctaaagtgtacaatgtgaaaaatttgacatatgtatacgtccatgaaaccatcatcacagccaagatcatggatatctacaccacaccccaaagcttgctcctccctgtcctttccgctctccctggacaactggatgaacattaacctgcgagaagtcatctgcacgtccagggacggggacaagttctggcggatgcccgagtgctacatccgcggcagcaccatcaagtacctgcgcatccccgacgagatcatcgacatggtcaaggaggaggtggtggccaagccccgcggccgcggaggcctgcagcagcagaagcagcagaaaggccgcggcatgggcggcgctggccgagttgggtctcccctctccagtggacgtacctggggcgggaagacagccacacgttgcatccctccttcttggggttgcccttgcagcgctgcctcggaggctcccaaaccttcccgggcccccttcttgtcccttggccatgaaccgaggcccaggcagaggagccccgagacatgggactcagccctcgtctcagtgcgcgtcatggcggtcgtcagggcacatcaagtcacctccgcaagccccagtttcccctatgagagggaatggtggtgcccatctgtccaggccgctggcaactacacttggaaccttgcgtggctctatccagagccaaggtcggccgcccccaccggagatgatgaattggcataa

SEQ ID NO: 23844 - DNA, 1261 bp, Homo sapiens
  SIMILAR (325)..(612): 561254mologous to Homo sapiens Lsm4 protein,accession number AJ238096,Smith-Waterman Score=225.
catcccaggctggagggagccccagtcagccactcttgagccaggcccacgggcagaggataggagccagtcttccttgtgagtgcacaatgggggctgcgcctaccacaacccacccttgctcctgggtgaaggattgcctggggtcaggacagatcctgcctgcagggtggaccctttgccacgtatgtcccgggactgatactgtgcagcttgcaggggtggtacggggtgcaggctgggcaggatctgcagggcctcccgcgctcccagggctgggccagacggcccggtggtaagttaataacctgctccccttctccgcaggacggggacaagttctggcggatgcccgagtgctacatccgcggcagcaccatcaagtacctgcgcatccccgacgagatcatcgacatggtcaaggaggaaggtggtggccaagggccgctggccgcgaagggccttgccagcaagcagaaagccagcagaaagtgtccgcggcatgggcggcgcgtggccgatgtgtgtttggtggccggggccgagggatgggatcaccaatcacaggaccgatgccatccagataagaagcctggcagacaggcggggcaaacagtgagcgcccacccagaccggctgctgcgcccccttcttgccagggtgggcgatttccgctccacagtctcggaacggaatctgcttcagaaaggaagaggcaggccgcccaggggggaacccccctttcgtgttttggtgaccccttccctttttaaggtgaaagccccttttttcttgcctaaaaaccggcaaattctccgggttagaaaatgtttactttgttgtttttttggtttttgtgaaacggggccgtcccaaaagcttggctggaatcccctagaaagagtcttgtgtttgaaggcaatcttttcaagccccttcgcctctggtttctcaagggcaagccattttcccaggcggggtttgtttttgcattttcttgggagcctctccgaagcaagcaaccagacggggagatttttaattttaaagctgtttcatgctggggactgacagcctgcagggtttccttgggcgcggcccaaaaatttgccttcaaaacaaacccggggacgtttggaaaggcctttcgaaaccgtggcagggggatgcctcggggccctggcccttcgcttccttctcttgtgttatggaagctaaaaacaaataaaactacacactgcaaaaaaaaaaaaaaaaaaag

SEQ ID NO: 23845 - DNA, 531 bp, Homo sapiens
  SIMILAR (1)..(87): 1001254mologous to Macaca fascicularis hypothetical protein,accession number AB049859,Smith-Waterman Score=151.
  misc_feature (1)...(531): n = a,t,c or g
cctgtgtccctggagtgttacacagtgcctcctgaagacaacctggccctccttcagctctacttccggaccctggttactggtgcgtccgcccacgttggtgccccgtgctctatgctgtggcnntgtggnctcatgtcaatagcttcatcttctctcagagacctaggatagttgatatagatggaaagatgggtacgttgtcctgtatccagcctttcaacagatgtctggccagacgaagaacattgtgtcctaatggtaggcaggagaccaaggagcagaaggcttgccttcctgggagcaggttgtttgagctgttttagagcagtgagccctaccattacatcctgatatctggggcttctgaaggtctgtgctgggagtgaagagtggcttagctatttacccgctctttggggacagggcaaactaaatgcatcccttcttacctaactcccaacccctgccctgggctgaggcatatgaatgctatagttgtgcattaaaataaatgttttttatctcctg

SEQ ID NO: 23846 - DNA, 343 bp, Homo sapiens
  SIMILAR (197)..(340): 1001254mologous to Homo sapiens Fragment of human secreted protein encoded by gene 24,accession number Y41438,Smith-Waterman Score=244.
gcgacctggcggcatgcaagcttgtggactggccgccgttttaccaccgtctcgacttggtaaaacccctggcggtaccccactttattgggcttgtgcgcccatctcccatttcgcccgcttgcgcgtaatgccgaacaaggccgcacctgatcggccttttccaacaggtagttccctgcttttctgtctgcaggcagcgctgcagccactgccagccacccatgctgccctctatcatggtatggccttggccctgctgagccggctgctgcccggaagtgagtacctcacccatgagctgctgctgagctgtgtattccggctggagttcctcccgtaa

SEQ ID NO: 23847 - DNA, 712 bp, Homo sapiens
  SIMILAR (207)..(401): 951254mologous to Macaca fascicularis hypothetical protein,accession number AB049859,Smith-Waterman Score=327.
atggccaatttcatgctttttaatggctgcttctcagttcccagttttccccaacatctgctctgtagtctttaaccctgatccttgtgctagaaggacagatgtttgtctaggacctgatctctgccctcatgatttggtttcatgtgatcgttatccacacaccttatgtatgtatatacattcctaccctccccctcagcacgtcatttcccctgtcacagttgcctgtgtccctggagtgttacacagtgcctcctgaagacaacctggccctccttcagctctacttccggaccctggttactggtgcgctccgcccacgttggtgccccgtgctctatgctgtggctgtggctcatgtcaatagcttcatcttctctcaggacccacagagctcagtaagttacatctccatcttcagaggaaggaagggagctagcaattgagctgcctctgggccagctggggaagaggtaagtgtcaagcaaggccagtggtgggtaccagccctcggctcagtgccacctctccctgttctgcttctaggatgaggtcaaagctgcccgcaggagtatgctgcagaaaacatggctgctggcagatgagggtctccggcagcacctcctgcactataagcttcccaattccacgctcccagagggctttgagctctattctcagatgccccctctgcgtcagcactacctcc

SEQ ID NO: 23848 - DNA, 3158 bp, Homo sapiens
  SIMILAR (441)..(1706): 991254mologous to Homo sapiens Unknown (protein for MGC:858),accession number BC000246,Smith-Waterman Score=2162.
gaggagctcctcgacagcaccttctcttggtaccatggagctttgacgttccctctgatgcccagccaggaggacaaggaggatgaggacaaggatgaagaatgcccagcaggaaaagcaaaaaggaaaagccctgaagaagaaagccggcctccacctgacctggcccgacatgatgtcatcaaggggctcctggctaccagcctgctgcctcggctgcgctacgtgctggaggtgacatacccaggacctgcggtgggtccttgacatcctggctgtgctcatccgcctggcccggcattccctggaatcagccacaagggtcctggagtgccctcggctgatagagactatagttcgagagttcttgcccaccagttgggtctcctgtgggggcagggcctacccctagtctatacaaagtaccctgtgctactgccatgaaactacttcgtgtcctggcctcagctgggaggaatattgctgcccggctgttgagcagctttgatctccggagccgcctgtgccgcatcatagctgaggctccccaagaactggccttgcccccagaggaagctgagatgctgagcaccgaggccctccgtctgtgggctgtggctgcctcctatggccagggcggttacctttacagggagctctacccagtgctgatgcgggccttgcaggtggtgccgcgggagctcagcacccacccacctcaacccctgtccatgcagcggatagcctcactgctcactctcctcacccagctaaccctggcagccggcagtacccctgctgaaaccatcagtgattctgctgaggccagcctctcggccaccccttccttagtcacttggacacaggtgtctgggctccagcctcttgttgagccgtgtctaaggcagaccttgaagttgctgtccagacctgagatgtggagagccgtgggcccagtgcccgctgcctgcctgttgttcctgggagcctactaccaggcctggagccagcaaccaagctcatgcccggaggattggctccaggacatggagcgcctgtcagaggagctgctgctgccactgctgagtcagcccacactgggcagcctgtgggattcccttaggcactgctcccttctctgcaacccgctgtcctgtgtgccagcccttgaagctccccccagcctcgtgtcactgggctgctcgggaggctgcccccgtctcagtctggctggctcagcctcacccttcccattcctcactgccctcctctctcttcttaataccctggcccagatccacaaggggctgtgtggccagctggctgccatattggctgccccgggactccagaattacttcctccagtgtgtggctcctggggctgccccacacctcacacctttctctgcatgggccctgcgccatgagtaccacctgcagtacctggcactcgctctggcccagaaagcggcagcgctgcagccactgccagccacccatgctgccctctatcatggtatggccttggccctgctgagccggctgctgcccggaagtgagtacctcacccatgagctgctgctgagctgtgtattccggctggagttcctcccggaaagaacatcagggggtccagaggcagccgacttctctgaccagctgtcgttaggaagcagcagggtccctcggtgtgggcaagggacttttgctggctcaggcctgccaagacctccccagcatccgcaactgctacctgactcattgctcgccagcccgagccagtctgctggcctcccaggctctgcaccgaggggagctacagcgagtcccaaccctgctactgcccatgcctacggagccgctgctgcccaccgactggcccttcctgccactgattcgcctctaccaccgggcttcaaacaccccctcggggactctctcccacagacaccatggggcacagccatggcgggtcctgcagtgggtgctagttttggagagctggcgcccccaggctctctgggctgtgccccctgctgcccgcctggcacggctcatgtgtgtgttcctggtggacagtgagctgttccgggagtccccagtacagcatctggtgggcagccctcctcgcacagctctgtcagcctcaagtcttgccaaacctcaacctggactgcggactccgtggcctgacgtctttccctgacctctatgccaacttcctggatcattatgaggctgtctcttttggggaccacctctttggggccatggtcctcctgcccctgcagcgtcggttcagtgtcaccttgcgccttgccctctttggggaacacgtgggagccttgcgagctctgagcctgcctctgacccagttgcctgtgtccctggagtgttacacagtgcctcctgaagacaacctggccctccttcagctctacttccggaccctggttactggtgcgctccgcccacgttggtgccccgtgctctatgctgtggctgtggctcatgtcaatagcttcatcttctctcaggacccacagagctcagatgaggtcaaagctgcccgcaggagtatgctgcagaaaacatggctgctggcagatgagggtctccggcagcacctcctgcactataagcttcccaattccacgctcccagaggagctttgagctctattctcagttgccccctctgcgtcagcactacctcccagagactgacttccaacagtgcctccaaaaaatggggtatccaaagaccctaggaatagttgatatagatggaaaagatgggtacgttgtcctgtatcccagcctttcaacaagaatgtctggcccagacgaaagaacattgtgtccctaatggtaggcaggagaccaaggagcagaaggcttgccttccctgggagcaggttgtttgagctgttttagagcagtgagccctaccattacatcctgatatctggggcttctgaaggtctgtgctgggagtgaagagtggcttagctatttacccgctctttggggacagggcaaactaaatgcatcccttcttacctaactcccaacccctgccctgggctgaggcatatgaatgctatagttgtgcattaaaataaatgttttttatctacctggaaaaaaaaaaaaa

SEQ ID NO: 23849 - DNA, 821 bp, Homo sapiens
  SIMILAR (10)..(723): 831254mologous to Homo sapiens putative p150,accession number U93568,Smith-Waterman Score=1078.
atggaatcaaaaagagcccgcattgccaagacaatcctaagccaaaagaacaaagctggaggcatcacactacctgacttcaaactatactacaaggctacagtaaccaaaacagcatgctactggtaccaaaacagagatatagaccaatggaacagaacagagccctcagaaataataccacacatctacaaccatctgatctttgacaaacctgacaaaaacaagaaatggggaatggattccctatttaataaatggtgctgggaaaactggctagccatatgtagaaagctgaaactggatcccttccttacaccttatgcaaaaatcaattcaagatggattaaagacttacatgttagacctaaaaccataaaaaccctagaagaaaacctaggtaataccattcaggacataggcatgggcaaagacttcatgacgaaaacacctaaagcagtggcaacaaaagccaaaactgacaaatggcatctaattaaactaaagagcttctgcacagcaaaagaaactaccatcagagtgaactggcaacctacagaatgggagaaaatttttgcaatctacccatctgacaaagggctaataaccagaatctacaaagaactcaaacaaattcacaagaaaaaatcaaacaaccccatcaaaacggacatggatgaagctggaaaccataattctcagcaaactatcgcaaggacaaaaatccaaacaccgcatgttctcactcataagtggaaattgaacaatgagaacacatggacacaggaaggggaacatcacacactggggcctgttgtggg

SEQ ID NO: 23850 - DNA, 613 bp, Homo sapiens
  SIMILAR (4)..(612): 971254mologous to Homo sapiens protein phosphatase 2C alpha, PP2Calpha,accession number S87759,Smith-Waterman Score=1037.
ggtggagactcaagaggtttactttgtaggaacaggccagttcatttcttcacacaagatcacaaaccacgtaatccgctggagaaagaacgaattcagaatgcaggtggctctgtaatgattcagcgtgtgaatggctctctggctgtatcgagggcccttggggattttgattacaaatgtgtccatccaaaaggtcctactgagcagcttgtctcaccagagcctgaagtccatgatattgaaagatctgaagaagatgatcagttcattatccttgcatgtgatcctatctgggatgttatgggaaatgaagagctctgtgattttgtaagatccagacttgaagtcactgatgaccttgagaaagtttgcaatgaagtagtcgacacctgtttgtataagggaagtcgagacaacatgagtgtgattttgatctgttttccaaatgcacccaaagtatcgccagaagcagtgaagaaggaggcagagttggacaagtacctggaatgcagagtagaagaaatcataaagaagcagggggaaggcgtccccgacttagtccatgtgatgcgcacattagcgagtgagatcatccccagccttccacccg

SEQ ID NO: 23851 - DNA, 1686 bp, Homo sapiens
  SIMILAR (1253)..(1342): 691254mologous to Oryctolagus cuniculus protein phosphatase 2C alpha, PP2Calpha,accession number S87757,Smith-Waterman Score= 103.
tcagaatatctgctgagggcatggcccagaacatgctgaaatgtgccagttgtagccagaagggagatttttcaatgcagtgactttcatcacagatacagctttctcctggccatcagaaaaattaggcatgtctcctaatgctttccctccctccttcccccaccccacaacaggtcccagtgtgtgatgttccccttcctgtgtccaagtgttctcattgttcagttcccacctatgagtgagagtatgcggtgtttgtttttttggtcttgcgatagtttgctgagaatgatggtttccagcttcatccatgtcccataatttctggcagtaaatatcaggagcactttctttcctactcagtatctgattcaccagaaacttctgctggattttaagggcatctagaaaatggctacatcttattactcgcagtgctaccagccttatcaaatcatcatcatcttttacctgttcgctcacattcactaattctttgcctttcacttgcttctttgtgcctgttctgcaaacccccagttctggttggatccagctctctgcaaatacagcttgactacttttcccagtctccttgacagctggctgaagccctgggactgatttctggtcagtgaaatgtcggcagaaaaggtggcaactacccccgggcttgacccctaaacatctgtgaaactgtctgggtctttctcttatgatcgtgaaggaattttggtggacttcgaggttaggagtagggtgtggaggggatgtagttatagacactcgatgtggacaattgacgatgtgaagagcgactgctacccctaaacctggctgtgattgctttgccaagtggacttgaaaggtggtcattctttgctgtgtataacgggcatcctggttctcaggttgccaaatactgctgtgagcatttgttagatcacatcgccgataaccaggatttacagggtctgcaggagcaccttctttggaaaatgtaaagaatggaatcagaacaggtttccagagcctgaagtccatgacactgaaagatctgaagaagatgatcacttcattatccttgcatgtgatagtatctgggatgttatgggaaatgaagagctctgtgattttgtaagatccaggcttgaagtcactgatgaccctgagaaagtttacaatgaaatagtcgacacctgtttgcataagggaagtcaagacaacatgtgtgtgattttttctctggtttccaaatgcacccaaagtatcaccagaagcagcgaagaaggaggcagagttgggcaagtacaggcttaactccatcttgagtgaccagtgatttgctactttgtgcctctgataaagagaagctgcctccattcggaggtgcccattagggtctggacttgtcctcttcttgagacagacgatgcagttagggagagggtaagtcctgaccccaatgggaacggtgaatgcagacagcttctctaccagaggctccaagtagcaaattataacgccctttataaagcagcttctgacataaaaaacatgacctactgaggccttgtgacttgctggtctgatatccacattgggcagcgggcgggtctgtttggaatcaatgacaagttgggaagggcccaccgagccttggctggcaaaaggaagcagcat

SEQ ID NO: 23852 - DNA, 2717 bp, Homo sapiens
  SIMILAR (402)..(473): 411254mologous to Homo sapiens putative p150,accession number U93568,Smith-Waterman Score=47.
atgggcaaagacttcatgacgaaaacgccaaaagcaattgcaacaaaagccaaaattgacaaatgggatctaattaaactaaagagcttctgcacagcaaaagaaactttcatcagagtgaacaggccccagtgtgtgatgttccccttcctgtgtccatgtgttctcattgttcagttcccacctatgagtgagaatatgcggtgtttggttttttgttcttgcgatagtttactgagaatgatggtttccaatttcatccatgtccctacaaaggatatgaactcatcattttttatggctgcatagtattccatggtgtatatgtgccacattttcttaatccagtctatcattgttggacatttgggttggttccaagtctttgctattgtgaatagtgccgcaataaacatacgtgtgcatgtgtctttatagcagcatgatttatagtcctttgggtatatacccagtaatgggatggctgggtcaaatggtatttctagttctagatccctcaggaattgccacactgacttccacaatggttgaactagtttacagtcccaccaacagtgtaaaagtgttcctatttctccgcatcctctccagcacctgttgtttcctgactttttaatgattgccattctaactggtgtgagatgatatctcatagtggttttgatttgcatttctctgatggccagtgatgatgagcatttcttcatgtgttttttggctgcataaatgtcttcttttgagaagtgtctgttcatgtccttcgcccactttttgatggggttgtttgtttttttcttgtaaatttgtttgagttcattgtagattctggatattagccctttgtcagatgagtaggttgcgaaaattttctcccatgttgtaggttgcctgttcactctgatggtagtttcttttgctgtgcagaagctctttagtttaattagatcccatttgtcaattttgtcttttgttgccattgcttttggtgttttggacatgaagtccttgcccacgcctatgtcctgaatggtaatgcctaggttttcttctagggtttttatggttttaggtttaacgtttaaatctttaatccatcttgaattgatttttgtataaggtgtaaggaagggatccagtttcagctttctacatatggctagccagttttcccagcaccatttattaaatagggaatcctttccccattgcttgtttttctcaggtttgtcaaagatcagatagttgtagatatgtggcattatttctgagggctctgttctgttccattgatctatatctctgttttggtaccagtaccatgctgttttggttactgtagccttgtagtatagtttgaagtcaggtagtgtgatgcctccagctttgttcttttggcttaggattgacttggcaatgcgggctcttttttggttccatatgaactttaaagtagttttttccaattctgtgaagaaagtcattggtagctttatggggatggcgttgaatctgtaaattaccttgggcagtatggccattttcacgatattgattcttcctacccatgagcatggaatgttcttccatttgtttgtctcctcttttatttccttgagcagtggtttgtagttctccttgaagaggtccttcacatcccttgtaagttggattcctaggtattttattctctttgaagcaattgtgaatgggagttcacccatgatttggctctctgtttgtctgttgttggtgtataagaatgcttgtgatttttgtacattgattttgtatcctgagactttgctgaagttgcttatcagcttaaggagattttgggctgagacgatggggttttctagatatacaatcatgtcgtctgcaaacagggacaatttgacttcctcttttcctaattgaataccctttatttccttctcctgcctgattgccctggccagaacttccaacactatgttgaataggagcggtgagagagggcatccctgtcttgcgccggttttcaaagggaatgcttccagtttttgcccattcagtatgatattggctgtgggtttgtcatagatagctcttattattttgaaatacgtcccatcaatacctaatttattgagagtttttagcatgaagggttgttgaattttgtcaaaggctttttctgcatctattgagataatcatgtggtttttgtctttggctctgtttatatgctggattacatttattgatttgcgtatattgaaccagccttgcatcccagggatgaagcccacttgatcatggtggataagctttttgatgtgctgctggattcggtttgccagtattttattgaggatttttgcatcaatgttcatcaaggatattggtctaaaattctcttttttggttgtgtctctgcccggctttggtatcagaatgatgctggcctcataaaatgagttagggaggattccctctttttctattgattggaatagtttcagaaggaatggtaccagttcctccatgtacctctggtagaattcggctgtgaatccatctggtcctggactctttttggttggtaaactattgattattgccacaatttcagagcctgttattggtctattcagagattcaacttcttcctggtttagtcttgggagagtgtatgtgtcgaggaatgtatccat

SEQ ID NO: 23853 - DNA, 2796 bp, Homo sapiens
  SIMILAR (409)..(2763): 851254mologous to Homo sapiens Human cytoskeletal protein (HCYT) (clone 1655208),accession number Y77575,Smith-Waterman Score =3179.
atgggccgggcgtcgcggctcacgcctgtaatcccagcactttgggaagccgagggccttagcagcggctgccgcagctcaatcgcggagcaactagccgggcgtctgcgggagccgagcgtgggacctgtgggcctaccacctggtgccctcatggagacaagaagccctgggttgaacaacatgaagccccagtcactgcagctggtactggaagagcaggtgctggcactacagcagcagatggcagagaatcaggcagcctcctggcggaagctgaagaactcccaggaggcccagcagagacaagcaacccttgtgaggaagctgcaggccaaggtgctgcagtaccgaagctggtgccaagagctggagaagcggctagaagccactggaggaccaatcccccagaggtgggaaaatgtggaggagccaaacctggatgagctgctggtccgattggaggaggagcaacagaggtgtgagagtctagcagaggtgaacacccagcttcgactgcacatggaaaaagctgacgtggtgaataaagcccttagggaagatgtggaaaaactgacagtggactggagccgggcccgggatgagctaatgaggaaggagagccagtggcagatggagcaggagtggagtctgctgttttccttgcttgtactcagagatctgatggagctaaaagctgagcatgtgaggctttcagggtctctgttgacctgttgtctgcgcttgactgtgggagcacagtctcgggaacccaacggatctggaagaatggatgggcgggagccggcccagctgctgctgctactagccaagacccaggagctggagaaggaagcccatgaaaggagccaggagttaatacagctgaagagtcaaggggatctggagaaggctgaacttcaggaccgggtgaccgagctctctgctctgttgacccagtctcagaagcaaaatgaagattatgaaaagatgataaaggctctgagagagacagtggagatcctggagacaaatcacacagaattaatggaacatgaagcatctcttagtaggaatgcgcaagaggagaagttgtctttacagcaggtgatcaaggatataacccaggtcatggtggaagaaggggacaatatagcccaaggctctggtcatgagaactctttggaattggactctagtatcttctcccagtttgattaccaggatgcagacaaggctcttactctggtgcgttcagtgctgactcggagacgccaggctgtgcaggacctaaggcagcagcttgcaggctgtcaagaggctgtgaacttgttgcaacagcagcatgatcagtgggaggaagagggcaaagccttgagacagcggctgcagaagctcactggggagcgggacactctggcagggcagactgtggacctccagggagaggtggactctctcagcaaggagcgagagctgctgcagaaggccagggaagagctgcggcagcagctggaggtgctagagcaggaggcatggcgcctgcgaagggtaaatgtggagcttcagctgcagggggactctgcccagggccagaaggaggaacagcaggaggagctgcacctggctgtccgggagagggagcgtcttcaggagatgctgatgggcctggaagccaaacagtcagaatcactcagtgaactgatcactcttcgggaagccctggagtcaagtcacctggaaggggagttactgaggcaagagcaaacggaagtgaccgcagcgctggctagggcagagcagtcaattgcagagctgtcgagttctgaaaacaccctgaagacagaagtagctgatcttcgggctgcagctgtcaagctcagtgccttaaatgaggctttggcgttagataaagttgggctgaaccagcagcttctccagttagaggaggagaaccagtctgtgtgcagcagaatggaggccgcagagcaggcgagaaatgctttgcaggtcgacctggcggaggcagagaagaggagggaagccctgtgggaaaagaacactcacctggaggctcagctgcagaaagctgaggaggctggggctgagctgcaggcagatctcagggacatccaagaagagaaggaagaaattcaaaagaaactaagtgagtcacgtcaccagcaggaggcagccacgactcagctggagcagctacatcaggaggcaaagcgacaggaagaagtgcttgccagggcagtccaggagaaggaggccctagtacgagagaaagcggctctagaggtgcggctgcaggccgtggagcgtgaccggcaggacctcgctgaacaactacaggggctcagctcagccaaggagctactggagagcagtctgtttgaagcccaacaacaaaattctgtgatagaggtcaccaaggggcagctggaggtccagattcaaactgtcactcaagccaaggaagtaatccaaggggaagtgaggtgcctgaagctggaactggacactgaacggagtcaggcagagcaggagcgggatgctgcagccagacagctggcccaggctgagcaagaagggaagactgccttggagcagcagaaggcagcccatgagaaagaggtgaaccagctccgggagaaatgggtctccaaggacaaacgggccctcaagttcatcaagaaaagagtggggacgcacatccgcactaagaggaggcaggaggagctgagcaatgtcccagccatcatgaggaaagctgatgccaagaaagactga

SEQ ID NO: 23854 - DNA, 442 bp, Homo sapiens
  SIMILAR (94)..(408): 631254mologous to Homo sapiens ribosomal protein L36,accession number BC003052,Smith-Waterman Score=297.
accgatcggccctctagtccagcgtggtggaattcgtagatccccgcgtggcaccagcccttctgccacagctgccattggagagcagcagccatggctctgtgctacccactatggccgtgtgccttgacaagggccacaagatgaccaagaacatgagcaagcccaggcacagctgccgccgcgggcgcctgaccaaacaccaaattcatgtgggacatgatccgagaggtgtgtggtttcgccccgtatgagcggcacgccatggtgttactcaaggtctccaaggacaaacgggccctcaagttcatcaagaaaagagtggggacacacatccgcactaagaggaggcaggaggagctgagcaatgtcccagccatcatgaggaaagctgatgccaagaaagactgagccccctgtcctgccctctctctgaaataaa

SEQ ID NO: 23855 - DNA, 851 bp, Homo sapiens
  SIMILAR (232)..(528): 321254mologous to Sus scrofa 17-kDa PKC-potentiated inhibitory protein of PP1,accession number AB008376,Smith-Waterman Score=172.
atgcatcctagaggcccccctcctcctgctcaggaagagagccacactgatgaaagcccaggcattgaccaccagagcctcgccaggagggcagggagagtggggagaactggcggtttttcccagctccttgcccagaccaatacttccatgctgtcttcaagccctgcttcctgcacatctcccagcccagatggggagaacccatgtaagaaggtccactgggcttctgggaggagaaggacatcatccacagactcagagtccaagtcccacccggactcctccaagatacccaggtcccggagacccagccgcctgacagtgaagtatgaccggggccagctccagcgctggctggagatggagcaatgggtggatgctcaagttcaggagctcttccaggatcaagcaaccccttctgagcctgagattgacctggaagctctcatggatctatccacagaggagcagaagactcagctggaggccattcttgggaactgccccccgccccacagaggcttttatctctgagctgctcagtcaactcaaagaaactccggagactcagccggcctcagaaataagcctgagagaccatctttagcagcctcagcactgccaggcctgccctgaaactccagatcctggctaagagggaaatagctccttgggacacaaacaagaaatgtggacaaggagggacatttgcatactcctactgtctgtgtggtcacagctagtttctgtcagctgggctctctgggagaaagctggctgttgtccaatgccttccttggcagccaagtggataaaacctttaggagccccaaaaaaaaaaaaaaaaa

SEQ ID NO: 23856 - DNA, 408 bp, Homo sapiens; identical to SEQ ID NO: 16083
  SIMILAR (1)..(204): 981254mologous to Homo sapiens ribosomal protein L23a,accession number U02032,Smith-Waterman Score=335.
  misc_feature (1)...(408): n = a,t,c or g

SEQ ID NO: 23857 - DNA, 678 bp, Homo sapiens; identical to SEQ ID NO: 19556
  SIMILAR (437)..(375): 611254mologous to Homo sapiens Human secreted protein, SEQ ID NO: 7678,accession number G03597,Smith-Waterman Score=59.

SEQ ID NO: 23858 - DNA, 555 bp, Homo sapiens
  SIMILAR (456)..(397): 851254mologous to Homo sapiens Human secreted protein, SEQ ID NO: 7102,accession number G03021,Smith-Waterman Score=88.
atgaacacctcttgcccaagaacctgcagcattccctggaccctgttgatcggaatagttgcactcactgatgcagcagcagaaactctagttttcctcctagaccacaaggaggaccaaggaagaagtacaggaaaagcggaagctggttctaggcaaaccaatggtcccaactccaaagagtcgggggttgttagagagccctttcccagtaagcctgacacccgtgtctttagtccagtggccgtactagtcgcttttaactggctgacaggtgatagtcccttagtggtcaccaagatgtgcccagttcttggtctcaatgacttcaagaatgaagctgcggaccctcacaatgagtgttacagttcttaaagatggtgtgcccggagtttgttccttcagatgttcagatgtgtccagagtttcttccttctggtgggtttgtggtcttgctgactttaggagtgaagctgcagaccttcatgcccagcatctccaaggcccacgaatatttctgaagcaagcaagggtgaatgtgtggcaaacatcaga

SEQ ID NO: 23859 - DNA, 1438 bp, Homo sapiens
  SIMILAR (680)..(1051): 621254mologous to Homo sapiens Similar to cadherin 1, type 1, E-cadherin (epithelial),accession number BC001865,Smith-Waterman Score=353.
atggtgtgcccggagtttattccttcagatgttcagatgtgtccagagtttcttccttctggtgggttcgtggtctttctgacttcaggagtgaagccgcaaaccttcgcgctgttacagctcataaagacctgtggtccaagagtatctctagcagttacagatgataaagaattattgctgcttttactttatggcctagtgctatttgaagacacaggaggaatgacctttcacctgcagatggaaacctggaggaaaagcaaggtccaggaaccctttggagtaaatgaatcaaatcttcaagtatatgcagcaataggatcaatggacagaaggagtgaagagcattccatttacagacaaatagcaggtactggggccctagctcaaagaaaggatgacccatatatgtatctattgaaagtaattactggcaatgtgtatgtcattctgaagagcagtgagaccttctacccactgatccaaacacaaaacagacactcagagctacagggagagaagctggtgggcatcatcaatgcaatatcaccaccacaggctaccattcccttgcagctgagctaccaggatgaaaaggacagaaaatttccaactggcagtgaaaaattacttggcaaagtagtatttggtgagaaatatgatggcgtccctgcttctggctacaggcaaagaaggaagctcctgccccctcctaaagccaaagccaaagtgaaggctttgcaaggccaagaaggcagtgttgaaagatgtccacagccacaagaaaaaaaaagatctgcaagtcacccacctttcggggggcccaagacactatgtactcgcgaagccccccaagtgtcttcaaaagactgcccccaggaaaaacaagcttgaccactgtgctatcaccaagtttccactgaccactaagtctaccacgaagaagatagaagacaacaacacacttgtgttcattgtggatgttaaagccaacaagcaccagttcaaacaggctgtgaagaagctctatgacactgatgtggccaagaatataacaaagcgatgggatgtcacttccataattacttcatgttatatacatctgcgtcttgctagcagacttgctctggaggatctccttgcaggattaatgaattgtttaaaaggaaccttttggaatgaagaatcaggtgaacgggtagagactagaccagagagtagatttaagcagcaatctaaactgatttacacaataaaaaacccaggaaggaaaaaatacggcgcagaagaaaagcgagcattttggtgtcatacagacctcctactccatgatcatgatgaacaagtgaatcacttcagttctccaagctccactttcaccaaatgtaaaagaagaaaaccattcctacttcgagagtttgtgtggattaaatga

SEQ ID NO: 23860 - DNA, 372 bp, Homo sapiens
  SIMILAR (14)..(298): 1001254mologous to Homo sapiens ribosomal protein L23a,accession number U02032,Smith-Waterman Score=479.
cggacgcgtgggtcggaagagcgctcccaggagaaacaagcttgaccactatgctatcatcaagtttccgctgaccactgagtctgccatgaagaagatagaagacaacaacacacttgtgttcattgtggatgttaaagccaacaagcaccagattaaacaggctgtgaagaagctgtatgacattgatgtggccaaggtcaacaccctgattcggcctgatggagagaagaaggcatatgttcgactggctcctgattacgatgctttggatgttgccaacaaaattgggatcatctaaactgagtccagctgcctaattctgaatatatatatatatatatcttttcaccaaaaaaaaaaaaaaaaaaa

SEQ ID NO: 23861 - DNA, 831 bp, Homo sapiens; identical to SEQ ID NO: 40
  SIMILAR (83)..(199): 351254mologous to Human immunodeficiency virus type 1 envelope glycoprotein,accession number AF025926,Smith-Waterman Score=69.

SEQ ID NO: 23862 - DNA, 951 bp, Homo sapiens
  SIMILAR (523)..(374): 321254mologous to Drosophila petalopeza hunchback protein,accession number U93017,Smith-Waterman Score=80.
atgtggcaccccgaccgtggttcctggcacaggaacgagcaggagggtaaggacggctaccgtggaaccaacttggaagtgccgtgctgctcaacagccacccccacctccacaccgctttgggtaaaattgccgccgccggacacctcaaccaagcctgaactgcagcttgaagagctggatgcagattcttcctggatgcctttgcatggctcgtgtccaactggaaagctggcagtggatgctcgctcttccctcttcactgagcccgcttttccatactggaagaagatgaaacacacatttcagaatatcctgagctggagcaagtttactaatctcacctacagcgtgacacagctgtggctgttggtagtgatggctcaaaccagctatcctcattcactggtgggcaggaagcaggtaattctacactcatcttgcctgtactctctggataataaaacaagtttagccggtgatgatcatgatgacgatgaccatgatgataatgattcatcacctgcagagaagggccctccccccatcactaaatcactggacaaggctgatgagcagagccacctgcggttggcagtacttgagttaggcttttacaagcctgtgaatttactcttggtggccatgacagggtgtcttctgcagctgatgatgaaaaaagagcaatgtggaacccacgggggagaaggttctactctggaggggagccgtccagatgtcccccaagacctcttttccccaactctaggattctacggttctacatcactctcggccgacctgggggagaacgtcattcttaagctctacctgccatcgtttcctctgcaggaaagcgagcccagtgctgagcatggggagaacctctgggctctttatgtaggatttgaagagcgcagatctgaggcctcacttgcgaaagcaccgtga

SEQ ID NO: 23863 - DNA, 681 bp, Homo sapiens
  SIMILAR (350)..(6): 611254mologous to Homo sapiens 14-JAN-1997 Human sex comb on midleg isoform encoding DNA,accession number V00012_cd1,Smith- Waterman Score=335.
aaacgtcagaacttggcttgcttcagtttgtcaatgtggtagcagagtttcagtgcgggtcccagcttcaggcccaggtacttcatgaccatgtcactcttcagcaacagcagagcgttgccatcaatctcgtgctttctgaagagctccacgtgaggccccagagcctgtgggtcggcgtccttcacaaaccacaccacgtcctccacagtccaggcggaggggttcctgctccgtggccgcctggcatcctgcgcatcctgagaagggcttgaggcacatctgtttccttcaagagaggtcgtgtttctcttggggctggaggctggaggcctcagcccaggtgccgaggggccaccagaagacatggggctagtgcggggaccaccagcggtgcaagcaggaccacccccaaggtggctgtctccagagttctgcctcttgcagtacagcgaggaggaggggtgcaaggagcccctgtggttaaaggtggaggcggaggtgtccacgctgtagcggttcatgcccacagggttcaccaggtactcttcggtggtgactgtcttgactgcagatgtatctgttttttattatttgtagcagttactctactttcctaagctcatgcatttgacttatccaaggcagggtctcacacagtgcttggaacagaagagggtt

SEQ ID NO: 23864 - DNA, 1125 bp, Homo sapiens; identical to SEQ ID NO: 6187
  SIMILAR (675)..(616): 501254mologous to Homo sapiens A human collagen 1 (alpha2) protein fragment,accession number Y84549,Smith-Waterman Score=51.

SEQ ID NO: 23865 - DNA, 2209 bp, Homo sapiens
  SIMILAR (2093)..(2206): 651254mologous to Homo sapiens peptidylprolyl isomerase,accession number X52851,Smith-Waterman Score=141.
atgggggtacagccattggataaatacagctgttccaaatgggagaaattggccaaaacaaaggggctacaggctccatgcaagtctgaaatccagtggacaatcaaatcgaaaagctccaaaatcatctcctttgacttcatgtctcacatccaggataatttcttgagaggagataactcccgtaaagttcagcaccagcagcagaggaaacccaggaaaaaaaccaagcctcctgcactaaccaaaaaacacaagaagaagagaaggcgtggacctcgtcgaccccaaaaacccattccacctgcagtcccccaagggaacctcagcatgcctgccagcgtctcactgccagtggaggcctctcacatccggagcccatccacgccagagctgagtgctgatgagttgccggatgacattgccaatgagatcactgacattccacatgacttggaattgaaccaggaggacttttcagatgtcctgccacggctacctgatgacttacaagattttgatttttttgaagggaagaatggagacctcctcccaactaccgaagaggctgaggagcttgaacgggccttgcaggctgtaacttctctcgagtgcctgagtaccattggggtccttgcccagtcagatggtgtgccagtccaggagttgtcagatagaggaataggggtgttctccacaggtactggagcttcaggaatacaatccttgagccgagaggtgaacacagacctaggggagctattgaatgggcgtatagtacatgataatttttctagtctagagctggatgagaacctgctccgttctgctaccttgtcaaacccacctacacccctggcagggcagatccaggggcagttctctgccccagccaacgttggccttacttctgccactctgatcagccagagtgcacttggggagagagccttcccaggacagtttcatggacttcatgacggcagccatgcctcccagaggccacatcctgcccagctgctgagcaaggcagatgacctaatcacctcacgacagcaatacagcagtgatcactcacactcctcaccccatggaagccattatgatagtgagcatgtgccgtctccctacagtgaccatatcacctctccccacacaacatcgtactctggtgataatatggcagctaccttttcagcagagatgcccatcatggcgcagcacttgctcccaacccaacttgaggtgccacttggaggcgtggtaaaccccagaactcactggggcaatctccctgtcaaccttgggagacccctctccatttaggcaaccttcttcggcgcagatgggacatcttctttccacttccctatccacgccacccaccacttcgaactcagagaccacacagcctgccttcgccaccgtgacccccagcagctccagtgtgcttccggggttaccacagaccagcttcagtggcatggggccttctgctgaactaatggcctccacctctcccaagcagcaactccctcagttcagcgcagcctttggccaccagctgagttctcacagtggcattcctaaggacctgcagcccagccacagctctatagcccctcctacaggcttcacagtaacaggagtgaagctgcagaccttcgcagtgagtgttacagttcttaaggctacctgcctggagttgttcgttcctcctggtgggtttgtggtctcgctggcttcaggtgtgaagctgcagactgtcacgcctcttcacttctcaggcaaccacccatctgctttctattactacaggttgtcatttgaaatggacaaaggaaagaaaagacagttcggagttgaaaaggagaagtgcggcagcctgggagggtttgttatgcttggcaatgaggagatgatcagaagagctgtaacactcatcgcatggaccaagattccattccttggcatccgtgaggccaagaaccccggatcagagaacataaggcttgccaccatcttggaagcgcccaccgccgtcttgggagctctgggagcaaggaccccctggagccccatactaccagccatgatcaaccccatcgtgtgtttcaacatcattgtcaacggcaagcccttgggccacatccccttcgagctgtttgcagacaagattccaaagacggcagaaaactttcactcctga

SEQ ID NO: 23866 - DNA, 1163 bp, Homo sapiens
  SIMILAR (824)..(1087): 351254mologous to Mus musculus SPR2H protein,accession number AJ005566,Smith-Waterman Score=118.
tgggagaagtgactagctggaacagagggcgtggcctgcgcatctggagatatttcctgtttgggcctgtgcagaaaaccatgcgcctcctcttgtccaggttaacttactgctggctggagcaggatggacgagtctcttggcgacttggtttggaaattggcagcctccccactccggtgcctgtgcgtttgtgccctgctaaccggagccctccaatggtttgtggcaccaccggacgttcttcaagcaactcttccacggagaagcgcatgtgcacgtgctccagcagagctgcccttcattttctcaaagggcctgagggtggcaccctcatggaggagatcagagcccttataaaagagcccccagagagctccctcaccccttctaccagaggaggacacagtgagaaggcaccatctaagaaccaccaggcggccacggtcaacaccaccacgctgagccgcatcagccacatcagccacacgcacctcctgatacactgcacagggaaggagcagcatgagccctatgaggatgcggcaaccaggtcccgtcctgaagcagacctcagccgtcacgagcgactgacctgccggcaccttgatcttggactacctgacatgcagaaccgccagtgtgtgccggggagtcagggtctacggcccgtggggggcctggaagggcccaggcactggtgtttggttcgaagttcccggctcggtgtccttcctcggaggccacagggctgtgaggacgacgcgggtgggcttcagaggcaggactgtgggcagtggagagagctggtgcaactgcccacccctcctgctgccctggaggcgcctccccccatcccaagcccctcccagacctcccagatcctccagggagctcccggtgcttttgcctgctgccaggaacctgcccagccgcacccccagcggggtctccatctccgtgttctcaaagccctggctgtctgccccccgtacccactccctctgttctggaatgctgtacacaagtccttctggaagacagtaaaccacaaagtcatagaaactcggctccgcatctccagcccgggatctggagccatatacctggtagccacccttggtgtctggtgctggccgcagaaggctccacaagctccgtga

SEQ ID NO: 23867 - DNA, 2505 bp, Homo sapiens
  SIMILAR (1)..(1731): 901254mologous to Homo sapiens protocadherin beta 7,accession number AF152500,Smith-Waterman Score=2643.
atggaggccagagtggagcgtgctgtgcagaaaaggcaagtcttatttctttgtgtatttctgggaatgtcttgggctggcgccgaaccgcttcggtattttgtggcggaggaaaccgagagaggcacctttcttaccaacttggcaaaagacctagggttaggggtaggggaactgagagcccggggaactagaattgtttcagaccagaacatgcaaattttactgctcagttcgcttactggtgatctacttctaaatgagaaattggaccgagaggaactgtgtggccccagagagccctgtgtgctgcctttccagttgttattggaaaaaccttttcagattttccgtgctgaactatgggtcagagacatcaatgatcacgcttcagtatttctagacagagagatttccttgaaaatattagaaagtaccactccaggggcggcatttctcctagagagtgcacaggattcagatgttggaaccaacagcctgagtaactacaccatcagccccaatgcctatttccatattaatgtccatgatagcggggaggggaatatctatcccgaattggtgctgaatcaagtgctggatcgggaagagataccagagttcagtttaaccctcaccgctttagacggcggctctcctccaagatcagggaccgccctcgtgcgcattctggttctagacgtaaatgacaacgcccctgattttgtgcggtcgctctacaaggtgcaggtgcccgaaaatagccccgttggttccatggttgtctccgtgtcagccagagatttagataccggaagtaatggggaaatagcctatgcattttcttacgccactgaaagaattctcaaaacgtttcaaatcaatccaacatctggcagtcttcatcttaaagcgcaattggactatgaggcaattcaaacttacacattaactattcaggccaaagacggcggcgggctttctggaaaatgcactgtagtggttgatgtaacagatataaacgataatcgacccgagctgctcctgtcttcacttactagcccaattgcagaaaactcacccgagacagtcgtggctgtttttaggattagagacagagattccgggaacaatggaaagacagtgtgctccatccaggacgatctccccttcatcctgaagccatctgtcgaaaacttctatactctggtaacagagaaacctttggatcgagagaggaacactgagtacaacatcaccatcaccgtcaccgacttggggacacccaggctgaaaaccgagcacaacataaccgtgctggtctccgacgtcaatgacaacgctcccgccttcacccaaacctcctacaccctgtttgtccgtgagaacaacagccccgccctgcccatcggcagtgtcagcgccacagacagagactcaggcaccaacgcccaggtcatctactccctgctgccgtcccaggacccgcacctgcccctcgcctccctggtctccatcaacgcggacaacggccacctgtttgccctcagtccctggactacgatgcccctgcgagcgttcgagttccggaacaacagccccgccctgcatattggcagcgtcagcaccgcagagaccaacatccaggtcacctactcgctgctgccgccccggaacccgcacctgcccctcgcctccctggtctccatcaacacagacaacggccacctgttcgccctcaggtcgctggactacgaggccctgcaggagttcgagttccgcgtgggcgcttcagaccgcggctccacggcgctgagcagcgaggcgctggtgcgcgtgctggtgctggacgccaacgacagctcactcttcgtgctgttcccgctgcagaacggctccgcgccctgcaccgagctgatgccccgggcgggccgccgagccgggctacctggtgaccaagaacgcctggctgtcgtagcagttgctcaaggccacggagccagggctgttcggcgtgtgggcgcacaatgcactgacaggctgctgagcgagcgtgacacagccaagcacaggctgatggtcctggtcaaggacaatggcgagcctccgcgctcggccaccgccacgctgcacgtgctcctggtggatggcttctccctgccctacttgccgttccctgaagcggccccggccccagcccaagccgacttgctcaccgtctacctggtggtggcgttggccttggggtcgcgggtcttcctcttctcggtgctcctgttcgtggcggaggagcagggaggcctcattgggtcgctgctcggtgcccgaggacccctttccaggcatctggtggacgtgagcgacaccaggaccctatcccagaggtacaagtatgaagtgtttctgacgcgaggctccgggacaaatgaattcaaattcctgaagtctgttatccctaagcatccgggcgctgtgaatgatgggaggaaaagtccaactttgtaa

SEQ ID NO: 23868 - DNA, 1960 bp, Homo sapiens
  SIMILAR (1928)..(1960): 1001254mologous to Homo sapiens protocadherin beta 7,accession number AF152500,Smith-Waterman Score=56.
atggaggccagagtggagcgtgctgtgcagaaaaggcaagtcttatttctttgtgtatttctgggaatgtcttgggctggcgccgaaccgcttcggtattttgtggcggaggaaaccgagagaggcacctttcttaccaacttggcaaaagacctagggttaggggtaggggaactgagagcccggggaactagaattgtttcagaccagaacatgcaaattttactgctcagttcgcttactggtgatctacttctaaatgagaaattggaccgagaggaactgtgtggccccagagagccctgtgtgctgcctttccagttgttattggaaaaaccttttcagattttccgtgctgaactatgggtcagagacatcaatgatcacgcttcagtatttctagacagagagatttccttgaaaatattagaaagtaccactccaggggcggcatttctcctagagagtgcacaggattcagatgttggaaccaacagcctgagtaactacaccatcagccccaatgcctatttccatattaatgtccatgatagcggggaggggaatatctatcccgaattggtgctgaatcaagtgctggatcgggaagagataccagagttcagtttaaccctcaccgctttagacggcggctctcctccaagatcagggaccgccctcgtgcgcattctggttctagacgtaaatgacaacgcccctgattttgtgcggtcgctctacaaggtgcaggtgcccgaaaatagccccgttggttccatggttgtctccgtgtcagccagagatttagataccggaagtaatggggaaatagcctatgcattttcttacgccactgaaagaattctcaaaacgtttcaaatcaatccaacatctggcagtcttcatcttaaagcgcaattggactatgaggcaattcaaacttacacattaactattcaggccaaagacggcggcgggctttctggaaaatgcactgtagtggttgatgtaacagatataaacgataatcgacccgagctgctcctgtcttcacttactagcccaattgcagaaaactcacccgagacagtcgtggctgtttttaggattagagacagagattccgggaacaatggaaagacagtgtgctccatccaggacgatctccccttcatcctgaagccatctgtcgaaaacttctatactctggtaacagagaaacctttggatcgagagaggaacactgagtacaacatcaccatcaccgtcaccgacttggggacacccaggctgaaaaccgagcacaacataaccgtgctggtctccgacgtcaatgacaacgctcccgccttcacccaaacctcctacaccctgtttgtccgtgagaacaacagccccgccctgcccatcggcagtgtcagcgccacagacagagactcaggcaccaacgcccaggtcatctactccctgctgccgtcccaggacccgcacctgcccctcgcctccctggtctccatcaacgcggacaacggccacctgtttgccctcagtccctggactacgatgcccctgcgagcgttcgagttccggaacaacagccccgccctgcatattggcagcgtcagcaccgcagagaccaacatccaggtcacctactcgctgctgccgccccggaacccgcacctgcccctcgcctccctggtctccatcaacacagacaacggccacctgttcgccctcaggtcgctggactacgaggccctgcaggagttcgagttccgcgtgggcgcttcagaccgcggctccacggcgctgagcagcgaggcgctggtgcgcgtgctggtgctggacgccaacgacagctcactcttcgtgctgttcccgctgcagaacggctccgcgccctgcaccgagctgatgccccgggcgggccgccgagccgggctacctggtgaccaag

SEQ ID NO: 23869 - DNA, 966 bp, Homo sapiens
  SIMILAR (328)..(915): 981254mologous to Homo sapiens protocadherin beta 15,accession number AF152494,Smith-Waterman Score=968.
atgggtcatcatctcatgatagataaactcgtcgcgctcggtggtttgtactacgccatccagcgccattacgcgaccaaatgcagcgttctcaaaaatgatcagatcctggtgatcggtcttttcatgatacagaacgttatctaccgcaaacatttcgccaacccgctgagcgctctgttcctgcaacaaggcatcgaactgtttgccgccattgcagaaattcacataactactgtcgccgagcgcaatcacgccataacgcagattcggctggaagcccagactatctttgattccctgaaagagtggcacaatgctatcaggaagtcgctggactacgaggccctgcaggctttcgagttccgcgtgggcgccacagaccgcggcttcccggcgttgagcagcgaggcgctggtgcgcgtgctggtgctggacgccaacgacaactcgcccttcgtgctgtacccgctgcagaacggctccgcgccctgcaccgagctggtgccccgggcggccgagccgggctacctggtgaccaaggtggtggcggtggacggcgactcgggccagaacgcctggctgtcgtaccagctgctcaaggccacggagcccgggctgttcggcgtgtgggcgcacaatggcgaggtgcgcaccgccaggctgctgagcgagcgcgacgtggccaagcacaggctagtggtgctggtcaaggacaatggcgagcctccgcgctcggccaccgccacgctgcaagtgctcctggtggacggcttctctcagccctacctgccgctcccaagagcggccccggcccaagcccaggccgactcgctcactgtctacctggtggtggcgttggcctcggtgtcgtcgctcttcctcttctcggtgctcctgttcgtggcagtgcggcctgtgcaggaggagcagggcggccccggtcggtcgctgctcggtgcttga

SEQ ID NO: 23870 - DNA, 2935 bp, Homo sapiens
  SIMILAR (298)..(2019): 701254mologous to Homo sapiens protocadherin beta 2,accession number AF152495,Smith-Waterman Score=2046.
atggaggtcatgggtaatatgggtagcaaaatcttgataacgggaataacatccacaaaacgcaaggtggcgctgctggctaaaaagagagagagaaaaataatttcacaaagaaaggatgttacagattccagagcaaagaggcaatctgaagagaaaagcataggaaaggaaacagtggtaataggaattgggctcatttcaaaggattccgctgctgccatttgtgagagccgctggaggctgagtgaaagtcattttgaaagactgatccaaagaagaatggaggccagagtggagcgtgctgtgcagaaaaggcaagtcttatttctttgtgtatttctgggaatgtcttgggctggcgccgaaccgcttcggtattttgtggcggaggaaaccgagagaggcacctttcttaccaacttggcaaaagacctagggttaggggtaggggaactgagagcccggggaactagaattgtttcagaccagaacatgcaaattttactgctcagttcgcttactggtgatctacttctaaatgagaaattggaccgagaggaactgtgtggccccagagagccctgtgtgctgcctttccagttgttattggaaaaaccttttcagattttccgtgctgaactatgggtcagagacatcaatgatcacgctccagtatttctagacagagagatttccttgaaaatattagaaagtaccactccaggggcggcatttctcctagagagtgcacaggattcagatgttggaaccaacagcctgagtaactacaccatcagccccaatgcctatttccatattaatgtccatgatagcggggaggggaatatctatcccgaattggtgctgaatcaagtgctggatcgggaagagataccagagttcagtttaaccctcaccgctttagacggcggctctcctccaagatcagggaccgccctcgtgcgcattctggttctagacgtaaatgacaacgcccctgattttgtgcggtcgctctacaaggtgcaggtgcccgaaaatagccccgttggttccatggttgtctccgtgtcagccagagatttagataccggaagtaatggggaaatagcctatgcattttcttacgccactgaaagaattctcaaaacgtttcaaatcaatccaacatctggcagtcttcatcttaaagcgcaattggactatgaggcaattcaaacttacacattaactattcaggccaaagacggcggcgggctttctggaaaatgcactgtagtggttgatgtaacagatataaacgataatcgacccgagctgctcctgtcttcacttactagcccaattgcagaaaactcacccgagacagtcgtggctgtttttaggattagagacagagattccgggaacaatggaaagacagtgtgctccatccaggacgatgtccccttcatcctgaagccatctgtcgaaaacttctatactctggtaacagagaaacctttggatcgagagaggaacactgagtacaacatcaccatcaccgtcaccgacttggggacacccaggctgaaaaccgagcacaacataaccgtgctggtctccgacgtcaatgacaacgctcccgccttcacccaaacctcctacaccctgtttgtccgtgagaacaacagccccgccctgcccatcggcagtgtcagcgccacagacagagactcgggcaccaacgcccaggtcatctactccctgctgccgtcccaggacccgcacctgcccctcgcctccctggtctccatcaacgcggacaacggccacctgtttgccctcaggtccctggactacgaggccctgcaggcgttcgagttccgcgtgggcgccacagaccgcggctcccccgcgctgagcagcgaggcgctggtgcgcgtgctggtgctggacgccaacgacaacttggcccttcgtgctgtacccgctgcagaatggctccgcgccctgcaccgagctggtgccccgggcggccgagccgggctacctggtgaccaaggtggtggcggtggacggcgactcgggccagaacgcctggctgtcgtaccagctgctcaaggccacggagcccgggctgttcggtgtgtgggcgcacaatggcgaggtgcgcaccgccaggctgctgagcgagcgcgacgcggccaagcagaggctggtggtgctggtcaaggacaatggcgagcctccgtgctcggccaccgccacgctgcacttgctcctggtggacggcttctcccagcccttcctgccgctcccagaggcggcccccggccagacccaggccaactcgctcactgtctacctggtggtggcgttggcctcggtgtcgtcgctcttcctcttttcggtgctcctgttcgtggcggtgcggctgtgcaagaagaagcagggcggcctctgtgggccgctgctcggtgcctgagggcccctttccacgacatctggtggacttgagcggcaccgggaccctatcccagagctaccagtatgaggtgtgcctgactggaggctccgggacaaatgagttcaagtttctgaaaccaattatccccaacctgctaccccagagcacaggcagggaagtggaagaaaatcgcccatttcagaataatttgggtttctgataaagaatgaaaaataaaacctgtgtttatgaatacatttataattaggaacttattgcgaggttcccttaagggagtgtctttacatcatttcaaatatgtactcttgaagtcaagcaataaatttctatacataaaataggatcctgatttagtatcaagaacccttcacaaagcatgaaatgtatatgtgtaatgttttatgtcaaacaattatgcttaatatacagtctattaaatgtaagtcttgtttgagatatttt

SEQ ID NO: 23871 - DNA, 993 bp, Homo sapiens; identical to SEQ ID NO: 3922
  SIMILAR (698)..(519): 351254mologous to Homo sapiens adlican,accession number AF245505,Smith-Waterman Score=81.

SEQ ID NO: 23872 - DNA, 4482 bp, Homo sapiens; identical to SEQ ID NO: 8551
  SIMILAR (1)..(4332): 831254mologous to Homo sapiens adlican,accession number AF245505,Smith-Waterman Score=6143.

SEQ ID NO: 23873 - DNA, 906 bp, Homo sapiens; identical to SEQ ID NO: 3920
  SIMILAR (900)..(613): 311254mologous to Homo sapiens adlican,accession number AF245505,Smith-Waterman Score=135.

SEQ ID NO: 23874 - DNA, 4974 bp, Homo sapiens; identical to SEQ ID NO: 8553
  SIMILAR (4)..(4941): 851254mologous to Homo sapiens adlican,accession number AF245505,Smith-Waterman Score=7191.

SEQ ID NO: 23875 - DNA, 10184 bp, Homo sapiens
  SIMILAR (3071)..(2637): 281254mologous to Homo sapiens adlican,accession number AF245505,Smith-Waterman Score=172.
ctttttttttttttttttttttgggagaatattattttattatcaaatgtacagtatattgaccttaaaaatacagtaaagcagtcatggaaataacaggtcgtgtattattcatgggcacaaactgactcatggctggggaagaagcagccaccttagaccagatggacaagccagatactgcagagaagtttctgggcttttcggggaagactctagattcaattctgtaaagttatgatgcagttttctccttcctctcctctcacctcctctgagcacagctttcaacaaaaactttgcatacaaggaaatctaatatcgcagccttccccactggagggttcctgggagaaggtaatataacagtggtgactgaatttgaaggaggttggagagaaattttttaaaattatatttccatgtctgctgtaatgtatccaagtcttgtaaagaccaataatttattaattttaataagacagaaagtatttctccttctagtctcatcgtctgatttgaaaggaaaaaatatatatataaacctttatataaaaagtgagttccaggaagaaatgtttttcttttttcatataaaatggtagctgtatgtatgtaactctgaattaaaatatatatatatatcagtccctctggttttaaatccttattgggcaagctggagttttaaagtgacagaggaaataactgaaagatgacttgtcaatctggaacaaagtctatcatgtaaaaactgcagcaggttaactaggtgatgcgtcttcaatggggtagtgaggtgttgttcatgtctatggcttatttttgatgaatgttcctcagatatcctatggacgcttatgaaggcagtcgagtggcatttgcaaaaaaagaaaaattgcagtcagagcacagacaccctgaatgaagcccctggcatgatgtaaacacaaaagaaagtgtctcagcaaggctgagccctccttctcgtgtctgcattgcttccttttcccaacaattgtagatcaagatcaacctcaacttgaaacccaccagaggccaccatgcactgtgacacattatttaagagctcctattccccaacctggcttcccttacaaaccccgctttgttgtcagttcctaagcaaatcattctggaatcccccatttcagaagcggtggatgtaagttgttttggagtcactgccgagaatgttttttgccatgcacttgtagaagccggcatctctctgtgtggcatgctgaatggtcagtgatccctgggggtgaagaaatctgtttccatacagacgagcctgaacccctgccttcagatgcgacttatccggtaactcccacgtgatgtcagctttgggaatccccatagccatgcagttcagtttcacggtgttcccgggccgggtgtagatgaccggggtgggctcgctggtgatccggggaggataggcgatcacaatcacggggatgctggtgaccgaagggccgtactccgtctccatcctgcatacataggtacccctgtcaaacaccgaggcctcacgacccgtgagggtgccattgtccagaagagaaacgaatcccagggtttgaaggccctccagatgcatgccattggggagcgtccaggagaaacgtccctgcccagccccgggaggggtgcaggggagcttcagggtctcaccattgatgatgctgaccaggttatgatactgcttgcttgcttctggcttcagtcccaccttcagggagaccagcctctccgtgtggccagcggcattgcgggccacgcagcggtaggccccggcgtccaccgaggagagaccgctaatgtgtagcatgccgtcagccttgtggtagaagcgctgcagctgctgtccactctgcagatcggtgccattgggaaggacccacaccaggctgggtgtcggggtccccgcggcagagcagttgaggctgatggtgtggccccgccatggccgtgatcttctcgctgatcgggtcgtggaagatgggtttctccatgggctccaggacagtgagctgcaggatcaacctggcctcccctccctcgttgcgtgccatgcataccagctggacggagtcgctcttcctcaaactcctgatgtccagggaaccgttgccatggacagtgatccggtttccatagtatggagctggcagaaccacaccctcgggaaaagcccataacaccctcggggtggggatgccttcagctttgcagtcaatcagtttccgactgcccccggctgctatctcccgcacagtggtgatggggttggggttaccgttgatcttgggtggctggacgttgacgtgaatccacaccgtcttcctatcctctcccgcgctgttcctgaccaagcaggtgtagttgccgctgtcagaacgctgggctttctgaataaggagagtgccatcttggtatatctgatacttctcagaggaggtggggatcaccttgttggttggggacaaccaagtcaccttgggcatgggttctcctttggcctcacaggctacagtgaccacgtctccatagggcacctgaaccgccaagcaagtcttgttccggatggtggcgggcgctgtcaccaccttgactctgactctcatctcgtccttcccgacctgattttcagcaaagcaggtgtagtctccttcctccctcatccccacttcgttaaagtagagtgtcccattgttgaagacgacatagcgcttggtgcgtccaccgctgtcatccgactgcatgaaggagttcaccagactcccgtctgggaggctccaggagatctcgggattgggaagcccggtggccacacagtccactttcaggtcacccccgtagaagactttgtggtcgttctcctccttgtgttcaatcttggccggtttcatcaccacatccactttgagcaccacgtagtcatcaccaaccttatttcgagctacgcacaggtaatctccggcatctttgtccgtcactgatttcaccaccagggtcccattggcaaacaccttgattctgctatcaaaactgaccttggcactatggacattgaaggtaggatggatgacaatctgtgatgggccatcctgtgcactgcagggtgttgagcaccgtccctggcctccacccaccagataccagaagcacccactgccccatttgtgataatcaaaggtgtcttcagatattgccaagtgttgtcttggggcaaaatcacccttggttgaaaagcactgccataaacctgtatatctgacgtccgtcctccgcggggaggtgcccgtgatgcgcgcgttggctgctgcacgctgcacgttcagctgcaccgtcctgcgcgcggagcctaccaggttggcggccacgcactcatagcgcccgctgtccttgggcgcgaggttgcggatgtagagcgtcccgttggggaaaacaaacaagttcccgtggaggaactgcgaggggcggatctgggtaccgtccccgagcacccagcgcacgctgggcaggggcgcagccttggcagtgcagtgaatgtgaatgctgagccccgggggcagcgagatgttctccagcttctcctggtggataacggggggcagtgccgccacgtgcaggcggatggccaggctgtccgccccggctgcattgctggccacgcacttatagacgcctctgtctgagaaggacgcctccttgatggaaagggtccggttttcgtgcagggtgatgcggccctccacgggggacacagtttgccacaccctcctgtcagggaagatccaggaaatttggggggctggggtccctttggccagacactccattgcaatggtgtctcccaggtagacagtgacgtcctggtagtgggaggctaggatttgaggttgctgcacggtgaccgaaagcaagaccaccatcctgtccaggccgtgcaggttgctggcggtgcacatatactggcctcgatcttgtacttgaaccttccgtatcactaaggtaccgttcttgagaacctcaaaccgttgtatcctggtattcggagtcataagagctcctgtggaaacctttgtccaagtaacgaaaggctttggttttcctgttgcctcacaggggaacacagtgtctgtctcagcggtgacggacacagtctgtggggacttggtgaggatttgtggcttttccccaagagaccagaatttggatgcaggaggtcctcctgcaaagaactttgagctgctctggtggaagcttcctgaggactggacagaagatgttataaaggagatagaactctgggtggaagagaccatagggatattctgtaagttagttgagggtgatcccgtggtctgcggagtgtgcaacaacggaggtgccggagggccaaagtccagatggaaggtgctatgggaatgtatcctgttgtaggaacctggaataacttttctctctctcattactggggcaggagaagtgggtatctggggtctccgggtgactcccaactgtggaaaagaaagagtcttgttggtaaagaaagggagtcttccattggaataatgaggaattcttggactgggaggctttccaactgggtttcttgcctcagggatgttgttatttccaaacactttggagtagccattgaattggtcagttcttcggtcagtaaacttactaggaatgctgggtttggacatgtgcaatgggagaggaattgttgtacttgataatcttggagttgtaaactgtttgttctctggcaaagccccagaaggatatgtagttatttccggtttgttggtccagtgacgaggtgactgggaagttacaaagtatctggaagcgctttgtgtggacatttcaggcagcctcactgttgctgttggtaggatgggtttggcagggactctggttagttgatgagaagcatgaactcttccatcctggcgttggctatctgggccacgtggtagactcctactaccaaatacttgcttttccaattccagctttgtagacaagttaaatgcatcctggtcggaagagggtgttgataattcatttggccctgacatatgctgtgttccttcattgttcactggggttgcttctgtttctggattccccacataattcaagaaaacattttccttggaatctctagatgcttgagatattcttggactgggaagtgctggcttagtggtggtggtttgtcccaaagacatgagaattgtggatggggacgaggatgctggctccttcatccgggcagcagtaggggtgtgattctgtggtctagtttcagaaaggagaatagccacagtggtttcaagatgatcttgatcaagggtggtggtttctgcctgacttgaagccacctccacttttatgcttgagagagttgtggaagaaccagcttcttcctggtgaaatggtgtggagactgtcaaagaggacaaaaactcggaagtgaaatccacatcctcaagctctttaagaaggggagggtctgtaagattttccccagaagtggtaacaggtatgcctgtctgtagcctcccaggctgggccgtccttgagggattccaggttggagttcctggaaagcctacaggagaggattcttccttaaattctcccatagtggagaccaaggagcgagaagttggtatggcattagtaattgattcaccagtgactaaaatgtcacttttatgtttgtcaacatttgtggcaacatcatccttaatttcttttccatctgatgtgggtttatatgtgactggaagtgtctcttggactttagggtaagatgaatatatttttctggtggttgtcatgtaatctaaggaatcataagggccctcagttttcagagaaacagttctaggcaaaagtatagtttctgaactgggagtaacaatgtttctatgtttattttctggagaagggctgggcttggatccggacgctcttgagctcactgtagaaggggtatatcgatgtttgtttggcctcttcccgtgttttctccgtggtgttcccttggatgtgggttctgcattcttctccatttccaactgtttgggggtattaactgtgttatccacccaagctgtaggaaccagagaactctccacttgacttgaaatcttaatgtcaggtgcttgagttggttgagtagaaaaagtctctgatggggcaaaagttgtgggtggggtttgcttgtgccggtggcggaatttgttggggcgtaatctccttctcccgttgggtctccttcgagaagggtgagtgctcatggtggatgacggagcaactttttgccttggtgttgttgttgctgttgtggtgtctttgtctaggagggtaccaactgtggtttccgcaggcttcttaactggagacatactgctcattatacccagtgtggagtcaggcaaagtgatggatttgctctcttggccctcactctcagaacttctggagtgtgtggggtctccctctagcatatttcctccctgtagtgtctgagacatctctttcataccctttttaatcagtaaggtgtcttgagtgcttagactacttttcacaaggtggatgttgtctgtcagtccttgtagatgtgattggcctgggacacctggttcccctatagtagaatcctcaaataactgtgatgtactggagtcattaacccagatggtgggggttggagtaaggtgtgcaaaggtgtcttctttcatcttatcctcatctggttgtgacttagtctccaaatctgggtcaaagtattgcatgggctcagactcagccaaggagacagcatccaatggaggctcatactcactggatgtgggctctggtgacgatccaacatctgctgcagaccaaccctctgttgccgtctcttcatgggtgggcttttcatagactgtgtctaatgtgtgcagagtaggagatggttcataaggctcagatataagtgtaggggctgctgtccccttcaggtctccttcagtggaagttatctcctcagtcttctcggaaaggtcatcaacaacttcctccagaggtgtgcttgttacttcaggttcaacaagaataactccattgtggttgtgttctagccccatgctggctgaggaaatggtacccaaaacgtgctcttcttcaccaagtagaggtacatctgctgaggattcttcagcactggttactgtctgcacaggagatgctgaggggggagaaatagcaggaaaaggtggtgtgacttctagactcaaggatggaggacttgtggttttaatcaatgggggtacttctgtgcccttagggagatttttcccacggactttggctaaaatatcagcccagcgctccggattaatctgtttgtttgccatgtttatccttcgtctagattcaaacactctgcgaccttctgcaacattggtctctggttctttttccgaatgcttccagagtttcagctttcttctccctttcttggctttcttgtctccattgatggcatcatcctttgttttgaggaacacctcttggtcctttggatgcagaagtctccttgaagtgttctcttcatctcccatgcccgagcccccttcatcctccacgatgtcttctctgactctggaaagagcctttgcacctgggcgtctgcctcttttggatggcaagccagaccctttcttggtcactgtgattcccaccgtaaaatggtctgccccttgctggttgacagccacacatctgtagtaaccactgtcactgacttggacctttgggatggaaagagttccatttggcaacatgtatacatgtgatgtgttagccaaatcattaattatccttctgtttggaagaatccagctaaggtgggcttcgggtattgctaaagcattgcaaggcaatgtcaccgactcccctgggttcttgccaattgtcactgtgtctttctcggctggctgagtggagggagactgcacaagtaccctatataccatgcggtccatttcatccctcacttgagcaatgcactggtacaagcctgagtcagatggctccatggacttgatcctcagccagccactgctgagaatggagaacttgctgtctgggtcatccatgggcgctttcaggatggagccatctggaagcacccagaagatagatggactctcagaagctttcacgttgcagctcaactggcatggacccccttccaggacagtctgatctctttgcacagctccactaggctcaatcattacccagcttctgccccgagcctgccttgtatctttggtggatattgtttgagaatactgggtgtagtaggaaagtagcaccttcttggccgtactctgacgtcggttcagctggatatctatggatggctgcatgacccattctggttctgcaagaatctgggctctcacacctgtgtagtaaagagcttcctcatcagcatcctgcctgtactggtagctgactctggggtctttgctgagcatgagctctctgtgtagcttcacgggaacttcactgtagtatgctatcaatttccatagcttttcatagttttctcgggtcattggacactcaaagtccaaggcaactgttgcatttatgtcaatatctggaggatccgtttggttcaagtgaatcttgtacacatccattggtttcttgatgtcacagaccaagttcaccatgttcccgtgctcgtcggtcatattcaaagagatgctccactggggcagttggaatttctccaggatgagctggctgccaccatcctcttcctgttcttgctcctcctcaatactcctgctcctgttctgtctcagaggggactctattgaaggcttcagacaagtcatgtccttcagcttgtgtatctcatgtttgtacaacttctttggactgaagcacattgcacacaactgaccgccttcataagctttgtcctttttacacttcagaattcgttgtcctcttggtctcctggatatgaaatcctctggaattttctccgtcctttctggccacaactgggtctcagtcactgcttcctcctcctcctctgcctgaatctttgctgactgggtcctccttgacttgagcctaagcccctttcctttctggtcggcttcagcgtcaatggcctctcgcatatgtgtggttccaattaccatccacccgccagtgatgactaccatatgtgcttctctagtccaaacacattccgtgagttccacaccccattgcctctttgacatgtactcacactcatacccacacacatacatgctgtgagacaaggcagcaagcacaagcaggagcatttcacaaaatcccttggccagctgaatttcatggctcagcgaatgagcgcagcctctacatgaatgccctctggattttgcatcccattccaaaaaccatctcatctcacaatcgcaggtccacggatttccctgcaagtaaagattctccagaagcggcatgttccgaagcatgctggcaggaagagttctaaccatgttctctgctaagtagaggtgccttatggtggagagtctgaaataatccaaaaatgtgaacgtggagaaggtgctggggtgcagctggtggaggagatttccttccaaatggagtagcctcagagacgttaagccgttgaaagcttgagggtggataaactcgatcttgttgtggtcaatgtgcagcctcattaagttagagagaccctggagggtctgtcctgtgatcactctcagcttgttgtagctgaacttgaaaacctgaagagagctgaggtctcttaaagctccatcggggatgcttgggatctcattgccgtgaatcataagtagctccaacttggtcagtcctgaacggagcccagaagaaggaggcagatcttcagacagaggagatagggctctgaggctctgtctctgaaatgggtcagaaacagctggatgttcctcagcacattttacttcaagggtgtgatatgttctccttccatagttgtggtcaccaaaaaggtctccagatgttgccaaatgttttccaggggcaaactcatccat

SEQ ID NO: 23876 - DNA, 1230 bp, Homo sapiens
  SIMILAR (343)..(1221): 831254mologous to Homo sapiens orphan neurotransmitter transporter NTT5,accession number AF151977,Smith-Waterman Score= 1259.
atgggtggcagtcaggcccagtgctgggtggactgtgtggaacagctggccagagctgtggggatggtgacggcatttggtgggctcaggcagcacaggctggagatccagctcacctccgacttctcacccacggccaaccctcctcagtaccagaggcacctgttcgtgcacatcagccagcactgccccagccccggagcgccgccgctcgagagtgtggacgtccggcagatctacgacaaattccctgagaaaaagggtggcctccgagagctatatgatcgtggccccccccatgccttcttcctggtcaagttctggataagggaaaaggagactatctcctactgggccaaatggttcgatttgattcaaccctctatccccaggaatgctgaaatacttttaaagctgataaacctagggaaactgcctcctgatgccaagccccctgtcaacctgctttacaacccaacctccatctacaatgcctggctcagtggccttccccagcacatcaaaagcatggttctccgcgaggtgactgagtgcaacatagagactcagtttcttaaggctagcgagggcccaaagtttgcattcctgtcctttgttgaagccatgtccttccttcctccgtctgtcttctggtcttttatcttcttcctgatgttgctggccatggggctgagcagcgcaatagggattatgcagggcatcattactccactccaggacaccttctctttcttcaggaaacatacaaagctgctcatagtgggagtctttttgctcatgttcgtgtgcggcctcttcttcactcgaccttcaggcagctacttcatcagactgctgagtgactactggatagtcttccccatcatcgtcgttgtcgtatttgaaaccatggctgtatcctgggcctatggggccaggaggttccttgcagacctgacgatcctgttgggccaccccatctctcccatctttggttggctgtggccccatctgtgtccagttgtgctgctaatcatctttgtgaccatgatggttcatctttgtatgaagccgatcacctacatgtcctgggactcaagcaccgctcaacatcacgtggaagctgccaaggcttggggcttctactctctgaagccacagcccgagctgtacgttggcccctttcagccatggctggagtggctgggacacagggcaccaagtccctag

SEQ ID NO: 23877 - DNA, 923 bp, Homo sapiens
  SIMILAR (446)..(565): 561254mologous to Homo sapiens zinc finger protein (154 AA),accession number X16281,Smith-Waterman Score=109.
atccgcctccctgagaggtttggggatggggtgtttagaggtgtggacagggacggctggagtgtggggtcgctggttggtggagaagtgagaggtgactcctgggactgtaggtgaagaaaccgcattctgctgagtgggttcccttgtggggtcttcagcctggttggcgccagcctttccgctgcaattcaggatccgagaaagaactgaggcgacccgtgagcaactctcaagagatcttatcccctgtcacgatgaggaagccggcggtcagcgtctgctgtgacctgactctcagggaggcggccccaccatttcaaagacatgaaagaacttacactggagagaaaccttataaatgcaaacaatgtgggaaagccttcagtggtttctgttacactcaaatacttgaaaaggctcaaactggaaaacaaccctatgaaggcatgaaagaactcactggaaacaaaaccatgattgtacgcaatttggtaaagccttcagtttttccagttccctttgtatacatgaaaaaattcacactggagagaagctgtatgaatagtgtctggtttcatctctatgacataattacaaccaaaatcctaaaggaactgatttaccacactgtgtttgccataaggcccaatttgtacctgcagcagcagctgtatcatcccaactcacagctctaccctctaaaggctcaacaccatgcggaagctgccaaggcttggggcttcaaccctttgaagccacagcccaagctgtacgttcgcccctttcagtcacggctggagtggctgggacacagggcaccaagtccctacattgcacacagcacggggaccctgggcctggcccgtgaaaccactttttcctcctgggcctccgggcctgtgatgggaagggctgtgtaa

SEQ ID NO: 23878 - DNA, 494 bp, Homo sapiens
  SIMILAR (376)..(489): 861254mologous to Homo sapiens Nedd8-conjugating enzyme hUbc12,accession number AB012191,Smith-Waterman Score=161.
  misc_feature (1)...(494): n = a,t,c or g
tttcgagattttagtcagtgcggcggaattccccctttgctgactgcgggtgattgattccccagtcatcttcctcatggcctgaccttggatttctccttgggctgtcctgctgcacaccctccctaccagcctctcacatgctcactctcctatgccctggatctgacctgcccaacaccagaggggcctgtggcagtctcccactcaccaagccctgaccctgatgctctctgtccacagagaggactggaagccagtccttacgataaactccataatttatggcctgcagtatctcttcttggagagtaagaataggtggttgggtctggagagattgggcttctgtccctctggcctgataaccccccctacctgtactggccacaggagccccaccccgaggacccactgaacaaggaggccgcagaggtcctgcagaacaaccggcggctgtttgagcagaacgtgcagcgctccatgcggngtgg

SEQ ID NO: 23879 - DNA, 1065 bp, Homo sapiens
  SIMILAR (736)..(846): 971254mologous to Homo sapiens Nedd8-conjugating enzyme hUbc12,accession number AB012191,Smith-Waterman Score=172.
atgcacattggaaggtttcagtcaggagtagattcagcagcaaaccagtggaaacgcagcttagtcgccggaagtgacctgcaaggccgccgaagcgtcatctccatgaacggaaatgcccgagtccagccgaaggaggccgaaccccaaactccatcgctgagcaacgcgggtttgcggcggctgcgcaggcgcacaacgcaggccgggcgggaagagccaaagcgggcaggcggcggaaatatccgaagcggcggggcgcccgaggccgttgccgacctccgcgctaaagccgctgctgccgcggaagacgatcctccaccgcaccccctcgcggagggatcagctgagcggccaaacggcacggtcgggggagccccgagtccgcagctgcagcggggcctgagaccagagttggcgagggcaaggaaggagcggccccgggcagtgggggcggggccgggcgggcccgagaacagccgaatttggccgagcgctgccgagcgagtccgaggcgctgggccaggccggagccggactacgggagccgaggcgggccgcgcggtgggcgcggagaggagcggagcggcgcggcaggccgggcgggtggcggcagcagcggaggaggccgcagctgcgggtccgaggagcggaggcgacgcgggcggcggcggggggccgggtggccggggtcccgggccccgcggcggcggcagcggcggcggcggcggcaggatgatcaagctgttctcgctgaagcagcagaagaaggaggaggagtcggcgggcggcaccaagggcagcagcaagaaggcgtcggcggcgcagctgcggatccagaaggagaggtattgtaagagcaccccttttccttctcctgggcccaagaccttcatccccagtatgaggcagccacacaagcagcaggtgttacccaatgccagcagcagaccttggagcatcacctccccaccaggttccacaccactgtggggccccattgtccacatggagaacctgaggcttcagcaagtgccaggacaccagtcggggaagggagattaa

SEQ ID NO: 23880 - DNA, 1004 bp, Homo sapiens
  SIMILAR (72)..(617): 411254mologous to Homo sapiens Nedd8-conjugating enzyme hUbc12,accession number AB012191,Smith-Waterman Score=277.
gcgtcgacccacgcgtccgggcggcggcagcggcggcggcggcggcaggatgatcaagctgttctcgctgaagcagcagaagaaggaggaggagtcggcgggcggcaccaagggcagcagcaagaaggcgtcggcggcgcagctgcgggatccagaaggacataaacgagctgaacctgcccaagacgtgtgatatcagcttctccagatcccagacgaccctcctcaacttcaaagctggtcatctgtcctgatgagggcttctacaagagtgggaagtttgtgttcagttttaaaggtgggccagggttacccgcatgatccccccaaggtgaagtgtgagacaatggtctatcaccccaacattgacctcgagggcaacgtctggcctcaacatcctcagaggagactgggaagccagtcctttacgattaaactccataatttatggcctgcagtattctcttcttgggagcccaaccccgaggacccacatgaacaaggaggccgcagaggttcctgcagaacaaccggcgggctgttttgagcagaacgtgcagcgctccatgcggggtggcttacatccggctccacctacttttgagcgctgcctgaaaatagggttggcgcatacccacccgccgccacggccacaagccctggcatcccctgcaaaatatttattgggggccatgggttaggggtttggggggcggccggtgggcgaatcccctgccttggccttgcctccccttcctgccacgtgcccctagttattttttttttttttaacaccatgtgattaaggtcggcgctgcctcccccgacccactcagcgaatgggaaatgaattggcttgtctagcacccactgctgggtgcttgttcagcccccactctgggctgtggagtgggtgggcaacgggcctgggtagctgggcccaggcaacccacccctccacctctggaggtcccaccaggctattaaaggggaatgttactgca

SEQ ID NO: 23881 - DNA, 884 bp, Homo sapiens
  SIMILAR (517)..(738): 581254mologous to Mus musculus F-box protein FBX17,accession number AF176532,Smith-Waterman Score=261.
atgagggacagagacaaactgcagctgttcttcctccacttgtccttcctggagagtgcaataaaaacacctcctttatttggtaacataaggaatgagaaaacccctttcaaagacacgccaaagaagagatcaactgccttagtaaacagatctacacgtaatgtagaccgccagttagggatgaagttagaatctcaccacatgatggattcctgtgtcttcaccttcgaccagtactgggatcctttcaagagtgtcatcagcaccttcacagatagctctgcaaaatggcggctaacctatggctccattgtcaagtcaacagcccacactatttcccaatacattgactcaggcacagcaagtacagctgaccaaaggcctccgaaagtggatggtgcaacacggtggggacggctgggtggtggaggaaaacaggacaaccgtgcctggggccccttctcagacgtgcttcgtgacttcattcaggtgaatgcccctgctatccaaagctggtgttgcaagaagcaggtcttggacctagaggaggagggtctgtggccagaactgctggatagtggcaggattgagatttgtgtctctgactggtggggagcccgacacgacagcggctgtatgtacagactcctcgtccaacttctagacgccaaccagactgttctagataaattctctgctgtgcctgatcccatcccgcagtgggaacaacaatgcctgcctttcacgttcacccacgtgtttttccaacattcaagatggggcgtccgtttttgtgtcttttcggaacaccgggggccagggacacacagttctggggctgggccactattgagcccgtgtgagcaacttcagtgtgaatg

SEQ ID NO: 23882 - DNA, 927 bp, Homo sapiens
  SIMILAR (432)..(752): 411254mologous to Homo sapiens crystallin beta-B2,accession number L10035,Smith-Waterman Score=155.
gcggtggaattctaaagagaacaatgaaagctgggccggctccttcaagacccgcctcaaggtggcaccgcggcggcttggggaccaccatgagacccctgctggggaaaaaaaaactcactgatattggcctgagtgcctacgccggagctgcgcgcagatcatcatgtacggggcatttttttctacacggttattgctctgtcacccaggctggagttcatcagtgcgatcttggctcattgcagccttgaacctcccgggctcaagtgatcctccctcctcaacctcccaagtagctgggactacggctgggtgagctatgaacaggccaactgcaagggcgagcagtttgtgtttgagaagggcgagtacgcccactgggactggtggaccagcagccagaggacagacttcagcagcctgaggccccatcaaaagtggacagccaagagcccaaggtttcatctttatgaaaaccccaacttcaccgggaagaagatggaaatcatagatgacgatggtacccagcttccacgccccatggctaccaggagaaggtgtcatctgtgtgggtgcggagtggcatgtgggttggctaataagtaccctggctaccgtgggctgcagtacctgctgaagaagggagactacaaggacagcagcaacttttggggcccgtcaccctcaggttacagtccgtgcgctgcatccacgacatgcaggggcaccaatgtggtgccttccaccccttgggaactcaggaggaggaggaggcaggacagaaagagcagatggaacaggtacccttttggttagccagaggggacatttgtgaactaagtgggaagaaaagtgtcatttgattagaccatgtgcatccggagccctttcctttcttttggtggccacctctccttgaggggc

SEQ ID NO: 23883 - DNA, 541 bp, Homo sapiens
ttttttccattgtagttggatttatcagagtatctgcgcaaagactctctctgctgccttggccaggggttggtagagtagtcagggaggaacagcgtgggcccctctagtagcacacaggtgaccctgctctgatgtctcagtgccgcaatgccatgtccccagcaggatctactgagcagcttccataggaaggagcatgacagagaaagcccacgcaggccctaggcccggcaggaattaggcagatgctccatcttcctctgacacactgttccctccagacgcactcctctcaaaccaggctggacgcctggcctgctggctgttttcatacggcccacagactaagaatgattttcacatttttaaatagctgatacacgtggaatgcatttgctgctttgccccggagaaacactgaggggatccagacgttgatcagcgcccggtttgatatttcaaaatccgacaaactctggtcttcggacgtttgactcaaatctccaggcaccggtccccggagatcgatgagctcctg

SEQ ID NO: 23884 - DNA, 624 bp, Homo sapiens
  SIMILAR (245)..(96): 331254mologous to Human adenovirus type 5 protein pVII,accession number M73260,Smith-Waterman Score=65.
gatgccaagtttgtggaggaacggagaaagcagctccagaattacctgcgcagcgtcatgaacaaagggatgcagatggtccccgagttcgctgccagccccaagaaggagaccctcatccagctgatgcccttcttcgtgtaagtactgctcccatggacatgggccgccagccctgccagcattttttttctcggtcgttttggaaggtcagggagtagagcggctctccgtgatgccctgatcgccatgggacccaggcgaactccaggggctgttccaggtgccaaagtggaggttggttctcagcgctttggagcttctaaagggatgggaagagagcaggcctgcaaatgagcattgttgacttgaggctcacaaagaaactttgggctctgtgattttgtactttcacacatttcgatcaagggaagattaattttctgtacagcccacgggtgctccaaaactgaaacaaattgtgtcagtgtttctcaagcttgggtaatgaacccaaggaaagttctcccagactcctaccagtattgacttaaattatttttatatgagttttacttaaaaatccacattaatattatttaaatgccttcttctctcttgaaa

SEQ ID NO: 23885 - DNA, 557 bp, Homo sapiens; identical to SEQ ID NO: 17377
  SIMILAR (120)..(230): 371254mologous to Methanosarcina thermophila ferredoxin,accession number M83188,Smith-Waterman Score=72.

SEQ ID NO: 23886 - DNA, 399 bp, Homo sapiens
  SIMILAR (289)..(345): 421254mologous to Rattus norvegicus betaB1-crystallin (AA 1 - 50),accession number X06377,Smith-Waterman Score=38.
atgggactgtcatctacagctcttatggatttggaaaaggaaaaggagagcatggatcttcgccctagtgaggaagacgtaccaaagcgaagatgttttgtgtttcctcaggatgccaagtttgtggaggaacggagaaagcagctccagaattacctgcgcagcgtcatgaacaaagtcatccagatggtccccgagttcgctgccagccccaagaaggagaccctcatccagctgatgcccttcttcgtgtcagggagcacagcggctctccgtgatgccctgatcgccatgggacccaggcgaactccaggggctgttccaggtgccaaagtggaggttgggtctcagcgctttggagcttctaaagggatgggaagagagcaggcctgcaaatga

SEQ ID NO: 23887 - DNA, 1179 bp, Homo sapiens
  SIMILAR (929)..(1126): 371254mologous to Plasmodium lophurae histidine-rich protein,accession number M15317,Smith-Waterman Score=116.
atggtgcctggagatttgagtcaaacgtccgaagaccagagtttgtcggattttgaaatatcaaaccgggcgctgatcaacgtctggatcccctcagtgtttctccggggcaaagcagcaaatgcattccacgtgtatcagcagagcatagcaggggtctcgggcatcgccaggaaaagagctttaatcccctttggaaaatcaaccttcagctacgtctgcatcaccaacataaaactcacggatgccctgcccagctgggactacacctgccatttcaacctgcccaaggcccagaagccaggggaaccaacaaagtgcatcctcaccatggagtggctggctctgctgcaaggagacccaggatcatggatacagaaagaatttattgttggaaaacggggcggcaagatggacaacattctctgggaccaacgggatgtgcagcctcctgggctcaggcctcaccagctcctgcacagtggtggggggccactgatcagcttcaggaatggtggtcccattctggtttgggaactgagaagaaagggagcctcggggaaggagattgtggggagcagatattttagggaaagtgatgaagttctagtgtggaaaaaccctaaaacactacagaaagaagatgaggaagtaaacagcacccaccccatgcacacctacccttgcactcactgtcaagtcttttgtgtaactgcagaaatcatcaatatttatctccaggcctgcatcgtcttggaaatgtccatgctgcccccaggggaaaggcccctgtttcttctgaggctgacaacagtcctggaagtgactgtctttgactctcaatggtctaggccataccacgtgtctgctgaccccagtgcctggaagcatcaccatcattatcatcatcaccatcattaccagttatcatcatcatcaccaaccatcaccattattaaccatccatcaccatcactagccatgcatcaccatcaccagccatccatcaccatcaccagccgtccatcaccatcaccagccgtccatcaccatcaccagccgtccatcaccatcatcatccgtccatcatccatcaccatcatcaaccacccatcacaggcatcatctatccatcaccatcatcagccatccatccctttcatcgtcagccatccatag

SEQ ID NO: 23888 - DNA, 2505 bp, Homo sapiens
  SIMILAR (55)..(519): 931254mologous to Homo sapiens putative p150,accession number U93563,Smith-Waterman Score=709.
atggggcctgaaatctgcacatccgacaagctctcagatgaggctgatgtcactgtgttggaagttctggccagggcaatcaggcaggagaaggaaataaagggtattcaattaggaaaagaagaagtcaaattgtccctgtttgcagatgacatgattgtatatctagaaaaccccatcgtctcagcccaaaatctccttaagctgataagcaacttcagcaaagtctcaggatacaaaatcaatgtgcaaaaatcacaagcattcttatataccaataacagacaaacagagagccaaatcatgagtgaactcccattcacaattgcttcaaagagaataaaatacctaggaatccaacttacaagggatgtgaaggacctcttcaaggagaactacaaaccactgctcaaggaaataaaagaggaacattccatcaaatggaagaacattccatcctcatgggtaggaagaatcagtatcatgaaaacggccatactgcccaaggtctacatccggataaaagacgatgaatggaatatttatcgccggtatacagagttcaggagtttgcaccacaagttacaaaacaagtaccctcaagtgagggcctacaacttcccacccaaaaaggccattggaaacaagtgtcatgggccacttgcatctttagaaaccatgcaacacagggaaagagcttgggctgtggattcagatcctgccccctcccacactggctgtgtgaccctggacaagtcctcagcctttgtggcactcagctgtcacatggtggtgagcacactgacagcatgggctgtggtgaagagtgaacaagcttatgccagtcaagtatttcccatggtgcggaccaatgacttcagaggactgaacaacaagggctctggggaggacagccacctggctgcaaccaagatcctaaggcatcttaagagttcttggcagaaaggccctgaagtaaaaaaaggtgatgagaccgaaatgctttctgaggctgtagacctggctgcagactgtgtgagtccaggggacagtgaccaaggcctgctctctgcatccctgatgcctagaacttcattatctcatggagaagccacaggatacatccatgaaactagcaatgagaatattgtgagcaaaccatgtcgattgataccaccattcccgctgcctaacaggcccatcttcctgatcaacttcaactcatccttaaaaactcaagtcaaacgtctcctctttgaaaccttccatgacataccccagcagatgcactcgtcggaaaatagctccatgaccatcttcttagagaagatgttcctcagggaaataattctggaacataatgactgcaatagtgttccttggggaaataattttgggaaatgctgctgtacctagcccatccctttggagaagcacggagcacccccatggtaattccaccaaggcaggcaccttatctgtctggttcatccctttatcgccggagcctatcacagtgcctggagatcccaagaggctccatacacatttgttgagagaacaaatacctgttgggataaaattagggaaggccaggcagaccataggaagaatggcctggaggatgttgcgaaagtccagagagagagaacaaagatccctggtggtggagtggacagactggcctggaagccagctccctgattccaaagagagccgaacaccagggagcaatgggagagaaaggcagctccagggcagggaggagcctgaagatgccaaagacagtagcttagggggaccacaagattcaggagcagaggggctgaggcttaattgcttatcacaagtcaagtggttatcagatcacaaaggtaacattcacagagtagctatggcccaagcatttcatatgtcatcacacacggtcacatccatgctgcaaggtgagtggtgtcccgtccctcctccttgttcctttctctgcagagcgaggctacctttaccccacacagcctgccttcttgctaaactagtgagactggtgacggtcagctcaatgtcaagtttggctcccactggttctgcaggtttggcacatgctgggcatatagcagaaccttgatcaacagctttgggacgaataaaggctttatactggaagggaaattttaaaaattcttcctgatacacgtggaatgcatttgctgctttgccccggagaaacactgaggggatccagacgttgatcagcgcccggtttgatatttcaaaatccgacaaactctggtcttcggacgtttgactcaaatctccaggcacctcatgacaaccagcctctgattgcccaagaaccctgctattggcaacagtgtcacacttgctatctgggacagtattctggttggccagtggactctctcttcgggttattttcgatgttcgctcttcaactgagcagcaagccacattcgccagcagcacctgtggcccatggaaactcat

SEQ ID NO: 23889 - DNA, 1238 bp, Homo sapiens
  SIMILAR (649)..(855): 361254mologous to Homo sapiens I-1 receptor candidate protein,accession number AF082516,Smith-Waterman Score=114.
tttttttttgtcttctcgctctttctgtatctttcagtgcaggcctggcatctcttgggcacacaccgattcgtgcatgtagttgacagtgaataagctaaatgtgcatttgatgccactctagggcgtatgccagatactgggttaggcttcatgtgctccaggtgaccaaagtctgaccccctagcctggacaggtttcctgtctggccctcgctgatctctgaacctgtgccacttttgttctgctgccctgccattcctctcttacacacctgatgtctcctgcagttgtgccaaatctttggagtgttgatggagaagttacagtagctgaacagaagccgggagaaattgctgaagaactcgcaagctcctacgaaagaaagctcatcgaggtggcagagatgcatggcgagctgattgagttcaacgagcgcctgcacagggccctggtagccaaggaagccctcgtgtcccagatgaggcaggagctcatcgatctccggggaccggtgcctggagatttgagtcaaacgtccgaagaccagagtttgtcggattttgaaatatcaaaccgggcgctgatcaacgtctggatcccctcagtgtttctccggggcaaagcagcaaatgcattccaccgtgtatcaggtctacatccggataaaagaccgatgaatggaatatttatcgccggtatacagagttcaggagtttgcaccacaagttacaaaacaagtaccctcaagtgagggcctacaacttcccacccaaaaaggccattggaaacaaggatgccaagtttgtggaggaacggagaaagcagctccagaattacctgcgcagcgtcatgaacaaagtcatccagatggtccccccgagttcgctgccagcccccaagaaggagaccctcatccaagctgatgccccttcttcggtcgacatcaaccccgccccggagagccctgtgaacagcccggcccaaagcagcttcccgcttccccaaactgtcccggggtcagccccgggagacccgcaacgtggagccccagagcggtgacctctgacctcgacaaaaccgcagccacgggccctgtgcgtggcaccagctgcgtccaccccagccactgccgctggcccctcacctcagcgtgacaaccacgtcccactggtgatcctgagagcacacgattcccaacagttacacaacaccccgattaaactaatcagtcttcg

SEQ ID NO: 23890 - DNA, 702 bp, Homo sapiens
  SIMILAR (7)..(468): 651254mologous to Bos taurus polyubiquitin,accession number Z18245,Smith-Waterman Score=456.
gtcaaaatgcggatcttcgtgaaaacccttaccggcaagatcatcacccttgaagtggagcccagtgccactatcgaaaatgtcaaagccaaaatccaagataaagaaggcaatccctgtgaccagcagaggctcatctttgcaggcaagcagcgggaagatggccgcagtctttctgactacaacatccagaaagagtcgaccctgcatctggtcctgcgtcggagaggtggtatgcagatcttcgtgaagaccctgaccggcaagaccatcaccctggaagtggagcccagtgacaccatcgaaaatactgaagaattaacagccacccctcaggcgcaggaccaggtgcagggtcgactctttctggatgctgtagtcagaaagagtgcggccatcttccaacttcttgcctgcaaagatgagcctctgctgatcgggggggatgccttcttcatcctggatcttggctttcacattttcgatggtgtcactgggctccacctccagggtgatggtctttccagtcagggtcttcacgaagatcttcataccacctctcagacgcaggaccaggaatgtgcccttaacccacgcacacaaaagacctcgctcaagttaacacaacttgtcattacaagcagaagaaagcaaagcattgtggtagttcatcttggaaatatctgtaaggtttttatctga

SEQ ID NO: 23891 - DNA, 1263 bp, Homo sapiens
  SIMILAR (290)..(454): 581254mologous to Bovine viral diarrhea virus-2 polyprotein,accession number AF104020,Smith-Waterman Score=131.
tcaccgtcggtatttgtgcagggctttggcagttagtgtcttcacatgtcgggctctctcaaggatgggaattattaggaaccattggcttcgtcgccttttgcagtttttaccgcaggcggcggtaaatcggggtttatcagaagtctggcggttaattattccgggatggtgtgggcgtttttcgccgcgctgactgctggttggctggcctctgtaagtggactgtccgcgttccttctcggcggtagtggtctggcaagggcgtttctggttactgtcctttattcccggtggctttctcggcatgacgctgttttttgccagcgggatgaactggacggtgacgttactgggttttctggcgggtaacctggaagtggagcccagtgacaccatcgaaaatgtgaaggccaagatccaagataaagaaggcatccccccgatcagcagaggctcatctttgcaggcaagcagctggaagatggcggtactctttctgactacaacatccagaaggagtcgaccctgcacctggtcctgcgtctgagaggtggtatgaagatcttcgtgaagaccctgactggaaagaccatcaccctggaggtggagcccagtgacaccatcgaaaatgtgaaagccaagatccaggatgaagaaggcatcccccccgatcagcagaggctcatctttgcaggcaagaagttggaagatggccgcactctttctgaagccatcttcttggacgtgggcctgctcctctcctgcaggacagtgagctcctgtggggcttttatccttggctggagtgtggtcatcttgatccccgtcatcagcacacgagatgacacaagcacgactaaatagattgatacgacatgcacaaccactgcgcatacgcacgagactgcagcagcgaagaccatgcagacagctacacgcgacacgaacacgagccccagcacgacagcttgagcgtgaccatacaggaggatggtgcccaggtgagtaaggactgagcagatgaggaaggcactgctgtttagaacccagcccatcagggaggcagcactgtaaaggtattggttgaggaatctcttctgcaaggtcccatgtaagagttgtggccttttccacgttcagtatgatcttagctgtagggttgtctttacgcccttttgtgttgaggcatatgttttccacactaaattgtttagaggcttttgtcatgtaagaacgtttaattttgccaaatgctttcat

SEQ ID NO: 23892 - DNA, 977 bp, Homo sapiens
  SIMILAR (101)..(502): 401254mologous to Suberites domuncula polyubiquitin precursor,accession number Y12081,Smith-Waterman Score=154.
  misc_feature (1)...(977): n = a,t,c or g
accatcatttcgcctagcttggcccgaggggcggttggctttgttgggtgagcttgtttgtgtccctgtggttggacgtggaatggagaatggcaggatcctggtatccgctgacaggtcaggagggcacatttgtctgaaaacccttacccggcaagaccatcacccgttgaggtggagcccagtgacaccatcgaaaatgtgaaggccaagatccaggataaggaaggcatgtccccccgaccagcagaggctcatctttgcaggcaagcagctggaagatggcccgtactctttctgactacaacatccagaaggagtcgacccctgcacctggtccttgcgtctgagagggtggtatgcagatctttccgtgaagaccctgaccggcaaagaccatcaccctggaagttggagcccagttnacaccatcgaaaattttgaagggccaggttccagggtaaagaagggattccctcccgaccagcagaggctcatcttttgcaggcaagcagctgggaagatggccgcactctttctgactacaacatccagaaggagtcgaccctgcacctggtcctgcgtctgagaggtggtatgcagatcttcgtgaagaccctgaccggcaagaccatcactctggaggtggagcccagtgacaccatcgaaaatgtgaaggccaagatccaagataaagaaggcatcccccccgaccagcagaggctcatctttgcaggcaagcagctggaagatggccgcactctttctgactacaacatccagaaagagttcgaccctgcacctggtcctgcgcctgaggggtggctgttaattcttcagtcatggcattcgcagtgcccagtgatggcattactctgcactatagccatttgccccaacttaagtttagaaattacaagtttcagtaatagctgaacctgttcaaaatattaataaacctgcagcgcgggtcaaat

SEQ ID NO: 23893 - DNA, 448 bp, Homo sapiens
  SIMILAR (368)..(54): 911254mologous to Homo sapiens angiopoietin-related protein,accession number AF153606,Smith-Waterman Score=525.
gcggtccccgttgatgctatgcaccttctccagacccagccagaactcgccgtggggatccccaaacccccccttgtaggttcccagggccggttgaagtccactgagccatcgtggcgcctctgaattactgtccagcctccatctgaggtcatcttgcagttcaccaaaaatggcggagacccctgaggctggatttcaaatagtccactctgcctctccccaacctggaacagctcctggcaatccctgggcagccggtgcaggcggctgacattgtgagccgggtcaactggctgggccatctcgggcagcctctttcttcgggcaggcttggccacctcatggtctaggtgcgaggactggagacgcggaggaccgggggtaagacccgcttggttgcagaagccgctggaaagaatcggatcacagtcgtggtacccaagtc

SEQ ID NO: 23894 - DNA, 431 bp, Homo sapiens
  SIMILAR (427)..(2): 881254mologous to Homo sapiens angiopoietin-related protein,accession number AF153606,Smith-Waterman Score=675.
cttccccaaccaggtgcacggaaaagttcagcaactcggcgttgccatcccagtgcctcatctgcacggccaggcggctgttgcggtcccccgtgattctatgcgccttctccagacccagccagaactcgccgtggggatccccaaccccccccttgtaggcttcccaggcccggtagaagtccgctgagccatcgtggcgcctttgaattactgtccagcctccatgtgaggtcatcaggcagttcaccaaaaatggcggagacccctgaggctggatttcaaatagtccactaagcctctccccaacctggaacagctcctggcaatccgtgggcagccggtgcaggcggctgacattgtgagccgggtcaactggctgggccatctcgggcagcctctttcttcgggcaggcatgaccacctcatcc

SEQ ID NO: 23895 - DNA, 517 bp, Homo sapiens
  SIMILAR (338)..(3): 911254mologous to Homo sapiens angiopoietin-related protein,accession number AF153606,Smith-Waterman Score=548.
  misc_feature (1)...(517): n = a,t,c or g
gagaagggtacggagagnccgctgggtgggacggtggtggcgcccagctggccggccacgggtgcagtgagctgcaggctataggccgtgtcctcgccacccaggtgcacggagaactgcagcaactcggcgttgccatccaagtcccgcagttgcacggccagcgggttgttccggtcccccgtaatgctatgcactttctccagacccagccagaactcgccgtggggatccccaaaccccgccttgtaggcttcccagggccggttgaagtccactgagccatcgtggcgcctctgaattactgtccagcctccatggtgcaggcggctgacattgtgagccgggtcaactggctgggccatctcgggcagcctctttcttcgggcaggcttggccacctcatggtctaggtgcttgtggtccaggaggccaaactggctttgcagatgctgaattcgcaggtgctgcttctccaggaaccactgctgctgggccaccttgtggaagagttgct

SEQ ID NO: 23896 - DNA, 667 bp, Homo sapiens
ctgtcgcccaggctggagtgcattggcgcgatctcggctcactgcaagctccgcctcccgggttcaggccattctcctgcctcagcctcccaagtagctgggactacaggcgcctgcaaccatgcccagctaattttttgtatttttagtagagacggggtttcgccgtgttagccaggatggtctcgatctcctgatctcatgatccacccgcctcggcctcccaaagtgctgggattacaggcgtgagccaccgcgcccggccaagagctccttcttaaccgcacaggcatgtgaggcccagaagactggctctgccaccagaaggaaggattgtttccttcaaccaaccttttggttgctaccatttcttgtccttgagaaaggtgctcctagtgcttgtagagggaaacgctacgtccgtgcagtatggctctccctttccacaggagcgatcctccagccctaccccaaactgcaggtttccaattggttatgatgtgccagagaccaggaaatgccagagggatgtttgtaacaaagctgccaaactctaagccttcttgttctaccccctaaggagaaaaaagatgtgtaagagattagcccatggaccccagctccacctgaacatcaatataccgtgaggacattccagagtccctgc

SEQ ID NO: 23897 - DNA, 512 bp, Homo sapiens
  SIMILAR (334)..(272): 901254mologous to Homo sapiens PRO2822,accession number AF119900,Smith-Waterman Score=100.
taggcactttcaaaaatgatcttatattactgatttcaaagagttattattaagctcccttaccctctgatttctcccattctgacacatcttcttaaaaaccgtcaaagagtctgaaaacatatccctccccaccctttttttcagccaagacctcactcttacaatgtccaagaaatattttatattaaaattaacaataaggggccgggcgtggtggctcacacctgtaatcccagcactttgggaggccgaggcaggcggatcatgaggtcaggagatcaagaccatcctggctaacacagtgaaaccctgtctctactaaaaatacgaaaaaaaattggccacgtgtggtggcgggtgcctgtggtcccagctactcgggaggctgaggcaggaaaatggaagtgaacctgggaaggtggagcttgcagtgagccgagatcaaaccactgcactccaagcctgggtaacagaagtgaaacctccatatcaaaaaaaacaaaaaaaca

SEQ ID NO: 23898 - DNA, 474 bp, Homo sapiens
  SIMILAR (452)..(6): 941254mologous to Homo sapiens angiopoietin-related protein,accession number AF153606,Smith-Waterman Score=760.
ggaatatagcccgtgtcctcgccacccaggtgcacggagaactgcacaatctgggcgttgccatccaagtcccgcagttgcccggccaggcggctgttgcggtcccccgtgatgctatgcaccttctccagacccagccagaactcgccgtggggatccccaaaccccgccttgtaggcttcccagggccggttgaagtccactgagccatcgtggcgcctctgaattactgtccagcctccatctgaggtcatcttgcagttcaccaaaaatggcggagacccctgaggctggatttcaaatagtccactctgcctctccccaacctggaacagctcctggcaatccctgggcagccggtgcaggcggctgacattgtgagccgggtcaactggctgggccatatagggcagcctctttcttcgggcaggcttggccacctcatcctcgtgccaagcttggcgtaagcagagt

SEQ ID NO: 23899 - DNA, 400 bp, Homo sapiens
acacaggataaagttattcttgtcattttgaaactgtagagtccctatttcggtgtgatgaatcactgttgcctttgaaaaatcctcattatttctgggccgggcatggtggctcacccctgtaatcccagcactttgggaggccaaggcgggtggatcatgaggtcaggagatcaagaccatcctggccaacatggtgataccccgtctctactaaaaatacaaaaaaattagttgggcatggtggcatgcacctgtagtcccagctacctgggaggctgaggcaggagaattgcttgaacctgggaggcagaggttgcagtgagccaaaatcatgccactgcactcccgcctgggcaacagagcaagagtctgtctcaaaaaaaaaaagaaaaaaaga

SEQ ID NO: 23900 - DNA, 1247 bp, Homo sapiens
  SIMILAR (652)..(756): 881254mologous to Homo sapiens Extended human secreted protein sequence, SEQ ID NO. 424,accession number Y36039,Smith- Waterman Score=159.
cgcggccgcgtcgacatttgagaaaacacatttcaaaaccagaaaagccaaaaacactccaaaaacaagcaaaacaatttggagctttagataaaaggaaaaactcccagttggtaaagtttatctttacttaggatttgtggctcacacctaaacaaagggggtcagggagtgggtacaaatttgagaaaatagaagggtaagggatggtcttgatctcctgacctcgtgatccgcccgcctcggcctcccaaagtgctgggattacaggggtgtgagagggggatccaaactttcacccagttggcgtggacagccacagatgcagggaaggatgaggaccacagagaaaccgtgggggccgtgaacttagagaaccgcgagtctgcatcggacacacgtggactgctgtggttcgagatgaacggagatttgggaataaagcacctacaactgtggtggcagcaaaagcccactttctgcggtggacctgacaaggagaggaccgcaatggcaagtggcggggtaggggtggccaccggagagcatcgaggggagacactcacggtgcaggcggctgacattgtgagccgggtcaactggctggccatctcgggcagcctctttcttcgggcaggcttggccacctcatggctagccacaagctctccaacaattactatcgcactcgcgatggccgccgggaatctgtgcccccttccatcatcatgtggtcgcaaaaggcgctggtgtcagggcaagccagcagagagggtttatggggatgccaatcatacggttggtaacatgtgcgcttcacggttagggggttatttagggtttagcatccggatagtggtgtttatatggtacttaggtctgtcagttgtggtcaatatgttagttggacggcaatgtgattggcagggattggtctatggtcaaccagagctgttggtgttctcgggtaatatgccgggggaagtagcacgggggaagcacaggaacgagaaggccccactgtctatgaggccagccagtcaatgccgtgtgttttgtgtgctcaagggttgttcagagaggtctcggcataaggaacaaactccagacacaaccatctttaagaactgtaacactcactgtgagggtccgtggcttcattcttgaagtcagtgagaccaagaacccaccaattttggacacattttggcgaccacgaagggactatcgcctatcacaagcggtga

SEQ ID NO: 23901 - DNA, 4951 bp, Homo sapiens
  SIMILAR (2930)..(3877): 581254mologous to Homo sapiens Human secreted protein clone dd119_4 protein sequence SEQ ID NO:108,accession number Y53051,Smith-Waterman Score=845.
tcgatacgacttttttttttttttttttttgagacgggagtctcgcctcctgtggcccaggctggagtgcagtagcgtgatctcggctcactgcaagctctgccacccaggttcatgccattttcctgcctcaacctccagagtagctgggactaccggcgcccgccaccacgcctggctaattttttgtatttttttttagtagagacggggtttcactgtgttagccagggatggtctcgaacttctgacctcagtgatccccccgcctcggcctcccaaagttctgggattatgggtgtgagccaccacacccggccccccttcaattttaaagccatcactatgcaccctatgtctatgccaggcactaaaataagatgaagcaccttcttggagtttacatgctggtaattatgccagacagtaataaaataggtaagaacggctgtgggggaagtcagctgggttctagttacagtcgcatttcaggaaatgatttaacatgctgactttaacaacctaagcctcttctccatgtgtgcacacagggtagatctctgaacacaggtgaccctagaagtgctgtaacttctaggggaatggctgtgttgagtcaaggcaggatgacagttcagcctcctcccaggctagtgcaaagggctcttcactcggattaaaaccttctctcccagaccgaattgccaactcccaacacccctcctacagaaaatttggagtcctcgcttattccctggcagcccctacctaatagggtggtgaattaattatcaaacatgcgacagtttagcgaaaatggcaacactttggaataaatgactgtaatgtacatcctggcgcccattttgcaggtcagttgctctccctggaaggaagagtgttctcggatttcaccttaaaggaggaaggctgccagaactgaactagcacttctgaatatcctgaggcgaggtccggtgacttccttgggaagctctgccgcgcccccatcccaccctaccccaccctaccccaccacagcaggcgctggagtcctgggaccaccaggatctgaggcccaaatccttcctcactaaggggaggagaggggtgctccggcagggcaggatgggaaggcgtgcttgggcgggattgtgacatgagtgccctggtgacatggagcagttctgtggcataaataaaggtgtcataaagacagggcgggactcatgcttacaaggggcacgagcgtctcggagctgccagaatgacttccgctcagtgcccggcactagcgtgtgtcatgtccccgctgcgtttctggggcccatggcccctccttatgtggcaactattgtggctactagtcaaggaggctcagcctctggagtgggtcaaggacccgctccagctgacctctaaccccctggggccgcctgagccctggtcttcccactcctcccatttcccacgggaatctccccatgcgcctactctcccagcagacccgtgggactttgatcacctggggccctctgcttcctcagagatgccagccccaccccaggaatcgactgaaaatttggttccattcctggacacctgggattcagctggagagctgcccctggagccagagcagttcttggcttcacagcaggatttaaaggacaagctgagtccacaggaaaggctccctgtttcgcccaagaagctgaagaaagatccagctcagcgttggagccttgctgagattattggaattatacgccaattatccacacctcagagtcagaaacagactttgcagaatgaatattccagtacagatacaccgtatcccggtagcctgcctccagaactccgggtgaagtcagatgagcctccagggccctctgagcaagttggaccttctcaattccatctagagcccgaaactcaaaatccagagacccttgaagacatccagtcctcttcactccagcaagaagccccagcacagcttccacagctccttgaggaagaaccttcttcaatgcagcaggaggccccagctctgcctccagagtcctctatggagagtctaactctaccgaatcatgaggtgtcagttcaacctccaggtgaggatcaagcttattatcacttgcccaacattacagttaaacctgcagatgtggaggttaccataacttcagaggctaccaatgagacagaatcttcccaagctcagcaggagaccccaattcagtttccagaggaggtggaaccttctgcaacccaacaggaggccccaattgagcctccagttcctcctatggagcatgaactttccatcagtgagcagcagcagccagttcagccttctgagacttctagggaggtcgaatcttctccgacccagcaggagaccccaggtcagcctccagaacatcatgaagtcacagtttcacctccaggtcaccatcaaactcatcatttagattcacccagtgtctctgtgaagcctccagacgtgcagctcaccatagcagcagagcctagtgcagaggtgggaacttctctagtccagcaggaggctacaactcggctctcagggtcaggtaatgatatagaacctcccgccatccagcacgggggcccacctctgctttcagagtcatcagaagaagctggacctttagcagttcaacaggagacttcatttcaatctccggaacctattaataatgagaacccctctccaacccagcaggaggctgcagctgagcatccacagaccgctgaggagggtgagtcttccctaacccatcaggaggccccagctcagactccagagttccctaatgtagttgtagctcaacctccagagcattcacacctgactcaagccacagttcaacctttggatctggggtttaccatcactccagaatccatgacagaggttgaactttctccaaccatgaaggagaccccaactcagcctcctaagaaagttgtaccccaacttcgagtatatcaaggggtaacaaatccaacaccaggtcaggatcaagctcagcatccagtgtcacccagcgttacagttcaacttttggacctgggacttaccatcactccagaacccactacggaggttggacattctacagccccgaagaggactatagtttctccaaagcatcctgaggtgacacttccacatccagaccaggttcagactcagcattcacacctgactcgagccacagttcaacctttggacctggggtttaccatcactccaaaatccatgacagaggttgaaccttctacagccctgatgactacagctcctcctccaggacaccctgaggtgacacttccaccttcagacaagggtcaggctcagcattcacacctgactcaagccaccgttcaacctctggacctggagcttaccataactacaaaacctactacagaggttaaaccgtctccaaccacggaggagacctcaactcagcctccagacctgggacttgccatcattccagaacccactacagagactggacattctacagccctggagaagactacagctcctcgtccagaccgggttcagactctgcatcgaagcctgactgaagtcacaggtccacctactgaactagaacctgctcaggattcactggtgcagtctgaaagttacacccaaaataaggctttaactgcaccagaggaacacaaggcctccacaagcaccaacatatgtgagctctgtacctgcggagatgagatgttgtcatgtattgatctcaacccagagcagaggctccgccaagtgcctgtgccagagcccaacacccacaatggcaccttcaccatcttgtaagaatcacttttcctcaattgtcctctgtgtcctgcctgacatggcagccttttcctggaggccttcctgggccttctttatctccccaagccatatggacaactgactttctgctttcacctttgcttgtcaactctcccttctcctcattctcttttaatgttaggccccttctccagtcttttccttttactctggtcttttactcgtttttgtatccatttttatttagccccatcacatcattgcttaaccgctgctctcctcccattttcgcttcaccctctttacagcagcctgtccctctcccgatctcagtgatgatgctctaagtggttaagagttgattccggagccaggctgcctgggtttgaacccagatctatttattagcttggtgacccagagcaagttattctgcctgtgactcaatttcctcacctttaaactggggatcatgctagttagcatttcataggattgttgtgaaatttaggtgagtgaatatatgaaacacttcatcagtgcttagcatatgtaggagagttggctgttcacatgattattcagtcctttagttttgtccagaactcatttttgtccctagctttctatatgtagaactagttttatgtcaaacccagggccaagtatgctactgtctccagaacacgaaaatgataggagggaagaggctgggcgcggtggctcaaacgcctgtaatcccagcactttgggaggccgaggcaggcggatcatgaggtcaggagatcaagaccatcctggctaacatggtgaacccccccgtctctactaaaaataaaaaaaaaaaattagccgggtttggtggcgtatgcctgtaatcccagcttactcgggaggcttgaggcaggagaattgctttaaacctgggaggcagagcttgcagtgagctgagattcgtgccactgcactccagcctgagtgacagagcaagactccgtcaaaaaaaaaaaaaaaaaaaagaaatgatatctggcccccccttaacactggagccccactcccttctcccatccggcccgagattaa

SEQ ID NO: 23902 - DNA, 1484 bp, Homo sapiens
  SIMILAR (178)..(627): 631254mologous to Mus musculus fasting-induced adipose factor,accession number AF278699,Smith-Waterman Score=446.
  misc_feature (1)...(1484): n = a,t,c or g
tgcaggaattcggcacgaggctgagcggatcctcacacgactgtgatccgattctttccagcggcttctgcaaccaagcgggtcttacccccggtcctccgcgtctccagtcctcgcacctggaaccccaacgtccccgagagtccccgaatccccgctcccaggctacctaagaggatgagcggtgctccgacggccggggcagccctgatgctctgcgccgccaccgccgtgctactgagcgctcagggcggacccgtgcagtccaagtcgccgcgctttgcgtcctgggacgagatgaatgtcctggcgcacggactcctgcagctcggccaggggctgcgcgaacacgcggagcgcacccgcagtcagctgagcgcgctggagcggcgcctgagcgcgtgcgggtccgcctgtcagggaaccgaggggtccaccgacctcccgttagcccctgagagccggcgtggaccctgaggtccttcacagccttctagacacaactcatggctcaccaacagacagatccatcaactcttccacaaggtggcccagcagcagcggcacctggagaagcagcacctgcgaattcagcatctgcaaagccagtttgggcgtcctggaccacaagcacctagaccatgaggtggccaagcctgcccgaagaaagaggctgcccgagatggcccagccagttgacccggctcacaatgtcagccgcctgcaccggctgcccaggggatttgccagggagctgttccaggttggggagaggcagagtggactatttgaaatccagcctcaggggtctccgccatttttggtgaactgcaagatgacctcagatggaggctggacagtaattcagaggcgccacgatggctcagtggacttcaaccggccctgggaagcctacaaggcggggtttggggatccccacggtaggtgtttctagtggggacagaggcaggggaggaagagggaccctcagaagtggccctgcctcatggagtggcctctcccactccaggcgagttctggctgggtctggagaaggtgcatagcatcacgggggaccgcaacagccgcctggccgtgcagctgcgggactgggatggcaacgccgagttgctgcagttctccgtgcacctgggtggcgaggacacggcctatagcctgcagctcactgcacccgtggccggccagctgggcgccaccaccgtcccacccagcgggctctccgtacccttctccacttgggaccaggatcacgacctccgcanggacaagaactgcgcgcagagcctctctgaggctggtggttgggcactgcggcatcncactcaacggccagtcttttcgctcatccacagcagcgcagaagctaagaagggatcttctgagactggcgggcccgtctacccgttgaggcaccacatgttgtccaccatgcagcaagcagctctacgtctgcttggctgtcc

SEQ ID NO: 23903 - DNA, 408 bp, Homo sapiens
  SIMILAR (155)..(406): 901254mologous to Homo sapiens sialic acid-binding immunoglobulin-like lectin-8,accession number AF195092,Smith- Waterman Score=435.
gtcaacacacggatgctgttaggggtgaactcaactgtgatttgtatttccatttcatgcttcctctccctaaccggtgagatatgacctcttatgcctcttcctgccgactctgatgctcagggagcagtcgtacaaaatcgtcgacccgggaatggtgacggtgcacgagggcctgtgtgtccatgtgccctgctccttctcctacccccaggatggctggactgactctgacccagctcatggctactggttccgggcaggagacagaccataccaagacgctccagtggccacaaacaacccatacagagatatgcaggcacagacccagggccgattccaactccttggggacatttggagcaacgactgctccctgagcatcacagacgcccggaagaggga

SEQ ID NO: 23904 - DNA, 2179 bp, Homo sapiens
  SIMILAR (956)..(1939): 581254mologous to Homo sapiens sialic acid binding immunoglobulin-like lectin 8 long splice variant,accession number AF287892,Smith-Waterman Score=829.
ctatgtcccctctgcttggatctgagtaggctgtgtgactgctggaccaagacgtggaagtggccctgtgccaggatctgcatctaggccggcatatgccactttctgtatcataggacactccctcatggaatccagccgccacactgtgtactcgttttgcagggagaggctcagggaaatgtgctgggagcctagagggttctgagctcggcaggtgaattccccttcatccttcacatgcactcgaggcagctccagcaccccaaggttcgaggactgtgaggggctcagggtcaggctcccccaggtccagctcagcctggcagggggattgctgtcgacagcacagacaaggcgcagagactggccctcaaggacttgaaagagatgaagccattttcccagggctgtggatgctgtggcatctccttggaagaacagtcatggtcaagttccaaggagggtctgtcccaaacacagacaagcttgcttagttttgtaattcaccttgtgatttgtatactccatttcatggtttcctcttctctaagccgaaagaaatatgacccccttatccctctttcctggcgtctctgatgctcagggagcagtcgttgctccaaatgtcccccaaaggaagttggaatcggccctgggtctctgcctgccacttcttctgttctgggttgtttgtggccactggaagcgtcttggtatggtctgtctcctgcccggaaccagtagccatgaactgggtcagagtcagtccagccatcctgggggtaggacgaaatcgtcgacccgggaagcatgaaatggagttacaaatcacagttgaattacaaaactaagcggccgtctgtgtttgtgacagccctgacccataggcctgacatcctcatcctagggaccctagagtctggccactccaggaacctgacctgctctgtgccctgggcctgtaagcaggggacaccccccatgatctcctggattggggcctccgtgtcctccccgggccccactactgcccgctcctcagtgctcaccccttttaccccaaagcccccaggaccacggcaccagccctcacctgtcagtgcacctctgcctgggacaggtgtgaccacgaccagtaccgtccgcctcgatgaggcctaccctgcgttggaacttgaccatgactgtcttccaaggagagggcacagcatccacaaccttgaggaatggctcggccctttcagtcctggagggccagtccctgcaccttgtctgtgctgtcgacagcaatccccctgccaggctgagctggacctgggggagcctgaccctgagcccctcacagtcctcgaaccttggggtgctggagctgcctcgagtgcatgtgaaggatgaaggggaattcacctgccgagctcagaaccctctaggctcccagcacatttccctgagcctctccctgcaaaacgagtacacaggcaaaatgaggcctatatcaggagtgatgctaggggcattcgggggagctggagccacagccctgggcttcctgtccttctgcatcatcttcgttggagtgaggtcctgcaggaagaaaacggcaaggccaacaatggggcgtgggggatacaggcatggaggacaccaaacgctgtaaggggctcagccctctcaagggacccctgagttgaatccccggcagaaggaacaggccccccaaaaccatggctccgccaatgccttggccaacccccctcgcccagaggaaggagagatccagtatgcatccctcagcttccacaaagcgaggcctcagtacccacaggaacaggaggccatcggctatgagtactccgagatcaacatccccaagtgagaaactgcagagactcaggcctgtttgagggctcacgacccctgcagcaaagaagcccgagactgattcctttagaattaacagccctccatgctgtgcaacaggacatcagaacttattcctcttgtcaaactgaaaatgcgtgcctgatgaccaaactctccctttctccatccaatcggtccacactccccgcccccggcctctggtacccaccattctcttctctacttctctgaagtcgactattttaggttccaaatatagtgagatcgtagagtgaaaaaaaaaaaaaaaaaa

SEQ ID NO: 23905 - DNA, 1179 bp, Homo sapiens
  SIMILAR (394)..(594): 291254mologous to Mus musculus glutamine repeat protein- 1,accession number U46463,Smith-Waterman Score=96.
atggtcatagctgtttcctacaggcacacaccagctatggatcatagctgtttcctaggaaaccagctcatgcgtccatcagctgtttcctcaggaaaccagctcatggtccatcagctgtttcctcaggcaacacagctcatggatcatagcttgtttccctcaggcaacaccagctatgagtccatcagcttgttttccctaggcaacaccagcgtcatagcgtgtttcctaaggcaaacagctcatggatccatcagctgtttcctcaggcaacacagctatggtccatcagctgtttccgcagggcaacaccagctcatggtccatagcttgtttcctcaggcaacaccagctcatgcgtccattagcctcgttttccgtcagggcacacaccagcttcatcgcgtccatcagcgtcgtattccctcagcgcaacaccagcgtcatcgactccatcagcgtcgtcttccttcagcgcaacaccagcgtcatcgcgactccatcagcgtatgttttcccttcagggcacacaccaggcctcattgcgactccatccagcggcaacaccagctcatgcggtccattggcctgttttcctcaggcaaaacagacccaacggttactcttcttaaggaagcagcggctgaacatgagatttgcctatgtagtagacatcccgtgaatttgagggagaccaaggcacatctaggaaacgcggcacacgctgtcttccctagaggtaaccagaaaaagccagagatgtgcccttatttacctactcataagctggtggttcccacgccacccctaatcccgcttgaagcagccctgagaaacatcgcccattctcgctccataccaccccccaaaaaattttcgccgaccccagacacttcagacgactacttgttggtgtttaattctttcccttactctaaacttactacaccgaaaacggggcaaggggaaaacttgggttccacgcggcccattccttgcaacggccccccaacaaggggcccccacaatggcgccaagtacccgggcgatgtttcccaccccgttggggtgggaaccttgtgggcaaaccggttattaacaggccaatatgaagagaatggaaaatccttctttctgcttatatgtacaatagccacattccaagtgaatgcctag

SEQ ID NO: 23906 - DNA, 396 bp, Homo sapiens
  SIMILAR (178)..(246): 1001254mologous to Homo sapiens CD94,accession number AB009597,Smith-Waterman Score=117.
atgattcaagaacatcatttaaatacacaatttttcattctctttttttgctaaatttcttcatactcaactttcagattctttaatctccagctcagcttcaacaattcaacgctgttctttctgaaaaagtacacatcgtgccttctctacttcgctcttggaacataatttctcatggcagcttttactaaactgagtattgagccagcatttactccaggacccaacatagaactccagaaagtgaacagaaaacttggaacgaaagtcggcatctctgtgcttctcagaaatccagcctgcttcagcttcaaaacacagatgaactggattttatgagctccagtcaacaattttactggattggactctcttacagtgaggagcacaccg

SEQ ID NO: 23907 - DNA, 445 bp, Homo sapiens
  SIMILAR (1)..(117): 1001254mologous to Homo sapiens CD94,accession number AB009597,Smith-Waterman Score=214.
gcactctcccagtatctatttccatcatttgaaacttttaatacaaagaactgcatagcgtataatccaaatggaaatgctttagatgaatcctgtgaagataaaaatcgttatatctacagggtcttgctatgttgcccaggctggtcttgaactcctggcctcaagggattctcccaccttggattcccaaagtgctgggattataggtgtgaaccaccatccctggccctcttcacattcttgtatgaagattgatttgggaaaaatgcatttcaggtaactgacaaaagatataggatgaaaaataatatctttcaaatgtttaatttgaactaagagagcttatgcattgcactttctggagatttgtaatgttttggttttgttgtccatgtgactacaaaataatatattttttaattaaaaaatttaaaataataaa

SEQ ID NO: 23908 - DNA, 192 bp, Homo sapiens
  SIMILAR (184)..(2): 641254mologous to Homo sapiens CD94,accession number AB009597,Smith-Waterman Score=190.
agatataacgatttttatcttcacaggattcatctaaagcatttccatttggattatacgctatgcagttctttgtattaaaagtttcaaatgatggaaatctgccatgagaaattatgttccaagagcgaagtagagaaggcacgatgtgtactttttcagaaagaacagcgttgaattgttgaagctgag

SEQ ID NO: 23909 - DNA, 447 bp, Homo sapiens
  SIMILAR (261)..(317): 841254mologous to Homo sapiens CD94-B protein,accession number AJ000001,Smith-Waterman Score=76.
  misc_feature (1)...(447): n = a,t,c or g
tcgtaaattcatgcgntccgannnacntnnaaaatngggcgaccccgcgtccgattacactatattacttgtctcttcaatttacgattcaagaacaccatttaaatacacaatgggtcatggtctttttttgctaggtttctgtatactcaactttcagattctttaatctccagctcaacttcaacaattcaacgctgctctttctgaaaaagtacacatcgtgccttctctacttcgctcttggaacataatttctcatggcagtgattaacaccactctgtggaggttaatttctgggaccttaaggataatatagcctttcgtggatggctacgatgggaattttgttgaaaaattcttttactaaactgagtattgagccagcatttactccacgacccaacatataactccacatagactctgactgctgctcttgccaa

SEQ ID NO: 23910 - DNA, 1317 bp, Homo sapiens
  SIMILAR (406)..(750): 641254mologous to Homo sapiens CD94-B protein,accession number AJ000001,Smith-Waterman Score=359.
attcacactataatacatgtctcaccaatagatgattcaagaacatcatttaaatacacaatttttcatgctctttttttgctaaatttcttcatactcaactttcagattctttaatctccagctcagcttcaacaattcaacgctgttctttctgaaaaagtacacatcgtgccttctctacttcgctcttggaacataatttctcatggcagtgtttaagaccactctgtggaggttaatttctgggaccttagggataatatgcctttcgttgatggctacgttgggaattttgttgaaaaattcttttactaaactgagtattgagccagcatttactccaggacccaacatagaactccagaaagactctgactgctgttcttgccaagaaaaatgggttgggtaccggtgcaactgttacttcatttccagtgaacagaaaacttggaacgaaagtcggcatctctgtgcttctcagaaatccagcctgcttcagcttcaaaacacagatgaactgcaggattttatgagctccagtccaacaattttactgggattggactctcttacagtgaggagcacaccgcctggttgtgggagaatggctctgcactctcccagtatctatttccatcatttgaaacttttaatacaaagaactgcatagcgtataatccaaatggaaatgctttagatgaatcctgtgaagataaaaatcgttatatctgtaagcaacagctcatttaaatgtttcttggggcagagaaggtggagagtaaagacccaacattactaacaatgatacagttgcatgttatattattactaattgtctacttctggagtctataaaatgtttttaaacagtgtcatatacaattgtcatgtatgtgaaacaatgtgttttaaaattgatgaaattcgttcacctacatttgagaattataaaattaacataaagaattttgtattttcatttaatgtatataatgttaaattcaatgtagttttattacacatttatgtaattttatttacattcttgctaattctcagcagaaatttaaataagatttaattcacatcaaataaaatttagaaaataaaatttaactcacactgcccaggctggagcatagtggcaagatcatagctcattgcaagctcaagtgatcctcctgactcagcctcccaagtagctaggactgcaggcaccatgtcactatgcccgactaatttttaatttttaattttttgtcaagacaaggtcttgctatgttgcccaggctggtcttgaactcctggcctcaa

SEQ ID NO: 23911 - DNA, 404 bp, Homo sapiens; identical to SEQ ID NO: 804
  SIMILAR (308)..(282): 881254mologous to Homo sapiens calbindin D28K,accession number S46006,Smith-Waterman Score=40.
  misc_feature (1)...(404): n = a,t,c or g

SEQ ID NO: 23912 - DNA, 439 bp, Homo sapiens; identical to SEQ ID NO: 18593
  SIMILAR (293)..(436): 771254mologous to Homo sapiens neutral protease large subunit,accession number M27826,Smith-Waterman Score=186.
  misc_feature (1)...(439): n = a,t,c or g

SEQ ID NO: 23913 - DNA, 481 bp, Homo sapiens
  SIMILAR (481)..(416): 771254mologous to Homo sapiens Human secreted protein, SEQ ID NO: 7340,accession number G03259,Smith-Waterman Score=92.
ctgactgactccttcccagatcttctcagtttagcagctgaagactgacactgcccaatcgcctcgaagccccctagaccatcacggacaccgagcttcgggtaactctcacagtggaagtatacacccagatggcctgaagtaactgaagaatcacaaaagaagtgaaaagccctgccccaccttaactgatgacattccaccacaaaagaagtgtaaatggccggtccttgccttaagtgctgacattaccttgtgaaagtccttttcctggctcatcctggctcaaaaagcacccccactgagcactttgtgacctccactcctgcccgccagagaacaaatgtcctttgactgtaattttcctttacctacccaaatcctataaagtggccccacccttatcttccttcactgaatctctttttggactcagcccgcctgcacccaggtgaaataaacagccatgttgttcacacaa

SEQ ID NO: 23914 - DNA, 553 bp, Homo sapiens
  SIMILAR (553)..(515): 691254mologous to Homo sapiens calbindin D28K,accession number S46006,Smith-Waterman Score=41.
  misc_feature (1)...(553): n = a,t,c or g
ggagggaaaagctctttaatttatttctcaagatatagatccaacaggactgcaaagtggaacagttctcagaagcctgattcaggaagatgtacccgggttttggcaccaaatttcacacgcgtccgtgtgaagagaccaccaaacaggctttgtgtgagcaacatggccgtttatttcacctgggtgcaggcgggctgagtcttccactgtgagagttaccggaagctcggcgtccgtgatggtctagggggcttccgaggcgatccggcagcgtcagtcttcagctgctaagctgagaaaatctgggaaggagtcagtcagagagccttgggccagagttccaggggctctgggagtggctgccaggtgagttgaacagtccgattttcagtggtgtcctgatttaaaattggtgagatgttccttgngctggtcggtctgaggacctgaggtcataggtggatctttctcacggagcanagaacaggagtacaggggattgatctcccaagggaggtcccccgatccgagtcacggcaccaaatttcat

SEQ ID NO: 23915 - DNA, 1059 bp, Homo sapiens; identical to SEQ ID NO: 806
  SIMILAR (328)..(459): 881254mologous to Homo sapiens calbindin D28K,accession number S46006,Smith-Waterman Score=211.

SEQ ID NO: 23916 - DNA, 248 bp, Homo sapiens; identical to SEQ ID NO: 20582
  SIMILAR (248)..(123): 831254mologous to Homo sapiens Human secreted protein, SEQ ID NO: 5576,accession number G01495,Smith-Waterman Score=174.

SEQ ID NO: 23917 - DNA, 347 bp, Homo sapiens
  SIMILAR (229)..(300): 701254mologous to Homo sapiens Human secreted protein, SEQ ID NO: 5576,accession number G01495,Smith-Waterman Score=72.
ttctacatttcaatcaaaatgattaaaacaaataaaaccaaacttgtttacaaatatacgaagagtcactgtggagggaaaagctctttaatttatttctcaagatatagatccaacaggactgcaaagtggaacagttctcagaagcctgattcaggaagatgtacccgggttttggcaccaaatttcacacgcgtccgtgtgaagagaccaccaaacaggctttgtggggcttccgaggcgatccggcagcgtcagtcttcagctgctaagctgagaaaatctgggaaggagtcagtcagagagccttgggccagagttccaggggctctgggagtggctgccag

SEQ ID NO: 23918 - DNA, 419 bp, Homo sapiens; identical to SEQ ID NO: 18547
  SIMILAR (329)..(198): 861254mologous to Homo sapiens calbindin D28K,accession number S46006,Smith-Waterman Score=207.
  misc_feature (1)...(419): n = a,t,c or g

SEQ ID NO: 23919 - DNA, 602 bp, Homo sapiens; identical to SEQ ID NO: 9698
  SIMILAR (192)..(524): 341254mologous to Bovine leukemia virus gag polyprotein,accession number M10987,Smith-Waterman Score=144.

SEQ ID NO: 23920 - DNA, 375 bp, Homo sapiens; identical to SEQ ID NO: 1999
  SIMILAR (51)..(122): 831254mologous to Homo sapiens Human secreted protein, SEQ ID NO: 5576,accession number G01495,Smith-Waterman Score=90.

SEQ ID NO: 23921 - DNA, 400 bp, Homo sapiens
  SIMILAR (37)..(282): 421254mologous to Homo sapiens gag,accession number AF156961,Smith-Waterman Score=158.
gggctggcttccttcactaggggcacctttccaccttccattcctccttcttctcccttagcctgtgttctcaagaacttaaaacctcttcaactcacacttgacctaaaacctaaacaacttattttcttctacaatgccgcttgaccccaatacaaactcaacagtggttccaaatagacagaaaacggcactttcgatttttccatcctacaagatctagataattcttgttgtaaaataggcaaatggtctgaggtgcctgacgtccaggcattcttctacacgttgttccctccctagtctctgttcccaatgtgattcctcctaagccgtgtcccatctgtgtaggaccccactgaaaatcagactgttcaactcacctgggagtggctgccag

SEQ ID NO: 23922 - DNA, 1755 bp, Homo sapiens; identical to SEQ ID NO: 5597
  SIMILAR (1)..(1752): 991254mologous to HERV-H/env62 envelope protein,accession number AJ289709,Smith-Waterman Score=3072.

SEQ ID NO: 23923 - DNA, 411 bp, Homo sapiens; identical to SEQ ID NO: 447
  SIMILAR (109)..(222): 861254mologous to Homo sapiens Human secreted protein, SEQ ID NO: 5576,accession number G01495,Smith-Waterman Score=172.

SEQ ID NO: 23924 - DNA, 864 bp, Homo sapiens; identical to SEQ ID NO: 1393
  SIMILAR (151)..(783): 791254mologous to Cloning vector pZC320 SopA,accession number U26464,Smith-Waterman Score=871.

SEQ ID NO: 23925 - DNA, 894 bp, Homo sapiens
  SIMILAR (284)..(451): 471254mologous to Homo sapiens Human secreted protein, SEQ ID NO: 7678,accession number G03597,Smith-Waterman Score=110.
tcagcaggatgtgggtggggccagataagggaataaagcaggctgccggaaccagcggcaccaagctggtcggggagtcttccaattgtggaaacgttgtttgtaaaccttgttcttctgctctttgcaatagtcttgctgctgctcactctttgggtctgtgccgccttcatgagctgtgaactcaccgtgaagttttgcagcttcgctcctaaagccagcgagaccacgacccactgggagggacagcaactctggacgcgccacttttacgaactgtgcactcaccgcaaaggtctgcagcttcactcctgaggccagcgagaccagaacccaccgtgaaggaacgaacaactccagacgcgccgcctttaagagtgtaacactgcaaaggtctgcagcttcactcctgaagtcagcgtagacccgaacctggcagccactcccagagcccctggaactctggccaaagctttctgactgactccttcctagatcttctcggcttagcagctgagactgacgctgcctgattgcctcggaagccccctgtcctagaaggggatcctcagatcgaccattttcagacacaagatagttaatgaacataaagtagaagaaacatgaagagcctgcactgaggtttatctcacagtcaaacttcttttcagatctctcccaagcataattatcctccttgacaaatgaacagacagattcagcagctgccacactgcacttgtttttaggggacatgtcagacaggtggatgtgaactacagttcctcgccgcctggaacatcccccaaccgccgtcaaggacacaaccagtgcgaccacccctgaaatcgagtccccaacatacgccggaccccacaaaatgaggaccgacat

SEQ ID NO: 23926 - DNA, 2493 bp, Homo sapiens
  SIMILAR (88)..(363): 391254mologous to Homo sapiens Human G713 protein sequence SEQ ID NO:5,accession number Y90962,Smith-Waterman Score=108.
tcagcagtggctgccggttttttttttccctctgttctggttggcgatggtgcgaataggaaccacccttccagccccactagatatcagcaatagaggcggcggcggcggcagcagcagcagcagcagcatcccagttgggcctcctccctctcggaggatggggtgagctcggaagcagcaggaacttgcagcagacacctcctctggctcctcctctctctctccccccccccagtgccccacccctgctgcggtagaggctgctggcccggcagctctggttgccatggcaatgaccaatgataagcgaccaagctcagggggagggagatgggcgaagcaagctgcaaggtctggaggggagtgaatttgtgcgctgccctctaggatgctcttgatgtctcctaccctgaactccaggtcttttaaaaatggggcaaggggggtcctgggttgttggaagtctttggtcccattgagtcgtttttgaagtttttgttgcaaaatgttaaggagtaccttacatttctggccaatgttgtccttgatggccctatatatgtgcttttcattctctacacataaattgatctcttcaagttcagggggagcaactgatcctaggatccttacgtatccaaaggcaattgctgatgattgtccctgaagggtaattttaacttgcctaagatcacatgactgcttttcattgtgaatcactgtttctctgggtgagatggtcagcccaatttccaaacaatattccagtctagcgtggaaaattgtgactcttgcatcatcaatttctccatctttgcccaatatgagttcaaaaacagctttggaaagttccaaagtcctccattgactccacatttccctggagagcagatccatttctccactcccaaagtcccctgaccctggtatatcaaacataccttggtgattggagagctgcatgccaacatggtcaaactggcacgtctcttcaaagcctgggactggaagggtcatatggcagatggcagcaaggccccaccactgggctatatcacagatctccctggttattgattgactctgtgtcatgcctggcctccaggttctgggaatgtcaccactaacacccaaaaacttctcgtggctccttagtgcctttagggaacacgttgttcttctgattaagacattaaaatccaaaatcttgtccttagtaatgaactgcaatgtatccctacacagctgcctttctcttaacttcaaggctacaaggatgtagtagccagtatgatagccagagggagaaagaagccaaagaaaaagtgggctgttgtgacagcgtttggtgccatggaatgataatctctttccaaagttggtgacttcttgagtttcattctgcagatcatactggttgtacaaagagggtgacacttccaccacgagtttccgtgttgactgtgcaggacatgtggaatcaactacccaaatgacaaggccattgccagccaagccttcaccagcttgagctctgcttccctgctggggttttatagcagccaaatccattttggagcttttgaatctatggggccaagggactctgaaggcatctgtgtcagttacagactggtgaagtctctgtgctaggacctcagtaaaaggcctcctccaccctgtactaccaaaagaatcatagcgcatgttgtaaatcaaactaaatatggcctgagaaagcctccatacttccatatttgatccttgtggatgaactataaccaccttagtaggtagacaagactgaagttgctttccaactgtgtcagcaacaacataacattcagctggtacaaagctgcgacttgtgaatttcctactgacattaagaagacttgtgaattccgtaatgagactgaagaagtctttcatgatggtacagagaatggtgtcaattcctaaagtttggtcaatctctctgggattcctcctaagcttcgtcccatctgtgtgggaccccactgaaatcggactgttcaactcacctgacacccactcccagagcccctggaacttggcccaaggctctctgactgattccttcccagatcttctcggcttagtgctgaagactgacactgcccgatcacctcggaagccccctgtcatgaggccagggactgtctgtgttgttgactgctgagcacccagccagtgtataggtggcaatagcattgctctcccacacagagaatccatatcacccttaaatgctagaaccttgtgggaaggaaattcaggggtacagtggtttggccaaagtaaaagtgagcgtagaggacgcgaatctgagcccccattaccaagcagaatgagggcctgctcatcatacacccgccctccggtttcaggacatgtgttcaggctcccagctgccttggtgatttcgcagagaagcgagtagggttctccacgttctttttcttccat

SEQ ID NO: 23927 - DNA, 807 bp, Homo sapiens
  SIMILAR (175)..(777): 911254mologous to HERV-H/env62 envelope protein,accession number AJ289709,Smith-Waterman Score=931.
atggatgaggagaaaagggaacacttaaatgctcttggtcgaagggcactgggtgaaggtccaatgtatcagtgcacacgggggagtggggcggggaattatctcaccacctacgtacgggagcccgaacaaaaggctctggccattttatggacccaggggtggggatggggccctgtaaataacagtgaaaggttgctcgtagatactcaacgttttctcatacaccatgaaaatcgaacctcctcctctgtgcagttacctcatcagtccccattacaacctctgatggctgtggccctagctggatccctaggagtctgggtacaagacacccctttcagcactccttctcatctttttactttgcatctccagttttgcctcgcacaaggtgtcttcttcctctgtgtatcctctacctacatgtgtctacctgctaattggacaggcacatgcacactagttttccttactcccaaaattcaatttgcaaataggaccgaagagctccctgttcccctcatgacaccgacacgacaaaaaagagttattccactaattcccttgcttgtcagtttaagactttctgccttcactattgctctcggtactggaatagcaggcatttcaacctctgtcacgaccttccgtagcctctctaatgacttctctgctagcatcacagacgtatcacaaactttatcagtcctccaggcccaagttgactctttagctgcagttgtcctccaaaaccgccgaggccttgacttactgctgaaaaaggaggactctgtatattcttaa

SEQ ID NO: 23928 - DNA, 1317 bp, Homo sapiens
atggtctatggggcttccaaggcgatcgggcagcatcagtcttcagccgctaagctgagaagatctgggaaggagtcagtcagagagccttgggccagagttccaggggctctgggagtggctgccagactagtcattggagaacagatgattgatgtcttagggccggagaaacgcagacggcgtaccacacaggaaaagatcgcaattgttcagcagagctttgaaccggggatgacggtctccctcgttgcccggcaacatggtgtagcagccagccagttatttctctggcgtaagcaataccaggaaggaagtcttactgctgtcgccgccggagaacaggttgttcctgcctctgaacttgctgccgccatgaagcagattaaagaactccagcgcctgctcggcaagaaaacgatggaaaatgaactcctcaaagaagccgttgaatatggacgggcaaaaaagtggatagcgcacgcgcccttattgcccggggatggggaacgaaccgatgactggatggatggccgccgcagtcgtcacactgatgatacggatgtgcttctccgtatacaccatgttatcggagagctgccaacgtatggttatcgtcgggtatgggcgctgcttcgcagacaggcagaacttgatggtatgcctgcgatcaatgccaaacgtgtttaccggatcatgcgccagaatgcgctgttgcttgagcgaaaacctgctgtaccgccatcgaaacgggcacatacaggcagagtggccgtgaaagaaagcaatcagcgatggtgctctgacgggttcgagttctgctgtgataacggagagagactgcgtgtcacgttcgcgctggactgctgtgatcgtgaggcactgcactgggcggtcactaccggcggcttcaacagtgaaacagtacaggacgtcatgctgggagcggtggaacgccgcttcggcaacgatcttccgtcgtctccagtggagtggctgacggataatggttcatgctaccgggctaatgaaacacgccagttcgcccggatgttgggacttgaaccgaagaacacggcggtgcggagtccggagagtaacggaatagcagagagcttcgtgaaaacgataaagcgtgactacatcagtatcatgcccaaaccagacgggttaacggcagcaaagaaccttgcagaggcgttcgagcattataacgaatggcatccgcatagtgcgctgggttatcgctcgccacgggaatatctgcggcagcgggcttgtaatgggttaagtgataacagatgtctggaaatatag

SEQ ID NO: 23929 - DNA, 882 bp, Homo sapiens; identical to SEQ ID NO: 1997
  SIMILAR (1)..(81): 811254mologous to Homo sapiens Human secreted protein, SEQ ID NO: 5576,accession number G01495,Smith-Waterman Score=99.

SEQ ID NO: 23930 - DNA, 513 bp, Homo sapiens; identical to SEQ ID NO: 1998
  SIMILAR (49)..(174): 761254mologous to Homo sapiens Human secreted protein, SEQ ID NO: 5576,accession number G01495,Smith-Waterman Score=162.

SEQ ID NO: 23931 - DNA, 774 bp, Homo sapiens; identical to SEQ ID NO: 2012
  SIMILAR (2)..(88): 721254mologous to Homo sapiens putative p150,accession number U93564,Smith-Waterman Score=107.

SEQ ID NO: 23932 - DNA, 641 bp, Homo sapiens
  SIMILAR (3)..(134): 721254mologous to Homo sapiens Human secreted protein, SEQ ID NO: 5210,accession number G01129,Smith-Waterman Score=174.
tttggtgtcgtgactcagattgggggacctcccttgggagatcaatcccctgtcctcctgctctttgctctgtgagaaagatccacctacgacctcaggaccgaccaagaaacatctcaccaatttcaaatccagtaagcggcctctttttactctcttctccaacttgcctcactatccctcaacctctttctcctttcaatcttggcgctacacttcaatctctcccttctcttaatttcaattcctttcattttctggtagagacaaaagagacacgttttatccgtggacccaaaactccggtgccagttacggactgggaaggcagccttcccttggtgtttaatcattgcagggatgcctctctgataattcacccacatttcaaaggtgtcagaccacgcagggacgcctgccttggtccttcacccttagcggcaagtcccacttttctgggggagtggcaagagcttgctacacatgccagaaatctggccattgggccaaggaatgccagcagcccaggattcctcctaagccgcgtcccatctgtgtcggaccccactgaaaatcggactgttcaactcacctggcagccactcccagagcccctggaactctggcccaaggctctctga

SEQ ID NO: 23933 - DNA, 885 bp, Homo sapiens
  SIMILAR (217)..(330): 811254mologous to Homo sapiens Human secreted protein, SEQ ID NO: 5576,accession number G01495,Smith-Waterman Score=157.
cctggtgatcaccaaccatatgcggggaacccacaacaggcatatttcagcccacctatatcagccgtcgtctgctccatctatatggggaaacgaacaggcatcattcagccacttcatgcgctgtatctccacaacaatgccaacaccacagaaggggacgggcttaccttccactgtgagagttacccgaagctcggcgtctatgatggtctgggggcttccaaggcaatcgggcagtgtcagtcttcagccgctaagccgagaagacctgggaaggagtcagagagccttgggccagagttccaggggctctgggagtggctgccaggtgagttgaacagtccgattttcagtggggtcccacacagatgggatgcggcttaggaggaatcctggcctgcgggcattccttggcccagtggccagatttccggcacgtgtagcaagctcctgtgggaggaggttctggaggaatgcctggccactgcggttcaggtgtttggaagttcttgtgtgccggagatgtggttgccccttccccagaaaagcgggacttgccgctaagggtgaaggaccaaggcaggcgtccctgcgtggtctgacacccttgaaacgtgggtgaatgatcagagaggcgtccctgcagtgagtaagcgtccctgtgtggtctgacacgtatgaatctggcaacataacaggaagcagcatagatgcccagagccaaaaataaagccccagttccatgtctggaagtcccaagacaatctgagacttgggatctgagctcagcagaatccggggagcctgagggccttcgatgtgcttcaagccagagaaaccttggagaccactgggaccaatttctgggcctgctgtggccat

SEQ ID NO: 23934 - DNA, 1844 bp, Homo sapiens
  SIMILAR (1340)..(1813): 381254mologous to Homo sapiens Similar to splicing factor, arginine/serine-rich 4,accession number BC002781,Smith-Waterman Score=256.
atgggggctgtctgtgaagctttgcggcagtacagcccagaaggggacggacttaccctccactgtgagagttacccgaagctcggcatccgtgatggtctgggggcttccgaggcgatccggcagcgtcagtcttcagccgctaagctgagaagatctgggaaggagtcagagagccttgggccagagttccaggggctctgggagtggctgccagccttgggctcctgtctacagcagcccaaggcaattccacttggtcaccccgataagtctccatcatccaaatggctgggaccacattcaactcctctttctcctcagccagcatctgtccacacttgcctgtttctagcctttcttcttccggacactcaagaaaattttcttaatcttatattccatactacaaaaactaacaatggattgcattcctccttgtgtttgctttactgggtgtctacttcacctaaagattcttatgagatccagccccaggggccattaaactgccagagccttttgttctggggctccctcaaaagtgagatgacccaaggtctgtgcagatccaccagcacaccattccacggtggagaggaacagaacgtgccatcacagtgggtggcccaatcccacaggagggagaacagaacggtgggaggtgaagccttcccaggtcaccctcctgcaagtgccatcacagtgggtgacccaatcccacaggatggacaacagaatgttgggaggaggaaattcaaaccaaaaggtgaagaagttgaaaactttgaaaaaaatttagacgaatgtataactagaataaccaatacagagaagtgcttaaaggagctgatggagctgaaagccaaggctcaagaactatgtgaagaatgcagaagcctcaggagctgctgtgatcaactggaagaaagagtatcaatgatggaagatgaaatgaatgaaatgaaaccaaatctgcgtctgattggtgtacctgaacgtgactgggagaatggaaccaagttggaaaacactctgcaggatattatccaggagaacttccccaaccttgtagcattctgaggacaggcctgaattctgagaagcaaaagtggtaaaagtattgtccagtcctttttaagttggtggctgagcttggtgaggtgtgtttttaaaagacctttagtccgttctacttttcttccactgtgagagttacccaaagctcggcgtccgtgatggtctacggggcttcggaggcaatcgggcagcatcagtcttcagccgctaagccgagaagatctgtgaaggagtcagtcagagagccttgggccagagttccaggggctctgggagtggctgccagcatgaagtcacatggacacaacaggtatcccatgtctcctcaggtcgggctcccgctcccggagcaagagccggagccggagccagagtcggagccggagcaagaaagagaaaagcaggagccccagcaaggacaagagcctgcagccgcagccatagcgctggcaagagccgcagcaagagcaaagaccaagctgaagagaagatccaaaacaatgacaatgtcgggaaacccaagagccggagtcctagcaggcataaaagagtcaggagaggagagtggaggaggagaagcgagggagtgtgagcaggggcaggagccaggagaagagcctccgccagagtcggagccggagcaggagcaaagcgggcagcaggagccggagcaggagccgcagcaagagcaaggacaagaggaagagcaggaagagaagcagagaggagagccgcagtcgcagtcgcagccgcagcaagagtga

SEQ ID NO: 23935 - DNA, 3726 bp, Homo sapiens
  SIMILAR (2011)..(3723): 911254mologous to HERV-H/env62 envelope protein,accession number AJ289709,Smith-Waterman Score=2697.
atggaattttgtatttcattaggccggaaaataactttttcaaacatttttccctacaacggggccaattggaaggttttcttaaaaaagtcccaaccattattgaatgcactggttgagcaggatgatgccgaacgcttgttccgccgcttccgagcggcaggggatttaccgtatggcgcttttggtgaaattttctgggaaacacagtgccaggagatgcagcagcttgccgacagagtcattgcctgtcgccagccggggcagagtatggaaattgatctcgcctgcaacggtgtgcagataactggctggttgccgcagctttgggatgctgaagggatcagcttcagtgtcttcagctttgggatgctgaagggatcagcttcagtgtcttcagctttgggatgctggagcttgctacacatgctggaaatctgccactgggccaaggaatgcccacagcacggtattcctcctaagccacgtcccatctgtgtgggaccccaccgaaaatcggactgttcatctcacctggcagccactcccagagcccctggaactctggcccaaggctctctgactgactccttcccagatcttctcggcttagcggctgaagactgacgctgcccgatcgcctcggaagcctgacacttatactttctgctcccccggctccttcagttgtacccactctttgttgagtctcccacaattaccattgttcctggcccggacttcaatccggcctcccacattattccggataccacacctgaccctcatgactgcatctctctgatccacctgacattcaccccatttccccacatttccttcttccctgtttctcaccctgatcacacttggtttattgatggcagttccaccaggcctaatcgccactcaccagcgaaggcaggctatgctatagtatcttccacatctatcattgaggctactgctctgcctccctccactacctctcagcaagctgaactagttgccttaactcaagccctcactcttgcaaaaggactatgcgtcaatatctatactgattctaaatatgccttccatatcctgcaccaccatgcagtcatatgggctgaaagaggtttcctcactacacaagggtcctccatcattaatgcctctttaataaaaactctgctcaaagccgctttacttccaaaagaagctggggtcattcactgcaaggggcatcaaaaggcatcagatcccattgctctaggcaatgcttatgttgataaagtggctagacaagcagctagctctccaacttctgtccctcacggccagtttttctccttcacttcagtcactcccacctactcccccactgaaacttccacctatcaatctcttcccacacaaggcaaatggttcttagaccaaggaaaatatcttcttccagcctcacaggcccattctattctgtcatcatttcataacctcttctatgtagacataattcctcggtttggccttcccacctctatacagtctgataacggaccagcctttactagccaaatcacccaagtagtttctcaggctcttggtattcagtggaaccttcataccccttaccgtcctcaatcttcaggaaaggtggaacggactaatggtcttttaaaggcacacctcaccaagtttagcctccaacttacaaaggattggacagcacttttacctcttgctcttctcaaaatcagagcctgtcctcgagatgctacaggatacagtccatttgaacttttatatggacgcactttcttgcttggccccaacctcatcccagacaccagccctctaggcgactatcttccagtactccagcaggctagacaggaaattcgccaggctgctaatcttctcttgcctactccagatccccagccatatgaagacaacctagctggacgatcagttcttgttaagaatctgacccctcaaactctacaacctcgatggaccggaccctacttagtcatctatagtaccccgactgccgtctgcctgcagaatcctccccactgggttcaccattccagaataaagctgtgtccatcggacagccagcctaatccctcctcttcctcctggaagtcgcaagtactctcccccacttcccttaaactcactcatatttctgaagaacatgcctacacagctgtccccgccttacagacagactgggcaacatctcccatctccctacacctccgaacttcctttaacagccctcacctttaccctcctgaagaactcatttactttctagacaggtccagcaagacttccccagacatttcacatcagcaagctgccgccctccttcgcacttatttaaaaaacctttctccttatatcaactctactccccccatatttggacctctcacaacacaaactactattcctgtggccgctcctttgtgtatctcttggcaaagacccactggaattcccctaggtaatctttcaccttctcgatgttcctttactcttcatctccgaagtccaactacaaacatcaatgaaacaattggagccttccagctccatattacagacaagccctctatcaatactgacaaacttaaaaacattagcagtaattattgcttaggaagacacttgccctgtatttcactccatccttggctatcttccccttgctcatcagactctcctcccaggccctcttcttgtttacttatacccagccccgaaaataacagtgaaagattgctcgtagatactcgacgttttctcatacaccatgaaaatcgaaccttcccctctacgcagttaccccatcagtccccattacaacctctgacagctgccgccctagctggatccctaggagtctgggtacaagacacccctttcagcactccttctcacctttttactttacatctccagttttgcctcgcacaaggtctcttcttcctctgtggatcctctacctacatgtgcctacctgccaattggacaggcacatgtacactagtcttccttacccccaaaattcaatttgcaaatgggaccgaagagctccctgttcccctcatgacaccgacacaacaaaaaagagttattccactaattcccttgatggtcggtttaggactttctgcctccactgttgctctcggtactggaatagcaggcatttcaacgtctgtcatgaccttccgtagcctgtctaatgacttctctgctagcatcacagacatatcacaaactttatcagtcctccaggcccaagttgactctttagctgcagttgtcctccaaaaccgccgaggccttgacttactcactgctgaaaaaggaggactctgcatattcttaaatgaggagtgttgtttttacctaaatcaatctggcctggtgtatgacaacattaaaaaactcaaggatagagcccaaaaacttgccaaccaagcaagtaattacgctgaacccccttgggcactctctaattggatgtcctgggtcctcccaattgttagtcctttaatacccatttttctccttcttttatttggaccttgtatcttccgtttagtttctcaattcatccaaaaccgtatccaggccatcaccaatcattctatacgacaaatgtttcttctaacatccccacaatatcaccccttaccacaagacctcccttcagcttaa

SEQ ID NO: 23936 - DNA, 1103 bp, Homo sapiens
  SIMILAR (650)..(282): 931254mologous to HERV-H/env62 envelope protein,accession number AJ289709,Smith-Waterman Score=566.
atgacagacaccggagcctacttgaaggtggaggattattcagtgacgttgcactggtataaaatcttactgggaatatctggaaccgtgaatggtattctcactttgactttgatctccttgatcctgttggtttctcagggagtattgctaaaatgccaaaaaggaagttgttcaaatgccactcagtatgaggacactggagatctaaaagtgaataatggcacaagaagaaatataagtaataaggacctttgtgcttcgagatctgcagaccagacagcagtgagtaagtcaaggtctcggcggttttggaggacaactgcagctaaagagtcaacttgggcctggaggactgataaagtttgtgatatgtctgtgatgctagcagagaagtcattagaaaggctacggaaggtcgtgacagaagtcgaaatgcctgctattccagtactgagagcaatagtggaggcagaaagtcctaaaccgacaagcaagggaattagtggaataactcttttttgtcgtgtcggtgtcatgaggggaacagggagctcttcggtcctatttgcaatttgaattttgggagtaaggaaaactagtgtgcatgtgcctgtccaattagcaggtagacacatgtaggtagaggatctttcagggtctagggctgtaaatcgtgtcagggttgctgccaaacaaaccatgaactgggctgggtttttatattcgatgaaaaagagcctaaatgctaactgattttgggagaggtcagataaagaaagaggagcattaaccttgactatgactttagcttcagccactgcccagggctggtggagctggccggctgctctgagggtggggtccaccaagcccacgcccacccagaactcatgctggcccacaagcgccatatgcagccccgttcctgtctgcgcctctccctccacacctccccgcaagctgagggagccagcttcggccttggccagcccagaaaggggctcccacagtgcagtggcaggctgaagggctcggccagagtgggcgccaaggccgaagaggcgctgagagcaagcaagggctgcaagggctgccagcat

SEQ ID NO: 23937 - DNA, 939 bp, Homo sapiens
  SIMILAR (3)..(146): 811254mologous to Homo sapiens Human secreted protein, SEQ ID NO: 5210,accession number G01129,Smith-Waterman Score=199.
tttggcgccgtgactgggatcgggggacctcccttaggagatcaatcccccgtcctcctgctctttgctccgtgagaaagatccacctacgacctcaggccctcagaccgaccagcccaagaaacatctcaccaatttcaaatccgagacaaaggagacacgttttatccgtggacccaaaactccggcgccagtcacggactgggaaggcagccttcccttggtgtttaatcattccagggacacctctctgattattcacccaggcttcagaggtgtcagaccacgcagggacgcctgccttggtccttcacccttagcggcaagtcccacttttctggggaaggggccagctgctcctcgccagaccgagctaggtcccaattcttcctcagcctccgctcctccaccctataatccttttatcgcctcccctcctcacacctggtccggcttacagtttccttccatgactagccctccccctcctgcccagcaatttactcttaaaaaggtggctggagctaaaggcatagtcaaggatttaattaacctcaccttcaaggtgtacaataatagaaaaaagttgcagttccttgcctccactgtgagacaaaccccagccacatctccagcacacaagaacttccaaacgcctgaactgcagcagccaggtgttcctccagaacctcctccccgaggagcttgctacaagttccagaaatctggccaccgggccaaggaatgcctgcagcccaggattcctcctaagccacatcccatctgtgtgggaccccactggaaatcggactgtccaactcacctggcagccactcccagagcccctggaactctggcccaaggctctctgactccttcccagatcttcttggcttagcggctgaagactgacactgcccgatcacctcggaatcccca

SEQ ID NO: 23938 - DNA, 908 bp, Homo sapiens; identical to SEQ ID NO: 20911
  SIMILAR (360)..(512): 551254mologous to Homo sapiens calbindin D28K,accession number S46006,Smith-Waterman Score=126.

SEQ ID NO: 23939 - DNA, 1883 bp, Homo sapiens
  SIMILAR (1742)..(1041): 851254mologous to Mus musculus protocadherin,accession number AF281899,Smith-Waterman Score=1033.
tcaggcctctgagcccaagccaagccatcgcatcccctgtgacttgcacgtatacgcccagatggcctgaagtaactgcacccaggtgaaataaacagccatgttgctcacacaaagcctgtttggtggtctcttcacacggacgcgcatgaaatttggtgccaagacccgggacttggatcaggggacttcccttgggagatcactcccctgtcctcctactctttgctccatgagaaagatccacctacgacctcaggtcctcagaccgaccagcccaagaaacatctcaccaatttcaaatccaagacaaaggagacaggttttatccatggacccaaaactccggcaccggtcacggactgggaaggcagccttcccttggtgtttaatcattgcagggacacctctctgattattcacccatgtttcaagggtgtcagaccacgcagggatgcctgccttggtccttcacccttagcggcaagtcccgcttttctggagaaggggcaagatttaattaacctcgccttcaaggtgtacaataatagaaaaaagttgcaattccttgcctccactgtgagacaaaccgcagccacatctccagcacacaagaacttccaaatgcctgaaccgcagcggccaggcgttcctccagaacctcctcccacaggagcttgctacatgtgccggaaatctggccactgggccaaggaatgcccgcagcccgggattcctcctaagccgcgtcccatctgtgtaggaccccaccgaaaatcggactgttcaacttcacctgggcagccactcccagagcccctggaaatctggcccaaggctctctgactgactccttcccagatcttctcggcttagcagcttgaagactgacactgcccgatcgcctcggaagccccctgggtatattgcatgatgttgaggtttggggtatgattgattctgtcacccagatactgagtatagtacacaatagttaatttttcaattgtctcttctccctctctccctccatagtagtccccagtgtcttttgttgccatcagcagctgtatgacactgtccccaggtctcatgtctgtataaacatacacatcataggatatttcagggaaggttggcgtgttatcatttgcatccatcacttgaatattgacgatgactggctcactttcttgtacaccatcaaatgctgttatcgaaaaggtgtaagtttgctgttcttccctgtccactggttgaagtaaggtgaggtagcgagtaataccagtctgtgtgacggtgaagactgaggtgtagtcattcagaaaaaggtgaagctctgggtcttttgtatcttctatgtccttgtccagagctactattcttaaaggtgaagtcaaattgagactgtccgaaatggttgctcccactggggcagattccaggatatagccttgataactgggcattgtaaaatatggactttgattgttttcatccagtatttcaatgtgtagaccggcaaaggcaggaagaggatgaccattgtcttgttcagccttaataaccaaatcaaatttctggtgaaagtctctgtttactggctccaggagactaagttctgctgtcctaggatgcatatggaaaaatcgtgggtaatcctcaggagtccctttgctccagttaccaacaagttcctcatctctatctgagaccacctcagcctggttttcatcattaatatcattatcagcattttggtcaaagccattcggtaagtctctagagagttccaaactttctcgcatcttcctatcttctacagagccctgcaaactgttccaatctctgcctgttacccagttccaaagtcgtttctgcat

SEQ ID NO: 23940 - DNA, 1023 bp, Homo sapiens
  SIMILAR (1004)..(771): 971254mologous to Cloning vector pCMVLacI lac repressor,accession number U64448,Smith-Waterman Score=361.
actgaagatccaacacaagaagtaaaaatagccttaactgatgacattccaccattgtgatttgttttgccccaccctaactcttcaatgtacttttgtaatctcccccacccttaagaaggtactttgtaatctccccaacccttaagaaggttctttgtaattctccccacccttgagaatgtactttgtgagatccacccctgcctgcaaaacatggctcttcaccccctatcccaaaacctgtaagaactaatgataatccaccaccctttgctgactctcttttcggactcagcccgcctgcacccaggtgaaataaacagccatgttgctcacacaaagcctgtttggtggtctcttcacacggacgcgcatgaaatttggtgccgtgactcggatcgggggagacctcccttgggagatcaatcccctgtcctcctgctctttgctccgtgagaaacatccacctacgacctcaggtcctcagaccgaccagcccaagaaacatctcaccaatttcaaatccggtaagcggcctgctttttactctcttctccaacctccctcactatccctcaacctctttctcctttcaatcttggcgccacacttcaatctctcccttctcttaatttcaattcctttcattttctggtattttctggcagccactcccagagcccctggaactctggcccaaggctctctgactgactccttcccagatcttctcggcttagcggctgaagactgacactgcccgatcgcctcagaagcccctgcccgctttccagtcgggaaacctgtcgtgccagctgcattaatgaatcggccaacgcgcggggagaggcggtttgcgtattgggcgccagggtggtttttcttttcaccagtgagacgggcaacagctgattgcccttcaccgcctggccctgagagagttgcagcaagcggtccacgctggtttgccccagcaggcgaaaatcctgtttgatggtggttccgaaatcggcaaaatcc

SEQ ID NO: 23941 - DNA, 439 bp, Homo sapiens
  SIMILAR (181)..(14): 801254mologous to Homo sapiens stromal antigen 3, (STAG3),accession number AJ007798,Smith-Waterman Score=230.
  misc_feature (1)...(439): n = a,t,c or g
gtccgggtaccgacagccctttcagagcttcacgcactcacgcggacttctcggtgttatcatgcagagtccaaccaatatatnntaaatagctgtcggtgaggaaagacgtgctgtagctttgcatccaacacccaatttcctcaatgcagatagcacggatctcaggaaggacatcccggcgttgttttcagtggttattttgctgctttcttcttcacaccgcgattgaagctgtcctcaaatcattctcttgtcttcttgtctggtacatcggcatggcgcaaccaaagcaagagagggtggcgcgtgccagacaccaacggtcggaaaccgccagacaccaacggtcagaaaccgccagacaccaacgctcggaaaccgccagacaccaacgctcggaatacacgccagaccacgacggagggcgaacgaaatt

SEQ ID NO: 23942 - DNA, 4205 bp, Homo sapiens; identical to SEQ ID NO: 15891
  SIMILAR (213)..(3887): 981254mologous to Homo sapiens stromal antigen 3, (STAG3),accession number AJ007798,Smith-Waterman Score=6245.
  misc_feature (1)...(4205): n = a,t,c or g

SEQ ID NO: 23943 - DNA, 394 bp, Homo sapiens
  SIMILAR (264)..(1): 641254mologous to Homo sapiens hPMSR2,accession number U38964,Smith-Waterman Score=265.
tggctctgtcaaaggtcgagtccgtgacgtcaaagagcctggaccaatcacagcacaccggatgcgtttttttttccgaacgcccgcagcagagtcagaagagaggtggtcgccgtgcagtagtggtgtggcgtgtattccgagcgttggtgtctggcggtttccgagcgttggtgtctggcggtttctggacggttggtgtctggcggtttccgacggttggtgtgtggcacgcgccaccctgtcttgttttggttgcgccatgctgatgtaccaggtggcaaaatatccaaagaaagggtcccaagcggtacatcgtcatagccggaaacagtcagagccaccagccaatgatattttcaatgctgcgaaagctgccaaaagtgacatgcag

SEQ ID NO: 23944 - DNA, 197 bp, Homo sapiens; identical to SEQ ID NO: 4798
  SIMILAR (1)..(186): 601254mologous to Homo sapiens stromal antigen 3, (STAG3),accession number AJ007798,Smith-Waterman Score=187.

SEQ ID NO: 23945 - DNA, 448 bp, Homo sapiens
  SIMILAR (28)..(153): 481254mologous to Homo sapiens Polypeptide fragment encoded by gene 73,accession number W88836,Smith-Waterman Score=64.
tgcttgagggctgggccgcatgccctctacctgctctgtaaatcccggaattcactttcctccagccgggcggacttttgcccgcagccagctagtagatttgctgactgacccccttccaagcaggagcttgaagagctgttacaggtaggagctgtcacactcattctcagaattcttccatgcctgccctgccttccactgtgaatctacattccaatgttattttgcatagacatagtaccatatgtttgacaggtctccccatcttttcatttctgtcccccaagtatcttggatagtgttcattaaataagctgaataaatgctgtttgattgaacgaaggaaggtggctccagtagcccacttgtaccaaagtatgtgcaggagaattagttcatagaaatttccatcggagctctctgaaaatggagatgggtactgtag

SEQ ID NO: 23946 - DNA, 404 bp, Homo sapiens
  SIMILAR (113)..(12): 1001254mologous to Homo sapiens stromal antigen 3, (STAG3),accession number AJ007798,Smith-Waterman Score=187.
agaaaagctcaccgcatcagctggttgcccaggccaggacctgaagggttgtgtggagtctggaaatattgtggacccaagaaccttgacctctcggtgcctgcgacgggctgactgctgggaatgaagcaggatcaatgatgggataaaaatcaagggtaagaagaggatgtaaggcagctggtgttaatggggagaaaagctcagagagatgcattttaaagctaaacaatggagaagggtttgagaagaacccaacaatgtgggagtgctacagcagggaaccatgaaacagaaacagcaagatggaggcagccagacaccaaactgggaactcagacacccagattccctccatggcctcacccctgggcaaaatccaactctgagccatcttcttcctc

SEQ ID NO: 23947 - DNA, 481 bp, Homo sapiens
  SIMILAR (293)..(481): 841254mologous to Homo sapiens stromal antigen 3, (STAG3),accession number AJ007798,Smith-Waterman Score=258.
aactgactgggcaaccccatcaaaagtaacttatcaggacattggaacgccaacaaggaagtgatagggagttcctaattatttttcagtctgttctctctcagcctccttcagttactatagacggtttttatttaatgttatggagtagaggtgattggctttgtttgctgcaggggtatcgggagttccctagaaggaaggaaagagtaaaagtagtagatggtgtcccaaggcctttggaatttctgagtagagaagagaatgctggacttctctgtttccgccgtgttcctccctttcccacatgcaccatgtctcctggacacagctgtacacagaactgctgcaggagcatgggccccagggcctgaatgagcttcctgccttcatcgagatgagggacctggcccggaggtttgccttgagttttggaccccagcagctgcagaaccgtgacctgcgggtcatgctacacaag

SEQ ID NO: 23948 - DNA, 1056 bp, Homo sapiens
  SIMILAR (447)..(226): 911254mologous to Homo sapiens similar to yeast mismatch repair gene PMS1; similar to U38980 (PID:g1061426),accession number AC006014,Smith-Waterman Score=347.
tcacagttctgcaggcttcttaatattcctttgaaattccttatggtgcacaggtagtgtagaaaataactgcttcacgctgactgtggtccctctggggtgggggtagggggttttctggatgattttcccatcgtgatcaaacaccagtcgagtcccaaccttcgccgatgcgtggcaggtagaaatggtgacatcgatgtgtgatgtttcagagctgaaagagattaagccttcaaagttttcttcttctaccccacatccattgtctgaaacttcaatgagatccactccatagtccttaagctttagatcaatattggtggcaccagcatccagactgttttctactaactccttcaccgcagtgcttagactcagtaccaccggcccagagcaaatctgatggactgacttccgatcgataggtttgatggccttagcaggttctgtatcaaagctatgaaactgatgacctccctggtaagagttgccctccaactgagtctgcacgaagatatcaatcagcgtcagtatgaggctgaaagaaacaaggggccagggcagagggcacctgagcggctggagagccagagctcgtgggtgaccaggtgccttatcactgagcagtaatattttgaaaggaatcttgttttctgagcagtaggtctcacccatgtgcttaaaatattcaggaaaccatgatggtttccttggatactggatgatgccattcaggtctatgtttttatctgaaaatggtgcccctgctgtccggctgtcctctccatagggggctcgatggtctttgccgacttgaggaaataggtcactgtattgcagcagatccttggtcgtggggctgggttggtcattgccactttgctgggaggttgaagcctcagggctcagtgccagctggctggggtgagattgggagcagtccattagccatgagttgccgatctgcatctgcacctgctccagctgggctttggcagccgtgattcctgaactgatgcatggctctgcttgcatggaccaagcttgcaacat

SEQ ID NO: 23949 - DNA, 497 bp, Homo sapiens; identical to SEQ ID NO: 15892
  SIMILAR (177)..(287): 971254mologous to Homo sapiens stromal antigen 3, (STAG3),accession number AJ007798,Smith-Waterman Score=190.

SEQ ID NO: 23950 - DNA, 515 bp, Homo sapiens
  SIMILAR (269)..(346): 921254mologous to Homo sapiens stromal antigen 3, (STAG3),accession number AJ007798,Smith-Waterman Score=121.
  misc_feature (1)...(515): n = a,t,c or g
ctcgccnacagctatttagaatatattggttggactctgcatgataagcaccgagaagtccgcgtgaagtgcgtgaaggctctgaaagggctgtacggtaaccgggacctgaccgcacgcctggagctcttcactggccgcttcaaggactggatggtttccatgatcatggacagagagtacagtgtggcagtggaggccgtcagattactgatacttatccttaaacttttctaccctgagtgcgagataagaacgatgggtggatagagagcaacgccagagcccaggcgcccagaggactttcttccagcttctgctgtccttctttgtggagagcaaggtgacatacacagagagaactctggctgttgtgcataggacctacaagtgggctggggttggtggctcacgcctgtaagcccagcactttgggaggctgaggtgggaggatcctttgagcccaggagtttgagaccagcttgggcaacatagtgagaccctgtcgcccccaa

SEQ ID NO: 23951 - DNA, 900 bp, Homo sapiens
  SIMILAR (337)..(900): 851254mologous to Homo sapiens stromal antigen 3, (STAG3),accession number AJ007798,Smith-Waterman Score=825.
cgcagcagggtcagaagggaggtggtcgccctccgtcgtggtctggcgtgtattccgagccttggtgtctggcggtttccgagcgttggtgtcttggcggtttccgaccgttggtgtctggcggtttccgaccgttggtgtctggcacgcgccaccctctcttgctttggttgcgccatgccgatgtaccagacaagaagacaagaaaatgatttgaggacagcttcaatcgcggtgtgaagaagaaagcagcaaaacgaccactgaaaacaacgccggtggcaaaatatccaaagaaagggtcccaagcggtacatcgtcatagccggaaacagtcagagccaccagccaatgatcttttcaatgctgcgaaagctgccaaaagtgacatgcagggatgtccttcctgagatccgtgctatctgcattgaggaaattgggtgttggatgcaaagctacagcacgtctttcctcaccgacagctatttaaaatatattggttggactctgcatgataagcaccgagaagtccgcgtgaagtgcgtgaaggctctgaaagggctgtacggtaaccgggacctgaccgcacgcctggagctcttcactggccgcttcaaggactggatggtttccatgatcgtggacagagagtacagtgtggcagtggaggccgtcagattactgatacttatccttaagaacatggaaggggtgctgatggacgtggactgtgagagcgtctaccccattgtgtaggcctctaattgaggcctggcctctgctgtgggtgaatttctgtactggaaacttttctaccctgagtgcgagataagaacgatgggtggaagagagcaacgccagagcccaggcgcccagaggactttcttccagcttctgctg

SEQ ID NO: 23952 - DNA, 814 bp, Homo sapiens
  SIMILAR (4)..(147): 751254mologous to Homo sapiens stromal antigen 3, (STAG3),accession number AJ007798,Smith-Waterman Score=188.
atggcacgaaccccgggggcagagctggcagtggcaaaatatccaaagaaagggtcccaagcggtacatcgtcatagccggaaacagtcagagccaccagccaatgatattttcaatgctgcgaaagctgccaaaagtgacatgcagcaccgagaagtccgcgtgaagtgcgtgaaggctctgaaagggctgtacggtaaccgggacctgaccgcacgcctggagctcttcactggccgcttcaaggactggatgggtttccatgatcatggacagagagtacagtgtggcagtggaggccgtcagattactgatacttatccttaagaacatggaaggggtgctgatggacgtggactgtgagagcgtctaccccattgtacttttctaccctgagtgcgagataagaacgatgggtggaagagagcaacgccagagcccaggtgcccagaggactttcttccagcttctgctgtccttctttgtggagagcaagctccacgaccacgctgcttacttagtagacaacctgtgggactgtgcagggactcagctgaaggactgggagggtctgacaagcctgctgctggagaaggaccagagcacgtgccacatggagccagggccagggaccttccacctcctaggagaatctccaggaatttctgccattgtgcagggagcaattgaaaaatcaggcgagaggagctcgcccccacccaaacgtattggttcgatgaaggaagggcccatggttctgccactggccctggacacccagtgctggtttcccgtggaagtccccctggactga

SEQ ID NO: 23953 - DNA, 1394 bp, Homo sapiens
  SIMILAR (1001)..(1144): 951254mologous to Homo sapiens stromal antigen 3, (STAG3),accession number AJ007798,Smith-Waterman Score=242.
gtgggtgggggtcacctcttacattcctctcttagaaggtggactctacttccagggtcttcttggatttcctggaagccaaggataatattgagggattctagaagacgtagagtaaattagggagcggtgacatttctacttcgtgtagatgcctctgaagaatgtccagaatatcactcattttccactggaaaaggaattagctctccctttactcattttctctcctcttcactggtgtgtttctggctatctgtctctccctctccctaacccaaaacctcatttttcaaaccctttgttgttacaggttatcctgccagccttgactcttgtctatttttccattctctggacactaaccccacatttctaaatcagatgcttccccaggtgagtgtgggtcttagatgggataatgggaacagaggaatctgtgtccttcaatccttccccttcaaagcccactgtgccccacagaagcagctgtcgagtttgaagggacaagaatggtggccttctgtgaactctgcccagagttgcctctcagatgtggatactgagatcccaggagcaggtgagtdttgkctcaaagtgggygaaaaaaggsggagtatccctgccccccattccbaaggagaaattgacagtgtcattmcttaccttgggaaacattctgtccttttaaacatcctttcttttcccccctacaggcttttgtcttattaagtgatctacttctcatctttagccctcagatgatagttgggggccgtgatttccttaggccacttgtcttttttcctgaaagctactctccaagtctgagctagccagcttcctcatggaccacgtcttcatccagccgggaagacctgggcagtggtgcagtgactctatacctggggctcagtaagggctggggcttgggtgtagctcaaaaatatagggcaggaagcttaagtctgtgattcccttttgccttccatgtgagccaggtgattcccaggaggatcatttacagatagagcggctacaccagcggcgccgcctcctagccgggttctgcaagctgttgctttatggggtgctggagatggatgcagcctcagatgttttcaaacactacaacaaggtacaccaaggccccagcttgggcttcacgaagccactggtgatgccgaggttctcggctgctacagtctagccactgaccacaggatggtgaactctgatgacaacgtgtgggtgacaaagggcaggtcccgcttgagcaccaggatgaagtctgtctgatacgtggacagcatgaacacggatatgttctggtcagccagtggggcgatgactgacttggcgatcttggtcatgccaataggctgggagctgga

SEQ ID NO: 23954 - DNA, 625 bp, Homo sapiens
  SIMILAR (218)..(313): 751254mologous to Mus musculus stag3,accession number AJ005678,Smith-Waterman Score=108.
tttttttttttttttttttaggcatcttatccttgaagtttaatgcttttaaccccgttccacttcccgccagaagagtgtcctcctcccatccccacagcacaccatcttctgccttttcttctcagcacctgggagctgttcctgcagcaactccaggaggtggtggtgaagcatgcagagccagcggtgcttgaggctggggcgcatgccctcttacctgctctgtaatcccgaattcactttcttcagccgggcggactttgcccgcagccagctaggtaggatttgctgactgacccgcttccagcagggagcttgaagagctgttacagggtagggagctgggggctgggacaatgggggacaccccaaacaaggggtggggagggggctgcaagacgggggggatgtgggacttgatgagttctgggggaaaatgctattgtgggatcttcttttccttttcaattcttccttcccagattgaggatgaggtatataatctgggcagccactctgaaacgcctctctgccttctacaagtgagtggctttcctcctcttccccatcccgtttttactggtgtctgtggagttggttccctctgttcttttccagtata

SEQ ID NO: 23955 - DNA, 1035 bp, Homo sapiens
  SIMILAR (353)..(535): 811254mologous to Homo sapiens stromal antigen 3, (STAG3),accession number AJ007798,Smith-Waterman Score=265.
tccgaacgaccgcagcagggtcacaagggagatgtccgcccccagtcgtagcctcggacggtttctgagcgttggtgtttggcacgcgccaccctctcttgctttggttccgccatgccgatgtaccaggctaaaaacttatcacgggcgcggtgcgcctctacgtgtggagcttcccacctgcatgtaccggctctctaacgtgcaaggcaggagcggaggcccagcgcccggcgttggccacctacagtctttggtagatgagtggctggatagctacaagcaagaccagggatgcaggatttctgggagcttgttaactttttcatctgatcttggtgggatgtaaaggaattcgggggactatcctctgacagctccaggtctatcctggaagaagttccagggcagcttctgtgagtttgtggggacattggtctgtcggtgccagtacatcctcctccatgatgacttccctatggacaacctcatctccctgctcactggcttctcagactcacaagtctgcgcctttctgtcacactagcaccctggctgctatgaaactgatgacctccctggtaagagttgccctccaactgagtctgcaccaagatatcaatcagcgtcagtatgaggctgaaagaaacaaggggccagggcagagggcacctgagcggctggagagcctgttggagaaacacaaagagctgcattaatactacattgtcaaagacaaagacgaacatgagacatgcgatatgagttttaaaaggagagaagagcaaaaaaacaatacagctatccaaggagcaagtgctgagcttgtgaaaaaacagcttctattttattaaataatagtgttcctgcagggatgtttgaagtactctgcaaggctaattaggacagatcaatgtacacttacctctccagaaggctgaaagggtgtgtagtgactatgtgtcattaaaaatttacttgaccatgggcaacagatgtccatgaaagaatgaaaaaaaaaaaaaaaaaaaaaaa

SEQ ID NO: 23956 - DNA, 4290 bp, Homo sapiens
  SIMILAR (211)..(2199): 981254mologous to Homo sapiens stromal antigen 3, (STAG3),accession number AJ007798,Smith-Waterman Score=3411.
  misc_feature (1)...(4290): n = a,t,c or g
aggacgcctgagagcttgaggccacacgaggctgtggagcggcgtgactcaaacgtggcgcgcatcagctcgcacacttccaaacctcgcgatagctactggccctgggcgagccgttgggattgcgcttgcgcacagcgtgtcttctggatcgccatacctaccctgtggtcctcatcttcctggcctcatagctcctcctcgccaagcatgtccaccccgttgcaaagagctgtgggagataccaagagggccttgtctgcatcttctagttcctctgccagtctaccctttgatgacagggactcaaaccatacctcagaggggaatggcgactctttgttagctgatgaagacactgactttgaagacagcttgaatcgcaatgtgaagaagagagcagcaaaacgaccaccgaaaacaacaccggtggcaaaacatccaaagaaagggtcccgagtggtacatcgtcatagccggaaacagtcagagccaccagccaatgatcttttcaatgctgtgaaagccgccaaaagtgacatgcagtctttggtagatgagtggctggatagctacaagcaagaccaggatgcaggatttctggagcttgttaactttttcatccaatcttgcggatgtaaaggcattgtgacccctgagatgttcaagaagatgtccaactcagagatcatccagcacctaacagagcagtttaatgaggactcgggggactaccctctcatagctccaggtccatcctggaagaagttccagggcagcttctgtgaatttgtgaggacattggtctgtcagtgccagtacagcctcctctatgatggcttccctatggacgacctcatctccctgctcactggcctctcagactcacaagtccgcgccttccgtcacactagcaccctggctgctatgaaactgatgacctccctggtaaaagttgccctccaactgagtgtgcaccaagataacaatcagcgtcagtatgaggctgaaagaaacaaggggccagggcagagggcacctgagcggctggagagcctgttggagaaacgcaaagagctccaagagcatcaagaggagattgaggggatgatgaatgccctcttcaggggtgtctttgttcatcggtacagggatgtccttcctgagatccgtgctatctgcattgaggaaattgggtgttggatgcaaagctacagcacgtctttcctcaccgacagctatttaaaatatattggttggactctgcatgataagcaccgagaagtccgcctgaagtgtgtgaaggccctgaaagggctgtacggtaaccgggacctgaccacacgcctggagctcttcaccagccgcttcaaggaccggatggtttccatggtcatggacagagagtacagtgtggcagtggaggccgtcagattactgatacttatacttaagaacatggaagggttgctgacggacgcggattgtgagagcgtctaccccgttgtgtatccttntaatngaggcntggcttctgccgcaggcgaatttctgtactggaaacttttctaccctgagtgcgagataagaacgatgggtggaagagagcaacgccagagcccaggcgcccagaggactttcttccagcttctgctgtccttctttgtggagagcgagctccatgaccacgctgcttacttagtagacagtctgtgggactgtgcaggggctcggctgaaggactgggagggtctgacaagcctgctgctggagaaggaccagaacctgggtgatgtgcaggagagcacactgatagaaatccttgtgtccagtgcccggcaagcttcagaggggcacccgcctgtgggccgggtcactgggaggaagggcttaacctctaaggagcgcaagacccaagccgatgacagggtgaagttgactgagcacctcatccccctgctgccccagctcctggccaagttctcagctgatgcagagaaggtcactcccctgctccagcttctcagctgctttgacctccacatctactgcactgggcgcttggagaagcacctggagctgttcctgcagcaactccaggaggtggtggtgaagcatgcagagccagcggtgcttgaggctggggcgcatgccctctacctgctctgtaatcccgaattcactttcttcagccgggcgggacttttgcccgcaagccaagctagtagcatttgctgactgaccgcttccagcaggagcttgaagagctgttacagtcgtccttcctagatgaggatgaggtatataatctggcagccactctgaaacgcctctctgccttctacaacactcatgacctgactcgctgggagctctatgagccatgttgccaactcctgcagaaggctgtggacacaggagaggttcctcaccaggttatcctgccagccttgactcttgtctatttttccattctctggacactaacccacatttctaaatcagatgcttcccagaagcagctgtcgagtttgagggacagaatggtggccttctgtgaactctgccagagttgcctctcagatgtggatactgagatccaggagcaggcttttgtcttattaagtgatctacttctcatctttagccctcagatgatagttgggggccgtgatttccttaggccacttgtcttttttcctgaagctactctccagtctgagctagccagcttcctcatggaccacgtcttcatccagccgggagacctgggcagtggtgattcccaggaggatcatttacagatagagcggctacaccagcggcgccgcctcctagccgggttctgcaagctgttgctttatggggtgctggagatggatgcagcctcagatgtttctaaacactacaacaagttctacaatgactatggtgacattatcaaggaaacattaactagagcaaggcagattgaccgaagtcattgttcccgaatcctgctgctgagcctcaagcagctgtacacagaactgctgcaggagcatgggccccagggcctgaatgagcttcctgccttcatcgagatgagggacctggcccggaggtttgccttgagttttggaccccagcagctgcagaaccgtgacctcgtggtcatgctacacaaggaaggcatccagttctccttgtctgagcttcctccagctggctcctccaatcagcctccaaatctggcattcctggagctcctttcagagttttccccccgactcttccatcaggacaagcagcttttactgtcctatctagaaaagtgcctgcagcatgtctcccaggcacctggccatccctggggcccagtcaccacctactgccactccctcagccctgtggagaacacagcagagaccagccctcaggtcctccccagctccaagaggaggcgcgttgaagggcctgccaagcctaacagagaggacgtctcctcgtcccaggaagaaagtctgcagctgaacagcatcccgcccacgcccaccctcacctccacagctgtgaagagcaggcagcccctgtgggggttgaaagagatggaggaagaagatggctcagagttggattttgcccagggcagtcagcccgtcgcaggcaccgagagggtcaaggttcttgggtccacaatatttccagactccacacaacccttcaggtcctggcctgggcaaccagctgatgcgactcagccttatggaagaggacgaggaagaagagttagaaatccaggatgagtcaaatgaagaacggcaggatacagacatgcaagcaagtagctactcttccaccagtgagcgcgggctggacctcttagattctacaggagcctggatattgaggatttcctgacaggactctgggggccccttccccagcttccacttccctaccctcaagaaatgtgaccatttggaaaaggcaaagagaaaaggagcaaaatgaagcattcccccaggcttcagccctgggctctgaggggaaagagttgggcattgtttttctaaacctaacctttccctctggtgatgttggggtagagaagccgagagaccctgtcctccctaatgcactgtggcccagtccccttgcctttttcctgttctgtttggagtggagaagggcagcacctctgtgtttaatggaagtagcccatagtctcctggatttttggaacatctttttcagcctattttgtgtcctaatgattcactcaataaacatgtttgaatccacacaaaa

SEQ ID NO: 23957 - DNA, 2019 bp, Homo sapiens
  SIMILAR (1631)..(1795): 1001254mologous to Homo sapiens Six9 protein,accession number AJ011785,Smith-Waterman Score=261.
atgtccttgttggcatttaaaattattttagtgggctttgaagggagtaaggctagagttcaaactgacctcttctacagatccctggtcctgttcctgctgctccagatttgcttcccactcagctgctttggcaactggaaaggggaagagggaggcatgcagagatgggtacttgggaaaaatgagaagatcgcttccccccaccggcttcctgctcccaccgcaaggtttgctgtttcgttacaactaaacttgcgaattctcggagcatttcagtttggcccagtcctctttgtcctctggagacctctcgaccgagacaacgcatcgccccaaagtgaattcctgaattcctgtggcatcactgcctatttggtgggaaaaagggagggaggggtagagcggggtgggggagggaggagtagtgaacgctgccgcactcgcctctctttttctcccagacactcgcatgtcttttcaacctccaggttctgcaaaatactgaagaaaagtccaggagctaacggcgggcgctgtcgagcacggggagggggtctccatggcgcccgcgccgccaatccgcccaccccaatagcggagccagctcgcctgccggcgtgcctgagccgagccgagcccgaaccccaagccgcggagccagcacctcctccagtcggggtcgtccgctcccggccgttgagccaccgccgccacccggtagtgtgtcccgctgccccaatccgcctcatcaacaagcgcctggcacactcagccaggcccgcgggcatctgctgcgtgtcccgctccgggctcagtgccctcgccgccgccggcactgcctcgatgttccagctgcccatcttgaatttcagcccccagcaagtggccggggtatgtgagaccctggaagagagcggcgatgtggagcgcctgggtcgcttcctctggtcgctgcccgtggcccctgcggcctgcgaggccctcaacaagaatgagtcggtgctacgcgcacgagccatcgtggcctttcacggtggcaactaccgcgagctctatcatatcctggaaaaccacaagttcaccaaggagtcgcacgccaagctgcaggcgctgtggcttgaagcacactaccaggaggctgagaagctgcgtggaagacccctgggacctgtggacaagtaccgagtaaggaagaagttcccgctgccgcgcaccatttgggacggcgaacagaagacacactgcttcaaggagcgcacgcggcacctgctacgcgagtggtacctgcaggatccataccctaaccccagcaaaaaacgtgagctcgcccaggcaaccggactgacccctacgcaggtgggcaactggttcaaaaaccgccgacaaagggaccgagcggctgcagccaagaacaggtcgcaaactagtccgtgggccgaggcttttcgtttcccggagtgtggatctcgattagccaaacattttgcggaagagcccggcctcatcccccaggcccaaatgctccttacaatcctttttgcctttaggtcgggccgacccgatccaacgcgatcgcgggagcacttgctcaggcgtaagccccaggcagacgcaccgttagaaatgactccagcagcaggtcctgtcacagggttccgggcgggcactacgggcggagggcgacggcacgccagaggtgctgggcgtcgccaccagcccggccgccagtctatccagcaaggcggccacttcagccatctccatcacgtccagcgacagcgagtgcgacatctgagttgcccatccaggatgctcagaagcagattccagtgtaaaaacgagaaaaacaaaatgaaagaggggaagaagatgagagacctgcaaatccagcgccacagaagccaggtgaccagggacccgcgggctcgggttgccgtttcccgccccaccccgcggccggcctggcttcactggcgccctttggccgcgaccacgggaaccagcggtgaggcctga

SEQ ID NO: 23958 - DNA, 1586 bp, Homo sapiens
  SIMILAR (862)..(1032): 1001254mologous to Homo sapiens Six9 protein,accession number AJ011785,Smith-Waterman Score=272.
ggggtctccatggcgcccgcgccgccaatccgcccaccccaatagcggagccagctcgcctgccggcgtgcctgagccgagccgagcccgaaccccaagccgcggagccagcacctcctccagtcggggtcgtccgctcccggccgttgagccaccgccgccacccggtagtgtgtcccgctgccccaatccgcctcatcaacaagcgcctggcacactcagccaggcccgcgggcatctgctgcgtgtcccgctccgggctcagtgccctcgccgccgccggcactgcctcgatgttccagctgcccatcttgaatttcagcccccagcaagtggccggggtatgtgagaccctggaagagagcggcgatgtggagcgcctgggtcgcttcctctggtcgctgcccgtggcccctgcggcctgcgaggccctcaacaagaatgagtcggtgctacgcgcacgagccatcgtggcctttcacggtggcaactaccgcgagctctatcatatcctggaaaaccacaagttcaccaaggagtcgcacgccaagctgcaggcgctgtggcttgaagcacactaccaggaggctgagaagctgcgtggaagacccctgggacctgtggacaagtaccgagtaaggaagaagttcccgctgccgcgcaccatttgggacggcgaacagaagacacactgcttcaaggagcgcacgcggcacctgctacgcgagtggtacctgcaggatccataccctaaccccagcaaaaaacgtgagctcgcccaggcaaccggactgacccctacgcaggtgggcaactggttcaaaaaccgccgacaaagggaccgagcggctgcagccaagtaacagactccagcagcaggtcctgtcacagggttccgggcgggcactacgggcggagggcgacggcacgccagaggtgctgggcgtcgccaccagcccggccgccagtctatccagcaaggcggccacttcagccatctccatcacgtccagcgacagcgagtgcgacatctgagttgcccatccaggatgctcagaagcagattccagtgtaaaaacgagaaaaacaaaatgaaagaggggaagaagatgagagacctgcaaatccagcgccacagaagccaggtgaccagggacccgcgggctcgggttgccgtttcccgccccaccccgcggccggcctggcttcactggcgccctttggccgcgaccacgggaaccagcggtgaggcctgacccagcaccacgttcttcttgctttgctttttcctaaggattttgctgcaaagtctccttcggaacccgaactgcaagctgagcgcctgcccagattctcccatgggtatttcacgtcgaaaggacgctgttacatatgtataactttcgctttaaagtttttttttaacaaaacatatatatgctgtttatttacttatttaagagaccgccatggtaggtttctctgtagcttggggaacttgctgtttctaaacatgcaggctggtggtgatgggttctgtgtggagaagccaaacaataaaacaacctagtgggcaaccttcttaa

SEQ ID NO: 23959 - DNA, 2292 bp, Homo sapiens
  SIMILAR (271)..(858): 561254mologous to Homo sapiens nucleoside-triphosphate-- adenylate kinase,accession number X60673,Smith-Waterman Score=460.
tcggcacgagggtaggtgtagcgtggcgctcagtccgcctgctactcggtcccggcgctgggctgaggggaggggttgtcttaaaagtctctccttccccctgtaggggcggccggcgagtcccagtgagagcggagggtgccagaggtagggggccgataaacaaagttcccggggcttcctccggggccgcggtcggggctgcgcgtttgaccgcccccctcctcgcgaaggcaatggcttccaaactcctgcgcgcggtcatcctttggcccgcccgggttgggcaaaggggcccctgtgtgccagaggatcgcccagaactttggtctccaagcatctctccaagcggccacttcttgcgggagaacatcaaggccaagcaccgaagttggtgagatggcaaaacaagtatatagagaaaaagtctttttggttccagaccatgtgatcacacgcctaatgatgtccgagttggagaacaggcgtggccagcactggctccttgaatggttttcctaggacatttggacaagccgaagccctggacaaaaatctgtgaagtggatctagtgatacgattgaatatttcatttgaaacacttaaagatggtctcaatgcgccgttggattcacccctcctagcgggaagggtatataacctgggacttcaatccacctcatgtacatggtattgatgacgtcactggtgaaccgttagtccagcaggaggatgataaaccccgaagcagttgctgcccaggctaagacagtacaaagacgtggcaaagccagtcattgaattatacaagagcccgaggagtgctccaccaattttccggaaccgagaccgaacaaaatctggccctacgtttacacacttttctcaaacaagatcacacctattcagtccaaagaaagcatattgaccctggcccaatgggaagaaccaggaagatgtgggtcattcattccaatagtgtggtgtagtaattggtgctgttgtccaaatttagaagcctagctgaggtagccttgcagcatcttttctagttgaaatggtgaactgataggaaaacaaatgagtagaaagagttcatgaagaggccctcctctgcctttcaaaaggctggtcacctacacatgtttaaggtgtctctgcacatgtctcaagcccatcacaagaaagcaagtacagtgtggatttcaaatggtgtgtaactttcagctccagctgggtttttgacagctgttgctgtgggtaatatttttgacatgtgatgggtgatagtcttctggttctccccattccccacaaagggctgtttgaaccacaggcaccagaaaagcctgaggattgaatcctgcaggctctagccccaggctttgtccccaggcttttctgggtttgtgcccctcctggtaaccagtgaaattgaagctactttactcatagtgggttgtttctctggtcttgagctgactgcgtccacagttcatttttttccggtaggaataactccttttcctacatcccacgcttcaatagagtctctccttttcagacatcctgggatgaaagaatttggctttttttttttctttttttttttggacatctgttttcactctttaggcttttaaacaatagttattgcttttatccctctcagattctaataactgagagcgatggggctatattgaatctctgtatgcactgagaactgagctatgaagaggatcttattaaactgctggtctgactttatggattgacactgttcctttcttttattgtgaaaaaaaaaaaaaaaaccctgaaagtcttggggaaccccctaaagtcttttggggaatcctcaaaaagcatggggaagttaagtatttagctacataaatgttgtaagatcatatcttatgtatagaagtaataagaccatttggaattactggactaattgaatagttaaggtttcctattcgggacaataaaatggtattttgaaagtgctgctaactattgatgctgacagtggtttcactcctatgagtgacccaaacatattataaatatgtggtaaagggaatggagcctgtgggggttgagcagaatgttgtactagctgtgcctggactgagtataacagctttatgattatgagaaaacaaattctttattttttttttctgttccaaagattcatcctatggggtggccataaagtctagaattagatactaatattttgtcattcattataacatatcaataaaccatttattaaaaga

SEQ ID NO: 23960 - DNA, 435 bp, Homo sapiens
  SIMILAR (23)..(139): 561254mologous to Homo sapiens calbindin D28K,accession number S46006,Smith-Waterman Score=117.
  misc_feature (1)...(435): n = a,t,c or g
cctgcaggaattcggcacgaggaaagatccacctacgacctctggtcctcagaccgaccaggccagggaacatctcaccaattttaaatcatccgcttccagatcccctggaactctggcccaaggctctctgagtgactccttcccagatcttctcggcttagcagctgaagactgacactgcccaatcgccttggaagcctacaggacaatcacagatgctctgggtaactctcacagtggaggggacgtgagtaaaaatgnnnnnnnnnnnnnnnnnnnnnnnnnnnnnnnnnnnnnnnnnnnnnnnnnnnnnnnnnnnnnnnnnnnnnnnnnnnnnnnnnnnnnnnnnnnnnnnnnnnnnnnnnnnnnnnnnnnnnnnnnnnnnnnnnnnnnnnnnnnnnnnnnnnnnnnnnnnnnnnnnnnnnnnnnagg

SEQ ID NO: 23961 - DNA, 448 bp, Homo sapiens; identical to SEQ ID NO: 16244
  SIMILAR (96)..(146): 881254mologous to Human endogenous retrovirus tripartite fusion transcript PLA2L,accession number Z14310,Smith-Waterman Score=84.
  misc_feature (1)...(448): n = a,t,c or g

SEQ ID NO: 23962 - DNA, 423 bp, Homo sapiens
  SIMILAR (9)..(131): 871254mologous to Homo sapiens calbindin D28K,accession number S46006,Smith-Waterman Score=193.
gatcaggggacctccctcgggagatcaatcccctgtcctcctgctctttactccatgagagagatccacctacgacctcgggtcctcagaccaaccagcccaaggaacatctcaccaattttaaatcgggtatacatccagatggcctgaagtaactgaagaatcacaaaagaagtgagaatggcctgttcctgccttaactgatgacactgccttgtgaaattccttctggctcaaaatctcccccattgagcaccttatgacccccacccctgccagccagagaacaaccccctttgactgtaattttccattacctacccaaatcctataaaatggccccacccctatctcccttcactgactctcttttcggactcatcccacctgcacccaggtgaaataaacagccttgttgctcac

SEQ ID NO: 23963 - DNA, 423 bp, Homo sapiens
  SIMILAR (1)..(132): 651254mologous to Homo sapiens calbindin D28K,accession number S46006,Smith-Waterman Score=151.
ctgtcctcctgctctttgctctgtgagaaagatccacctacaacctcgggtcctcagaccaaccagctccaggaacatctcaccaattttaaattggaagacaagaatgtcaggactctgagcccaagcctgcacatatacatccagatggcacgaagctactgaagaatcacaaaagaagtgaaaatggtcggttcctgccttaactgatgacattaccttgtgaaattccttctggctcagaagctcccccactgagcaccttgtgaccccagcccctgccctcaagagaacaaccccctttgactgtaattttccactacctacccaaatcctataaaactgccccagccctaacttcctttgctgactctctttttggacttagcccacctgcaattaaaaagctttattgctcacaaa

SEQ ID NO: 23964 - DNA, 1035 bp, Homo sapiens
  SIMILAR (245)..(469): 721254mologous to Homo sapiens putative p150,accession number U93563,Smith-Waterman Score=272.
atggagctgaaaaccaaggctcgagaactacgtgaagaatgcagaagcctcaggagccgatgcgatcaactggaagaaagggtatcagcaatggaagatgaaatgaatgaaatgaaactaaaccaggaagaagttgaatctctgaatagaccaataacaggagctgaaattgtggcaataatcaatagcttaccaaccaaaaagagtccacgaccagatggattcacagccgaattctaccagaggaatccaacttacaagggatgtgaaggacctcttcaaggagaactacaaaccactgctcaaggaaataaaagaggatacaaacaaatggaagaacattccatgctcatgggtaggaagaatcaatatcgtgaaaatgaccatactgcccaagggcttaaaaaagcagcttacaaggctgttaattatgacaagcttaaagaaactacccaaggtgaagacgaaaacccagcccaggtcatggcccgcttagcagcaacccttagacgctttaccaccctagacacagaggggccagaaggccgccttattcttaatatgcattttaccacccaatccactcctgacattaggaaaaaacttcaaaaattagaatctggccctcaaaccccacaacagaacttaattaacctcaccttcaagcggctaaagtctgacaccacccaatcgcctcggaagcctacaggaccatcacagatgctctgggtaactctcacagtggaggcccgcctgcacccaggtgaaataaacagccatgttgctcacacaaagcctgtttggtggtctcttcacacggacacgcatgaaacatatagtcttgaaaaattaattaaacattcatctaaagaagttagaaaatgcaaagaagtgggtcaacatcgagcaggctacccattgcttgggagctcaatcggcccctggccccattgcgtggggcagctgccctctgctggcaagggcaaaagggcaatgggacagccttttggggtacccacactcagtgggtcctga

SEQ ID NO: 23965 - DNA, 561 bp, Homo sapiens; identical to SEQ ID NO: 18606
  SIMILAR (252)..(371): 921254mologous to Homo sapiens calbindin D28K,accession number S46006,Smith-Waterman Score=202.

SEQ ID NO: 23966 - DNA, 954 bp, Homo sapiens
  SIMILAR (361)..(918): 301254mologous to Acanthamoeba castellanii Myosin- IA,accession number AF085185,Smith-Waterman Score=135.
atgccctcaactcccatccgaggaaaaactgtcttccacaaattgtcttccatgaaaccagtccctggcaccacaaaggctgctcctcaccaggccaagctaggtcccaattcttcctcagcctctgctcctccaccctataatccttttatcacctcccctcctcacaccgggtccggcttacagtttcgttccatgactagccctcccccacctgcccagcaatttactcttaaaaaggtggctggagctaaaggcatagtcaagcatgctttgaaaggattaaagcctgttatcactcgcctgctacagcatggccttttaaagcctacaaactctccttacaattcccccattttacctgtcctaaaaccagacaagccttacaggaaggcaggcccctccccactcaaatccctgtccagggtccagggtccagagaagggagtggcccaggcagagaaccccattgtccactttgcctctgctgctctgccagtctgcaggggcagaaggatgcccgtgcccaggaagaatgctgaagccagatccgaaatcgctaatttacaggcagcgcagtgggatgcttttggattcgggacacctgggcccagacccagccgccccaccccggcgccccgggcttgtgcacagcaggagcctccgccccgcgggtgtgggttggacgaggccaagggcagcggccggccaggggccaggccagagtccagcactgccctcggaggaagccgggtgggggcggcgctcctgaaggctccagccccggggagggaagccggccccgcacctcccgcactgggcgctcagacccctggtgcttccacggcgtctgagggtttctcagccaccgaagggtgtctccgccgcacccaacgggtcccccggtggagagatttgccttcacatcagattaaagggggttccgtttggtga

SEQ ID NO: 23967 - DNA, 684 bp, Homo sapiens
  SIMILAR (328)..(242): 891254mologous to Homo sapiens unnamed protein product,accession number AK000541,Smith-Waterman Score=131.
tcatgcagcaagttggtctatgttctctttacttctgtttgccagatgatcctcaataatttctgcaaacagattcctcttcaacagattatatgcaagaggtaaaagctggacagcaactttatgaaaataatgtgagccatagcaaaagaggtccattcccaactcaagccccatcccataatcacattcattattagcaaactgcacaaaagtcatcatttcctgaatgggagcaaaagctttcagcctcaactgttgtcttgcaaattctcttgaggtcagcatctgtttcagggagctctctgtacctaacatcatttttatctggttcaatcttgggatgctgaatatttccatgaatttgtccatttcttcaaggttttctagcttgtttgcacagaggtgtttgtagttttcatgcgcgtccctgtgaagagaccaccaaacaggctttgtgtgagcaacatggctgtttatttcacctgggtgcaggtgggcttccactgtgagagttacccgaagctcggcgtccgtgatggtccagggggagatgggacgcggcttaggaggaatcccgggctgcgggcattccttggcccagtggccagatttccggcacgcgtagcaagctcctgggggaggaggttctggaggaacgcctggccgctgcggttcgggcat

SEQ ID NO: 23968 - DNA, 825 bp, Homo sapiens
  SIMILAR (3)..(77): 761254mologous to Homo sapiens HHLA3 protein,accession number AF126163,Smith-Waterman Score=107.
tcaggcctctgagcccaagccaagccatcgcatcccctgtgacttgcacgtatacgcccagatggcctgaagtaactgcacccaggtgaaataaacagccatgttgctcacacaaagcctgtttggtggtctcttcacacggacgcacatgaaaaccactgtcctccagatcccagaacggtagatccactgacagcttgcaccgtgctcctggaaaagcctgagacactcaacatgagcccacgaaggcagccgggagggaggctgtacccttccactgtgagagttacccgaagctcggcgtctatgatggtctgggggcttccaaggcaatcgggcagtgtcagtcttcagccgcttgactatgcctttagctccagccacctttttaagaggaaattgctgggcaggagggggagggctagtcatggaatgaaactgtaagcctgaccaggtgtgaggaggggaggtgataaaaggattgtagggtggaggagcagaggctgaggaagaattgggacctagctcggcctggcgaggagcagcttgccccttccccagaaaagcaggacttgctgctaagggtgaaggaccaaggcaggcgtccctgcgtggtctgaaacccttgaaacgtgggtgtataatcagagaggcgtccctgcattgattaaacaccaagggaaggctgccttcccagtccgtgaccggagccagagttttgggtccacggataaaatgtgtctcctttgtctctagtgttcctatctctgattcctcttcaatgcatgattcacgctgctgccagagggtcacagcattccacat

SEQ ID NO: 23969 - DNA, 1287 bp, Homo sapiens; identical to SEQ ID NO: 445
  SIMILAR (769)..(1263): 411254mologous to Murine leukemia virus gag-pol polyprotein,accession number U13766,Smith-Waterman Score=280.

SEQ ID NO: 23970 - DNA, 581 bp, Homo sapiens
  SIMILAR (237)..(79): 461254mologous to Human T-cell lymphotropic virus type 1 Gag,accession number S74562,Smith-Waterman Score=153.
tcagtcttcagctgctaagccgagaagatctgggaaggagtcagtcagagagccttgggccagatttccaggggctctgggagtggctgccaggtaagttgaacagtccgattttcggtggggtcctacacagatgggacgcggcttaggaggaatcccgggctgcgggcattccttggcccagtggccagatttccggcacatgtagcaagctcctgtgggaggaggttctggaggaacgcctggccgctgcggttcaggcatttggaagttcttgtgtgctggagatgtggctgcggtttgtctcacagtggaggcaaggaattgcaacttttttctattattgtacaccttgaaggcgaggttaattaaatcttgccccttctccagaaaagcgggacttgccgctaagggtgaaggaccaaggcaggcatccctgcgtggtctgacacccttgaaacatgggtgaataatcagagaggtgtccctgcaatgattaaacaccaagggaaggctgccttcccagtccgtgaccggtgccggagttttgggtccatggataaaacctgtctcctttgtct

SEQ ID NO: 23971 - DNA, 531 bp, Homo sapiens
  SIMILAR (219)..(82): 531254mologous to Human T-cell lymphotropic virus type 2 gag polyprotein,accession number AF139382,Smith-Waterman Score=160.
ctaagccaagaagatctgggaagcagtcagagagccttgggccagagttccaggggctctgggagtggatgccaggtgagttggacagtccaatttccagtggggtcccgcacagatgggacgtggcttaggaggaatcctgggctgcaggcattccttggcctggtggccggatttctggcacttgtagcaagctcctgggggaggaggttctggaggaatgcctggccgctgaggttcaggcgtttggaagttcttgtgtgctggagacatggctgaggtttgtctcacagtgaaggcaaggaattgcaacttttttctattattgtacaccttgaaggtgaggttaattaaattcgctaagggtgaaggactaaggcaggcgtccctgcgtggtctgacacctctaaaacctgggtgaataatcagagaggcgtccctgcaatgattaaacaccaagggaaggctgccttcccagtccgtgaccggcgccggagttttgggtccacggataaaacgtgtctcctttgt

SEQ ID NO: 23972 - DNA, 486 bp, Homo sapiens
  SIMILAR (118)..(483): 531254mologous to Sus scrofa polyprotein,accession number U77599,Smith-Waterman Score=358.
ggacacctctctgattatacacccacgtttcaagggtgtcagaccatgcagggacgcctgccttggtccttcacccttagcggcaagtctcgcttttctggggaaggggcaactcaacgccaatatcccatcccacagcaagctttgaaaggattaatgcctgctatcactcgcctgctacagcatggccttttaaagcctataaactctccttaccattcccccattttacctgtcctaaaaccagacaagccttacaagttagttcaggatctgcgccttatcaaccaaattgttttgcctatccaccccatggtgccaaacccatatactcttctatcctcaatacctgcctctacaacccattattctgttctagatctcaaacaagctttctttactattcctttgcacccttcatcccagcctctcttcgcattcacttggactgaccctgacacccatcaagctcagcaaattacctag

SEQ ID NO: 23973 - DNA, 441 bp, Homo sapiens; identical to SEQ ID NO: 19782
  SIMILAR (131)..(262): 721254mologous to Homo sapiens Human secreted protein, SEQ ID NO: 5210,accession number G01129,Smith-Waterman Score=174.
  misc_feature (1)...(441): n = a,t,c or g

SEQ ID NO: 23974 - DNA, 428 bp, Homo sapiens; identical to SEQ ID NO: 3061
  SIMILAR (2)..(100): 871254mologous to Homo sapiens calbindin D28K,accession number S46006,Smith-Waterman Score=154.
  misc_feature (1)...(428): n = a,t,c or g

SEQ ID NO: 23975 - DNA, 809 bp, Homo sapiens; identical to SEQ ID NO: 20370
  SIMILAR (291)..(785): 411254mologous to Feline leukemia virus gag-pol precursor polyprotein gPr80,accession number AF052723,Smith-Waterman Score= 284.

SEQ ID NO: 23976 - DNA, 1185 bp, Homo sapiens
  SIMILAR (688)..(1149): 481254mologous to Murine leukemia virus gag-pol polyprotein,accession number U13766,Smith-Waterman Score=364.
atggaaatgcaagaaaatggtgaaggagagagcagaaggcaggcagcatctgcgtgctcaaggacaggaggaaggaggaaggcgggagtgggcggaaacagcagtcagattctcagcagcactaaaattgtccctgccacttggcaggaggcagttcagacatcgcagatccaagagccttgtcctttcctcattcatgtaactgcacagggagccaattgtctggcagaattctgtgctaaatcagctaaaggagacaggaatggtggctgtggaatgcctccacagaggggccgtcagtcctgccagatcctcaccaaggattctgcagggccagtcttctcatcccctcccacccctacccttgatcagtaccagggcgtactgggtcacacagaaggaggtgagcggcagatgggacagtctagttccaggaaaacaagctcagggctcccactgattctacattatgcccgcctgcacccaggtgaaataaacagctttattgctcacacaaatcctgtttggtggtctcttcatatggacacgagtgaaatttggtgccctgacttggatcgggggacctcccttgggagatcaatcccctgtcctcctgctctttgctccatgagaaagatccacctacgacctcaggtcctcagaccgaccagcccaagaaacacctcaccaatttcaaatctgcatgctttgaaaggattaaagcctgctatcactcgcctgctacagcatggccttttaaagcctataaactctccttacaattcccccattttacctgtcctaaaaccagataagccttacaagttagttcaggatctatgccttatcaaccaaattgtttttcctatccaccccgtggtgccaaacccatatactctcctatcctcaatacctccctccacaatccattattctgttctggatctcaaacttgctttctttactattcctttgcatgcttcatcccagcctctctccgctttcacttgggctgaccctgacacccatcaggttcagcaaattacctgggctgtactgccacaaagcttcacagacagcccccattacttcagtcaagcccaaatttcttccttatctgttacctatctcagcataattctcataaaaacacacgtgctctccctgccgattgtgtctgactaa

SEQ ID NO: 23977 - DNA, 756 bp, Homo sapiens; identical to SEQ ID NO: 3068
  SIMILAR (67)..(186): 971254mologous to Homo sapiens calbindin D28K,accession number S46006,Smith-Waterman Score=213.

SEQ ID NO: 23978 - DNA, 516 bp, Homo sapiens; identical to SEQ ID NO: 641
  SIMILAR (514)..(449): 861254mologous to Homo sapiens Human secreted protein, SEQ ID NO: 5576,accession number G01495,Smith-Waterman Score=106.

SEQ ID NO: 23979 - DNA, 1423 bp, Homo sapiens; identical to SEQ ID NO: 5256
  SIMILAR (923)..(1339): 531254mologous to Gibbon ape leukemia virus pol polyprotein,accession number M26927,Smith-Waterman Score=387.

SEQ ID NO: 23980 - DNA, 832 bp, Homo sapiens
  SIMILAR (735)..(76): 491254mologous to Murine leukemia virus gag-pol polyprotein,accession number U13766,Smith-Waterman Score=479.
ctttaaaagaccattagtccattctacctttcctgaagattgaggatggtaagggatatgaaggttccactgaataccaagagcctgagaaactgcttgggtgatttgactagtaaaggctggtctgtcatcagactgatatcctttggagaataaatgctgaagaagcagaagtgtgtcttgttgagaagattcaaaggaggggctacaaagaagaaggtcatcaatatattgaataaggtgagaagcagaggggtggaaagaaagtagatcatgagaaagagcttggctgaagtaatgagggctgtccctgaaaccttgcggcagcacagcccaggtaagctgctgggactgttgggtgtcagggtcagtccaggtgacagcaaagagaggctgggatgaggggtgcaggggaatagtgaaaaaagcatctttaagatgaagcacagaatagtgagttgtggaggaaggtattgaggacaaaagagtgtacaggttgggcaccacagggtggataggcaaaacaatttggttggtaaggcgcagatcctgaactaatctgtaagacttgtcgggtttttggacaggtaaaatgggggaattgtaaggagagtttataggttttagaagcctatgctgtagcaggtcagtgataacaggctttaatccttttaaagcgtgcggtgggatgggatattggcgttgagtggggtaagggtgattaggtttagtgggatggtaatgggcatgtgatcggttgccagggaaggagtagagatgtcctatacttgtggttaaggtggggggatatgagaggaagacgcaaaggagg

SEQ ID NO: 23981 - DNA, 1080 bp, Homo sapiens
  SIMILAR (328)..(242): 891254mologous to Homo sapiens unnamed protein product,accession number AK000541,Smith-Waterman Score=131.
tcatgcagcaagttggtctatgttctctttacttctgtttgccagatgatcctcaataatttctgcaaacagattcctcttcaacagattatatgcaagaggtaaaagctggacagcaactttatgaaaataatgtgagccatagcaaaagaggtccattcccaactcaagccccatcccataatcacattcattattagcaaactgcacaaaagtcatcatttcctgaatgggagcaaaagctttcagcctcaactgttgtcttgcaaattctcttgaggtcagcatctgtttcagggagctctctgtacctaacatcatttttatctggttcaatcttgggatgctgaatatttccatgaatttgtccatttcttcaaggttttctagcttgtttgcacagaggtgtttgtagttttcatgcgcgtccctgtgaagagaccaccaaacaggctttgtgtgagccataaagctgtttatttcacctgggtgcaggtgggctgagtccgaaaagagagtcagcgaagggagataggggtggggccgttttataggatttgggtagataaaggaaaaaggggggttgttctctttctcagcaagtaacttgtggaaacaagttacttcctccttcctttgttctcctctgcctttgtctcttttgaaaagttctaagttgctagccaatcgggacaaatacagaatgtgtggtcctgttccagccaatggaaaccggacacagcagtagagtaaacatgtcaggttataaatgaccctgtctcctttgttcggtgtactctcgtggcaaaactgctggcgagtgtaccctttctgcctgttgtttggtggccccctttcagtgatggatccagaaggcagcccaagtggctgcctaattctcttggactgggggctgactctgttactctgtctactggtggggtattccaacccaatgtgcgtggacttaattgcaatggaaaaatagtcatggggagatgtcccttggagttcgttcccattcccgctacttcccccatcagcaggaagaagccagagcgatcgacggccttttcccat

SEQ ID NO: 23982 - DNA, 1764 bp, Homo sapiens; identical to SEQ ID NO: 1396
  SIMILAR (727)..(834): 581254mologous to Homo sapiens Human secreted protein fragment encoded from gene 42,accession number Y07785,Smith- Waterman Score=97.

SEQ ID NO: 23983 - DNA, 2206 bp, Homo sapiens; identical to SEQ ID NO: 15055
  SIMILAR (2)..(889): 1001254mologous to Homo sapiens potassium channel homolog; KvEBN2,accession number AF033347,Smith-Waterman Score=1565.

SEQ ID NO: 23984 - DNA, 3650 bp, Homo sapiens
  SIMILAR (931)..(824): 301254mologous to Homo sapiens putative p150,accession number U93563,Smith-Waterman Score=42.
tcagacaggaaagccaacggccatatctaaggtagtccaggagagaaggattaagaatcttgacagcaggagcccaagcctctctagattctctttttcagggctcatcagaagaggtggcaataatactgtgtagcggtcgccagtagcagcatccagtgggggagatatctggagctgcctaaggacagccacgatggctggtgagtgaagccatcctgtagtattgtatgtagtatgcaatgtgggaagtgccagagtcatggctgcactgctggatcgagctaggattgtgacacggtagccctttggatgaatgtagtgggatgttggtggggtcccaggatgtggagatacaggacctattggaccctgaaatcctttggagagtaaatgctgaaggagcagaagtgtgtcttgttgagaagattcaaaggaggggctacaaagaagaaggtcatcagtatattgaataaggtgagaagcagaggggtggaaagaaactaaatcatgagaaagagcttggctgaagtaatgagggctgtccctgaaaccttgcagcagcacagcccaggtaagctgctgggactgatgggtgtcagggttagtccaagtggaagcaaagagaggttgggacgaggggtgcagggcaatagtgaaaaaagcatctttaagatcaagaacggaacagttagttgtggaggaaggtattgaggacaaaagagtgtacgggttgggcactacagggtggataggcaaaacaatttggttgataaggcgcagatcctgaattaacctgtaagccttgtctggttttaggacaggtaaaatgggggaatggtaaggggagtttataggctttaaaacgccatgctgtaacaggcgagtgataacaggctttaatcctttcaaagcgtgcttttccctcacagtgtgagtctctcttggctctgagtcaatctgagctggtgctttgctttcctctctatgctgccatcctgagtctctgtgcctcaaagggtcttcatcacttttttgctgaattccagtgttctcccccagacactcttgggcagtatggccattttcacgatattgattgttcctacccatgagcatggaatgttcttccatttgtttgtatcctcttttatttccttgagcagtggtttgtagttctccttgaagaggtccttcacatcccagttcctccttgtacctctggtagaattcggctgtgaatccatctggtcctggactttttttggttggtaagctattaattattgcctcaatttcagctcctgttattggtctattcagagattcaacttcttcctggtttagtcttgggagggtgtatgtgttgaggaatttatccatttcttctagattttctagtttatttgtgtagagatgtttatagtattctctgatggtagtttgtatttctgtgggatcggtggtgatatcccctttatcattttttattgtgtctatttgattcaactcccacacaataataatgggagactttaacaccccacaaaggacgagagtgtccaagtatgagaactggctcaagtcttgggctaatgcttggccaaatagatggcctgaaaccttggggtaaaacagtccaggtgagttgagacgttgggttcgaaggatcttcaaaggcaaagaagaattgagagtcaggatgtaagggatgcagaaaaagtcatccttaaggtccaggactgtaaaccattctgcttcttctggtatttgggaaagcagagcataagggttaggtgcagcttgtcctccattaggaaagaaaccttggaggagttgccctgatacgctgaaaaggcagttctgtctggacatataaaaatagagcttttctcccttggttctataaggagggggtaaggcccctgttttaactactaagttgtcactgatctgctggttcaccctgttggcatgggctccttcaagtcctgctagatacccctgcttctgcttctctgaatccctggctaggtatgtgtatgtttccttggtgaaaagcgtcagtttatgctgcaagtcatttacatggaggccatgagaaacaactatgagtttcattttttctttgctgtatccatttcgtatgcatctttccttcttgatcgtcagcccggcgctgcgctcgatttctcgccgggccttagctgccttcccgcggggcaggtctctggacctgcagcccgccatgcctgagcctcccaccccctccgtgggctcctgtgcgtcccgagcctccccgatgagcgccgccccctgctccaaggtgccccagtcccatctttttgcttttatgagctgtaacaccgcgaaggtctgcagcttcactgctgaagccagcgagaccacgagcccaccgggaggaacgaacaactccagacgcgccaccttaagagctgtaacactcactcgaaggtctgcaacactcactcgaaggtctgcagcttcacatagatcctcaacagtttgaaatccattgaccaggacatagctttgactgataaaaggatatcccaattggccagtagccagtcttgtagcattccgaggacaggcctgaattctgagaagggaaagtggtaaaagtattgtccagtcctttttaagttggtggctgagcttggtgaggtgtatttttaaaagacctttagtccgttctgcttttctgaagctcggcgtccgtgatggtctagggggcttctgaggcgatcgggcagtgtcagtcttaagctgctaagctgagaagattgcccgctttccagtcgggaaacctgtcgtgccagctgcattaatgaatcggccaacgcgcggggagaggcggtttgcgtattgggcgccagggtggtttttcttttcaccagtgagacaggcaacagctgattgcccttcaccgcctggccctgagagagttgcagcaagcggtccacgctggtttgccccagcaggcgaaaatcctgtgtgatggtggttccgaaatcggcaaaatccattaattgcgttgcgctcactgcccgctttccagtcgggaaacctgtcgtgccagctgcattaatgaatcggccaacgcgcggggagaggcggtttgcgtattgggcgccagggtggtttttcttttcaccagtgagacaggcaacagctgattgcccttcaccgcctggccctgagagagttgcagcaagcggtccacgctggtttgccccagcaggcgaaaatcctgtttgatggtggttccgaaatcggcaaaatcccttataaatcacaagaataacccgagatagggttgagtgttgttccagtttggaacaagagtccactattaaagaacgtggactccaaccgtaaaaggcgagaaaccgtttgtaaggcttgtctggttttaggacaggtaaaatgggggaattgtaaggagagtttataggctttaaaaggccatgctgtagcaggcgagtgataacaggctttaatctttttaaagcgtgactattggctcccctggttctcaggttctcagatttggactgaattacaccactggctttcctggttctccggctcacagatggcatctgatggaacttctcagcctccat

SEQ ID NO: 23985 - DNA, 1585 bp, Homo sapiens
  SIMILAR (761)..(1465): 361254mologous to Homo sapiens gag,accession number AF156961,Smith-Waterman Score=354.
atggcatcatctgctcagcttctggggagctctcaggaaacttacaatcatagcaaaaggcaaagagggggtgagatgtctcacatggctggagctaggaggaagagagagagaggagagatgctacacacttttaaacaaccagatctcatgaggtggtcttcagtatgtcggaagaacaaagagaaggttggaaattccaggaaaagaagaaatgttagatattgtttctccagaaagttcaatggcactagtaaagttttcgagagctggcaagtggtggtggtgggtgaaataaacagccatgttgctcacacaaagcctgttcggtggtctcttcacacagacgcgcatgaaatttggtgccgtgactcagatcggcggacctcccttgggagatcaatcccctgtcctcctgttctttgctccatgagaaagatccacctacaagctcaggtcctcagaccgaccagcccaaggaacatctcaccaattttaaatcaggagagacaaaggagatgcattttattcgtggacccaaaactccggcaccggtcatggactagggaaggcagccttcccttggtgtttaacctttgcagggacggcctctctgatcattcagccacatttcaagggtgtcagaccatgcagggatgcctgccttggtccttcacccttagcggcaagtcccgcttttctggggaaggagcaagctgctccttgccaggctgagctaggtcccaattcttcctcagcctctgctcctccaccctataatccttttatcacctcccctcctcacacccggtccggcttacagtttcgttccgtgactagccctccccctcctgcccagcaatttactctgaaaaaggtggctggagctaaagacatagtcagggtacatgtacctttttctctatcagacctttctcagatcagtcaatgtttaggctctttctcatcagaccccactaaatatacacaggaattccaatgtctaactctgtcctacaacttaacctggagtgacttaaatgtcatcctgacttctaccctctccccagatgaatgggaaagagtttcttctctagcccaatctcatgctgataaccgccggcttcacgagccagacctccaggaaggcattagagcagttccccgagaggatccccaatggaaccatcaggcaaattccccaggtatagctaggcgagattacatggtttcctgcctagttgaagggcttaaaaaagcagcttacaaagctgttaattatgacaaacttaaagaaactacccaaggtgaagatgaaaacccagcccaggtcgtggcccgcttagcagcaacccttagacgctttaccgccctagacccagaggggccagaaggccgccttattctcaatatgcattttatcacccagtcagctcctgacattacaaaaaaacttcaaaaattagaatctggccctcaaaccccacaacaggaattaatcaacctcaccttcaaggtgcacaataatagggaggaagcagccagacggcaatgcatttctgagttacagttacttgcccctact

SEQ ID NO: 23986 - DNA, 847 bp, Homo sapiens
  SIMILAR (518)..(613): 471254mologous to Homo sapiens gag,accession number AF156961,Smith-Waterman Score=56.
taaaacctcttcaactcacacctgacctaaaacctaaatgccttattttcttctgctatgccgcttgaccccaatacaaactcgacagtagttccaaataaccagaaaatggcactttgaatttttccatcttgcaagatctaaataattcttgttgtaaaataggcaaatggtctgaggtgcctgacgtccaggcattcttttacacatcagtcccttcctagtctctgtgcccagtgcaactcgtcccaaatcttccttctttccctcccgcctgtcccctcagtaccaaccccaagcatcgctgagtctttctaatcttccttttctacagacccatctgacctctcccttcctccccaggctgctcctctccaggccgagctaggtcacaattcttcctcagcctctgctcctccaccctataatctttttgtcacctcccctcctcacacctggtcgggcttacagtttcgttccgtgactagccctcccccaacttgctcagcaatttactcttaaaaaggtggctggagccaaaggcatagtcaaggttaatgctcctttttctttatcccaaatcagatagcatttaggctctttttcatcaaatataaaaatccagcccagttcatgacttgtttggcagcaaccctgagacactttacagccctagaccctaaaaggtcaaaaggcagtcttattctcaaaatacattttattacccaatctgctcccgacattaaataaaactccaaaaattaaattccggccctcaaactccacaacaggatttaattaacctcgccatcaaggtgtgaaataacagaaaaaagttgcaactcct

SEQ ID NO: 23987 - DNA, 1826 bp, Homo sapiens
  SIMILAR (1207)..(1248): 921254mologous to Homo sapiens Human secreted protein, SEQ ID NO: 5210,accession number G01129,Smith-Waterman Score=75.
cagaggggctacacttcagcattacctggaatccacagtcaccagtgtttcttcagggttaggggagcattagcacatgccacagccaggcaacacagagcaagggctataaggcatggccatcagcgttggcagcagaaaggtagtaggaacaatcacacagtagcagcagttgagggagagaaggacattctgggaggtttcagcagctggcatcaccgcagtatgcctgataatttttcattgaaaggaggacacgatgtactgggtgaaagaggctgtggtaaatatactttaagtgacatagtggtaatgtgtgaggagaaagaagtgttctataattttcacgctttaaaaggattaaagcctgttatcactcgcctgctacagcatggccttttaaagcctataaactctccttacaattcccccattttacctgtcctagaaccagacaagccttacaggttagttcaggatctgcgccttatcaaccaaattgttttgcctatccaccccatgatgttactaggggagatatcagtcaccaaggccttggctggctccctgataaaagcccttgcagtattccacactgcagaatccccaggctatgctctcctggattcttactacctgctccagaaagggagtgtttgcatctccatcctccaagaagaggaagcattttcttggccggggaaaggagagtgtcgagataagtcctgggcctctctgggcctaatacccgcatttccccagggaggacagtggaaacaggccctggggcttctggaccacagctgcctctgctttggggaattaggcaccaggttggcagccccagcatccttcagcaccttcccaataacaaaccgagagcgggagagaaaaactgacaagctgattccaaaattcatgtggaaatgcaagggacccagaataaccaaaacaatcttggaaaagaatgaagttggagaatttacacttcttgatttcaaaacttaccacaaatttgcagtaatcaaaactatgtggtactggcataaggacagatacattgatcaacagaatgacattgaaagtccagaaataaattcatatgtttatggtcaactgatttttgacaaagactcagcccgcctgcacccaggtgaaataaacagtcttgttgctcacacaaagcctgtttggtggtctcttcatatggacgcgcatgaaatttggtgccgtgactcggatcggggggacctcccttgggagatcaatcccctgtcctcctgctctttgctccatgagaaagatccacctacgacctctggtcctcagaccaaccagcccaaggaacttctcaccaattttaaatcagtcccaactccaagcgttgctgagtctttccaatcttccttttctacggacccatctgacccctcctctcctccccaggctgctcctcgccaggccaagccaggtcccaattcttcctcagcctctgctccccgaccctataatccttttatcacctcccctcctcacacctggtcgggcttacagtttcattctgcgactagccctcctccacctgcccaacaatttcctcttaaaaaggtggctcaagttaaaggcacagtcaagtggctaaagactgatgctgcccgatcgcctcagaagcctacaggaaccatcacagatgctttagataactctcacagtggaggtccgataatggaccggcctttattagtcaaatcacccaagcagtttctcaggctcctggtattcagtaaaacctttatatcccttaccatcctcaatcttcaggaaag

SEQ ID NO: 23988 - DNA, 2119 bp, Homo sapiens
  SIMILAR (847)..(903): 421254mologous to Sus scrofa domestica polyprotein,accession number U77600,Smith-Waterman Score=46.
  misc_feature (1)...(2119): n = a,t,c or g
caaaaagcactcccactgagcaccttgcgacccccactcctacccgccagagaacaaccccctttgactacgcgcatgaaatttggtgccgtgacttggatcgggggacctcccttgggagctcaatcccctgtcctcctgttctttgctcggtgagaaagatccacctacgacctcaggtcctcagactgacccagccaaggaacatctcaccaattttaaatcagaaggcaggaatgtcaggcctctgagccccaagccaagccatcgcatcccctgtgacttgcacgtatatgcccagatggcctgaagtaactgaagaatcacaaaaagaagtgaaaatgactggttcctgccttaattgatgacattccaccacaaaagaagtgaaaatggctggtccctgccttaactgatgatattaccttgtgaaattccttctgctggctcatcctggctcaaaaatcacccccactgagcaccttgcgaccccccactcctgcccgccagagaaaaaccccccctttgactgtaattttccattaccttcccaaatcctataaaacggccccacccctatctccctttgctgactctcttttcggactcagcccgcctgcacccaggtgaaataaacagccacgttgctcacacaaagcctgtttggtggtctcttcacacggacgcgtatgaaatttggtgccgtgactcggatcgggggacctcccttgggagatcaatcccctgtcctcctgttctttgctccgtgagaaagatccacctacgacctcaggtcctcagacccaccagcccaaggaacatctcaccaattttaaatcagacaaaggagacatgttttatccgtggacccaaaactccagtgccggtcacggactgggaaggcagccttcccttggtgtttaataactgcagggacacctctctgattatacacccacgtttcaagggtgtcagaccacgcagggatgcctgccttggtccttcacccttagcggcaagtcccgcttttctggggaaggggcaagctgctcctcgccaggccgagctaggtcccaattcttcctcagcctctgctcctccaccctataatctttttatcacctcccctcctcacacctggtccggcttacagtttcgttctgtgactagccctcccccacctgcccagcaatttactcttaaaaaggtggctggagccaaaggcatagtcaagaccatcacagacgccgagcttcgggtaactctcacagtggaaggccgagacagtttaactaaattatctgcttccctgacgattcctggactacagccacatctcattgccgtccttctccccaacccaaagcctccttcgcgtcttcctctcatatccccctaccttaacccacaagtatgggacatctctactccttccctggcaactgatcacatgcccattaccatcccattaaaacctaatcacccttaccccactcaacgccaatatccaatccctcagcacgctttaaaaggattaaagcctgttatcactcgcctgctacagcatgggcttctaaaacctataaactctccttaccattcccccattttacctgtcctaaaaccagacaaggcttacaagttagttcagaatctgcgccttatcaaccaaattgttttgcctatccaccccgtggtgccaaacccatatactctcctatcctcaatacctccctctactacccattattctgttctggatctcagacatgctttctttactattgctttgcacccttcatcccagcctctctttgccttcacttagactgaccctgacacccattaaggctcaacaaattacctgggctgcactgccacaaggcttcacagacagcccccattacttcagtgaagcccaaatttcatcctcatctgttagtcatactcccgttcaccgttctcaactactcatacatgccctggctcttctttacactggccgggtttacactggtttctccaaggacatcacagctggatatctcctgggtgctatccccaaactggcactctaaactcttgaagtaaantaaataatctttgctgggaggactcg

SEQ ID NO: 23989 - DNA, 1578 bp, Homo sapiens
  SIMILAR (721)..(879): 661254mologous to Homo sapiens Human secreted protein, SEQ ID NO: 5210,accession number G01129,Smith-Waterman Score=162.
  misc_feature (1)...(1578): n = a,t,c or g
atggtgtgtctggagtttgttccttcagatgttcagatgtgtccagagtttcttccttccagtgggtttgtggtctcactgacttcaggagtgaagccacagaccttcgcagtgagtgttacagctcataaaggtggcacacccagagttgtttgttcctcccagtgggttcgtggtctcgctgacttcaggaatgaagctgcagaccctcacgaccagggaatggatgagaatcctactgattttctggaacggctaagaggggccttggtaaagcacatgtctctatctcctgatttagtcgagggacaattaatcctaaaggataaatttattactcaggcagcccctgatattgagaggaagctgcagaaacagaatgggccatctctcagggacatatttttcagtccccagaatggctacaattggaggatggcaagcttttatctaccagttgcgaacaaatggaaaattcttaaaagcctttaccagatcttacacctaggcccagattgggagggaccttacactgtatttctttctactcctatggcagtggaggtcactggaatagactcttggattcattacacccaagtgaaggcctggaaagctgatggagccacctctgtcaacccagaagagcacccaaagtaccaaggtgaaataaacagccatgttgctcacagaaagcctgtttggtggtctcttcacacggacgtgaatgaaatttggtgccgtgactcggattggggggacctcccttgggagatcaatcccctgtcctcctgtgttctttgctccgtgagaaagatccacctacgacctcaggtcctcagaccgaccagcccaaggaacatctcaccaattttaaatcaggtaagcggcctgctttttactctcttctccaacctccctcactatccctcaacctctttctcctttcaatcttggcgccacacttcaatctctcccttctcttaatttcaattcctttcattttctggtagagacaaaggagacatgttttatccgtgtacccaaaactccggcgccagtcacggactgggaaggcagccttcccttggtgtttaatcattgcagggacgcctctctgattatacattcacgtttcaagggtgtcagaccacgcagggacacctgccttggtccttcacccttagcggcaagtcccgctttcctggggcaggggcaagtacccctcaaccccttctccttcacccttagcggcaagtcccgctttcctggggcaggggcaagtacccctcaaccccttctccttcaccctcagcggcaagtcccgcttttctggggaaggggcaagtacccctcaaccccttctccttcacccttagcggtaagtcccgcttttntagggggcaggggcaagtaccccccaaccccttctccttcacccttagtggcaagtcctgctttcctggggcagcggcaagtcccgctttcctggggcaggtacccctcgaccccttctccttcaccctcagcggcaagtcccactttcctggggcaggacttgccgctttcctggggtag

SEQ ID NO: 23990 - DNA, 3993 bp, Homo sapiens
  SIMILAR (1234)..(2592): 991254mologous to Homo sapiens type IV collagenase,accession number M55593,Smith-Waterman Score=2531.
atggctgcagatgaagggctcggaatcaaggaggacttcctggaggcaaggagttttgagctgcctttgaaagtagggcaaatactttcctgtgcctcagtttccccatctctccgggaagtctatgtaatgtggtggttaggtggaaaggctatggcattagagaaccccaaggcatatcctgatgctgatattaagtgtgcggccacgagaactgctccctctggtcagccctctgggcctggtgcttctggcccaggtccctgcgtgccaccccttggcttcccttataccctacccctgtgctttggaattaatccatcatcagtaagctctcctcgaattatccttatccgggagggccatctgctccctcctgggatcccgattgctgcagagaggtcacagcagggtgtggagggttctgcaggctgtggcaaggagttgtggttttatttaagagtgtatctagcatctcgcactatacgaggccaagttaaggcttacacatttgcagaaggaaagaggccaccgagccagcggaccctcggagcgcaccctgctccgcggagcaggctccaaccaggcggcgaggcggccacacgcaccgagccagcgacccccgggcgacgcgcggggccagggagcgctacgatggaggcgctaatggcccggggcgcgctcacgggtcccctgagggcgctctgtctcctgggctgcctgctgagccactccgccgccgcgccgtcgcccatcatcaagttccccggcgatgtcgcccccaaaacggacaaagagttggcagtgcaatacctgaacaccttctatggctgccccaaggagagctgcaacctgtttgtgctgaaggacacactaaagaagatgcagaagttctttggactgccccagacaggtgatcttgaccagaataccatcgagaccatgcggaagccacgctgcggcaacccagatgtggccaactacaacttcttccctcgcaagcccaagtgggacaagaaccagatcacatacaggatcattggctacacacctgatctggacccagagacagtggatgatgcctttgctcgtgccttccaagtctggagcgatgtgaccccactgcggttttctcgaatccatgatggagaggcagacatcatgatcaactttggccgctggggtaggcagaagatggggcagaagaggggccagcagggatcagtgttgagacgaggggagcatggcgatggatacccctttgacggtaaggacggactcctggctcatgccttcgccccaggcactggtgttgggggagactcccattttgatgacgatgagctatggaccttgggagaaggccaagtggtccgtgtgaagtatgggaacgccgatggggagtactgcaagttccccttcttgttcaatggcaaggagtacaacagctgcactgataccggccgcagcgatggcttcctctggtgctccaccacctacaactttgagaaggatggcaagtacggcttctgtccccatgaagccctgttcaccatgggcggcaacgctgaaggacagccctgcaagtttccattccgcttccagggcacatcctatgacagctgcaccactgagggccgcacggatggctaccgctggtgcggcaccactgaggactacgaccgcgacaagaagtatggcttctgccctgagaccgccatgtccactgttggtgggaactcagaaggtgccccctgtgtcttccccttcactttcctgggcaacaaatatgagagctgcaccagcgccggccgcagtgacggaaagatgtggtgtgcgaccacagccaactacgatgatgaccgcaagtggggcttctgccctgaccaagggtacagcctgttcctcgtggcagcccacgagtttggccacgccatggggctggagcactcccaagaccctggggccctgatggcacccatttacacctacaccaagaacttccgtctgtcccaggatgacatcaagggcattcaggagctctatggggcctctcctgacattgaccttggcaccggccccacccccacgctgggccctgtcactcctgagatctgcaaacaggacattgtatttgatggcatcgctcagatccgtggtgagatcttcttcttcaaggaccggttcatttggcggactgtgacgccacgtgacaagcccatggggcccctgctggtggccacattctggcctgagctcccggaaaagattgatgcggtatacgaggccccacaggaggagaaggctgtgttctttgcagggaatgaatactggatctactcagccagcaccctggagcgagggtaccccaagccactgaccagcctgggactgccccctgatgtccagcgagtggatgccgcctttaactggagcaaaaacaagaagacatacatctttgctggagacaaattctggagatacaatgaggtgaagaagaaaatggatcctggcttccccaagctcatcgcagatgcctggaatgccatccccgataacctggatgccgtcgtggacctgcagggcggcgggtgcctattacctgaagctggagaaccaaagtctgaagagcgtgaagtttggaagcatcaaatccgactggctaggctgctgagctggccctggctcccacaggcccttcctctccactgccttcgatacaccgggcctggagaactagagaaggacccggaggggcctggcagccgtgccttcagctctacagctaatcagcattctcactcctacctgatcgcttcggccgggttctacgcccggctcaactatgagccggtgcgcccatgcggcggaagttgcggccacagtgccaggtgccggcgtcgggaacgtggggctgcggccgcccatggtgccccgtcaggcgtccttcttcccgccgccggtgccgaaccccttcgtgcagcagacgcagatcggctccgcgaggcgggtccagctttgaaatttctgggtcgtgctatgttcttttcaatgggatttatagttgctgtaaaaggaaagattgcaagtcctttggaagcaccagtttttgttgctgcccctcattcaacattctttgatggaattgcctgtgttgtagctgggttaccttctatggtatctcgaaatgagaatgcacaagtccctctgattggcagactgttacgggctgtgcaaccagttttggtgtcccgtgtagatccggattcccgaaaaaacacaataaatgaaataataaagccaacaacatcaggaggagaatggccccaggagccttcattccaggagttccagtgcagccagtcctcctcagatacccaaacaagctggcttaagacattgttatggaaaggtatatttgtctttcagtttatgccagttcaagtaccaaatgatgaagaaaaaaatgatcctgtcctttttgccaataaagtccggaatttaatggcagaagctctgggaataccagtaacagatcatacctatgaagactgcagattgatgatttcagcaggacagctaacattgcctatggaagctgggctggtggaatttactaaaattagccgaaaattgaaattagattgggatggtgttcgtaagcatttggatgaatatgcatctattgcgagttcctcaaaaggaggaagaattggaattgaagaattcgccaagtatttaaagttgcctgtttcagatgtcttgagacaactttttgcactctttgacaggatatggatggtagagttcccacagacagcaattaaggttgctattaatgttctaataaatagccataggggattaaatcatccagaggagaaaaagcttgttaatctaataatagtcttttattctatgatggcttatgagaaactgttagccaaatgccctccatcttcacggaaaataaatgagaagaattggatttaa

SEQ ID NO: 23991 - DNA, 426 bp, Homo sapiens
  SIMILAR (1)..(81): 1001254mologous to Bos taurus MMP-2,accession number AB043994,Smith-Waterman Score=144.
ggtgcctattacctgaagctggagaaccaaagtctgaagagcgtgaagtttggaagcatcaaatccgactggctaggctgctgagctggccctggctcccacaggcccttcctctccactgccttcgatacaccgggcctggagaactagagaaggacccggaggggcctggcagccgtgccttcagctctacagctaatcagcattctcactcctacctgatcgcttcggccgggttctacgcccggctcaactatgagccggtgcgcccatgcggcggaagttgcggccacagtgccaggtgccggcgtcgggaacgtggggctgcggccgcccatggtgccccgtcaggcgtccttcttcccgccgccggtgccgaaccccttcgtgcagcagacgcagatcggctccgcgaggcgggtccag

SEQ ID NO: 23992 - DNA, 3591 bp, Homo sapiens
  SIMILAR (1490)..(1353): 841254mologous to Homo sapiens type IV collagenase,accession number M55593,Smith-Waterman Score=196.
tttctcttcatcaataagattcaactaataatggccttttttatttatgtggttggaaaggttaaaataggtgacacgtgaaaagtgccttgccactagaaagcactctattaattgagggggatattattgttactgttcattgttagtagtagcattaaaactgatatgattgctaatgaagaaacagacttaaagaggaagcaaacctcgaacagatgccacaataaagcaacaaaattgctgattcttcagggctctttctacaggacagagggactagagcttactctccctgaggttctcttgctgtttactttggaagctctgacctttccagcagacaccatcacctgtgccctgcagggagcagagattcggactttttaagtttccgcttctggctgggtctgtggcccttgtctaggctctgctaaaacagatggcaaacacggccactcagtaggtgtctttattcatacttgttgacaatttcccattggggaatcggttgaagggaggggcagggagggctgagcgggaacccacggcttggttttccctccatccaagtggagaagagacttcggtaggggacatgctaagtagagtgaacaggggaacccatcactaatgtgggcttgaaaatgcactgttgcaattgacttcagaacaacctgaatcccttctgtcaggaaaatgcaatttcctaaagtggaaaaaaaaaaaacaagaccccaaagaaaaaaaacaaattgccatacaaagcaaactgcctaatgttaagaaaggttctaaggcaagccagcagtgaaaagcccaggggtctggggagtggccaccttggccatggcccctgttcccactgccctgtgcccaggcttttcgggccacccagtgccctctttgagacagtctccattgctctccaaggggttcttttgagccacaagaaggttgtgaaaggaagagaagcctgaaagtgtgggcagcaccaggggcagcccaaagcagggctgcggttgaaaaatatcaaagtatctcttttaggggtggcttctgaggggtggtgggattggagggggaaggtccgcctgggaggagtacagtcagcaatctaattcttgggcaccgggagggagccacttctctggaatcttaaattacccaggtagggagtgagaatgctgattagctgtagaggtgaaaggaccgggtggccaggcccctcccgggtccttctctagttctccaggcccggtgtatcgaaggcagtggagaggaagggcctgtgggagccagggccagctcagcagcctagccagtcggatttgatgcttccaaacttcacggctcttcagactttggttctccagcttcaggtaataggcacccttgaagaagtagctgtgaccgccgccctgcaggtccacgacggcatccaggttatcggggatggcattcccaggcatctccgatgagcttgggaaagcccaggatccattttcttcttcacctcattgtatctccagaatttgtctccagcaaagatgtatgtcttcttgtttttgctccagttaaaggcggcatccactcgctggacatcagggggcagtcccaggctggtcagtggcttggggtaccctcgctccaaggtgctggctgagtagatccagtattcattccctgcaaagaacacagccttctcctcctgtggggcctcgtataccgcatcaatcttttccgggagctcaggccagaatgtggccaccagcaggggccccatgggcttgtcacgtggcgtcacagtccgccaaatgaaccggtccttgaagaagaagatctcaccacggatctgagcgatgccatcaaatacaatgtcctgtttgcagatctcaggagtgacagggcccagtgtgggggtggggccggtgccaaggtcaatgtcaggagaggccccatagagctcctgaatgcccttgatgtcatcctgggacagaacggaaagttttggtggaggtgtaaatgggtgccatcagggccccagggtcttgggagtgctccagcccacaatgcgtggccaaactcgtgggctgccacgaggaacaggctgtacccttggtcagggcagaagccccacttgctggtcgtcatcgtagttggctgtggtcgcacaccacatctttccgtcactgcggccggcgctggtgcagctctcatatttgttgcccaggaaagtgaaggggaagacacagggggcaccttctgagttcccaccaacagtggacatggcggtctcagggcagaagccatacttcttgtcgcggtcgtagtcctcagtggtgccgcaccagcggtagccatccgtgcggccctccagtggtgcagctgtcataggatgtgccctggaagcggaatggaaacttgcagggctgtccttaagcgttgccgcccatggtgaacagggcttcatggggacagaagccgtacttgccatccttctcaaagttgtaggtggtggagcaccagaggaagccatcgctgcagccggtatcaagtgcagctgttgtactccttgccattgaacaagaaggggaacttgcagtactccccatcggcgttcccatacttcacacggaccacttggccttctcccaaggtccatagctcatcgtcatcaaaatgggagtctcccccaacaccagtgcctggggcgaaggcatgagccaggagtccgtccttaccgtcaaaggggtatccatcgcaatgctccaagcggcccaaagttgatcataatgtctgcctctccatcatggattcgagaaaaccgcagtggggtcacatcgctccagacttggaaggcacgagcaaaggcatcatccactgtctctgggtccagatcaggtgtgtagccaatgatcctgtatgtgatctggttcttgtcccacttgggcttgcgagggaagaagttgtagttggccacatctgggttgccgcagcgtggcttccgcatggtctcgatggtattctggtcaagatcacctgtctggggcagtccaaagaacttctgcatcttctttagtgtgtccttcagcacaaacaggttgcagctctccttggggcagccatagaaggtgttcaggtattgcactgccaactctttgtccgttttgggggcgacatcgccggggaacttgatgatgggcgacggcgcggcggcggcgtggctcagcaggcagcccaggagacagagcgccctcaggggacccgtgagcgcggccccgggccattagcgcctccatcgtagcgctccctggccccgcgcgtcgcccgggggtcgctggctcggtgcgtgtggccgcctcgccgcctggttggagcctggtccgcggcgcagggctgcgctccgagggtccgctggctcggtggcctggggtttgcccggctcagcggctcatggtccggcccccgcgccccagcccccgccgccgccgccgccgccgcaggtcctggcaatccctttgtatgtttaaagccccagatgcgcagcctccagccaccgcctgaggaagtctggatgcagcggaaaca

SEQ ID NO: 23993 - DNA, 1680 bp, Homo sapiens
  SIMILAR (1)..(660): 991254mologous to Escherichia coli Sensor kinase CitA,accession number D90702,Smith-Waterman Score=1090.
atggagccaaagcaaatcgcacgcgtggtccgtcagcaagaggcgctgtttagttcggtttatgaagggctgattgcggtggatccgcatggttacattaccgccatcaatcgtaacgcaagaaagatgctggggctgagttcccccggacggcaatggttgggtaaacccattgttgaagtggtcaggcccgccgatttctttaccgaacagattgatgaaaaacgtcaggatgtggtggcgaactttaacggtctgagcgttattgccaaccgggaagctattcgttcaggtgatgatttgctgggggccattatcagctttcgtagtaaagacgaaatttccaccctcaatgcgcaactgacgcaaataaaacaatacgttgagagccttcgtacattgcgacacgagcatctcaattggatgtcgacgctcaatggtctgttgcagatgaaagagtatgatcgcgtgctggcgatggtgcagggggagtctcaggcccagcaacagcttattgacagcctgcgcgaggcgtttgccgatcgccaggtggcggggctgctttttggtaaagtgcagcgcgcccgggaactggggctaaaaatgatcattgtccccggtagccagctttcgcaactgccgccaggactggatatcacgttcccctatgaagacggcctggattggagcgtcattaaccattgttacaccgaaattgatctgaagattttccgtcagtacctcgctcccgcgctgggtgtaactcaccgctttgtcggtactgaacccttttgtcgcgttaccgcccagtacaaccaggatatgcgctactggctggaaacgccgactatctccgcaccgcccatcgaactggttgaaattgagcggctgcgttaccaggagatgccgatatccgcttcccgggtacgtcaactgctggcgaaaaacgatctcacggctatcgcgccgctggtccctgcagtcacgctgcattatttgcagaacctgcttgagcactcccgccaggacgcggcagctcctgaatgtcgatacaagcgcactgggtccgcacaaaatgatttctgtgctggtggcgcgctcgccgtgccggaaggtgacagtacggtggatgtcgctaaccgcctgattgactggtgccagtcgcgcggtgaagcggttatcgccagtcaggactggcacccggcgaatcacggcagttttgccagtcagcacggtgtagagccttatacgccaggccaactcgacggtttgccacaaaccttctggccagatcactgtgtgcagaacagtgaaggcgcacaattacatccgttactgcaccaaaaagcgatcgcagcggtgttccataaaggcgaaaatcctttagttgacagttacagtgccttttttgataacggccgtcggcagaaaacctctctcgatgactggttacgcgatcatgaaatcgatgaattgatcgttatgggcctggctactgactattgcgtgaagtttaccgtgctggacgcgttacagttaggttataaggtaaacgtgattaccgatggttgtcgtggcgtgaatatccagccccaggacagtgcgcacgcgtttatggagatgtcagcagctggggcaacgctatatacgctggcagactgggaagagacacaggggtaa

SEQ ID NO: 23994 - DNA, 2976 bp, Homo sapiens
  SIMILAR (1441)..(2100): 961254mologous to Escherichia coli PHOSPHOENOLPYRUVATE- PROTEIN PHOSPHOTRANSFERASE PTSA (EC 2.7.3.9) (PHOSPHOTRANSFERASE SYSTEM, ENZYME I) (ENZYME I-ANI),accession number D90868,Smith- Waterman Score=1052.
atgcacatcaccctccggcagttggaagtttttgcagaagtattgaaaagtggatcaaccacccaggcgtcggtgatgctggcgttgtcgcaatcagcagtgagcgcagccttgaccgacctggaagggccagcttggcttttgcggcggcggtcggatgatgctgcggacgcgtgccttccgatcgccgtgctggaagatgccggcgtaccgtatcagctgctggaatccagccgcctggcggaagtggagcccgcgctggcagaagtggcgcacaaactgacgggcggcctgcagttacccaatgatgaaaccggagactgtcagctatttacccagaatctggcgcggatggcggagcaggcgggggttaaattccgctttaatacgcccgttgaccaactgctttgcgacggcgagcaaatctacggcgtgaagaagattttgggactggatgtgctggtacatggcgaggccgagcgtaatgacatggtggaatactttggcgagcacctcgacggatttgtctttacgcaaaacggttgggtacagagctacggttcccgctgcgtgaagccaccgattgtcattggtgacattagccgcccggcaccgattaccgtggagtgggcgaagtatgcgcaatcgctgaccgacaaaccggtgaaagggatgctgacggggccggtgaccatactctgctggtcgttcccgcgtgaagatgtcagccgtgaaaccatcgccaaacagattgcgctggcgctgcgtgatgaagtggccgatctggaagccgctggaattggcatcatccagattgacgaaccggcgctgcgcgaaggtttaccgctgcgtcgtagcgactgggatgcgtatctccagtggggcgtagaggccttccgtatcaacgccgccgtggcgaaagatgacacacaaatccacactcacatgtgttattgcgagttcaacgacatcatggattcgacctacgtgccgatattctttctcctgtcaaagaaaccggcacattgctgggcgtgttcacaagcggcggaactctgcggtctgaaggcgggcactccggtggtcgttggaggaggcgacgtgcagcttggttgtagagcggcggccaaaacgggctgtttgaaaaccccggtaaccaaacggggccatacggaaaataacgcaaaggcagatgcgaaaagctcgctggcgctgattggcaccggcaccctatttaatgacagttggcagcctgaaacattagcggcagcgatgaagagcaggcgcggcgcgtgctggaagagtacatcccaggtgcgctattatccgacagcgcacagcgttcagcctacgcaggcagaactgacggcgcatccgctgccgcgttcattaagccgccttaacccggatttactgtacggcaatgtgctggcaagcggcgtcggcgatgatgaatttgcaggcaatatccgtcgcctgatgacagaacagcatcaggggctgggggcggcgatcatcagcaatatggagcaggtttgcgccaaactttctgcctctgccagcgattatctgcgcgaacgtgttagcgacattcgcgatatcagcgaacagttgctgcatatcacctggccggaactgaagccgcgcaacaagctggtgcttgaaaaaccgaccattctggtggctgaagatttaaccccaagccagtttttgagccttgatttgaaaaatcttgcgggcatgattctggagaaaaccgggcgcacctcgcatacactgattctggcccgtgcctcggcgatcccggtactgagtggcttgccgctggatgcgattgcccgttatgccgggcaacctgcagtgcttgacgcccagtgcggcgtgctggcgattaacccgaatgacgcggtgagcggttattatcaggtcgcgcagacgctggcggataaacgccaaaaacaacaggcgcaggctgccgcgcagctggcctattcccgtgataaccagcgtattgatattgcggcgaatatcggcaccgctctggaagcgccaggcgcgtttgccaacggcgcggaaggcggcggacgagcagaacaattgaagactacaaccagtgcaactggagcggtgacagcgatatttcgacgaggaatgaggaataaatctactgaatccgaaagacctctgatagcgagttacgaaatggcgtcgcacgggcatgggccattggccctaccgtccccaattgagaaacattacggtcaactgcctgatgcgacgcttgatgcgtcttatcagcgcgtgtttcatacgcaagtgcgtatcggcgcgccgctgaacattaccggtttaacggattatgctcaggagccgtattattcgacggcggtgggattgcttcactatgggaaagagtcacatcttaacggtgaagctgaagtagaaaaacgtgttacagcatcagttggctcgtggatcaagcgactcaatagttggttggtgatgcgtttgtccgcctgcaatgccgcctgttctgcgcgggccgccagttcaatggcttcatccggggaaacttccgcagggtggaacaagtcgagatctggtgcgtcaaaggccagcagctctttgtctgccacgccggcacagggatctggcgaggtacaatcctggatttaccctccgaccatacagaatgagctaccgggaagtcaagtacttctcctttcctggggaacttctgatgaggatgttacagatgctggtcttaccacttatcatctccagtcttgtcacagtgaacgaggtgccctgctaaacaccacaccatcagccttctctgaccacagtgatgtagttgacaacagcgtacaacaggtctgttttctcaccctcttatcccacccagataacatctggttggacagcctattagctattgatgcaagaatgcttgttctcagaaccaccaggacttga

SEQ ID NO: 23995 - DNA, 2133 bp, Homo sapiens
  SIMILAR (1)..(774): 901254mologous to Escherichia coli ATP-dependent helicase HrpA homolog,accession number D90780,Smith-Waterman Score=1183.
atggagctggggcgcgggattaaaggactgatcggccatacccagccgcgtcgtctggcggcaagaacagtggcgaaccgtattgcggaagagctgaaaacggagccgggcggttgcatcggttacaaagtgcgtttcagcgatcacgtaagtgataacacgatggtcaagctgatgaccgacggtatcctgctggcggagatccagcaagaccgcctgctgatgcagtacgacactatcattattgacgaagcgcacgaacgcagcctgaatatcgattttttgctcggctatttgaaagagttgctgccgcggcgtcctgacctaaaaatcattatcacttccgcgactatcgacccggaacgcttttcgcgccactttaataatgcgccgattattgaagtctccggtcggacctatccggtggaagtgcgctatcgcccgattgttgaagaagccgatgacaccgagcgcgatcagttgcaggcgatttttgacgccgtagacgaactgagtcaggaaagccatggcgacattctgatctttatgagcggcgagcgggaaatccgcgataccgccgatgcgctgaacaagctgaacttacgccataccgaaatcttgccgctttatgcgcggctttcgaacagcgaacaaaatagggtattccagtcgcacagcggacggcgcagtcagatattactggcgggaaatctggcgcaggcccgaatgatgatcgagcgttttaagccggggctaatcttgctcgataactatcttcctgacggtagagggattaatttactgcatgaactggtgcaggcgcattatcccggcgacgtggtgtttaccactgcagccagcgatatggaaacggtgtctgaagccgtacgttgtggtgtatttgattatctcattaagcccattgcctatgaacggctggggcaaacgctaacccgtttccgccagcgtaaacatatgctggaaagtattgatagcgccagccagaagcaaattgactgcagatgtttaatcggaaaaactttccaaagggccggccccataaagctgctgacggcgtactgcgtggtgcttccggtggtcactgcgataccgcgattgcctctgcgctttccatcatcgtcggcgccgctggtacgcggtcgtattccgactctggtggataacgtactgacctgcatcaccccaggctccagtgtcgatattctggtcacagaccacggtatcgcagtaacccggcacgtccggtaccgagatcgattgtatcatgtcatatccactggttgcgccgctgttggccataatcatcgccaggatagcggcaatgataagaataatgcctcccgaggcatcactgctaaagaatcgatgcagatgtttcactttttatttctctttcagagatcccctttcgcggctatgcataaagagctgattgttgccagttcctactctaaaaactttggcctgtacaacgagcgtgttggcgcttgtactctggttgctgccgacagtgaaaccgttgatcgcgcattcagccaaatgaaagcggcgattcgcgctaactactctaacccaccatcacacggcgcttctgttgttgccaccatcctgagcaacgatgcgttacgtgcgatttgggaacaagagctgactgatatgcgccagcgtattcagcgtatgcgtcagttgttcgtcaatacgctgcatgaaaaaggcgcaaaccgcgacttcagctttatcatcaaacagaacggcatgttctccttcagtggcctgacaaaagaacaagtgctgcgtctgcgcgaagagtttggcgtatatgcggttgcttctggtcgcgtaaatgtggccgggatgacaccagataacatggctccgctgtgcgaagcgattgtggcagtgctcccgcaatggcaggctacgttgaaagcgatcgttccgtcttatggacgcaagctgaacggtgatgtagcggcaacagaacgcgagttgcagtacaccagcgaagtgctggggttgaactacgacaagccgcaggcagcagatagtacgccgaaaccgcagttgaaaccgcaacccgttcaaaaagaagtggcggatattgcgttgtaa

SEQ ID NO: 23996 - DNA, 1619 bp, Homo sapiens
  SIMILAR (136)..(723): 931254mologous to Shigella flexneri CriR,accession number U29654,Smith-Waterman Score=932.
atgctgacattcattgagctccttattggggttgtggttattgtgggtgtagctcgctacatcattaaagggtattccggcactgcccagcttcaacaagctacagcagcacggatatcgagaatacggaaaaatatactaatgaccgggggcgaatccgtatcatcgccctgtgctctaaacgagcgttttaagccggggctaatcttgctcgataactatcttcctgacggtagagggattaatttactgcatgaactggtgcaggcgcattatcccggcgacgtggtgtttaccactgcagccagcgatatggaaacggtgtctgaagccgtacgttgtggtgtatttgattatctcattaagcccattgcctatgaacggctggggcaaacgctaacccgtttccgccagcgtaaacatatgctggaaagtattgatagcgccagccagaagcaaattgatgagatgtttaatgcttatgctcgcggtgaacctaaggacgagctaccgaccggcattgaccccttgacgctaaacgcggtgcgaaaactgtttaaagagcctggtgtgcaacatacggcagaaacggtggcgcaggcactgaccatcagccgcaccactgccaggcgttatcttgaatattgcgccagccgccatctgattattgctgaaattgttcacggcaaagttggcagaccacaacgcatataccacagtgggtgacatgataaagccggaggaaacttgcctccggcattactatttacttgcctgtgaccgctgctgccgttcctggcaccatcagctctgtagcaacgattacaatcaccaaaccaacaagcaccggtaccggagtgcgttttacgacttcaaacggcgagatcttcgccatccggccaccgcaacgactacgccagaacggcgaaagggtcccgtcaaggtttgacgcctgcaccatcgggatagtcaaaagagtgaccgcgatggagacgccgcccacgattcatgactttggtggcttcccgcaggcgctgtacgatacgcattatcctgctccgggttcgcctgcgctggcacagcgtctggttgagctgttagcgccgatcccggtgacgctggataaagaagcctggggctttgaccacggctcgtggggcgtgctgattaagatgtatcctgacgctgatatcccgatggtgcagttgagtatcgacagtagcaaacctgccgcctggcatttcgaaatggggcgcaaactggcagcgctgcgagatgaaggaataatgttggtcgccagcggtaacgtggtgcataacctgcgcacagcgaagtggcacggtgatagttcaccgtatccgggggcgacgtcgtttaatgagtatgtgaaagcgaatctgacgtggcgagggccagtggaacaacatcctctggtgaattacctcgaccatgagaggggcacgttatcgaacccaacggccagacattatttgccggtgttgtatgtgttacgggctatcttatgggcaaggaccccattacccattccgggacgtaccacagtatctaaagtcaagatgaagaaaagaatcttaagagccatgagacaaaagcagcag

SEQ ID NO: 23997 - DNA, 4474 bp, Homo sapiens
  SIMILAR (1546)..(2835): 961254mologous to Escherichia coli Sensor kinase CitA,accession number D90702,Smith-Waterman Score=2114.
atgagtcaggaaacgcccgcttcgacgactgaagcgcagattaaaaataaacgccgtatctcacctttctggctgctgccgttcatcgcgctaatgattgccagttggctgatttgggacagttatcaggaccggggtaataccgtcaccatcgactttatgtcggcggatggtattgttccaggccgtacgcctgttcgttatcagggcgttgaagtcggaacagtgcaggatatcagcctcagcgacgatcttcgtaagattgaagtcaaggtcagcatcaagtccgatatgaaagatgcgctgcgcgaagagactcagttctggctggtgacgccaaaagcatcgttggcaggtgtctccgggctggacgcctcgtcgacggcgcagcacatcattgaccgaggtcgactgccagcggtcgatatcctgacgggtcacaacggtggttggtgcaagcacacgtctgcgcggctgttcaaaacggttagcagtaacgacgagagtatccgggctggtatcctgtgcccaagcggaaaatgccgtgacggaacacgccgtcagcagcgaagcttttttaatcattgtaaagcatccacaatagaagaaggatgccgcaggtttcatcaatattacgcgatgatgagaaccagatgcgacgttggccggcaggtcttcgggcttggaggggtatctaagatactaagagatgatgacttcccaccgaatggcagtgtccgcataacgcaatcatcgcacctttccttaccgctgcgcgtcacgtccagattcgcactggattccctattaactcacaggaccggcaagtggatgctacaggttgtaacaagatacatcatgacccccgaacaccttccaacagaacagtatgaagcgcagttagccgaaaaagtggtacgtttgcaaagtatgatggcaccgttttctgacctggttccggaagtgtttcgctcgccggtcagtcattaccggatgcgcgcggagttccgcatctggcacgatggcgatgacctgtatcacatcattttcgatcaacaaaccaaaagccgcatccgcgtggatagcttcccccgctgcagtgtacttatgcaccagttgatgacggcgatgattgcggaaaccggtattaaagtcgtctacgatgttttcgactctaacgaagtactggaaggcaaattaatggccgggagtaccggctttgatctggtggttccatctgccagctttctggagcgccagttgactgcgggagttttccagccgctggacaaaagcaaattgccggagtggaagaatctcgacccggaactgctgaagctggtcgccaaacacgatcccgacaataaatttgctatgccctatatgtgggcgacgaccgggattggctataacgttgataaagttaaagcggtgctgggcgaaaacgcgcccgtcgatagctgggacttgatcctcaaacctgaaaatctggaaaaactgaaaagctgcggtgtctctttcctggatgcgccagaagaagtttttgctaccatcccaacagcactaaagcggatggtgattggggaccggcactcgatccgcctttaccatcctaatccggagaaaattggttatcctatgcagttcaccaaacagggcgcgctggagaaaggggagagctacttcattaccgggaaagggtcaatggggatggcgatgcgcgccaaaacgccaatctttgatgacgatggaaaagtcatcggcgtggtgtcgattggctacctggtgagtaaaatcgatagctggcgggctgagtttttattaccgatggcaggtgtgtttgtcgtgctgttagggattctgatgttgctgtcgtggttcctggccgcgcatatccgtcggcagatgatgggcatggagccaaagcaaatcgcacgcgtggtccgtcagcaagaggcgctgtttagttcggtttatgaagggctgattgcggtggatccgcatggttacattaccgccatcaatcgtaacgcaagaaagatgctggggctgagttcccccggacggcaatggttgggtaaacccattgttgaagtggtcaggcccgccgatttctttaccgaacagattgatgaaaaacgtcaggatgtggtggcgaactttaacggtctgagcgttattgccaaccgggaagctattcgttcaggtgatgatttgctgggggccattatcagctttcgtagtaaagacgaaatttccaccctcaatgcgcaactgacgcaaataaaacaatacgttgagagccttcgtacattgcgacacgagcatctcaattggatgtcgacgctcaatggtctgttgcagatgaaagagtatgatcgcgtgctggcgatggtgcagggggagtctcaggcccagcaacagcttattgacagcctgcgcgaggcgtttgccgatcgccaggtggcggggctgctttttggtaaagtgcagcgcgcccgggaactggggctaaaaatgatcattgtccccggtagccagctttcgcaactgccgccaggactggatagcaccgagtttgcagccattgtgggcaatttacttgataacgccttcgaagccagcctgcgtacgcatgaaggggacaagatcgttgaattattcctcagcgatgaaggcgatgatgtggtgattgaagtcgccgatcagggctgcggcgttccagagtctctacgagacaaaatatttgagcagggggtcagtacgcgtgctgacgagcccggtgaacatggcattgggttgtacttgattgccagctacgtaacgcgctgcggatggtgttatcactctcgaagataatgatccctgcgtcaaaaaagattcttcacgcttcccctatgaagaccggctggatttggtgttaaaaggcaccgccgatattccacgcctgactgtgcatcgtggctccgaatacatcatctcccgcgctacgttcccttgctacttcattaaagaacagagcgtcattaaccattgttacaccgaaattgatctgaagattttccgtcagtacctcgctcccgcgctgggtgtaactcaccgctttgtcggtactgaacccttttgtcgcgttaccgcccagtacaaccaggatatgcgctactggctggaaacgccgactatctccgcaccgcccatcgaactggttgaaattgagcggctgcgttaccaggagatgccgatatacgcttcccgggttatgttcattttccgcccagataatacggccctgccccggaacgatacgccccagatggtgaagctgtttatggatcgctttcaggtcgtcaaagatatcggtgtgatcgaactcaaggttgttgaggatcagcgtacgcgggcagtaatgatcaaatttagagcgtttgtcaaagaaggcgcagtaatagtcatccgcttcgataacaaagaagtcgctttcgcccagatgagcggaaacctcacagttccccggagcacgtccgattacaaagcacgggatatttttttccagtaccgcttcctcactcggatttccacgggtcatggcgttgccaataatcaccagatccggctacggctcgagctggctggcatcgtacccctgaatcagctcaatgccttgcttctcaaggtctatccgctctccaagctgtgtaattccccaaaaaaatgccaattagaaagcgtgttccgccttacacaatgggtcgtcaaaaaaccgatctccaaccgccagagtgggttgggaggtattgtgctccccggtctttttcgcgtcttgtccccgggtaacctttcccccataaagggcacagtcattttgccaaatgaagtgcaacccggctttttgggcaatctggtggggccgatagcggttggatcggtttatcgtaaatctaccttcctcatggattcactgggtaacaaaattctgccggactggctgaccattgaagagcatctgcatctcctgaaagggctggagtctaccccattcacaatgaaaggtgtgcgcaccgagcgtcgcgatattattaaaaatggcatcctgactcagtggctgctgaccatctactcggctaggaaactgggtctgaaaagcaccgcacatgcgggcggtattcacacctggcggattgccgaacaaggtgtaagcttcgagcagatgctcaaagagatgggcaccgggctggtggtcacggaattgattgaccagggcgtaagtgccatcaccggtgattattcccgtgattcaacgggcttttgggtaaagaatggccaaattcagtatccggtgatcgaaatccccatcgcaggtaatttaaaagatatgtggcgcaatattgtcaccgtcggtaacgatattgaaacacgcagtaatatacagtgtggttctgtgctgataacgaaaatgaaaatcgccggtcagtaa

SEQ ID NO: 23998 - DNA, 1890 bp, Homo sapiens
  SIMILAR (885)..(1196): 971254mologous to Shigella flexneri CriR,accession number U29654,Smith-Waterman Score=523.
gggatccgcgacccgcacactaacctcttaaggaactacattcaagaccagatagagcttgaaccagatcgaaggatcaccagtttccctcgaagtccgagtccacctgtcggatcatgtccggagcttgatgtaaatatcttctggagggccccgggaactggggctaaaaatgatcattgtccccggtagccagctttcgcaactgccgccaggactggatagcaccgagtttgcagccattgtgggcaatttacttgataacgccttcgaagccagcctgcgtagcgatgaaggaaacaagatcgttgaattattcctcagcgatgaaggcgatgatgtggtgattgaagtcgccgatcagggctgcggcgttccagagtctctacgagacaaaatatttgagcagggggtcagtacgcgtgctgacgagcccggtgaacatggcattgggttgtacttgattgccagctacgtaacgcgctgcggtggtggtatcactctcgaagataatgatccctgcgctccattaaccctattgatcgttgaggacgaaacgccgctggcagagatgcatgcggaatatattcgtcacattcccggattcagtcagatattactggcgggaaatctggcgcaggcccgaatgatgatcgagcgttttaagccggggctaatcttgctcgataactatcttcctgacggtagagggattaatttactgcatgaactggtgcaggcgcattatcccggcgacgtggtgtttaccactgcagccagcgatatggaaacggtgtctgaagccgtacgttgtggtgtatttgattatctcattaagcccattgcctatgaacggctggggcaaacgctaaccgggttccccccagcgtaaacatatgttgaaaagtattgaaagcgccacccagaagcaaattgatgagatgtttaatgcttatgctcgcggtgaacctaaggacgagctaccgaccggcattgaccccttgacgctaaacgcggtgcgaaaactgtttaaagagcctggtgtgcaacatacggcagaaacggtggcgcaggcactgaccatcagccgcaccactgccaggcgttatcttgaatattgcgccagccgccatctgattattgctgaaattgttcacggcaaagttggcagaccacaacgcatataccacagtgggtgacatgataaagccggaggaaacttgcctccggcattactatttacttgcctgtgaccgctgctgccgttcctggcaccatcagctctgtagcaacgataacaatcaccaaaccaacaagcaccggtaccgaggtgcgttttacgacttcaaacggcgagatcttcgccatcccggcaaccgcaacgactacgccagaaacgggcgaaagggctctttgatgatagcctatgatcacaatgcttatgtaaaaccactctggctttatctggtgattgatcagttccaacagccccatagagctgtgggtttcctgtttcatattttgcaaggggcatttttaaaaaaggtcttttctatcaaccagtatgaaaatgcgacccgcgatatcgccgtgctggaagatgccggcgtaccgtatcagctgctggaatccagccgcctggcggaagtggagcccgcgctggcagaagtggcgcacaaactgacgggcggcctgcagttacccaatgatgaaaccggagactgtcagctatttacccagaatctggcgcggatggcggagcagccgggggttaaattccgcaataatacgcccgtgaccaatcatacgactttgagctcggtaccccatgctacgccaggcatcggcattgccaacggcaatagcgatgcgatcggctatgtgttgtag

SEQ ID NO: 23999 - DNA, 460 bp, Homo sapiens
  SIMILAR (3)..(203): 1001254mologous to Homo sapiens HT002 protein; hypertension- related calcium-regulated gene,accession number BC002672,Smith- Waterman Score=332.
aagacctggtcggggacttggccagcgtggtatttgggagccagcggcccctccttgattctgtggcccagcagcagggggcctggctgccgcatgttgctgactttcggtggcgggtggatgtagcaatctccaccagtgccctggctcgctccctgcagccgagcgtcctgatgcagctgaagctttcagatgggtcagcagatctggagaagaggtgtgagcgcagactgcaggactgacccctcacttgaccagtcccattcagatccggcttggacaggcacctgagatggtgccaaagtgcagctgactcttcccacgacagccctgcccttcccatgaggcaggctcttcagtgagtgtttgaacgtaattatgtagttttctgtttaattgaaaaagagagctatgcctttttttctttttggaagtaaagcagctaaaaacatgtttctat

SEQ ID NO: 24000 - DNA, 2958 bp, Homo sapiens
  SIMILAR (1)..(888): 1001254mologous to Cloning vector pZC320 SopA,accession number U26464,Smith-Waterman Score=1548.
atgaaactcatggaaacacttaaccagtgcataaacgctggtcatgaaatgacgaaggctatcgccattgcacagtttaatgatgacagcccggaagcgaggaaaataacccggcgctggagaataggtgaagcagcggatttagttggggtttcttctcaggctatcagagatgccgagaaagcagggcgactaccgcacccggatatggaaattcgaggacgggttgagcaacgtgttggttatacaattgaacaaattaatcatatgcgtgatgtgtttggtacgcgattgcgacgtgctgaagacgtatttccaccggtgatcggggttgctgcccataaaggtggcgtttacaaaacctcagtttctgttcatcttgctcaggatctggctctgaaggggctacgtgttttgctcgtggaaggtaacgacccccagggaacagcctcaatgtatcacggatgggtaccagatcttcatattcatgcagaagacactctcctgcctttctatcttggggaaaaggacgatgtcacttatgcaataaagcccacttgctggccggggcttgacattattccttcctgtctggctctgcaccgtattgaaactgagttaatgggcaaatttgatgaaggtaaactgcccaccgatccacacctgatgctccgactggccattgaaactgttgctcatgactatgatgtcatagttattgacagcgcgcctaacctgggtatcggcacgattaatgtcgtatgtgctgctgatgtgctgattgttcccacgcctgctgagttgtttgactacacctccgcactgcagtttttcgatatgcttcgtgatctgctcaagaacgttgatcttaaagggttcgagcctgatagtgacctaaggtacctgcagtcctgcgagtggggagacactggaatttttctgaagtggtcctgcattcctgccgagaaggggctgcagacctctggggcctgggtagaggcagcagatatacccctgctccctggctccccacgccggctgagccctcaggcagggtccagagggggccagggccccaaacatggacagcagtgtctcaagatgccaggtccccgggccccaggtctgcagggcggttccaacagagatcctggccagccctgcggtggagagagcacccgcagcagctctgtcatcaacaactatctggatgccaatgagcctgtgtccttggaggcccgtcttagccgcatgcacttccatgacagtcagaggaaggtcgactatgtacttgcctaccactaccggaaacgcggggtgcacctggcccaaggcttccctggccactcgctggctatcgtctccaatggggagacaggcaaggagcctcatgctgggggcccaggtgacattgagctgggaccgctcgatgccctggaggaggagaggaaggagcagcgggaggaatttgagcacaatctgatggaggctggactggagcttgagaaggacttggaggtctggcagagcctggatgtctggcatctcaacctgaattgcagcactgagtcaaagggggatatcttggatgctggggtccagcaggagtggacacgggaacccccaaaggcttcagagtggaagccccagggtcctcggagctggtgtgggtttgctgctggctccctgcacacgctgcccgtgcgtggttacgagtttgtgtataaggatggggaaaagggaaaggaagcagaagcagggtcagagctaaggagccacgtgaagctgattccacataaacaattttttcttcaaatcatcaataatcagcagatgaagccgcaggcaggagtgaagctgcagaccttcgcggtgagtgttacagctcttaaggcggcgcgtctggagttgttctttcctcccggtgggttcgtggtctcactggcttcaggagtgaagctgcagaccttcgcggtgagcgttacagctcataaaaacagtgtggacccaaagagaggtattaacttcctactgatcatagagcttcgctcaatgaagcaccccgtccaagaccctttaccacctcctggtggcctggaggactcattgccagaatgcataattagcatagacatacttagcagctggcagaacccccacatcggctccctgactggtaggggttatatcaactctccagctttgtgtcataatcttatttggagagaccttgatcgtttttcgcttccacaagatatcacactggtccattacattgatgacattatgctgactggatccagtgagcaagaagtagcaaacacaccagacttatggagacagctcttggcctgttacaggactttgatggaaactgaacgtttgactatgggtcataaagtcaccatggcacctgaactgcctataatgaactgggtgccttctgacccatctaaccataaagtgggtcatgaacagcagcattccatcatcaaacccaggattcacgggtccaagaatcaaggcactgaagtggaagtggcaccactcaccatcgcccctagtgatccactagcaaaatttttgcttcctgttcccacagcattacgttctgctggcctagagatcttagtttcagagggaggaatgctgccaccaggagacacaacaacaattccattaaactggaagttaagattgccacctggacactttgggctcctcctacctttaagtcaacaggctaaggagggaattacagtgttggctggggtgattgacccagaccatcaagatgaaatcagtctactactccacaacagaggaagaaaaccacgacctgctgaggtgcttcctgaaggcaaagggaatacagaatgtttagtgaagaaggtagtcatcaacaccagctacgaccacatgaccagctgcagaaacgaggactgccaattgtcatga

SEQ ID NO: 24001 - DNA, 2021 bp, Homo sapiens
  SIMILAR (805)..(1473): 541254mologous to Homo sapiens hypothalamus protein HT002,accession number AF113540,Smith-Waterman Score=427.
  misc_feature (1)...(2021): n = a,t,c or g
ggcaatttgaatacctttaattattccctggctcttcttagcccccttcctgttcaggacccagggcctgtggagtgactactcagatcctgtgccccagaaaccgtgagatgtctcaattcccatgcaggcaaaggaggggagcttcacactcagcagacctcatagctgttacaccaatggcttctgctgtggctatcccatgtccggtgtgaggagacagtggtatgactcatcccttnnnnnnnnnnnnnnnnnnnnnnnnnnnnnnnnnnnnnnnnnnnnnnnnnnnnnnnnnnnnnnnnnnacagccagctctaatggcttccatttggcgtttccaaccataatagcctttaccagtcaaggagccaatgtgggggttctgccagctgctaagtatgtctatgccaattatgcatcctggcactgggaaaatgaccacaggataagtctggggacccactggacccgctgtgggttacaaacatacaccctggtgtttcaatctccaaacgttgacattttgcctaacaaccaaaccattgaggctctccctatttcctcctcctccgagcacgctaagccagctctacatctccttcttctgttttctcaagctgcttctggcccatttgtgttggtctgggtcctccaagaagaagacaccaagattaaggatacaaacgtcgtgttcagagaaatgtctggggtagaaaatagtgaggcatctgcatctgggaccgacctcctgggctggctgatcaaagaagaagccacagccatggctggtggggggaactggccactcccttaccttggcatcatccttgggngatagtcacagtgggccgagtgagtttcttgggggcccagcttcctccagaggtggcagcaatggcccggctactaggggacctagacaggagcacgttcagaaagttgcttgaagtttgtggtcagcagcctgcagggggaggattgccgagaggctgctgcagccgtcttggggtcagcgccaacctgccggaggagcagctgggtgccctgctggcaggcatgcacacactgctccagcaggccctccgtctgccccccaccagcctgaagcctgacaccttcagggacccagctccaggagctctgcatcccccaagacctggtcggggactttggccagcgtggtatttgggaagccaagcggcccctcctttgattctgtggcccagcaagccagggtggcctggctgccgcatgttgcttgactttcggttggcgggtggatgtaacaatctccacccagtgcccttggctcgctccctgcaagccgagcgtcctgatgccagctgaaagcttttcagaatgggtcaagcatacccgcctttgaggtccccccacagcccaagttcccaggagctggcggtacagcgtggcccctggtccctaaaggagatggcagatctggaaaaaaagttgtgagccgcaacttgcaggactgaccccctcacttgacccagtcccattcagatccggcttggacaggcacctgagatggtgcccaaagtgcgagctgactcttcccgacgacagccctgcccttcccatgaggcaggttcttcaagtgagtgtttgaacgtaattatgtagttttctgtttaattgaaaaagagagctatgccttttttttctttttggaagtaaagcaagctaaaaacatgtttctataggtgagtgttggacctcacaccctccccttccctgtacatttgtctttggtgctggacgtggccatgtgaggccaggttgaggccctttgtagacaacatacagttgctcagcctggccccatgtagccaggtgcttttgtagatcttgtgttttaggttgggcattttcactcttctgccttaaatccctgaccccatggagctgacattctagtgcggctgaggggaggggaaacattgtaaaataaatcataaaaattaactggaatagctcatcaaaaaaaaaaaaaaaaa

SEQ ID NO: 24002 - DNA, 315 bp, Homo sapiens
  SIMILAR (142)..(312): 1001254mologous to Homo sapiens clathrin-associated protein AP17,accession number AJ010148,Smith-Waterman Score=289.
atgatccgctttatcctcatccagaaccgggcaggcaagacgcgcctggccaagtggtacatgcagtttgatgatgatgagaaacagaagctgatcgaggaggtgcatgccgtggtcaccgtccgagacgccaaacacaccaactttgtggaggtcttaaacgaatatttccacaatgtctgtgaactggacctggtgttcaacttctacaaggtttacacggtcgtggacgagatgttcctggctggcgaaatccgagagaccagccagacgaaggtgctgaaacagctgctgatgctacagtccctggagtga

SEQ ID NO: 24003 - DNA, 524 bp, Homo sapiens
  SIMILAR (80)..(523): 901254mologous to Rattus norvegicus clathrin-associated protein 17,accession number M37194,Smith-Waterman Score=669.
agccctacaactgcaccctgagccggagctgcccattcgccgcggtaccggggccgctggggtctggacgggggtcgccatgatccgctttatcctcatccagaaccgggcaggcaagacgcgcctggccaagtggtacatgcagtttgatgatgatgagaaacagaagctgatcgaggaggtgcatgccgtggtcaccgtccgagacgccaaacacaccaactttgtggaggtcctggcaagctccgttgctgacagcctctctgttctgcagttccggaactttaagatcatttaccgccgctatgctggcctctacttctgcatctgtgtggatgtcaatgacaacaacctggcttacctggaggccattcacaacttcgtggaggtcttaaacgaatatttccacaatgtctgtgaactggacctggtgttcaacttctacaaggtttacacggtcgtggacgagatgttcctggctggcgaaatccgagagaccagccagacgaaggtgctgaaacagc

SEQ ID NO: 24004 - DNA, 996 bp, Homo sapiens
  SIMILAR (303)..(518): 471254mologous to Drosophila melanogaster adaptor protein complex AP-2 small chain sigma2,accession number AF228055,Smith- Waterman Score=108.
gctggctctgactcttcacccatcttcacccaggctggcccctttggtgaaactacaactcccaggggtctgtgcgcgagaaggcaggcgggtttttctaccggaagtccgctctagctctgggccctacaactgcaccctgagccggtagctgcccattcgccgcgggaccggggccgctggggtctggacggtgttttgttttgatccgctttatcctcatttcagaaccgggcaggcaagacgcgcctggccaagtggttacatgcagtttgatgatgatgagaaacagaagctgattcgaggaggtgcatgccgtggtcaccgtccgagacgccaaacacaccaactttgtgggagtttccggaacttttaagatcattttaccgccgttatgctggcctctacttctggcatctgtgtggatgttcaatgacaacaaacctgggctttacctgggagggccatttcacaactttcgtgggaggtcttaaacgaatattttccacaatgtctgtggaactgggacctgggtgtttcaactttctacaaaggttttacacggttcgtgggaacgaggatgtttcctgggctgggcgaaaatccgaagagacccagcccagacgaaaggtgcttgaaacagctgcttgatgcttacaagtccctgggagtttaggggcaggcgagcaccccaccgccggccccgggcccctccgtgggacttcgcctgctcgccttccccttccccagcccgtggccaacccagcagtcctttccctcagctgccctaggaggaagggaccccagctgggtcttggggccacaagggaggagactgcaccccacttgcctcttgggccctgggctgttggggcagaggccccccgtgtgtgtcccgagtaaactgttgccgttgttcgtgttgatgccataagcgtctgtgcgtggagtccccaataaacctgtggtaactgcctggcaaaaaaaaaaaaaaaa

SEQ ID NO: 24005 - DNA, 428 bp, Homo sapiens
  SIMILAR (1)..(426): 1001254mologous to Homo sapiens Human ZC3 protein,accession number Y55933,Smith-Waterman Score=755.
  misc_feature (1)...(428): n = a,t,c or g
gccaagcccgacgaccaccgctcacggccaggccggcccgcagactttgtgttgctgaaagagcggactctggacgaggcccctcggcctcccaagaaggccatggactactcgtcgtccagcgaggaggtggaaagcagtgaggacgacgaggaggaaggcgaaggcgggccagcagaggggagcagagatacccctgggggccgcgatggggatacagacagcgtcagcaccatggtggtccacgacgtcgaggagatcaccgggacccagcccccatacggnggcggcaccatggtggtccagcgcacccctgaagaggagcggaacctgctgcatgctgacagcaatgggtacacaaacctgcctgacgtggtccagcccagccactcacccaccgagaacagcaaaggccaaagcccaccctc

SEQ ID NO: 24006 - DNA, 422 bp, Homo sapiens
  SIMILAR (114)..(422): 931254mologous to Homo sapiens Misshapen/NIK-related kinase MINK-1,accession number AB035698,Smith-Waterman Score=497.
  misc_feature (1)...(422): n = a,t,c or g
gcctgctttgaggaagaggccacctccccagggtgggtactggagcggaaccgcnnnnnnnnnncctccaaaccggacagctcccctgtgctgtcccctgggaataaagccaagcccgacgaccaccgctcacggccagcagaggggatacagacagcgtcagcaccatggtggtccacgacgtcgaggagatcaccgggacccagcccccatacgggggcggcaccatggtggtccagcgcacccctgaagaggagcggaacctgctgcatgctgacagcaatgggtacacaaacctgcctgacgtggtccagcccagccactcacccaccgagaacagcaaaggccaaagcccaccctcgaaggatgggagtggtgactaccagtctcgtgggctggtaaaggcccctggcaagagctcg

SEQ ID NO: 24007 - DNA, 387 bp, Homo sapiens
  SIMILAR (105)..(386): 951254mologous to Homo sapiens Misshapen/NIK-related kinase MINK-1,accession number AB035698,Smith-Waterman Score=482.
  misc_feature (1)...(387): n = a,t,c or g
ggatgaacaagcagcagaactctcccttggccaagagcaagccaggcagcacggggcctgagccccccatcccccaggcctccccagggcccccaggcctcccctgggcccccaaaccctaccacaaattcatggccttcaagtcctttgccgacctcccccaccgctctctgctggtcgacctgacagtagaggaggggcagcggctcaaggtcatctatggctccagtgctggcttccatgctgtggatgtcgactcggggaacagctatgacatctacatgcctgtgcacatccagagccagatcacgncccatgccatcatcttcctccccaacaacgacggcatggagatgctgctgtgctacgaggacgagggtgtctacg

SEQ ID NO: 24008 - DNA, 337 bp, Homo sapiens
  SIMILAR (9)..(335): 841254mologous to Homo sapiens Misshapen/NIK-related kinase MINK-1,accession number AB035698,Smith-Waterman Score=478.
gcacgaggctgatgttgctggaccgaagtgggcagggcaaggtgtatggactggttgggcggtgacgctttcagcagatggatgtgctggaggggctcaatctgctcatcaccatctaacggaataggaacaaactgcgggtgtattacctgacctggctccggatcaagattatggacaatgacccaaaactggagaagaaacacgactggaccaccgcggggtacatggagggctgcggacactaccgtgttgggaaatacgagcggattaagttcctggtcatcgccctcaagagctccgcggaggtgtatgcctgggcccccaaaccctatcg

SEQ ID NO: 24009 - DNA, 570 bp, Homo sapiens
  SIMILAR (218)..(337): 951254mologous to Homo sapiens Misshapen/NIK-related kinase MINK-1,accession number AB035698,Smith-Waterman Score=197.
gagagaacaaggatgaacaagcagcataactctaccttggccaagagcaggccaggcaacacggggcctgagcccctcatgccccaggcctccccagggcccccaggacccctttcccagactcctcctatgcataggccggtggagccccaggagggaccgcacaagagcctggtggcacaccgggtcccactgaagccatatgcagcacctgtaccccgatccacagtccctgcaggaccagcccacccgaaacctggctgccttcccagcctcccatgaccccgaccctgccatccccgcacccactgccacgcccagtgcccgaggagctgtataagaaagctcatgctgctatacgagagaatccagtctatgaaaagaagcccaagaaagaagttaaaaagaagaggtggaaccgtcccaaaatgtcccttgctcagaagaaggatcgggtagctcaaaagaaggcaagcttcctcagagctcaggagcgggctgctgagagctaaacccagcaattttctatgattttttcagatatagataataaacttatgaacagcaact

SEQ ID NO: 24010 - DNA, 921 bp, Homo sapiens
  SIMILAR (169)..(330): 881254mologous to Homo sapiens acetylcholine receptor epsilon subunit CHRNE,accession number X66403,Smith-Waterman Score=243.
tttttttttttttttttgagacttagacacagtatttcgttcccaggcacagcataattggtttaggagatctgatactgatagtacactgcctcagaggcctgtgaggacccaggggaggcagaggggagagaggtgctccagcctcttcattgccaatgacccttccttcttgaccccatcgcaggcaggggtgtggggaagaacgaggaactgcgtctttatcaccatctcttcaacaactatgacccaggaagccggccagtgcgggacgctgaggatactgtcaccatcagcctcaaggtcaccctgacgaatctcatctcactggtaagctacccccaccctcatcttaagccaaaaatcccacttctggccccaaccgctgagctctgtcctaaagctcacttctggccctgaaatctcacttcaatcatccccatctcccatctgcagaatgaaaaagaggagactctcaccactagcgtctggattggaatcgtgagtcaaatctggggaatggtgtgaggtcttgtccagggcaccccttttcccccaaacccctcccaggcagcgccaggtgggagatgcagggcacgcggccttccatcccccaccccttaggattggcaggattaccgactcaactacagcaaggacgactttgggggtatagaaaccctgcgagtcccttcagaactcgtgtggctgccagagattgtgctggaaaacaagtgagaaccgggccagacgccaggctggagggaagccggcctggggtgcgggctggacttggttggggaagggggtactctgagagggtgcagacctgtgcaaaaagctcggtttccccgagcccacagtattgatggccagttcggagtggcttacgacgccaacgtgctcgtctacgagacgaaa

SEQ ID NO: 24011 - DNA, 7132 bp, Homo sapiens
  SIMILAR (263)..(2554): 911254mologous to Homo sapiens Human ZC3 protein,accession number Y55933,Smith-Waterman Score=3613.
  misc_feature (1)...(7132): n = a,t,c or g
atacgatcttcgactccctccccctccccggtctccgggggaggcgcggtttagtttgcccccggcgttctccgatgggggagaagcggtgacggcggcagtggagtaaccgagccagagcgtgagcggccccggtgccccgttccccacggaggccatgggcgacccagcccccgcccgcagcctggacgacatcgacctgtccgccctgcgggaccctgctgggatctttgagcttgtggaggtggtcggcaatggaacctacggacaggtgtacaagggtcggcatgtcaagacggggcagctggctgccatcaaggtcatggatgtcacggaggacgaggaggaagagatcaaacaggagatcaacatgctgaaaaagtactctcaccaccgcaacatcgccacctactacggagccttcatcaagaagagccccccgggaaacgatgaccagctctggctggtgatggagttctgtggtgctggttcagtgactgacctggtaaagaacacaaaaggcaacgccctgaaggaggactgtatcgcctatatctgcagggagatcctcaggggtctggcccatctccatgcccacaaggtgatccatcgagacatcaaggggcagaatgtgctgctgacagagaatgctgaggtcaagctagtggattttggggtgagtgctcagctggaccgcaccgtgggcagacggaacactttcattgggactccctactggatggctccagaggtcatcgcctgtgatgagaaccctgatgccacctatgattacaggagtgatatttggtctctaggaatcacagccatcgagatggcagagggagccccccctctgtgtgacatgcaccccatgcgagccctcttcctcattcctcggaaccctccgcccaggctcaagtccaagaagtggtctaagaagttcattgacttcattgacacatgtctcatcaagacttacctgagccgcccacccacggagcagctactgaagtttcccttcatccgggaccagcccacggagcggcaggtccgcatccagcttaaggaccacattgaccgatcccggaagaagcggggtgagaaagaggagacagaatatgagtacagcggcagcgaggaggaagatgacagccatggagaggaaggagagccaagctccatcatgaacgtgcctggagagtcgactctacgccgggagtttctccggctccagcaggaaaataagagcaactcagaggctttaaaacagcagcagcagctgcagcagcagcagcagcgagaccccgaggcacacatcaaacacctgctgcaccagcggcagcggcgcatagaggagcagaaggaggagcggcgccgcgtggaggagcaacagcggcgggagcgggagcagcggaagctgcaggagaaggagcagcagcggcggctggaggacatgcaggctctgcggcgggaggaggagcggcggcaggcggagcgcgagcaggaatatattcgtcacaggctagaggaggagcagcgacagctcgagatccttcagcaacagctgctccaggaacaggccctgctgctggaatacaagcggaagcagctggaggagcagcggcagtcagaacgtctccagaggcagctgcagcaggagcatgcctacctcaagtccctgcagcagcagcaacagcagcagcagcttcagaaacagcagcagcagcagctcctgcctggggacaggaagcccctgtaccattatggtcggggcatgaatcccgctgacaaaccagcctgggcccgagaggtagaagagagaacaaggatgaacaagcagcagaactctcccttggccaagagcaagccaggcagcacggggcctgagccccccatcccccaggcctccccagggcccccaggacccctttcccagactcctcctatgcagaggccggtggagccccaggagggaccgcacaagagcctggtggcacaccgggtcccactgaagccatatgcagcacctgtaccccgatcccagtccctgcaggaccagcccacccgaaacctggctgccttcccagcctcccatgaccccgaccctgccatccccgcacccactgccacgcccagtgcccgaggagctgtcatccgccagaattcagaccccacctctgaaggacctggccccagcccgaatcccccagcctgggtccgcccagataacgaggccccacccaaggtgcctcagaggacctcatctatcgccactgcccttaacaccagtggggccggagggtcccggccagcccaggcagtccgtgccagtaaccccgacctcaggaggagcgaccctggctgggaacgctcggacagcgtccttccagcctctcacgggcacctcccccaggctggctcactggagcggaaccgcgtgggagtctcctccaaaccggacagctcccctgtgctctcccctgggaataaagccaagcccgacgaccaccgctcacggccaggccggcccgcaagctataagcgagcaattggtgaggactttgtgttgctgaaagagcggactctggacgaggcccctcggcctcccaagaaggccatggactactcgtcgtccagcgaggaggtggaaagcagtgaggacgacgaggaggaaggcgaaggcgggccagcagaggggagcagagatacccctgggggccgcagcgatggggatacagacagcgtcagcaccatggtggtccacgacgtcgaggagatcaccgggacccagcccccatacgggggcggcaccatggtggtccagcgcacccctgaagaggagcggaacctgctgcatgctgacagcaatgggtacacaaacctgcctgacgtggtccagcccagccactcacccaccgagaacagcaaaggccaaagcccaccctcgaaggatgggagtggtgactaccagtctcgtgggctggtaaaggcccctggcaagagctcgttcacgatgtttgtggatctagggatctaccagcctggaggcagtggggacagcatccccatcacagccctagtgggtggagagggcactcggctcgaccagctgcagtacgacgtgaggaagggttctgtggtcaacgtgaatcccaccaacacccgggcccacagtgagacccctgagatccggaagtacaagaagcgattcaactccgagatcctctgtgcagccctttggggggtcaacctgctggtgggcacggaggaacgggctgatgttgctggaccgaagtgggcagggcaaggtgtatggactcattgggcggcgacgcttccagcagatggatgtgctggaggggctcaacctgctcatcaccatctcagggaaaaggaacaaactgcgggtgtattacctgtcctggctccggaacaagattctgcacaatgacccagaagtggagaagaagcagggctggaccaccgtgggggacatggagggctgcgggcactaccgtgttgtgaaatacgagcggattaagttcctggtcatcgccctcaagagctccgtggaggtgtatgcctgggcccccaaaccctaccacaaattcatgggccttcaagtcctttgccgacctcccccaccgccctctgctgggtcgacctgacagtagaggaggggcagcggctcaaggtcatctatggctccagtgctggcttccatgctgtggatgtcgactcggggaacagctatgacatctacatccctgtgcacatccagagccagattacgcccccatgccatcatcttcctccccaacaccgacgggcatggagatgctgctgtgctacggaggacgaaggttgtctacgtcaacacgtacgggcgcatcattaagggatgtggtgctgcagtggggggagatgcctacttctgtggcctacatctgctccaaccagattaatgggctggggtgagaaagccattgagatccgctctgtggagacgggccacctcgacggggtcttcatgcacaaacgagctcagaggctcaagttcctgtgtgagcggaatgacaaggtgttttttgcctcagtccgctctgggggcagcagcctaagtttacttcatgactctgaaccgtaactgcatcatgaactggtgacggggccctgggctggggctgtcccacactgggacccagctctccccctgcagccagggnttcccgggccgccccttctttcccctccctgggcttttgcttttactggtatgatttcactggagcctgctgggaacgtgacctctgacccctgatgctttcgtgatcacgtgaccatcctctttccccaacatgttcctcttcccaaaactgtgcctgtccccagcttctggggaggggacacagcttccccttcccaggaattgagtgggcctagcccctccccccttttctccatttgagaggagagtgcttggggcttgaaccccttaccccactgctgctgactgggcagggccttgagacccctttatttgcacgtcaggggagccggctcccaccgttgaatgtattttaccctggtgtgggggtcactgggcccctaaaatttttggggggtcacccagccactcccaggggcagggaccatttccttcattttctgaaagcactttaatgattcccccttcccccaaactcccagggaatggaggggggaccccgccagccaaaaacattccccccattcccgacccccatctcctcttctagcccatggcccttccccggtggagggagggaggcagggagccctcactctccacgccccttgcttggcatctgtatatagtgtgagcggcaagtaacccttttcctccctcccccctcccccctcctcaatgttagtggccttggatatcctgtttgttaataaagacaattcaaccagctcccaccatgcaggccgcatgtccttgctttctgtcagtactgtagactaggcagagagagcctccagggtggggaagaaaggggcagggtgggcctggatctgcaatgagtgagcctcatggggtgggatgggcagtgctgggccaagaaaacctagaagaaatgactgtggaagggtcagggcagcctcagccttaaacctgtgggcctgagggccaccagcactgaaggtgtttggttcccacccgctccagcagagccagaccagggaagaagagggtttcctggctacagcctccctgtgtgcaagtcctgcaaaggggtctcctgtttggctatgaaatgaatatagatagatagctcacaagctggcagccaccagagtcccgtggggctgagccttagaaaggctgggaggtcagcaaggctgaatgaagggcagtccttgctttctggaagactggcacctgagagcctatgtgaaccctttcctcctgctgacccctggactgcggccaggcctacacacgccagggaacgggcacacaccattcttgtgaagttcacaaactgcagattgatcagcagggggaagggatcataatgccgtggtggcggcagcctactttttcaaaatcaatttcctactggagatgggtgggaaattgaagtcggtgcgagctaaggctggatacacggcgcgtaggggagatcaggcactcggttgaagtaggccccgaggaagatgaggctggagcccacgctgaagagcaccagagcggcccagaagcagatgttgtcaagggcattccccatgcgcacccagtcggacacttcctcgccggtggcctcctgatctctcgtgctctcggccacgaagttcacggcatccacacagcagcggacctcgggggcggcggcgcccaggctctggcagaaggcagccgtccaggtcccctgccggtgcctctgcccctcaaacacgagctcgctccgtggctttttcagtatcagctcctccgcgcggagcaataagcccaccgacgacgcccgccttgggggcgaggcggcccggggggcctcgggcggcggcggggagcccaggaggcgcggcagcagctccaggagaacgtggcgcagccgcggggacatggcgtgggtggtgggcgtccgctgggacacgttgagcacgatgacgcaattcatgacaatgagcgtggcgaccaccatgacgaaaataaggaacctgcccaggagcggcacgctcagagaagtctctgggattttctgggcaatgaggaacaagaagacggtctgggcgagcaggacgttgatggagaccgtgcatttctggccgccggcctgcgccggcaggaagtaggcgagcagcaccaggcccgagatgagcacacagggcacgatgatgttaatgacgtagaagagcggcttccggcggatgatgagcgagtagatgacgtcagtctcccctgggccgtcggtggcgccaccgtggtggcggcggatcacccccgggcagaagtcgatggcccactcgccgttctcagtataggcctctgtgtcgatgtcgatcttgttgatggtcttgccgtcgttgtctacggcaaaagtgaactccacctcttcggcattgtacgtctgagagcggaaaataagcgaacagttctgccaatcgaaggggaagtaggtgacctccactgcgcagacgctgcggtagatggccggaggcagccacgtcacggagccgccctcgtagacgagcacgttggcgtcgtaggccactccgaactggccatcaatattgttttccagcacaatctctggcagccacacgagttctgaagggactcgcagggtttctatacccccaaagtcgtccttgctgtagttgagtcggtaatcctgccaatcgattccaatccagacgctagtggtgagagtctcctctttttcattcagtgagatgagattcgtcagggtgaccttgaggctgatggtgacagtatcctcaggctcccgcactggccggcttcctgggtcatagttgttgaagagatggtgataaagacgcagttcctcgttcttccccacacccctgccgagaagccccaagaggagcaggaccccaagcggagcccttgccatcctgctgcgtg

SEQ ID NO: 24012 - DNA, 1857 bp, Homo sapiens
  SIMILAR (217)..(1077): 961254mologous to Homo sapiens dJ41P2.1 (novel protein similar to APOL (apolipoprotein L) and TNF-inducible protein CG12- 1),accession number AL049748,Smith-Waterman Score=1391.
atgccatgtggcaaacaaggaaatttgcaagttcccggttccaaggtgttacctgcctcactcgtgaacctgtgccagagttggaaaattaacaatttgatgtcaactgtccacagtgatgaggctggtatgctgtcctactttctgtttgaagagctgatgcgatgtgacaaagattccatgccagatggaaatctgtcagaggaggaaaaattgtttctctcatattttcctttgcacaagtttgagctagaacagaacatcaaagaacttaacacccttgcggaccaagttgacaccactcacgagttgcttaccaagaccagcctggtggccagctcttccggggctgtttctggggtcatgaacatcctgggtttggccctagcacctgtgacagcaggaggcagtctcatgctctcagcaactgggacagggttgggggcagcagctgccatcaccaacatagtaacaaatgtcttagaaaatagaagcaattcagcagcaagagacaaagccagccgactggggcctctgacaacatcacatgaggctttcggaggaataaattggtctgaaatcgaggctgctggcttttgtgttaataagtgtgtaaaagctatccagggcatcaaggatcttcatgcctaccagatggccaaatccaactctggcttcatggctatggtcaagaattttgtggccaagagacacatccctttctggacggctagaggggtgcagagagcctttgagggcacaactctggccatgaccaatggtgcctgggtgatgggtgctgctggggctggcttcttacttatgaaagacatgagcagcttcctgcagagctggaagcacctggaggatggggcaaggacggagacagcagaggaactgagagcacttgctaagaagctggagcaggagctggaccggctcacccagcaccaccggcacctgccgcagaaggcgagccagacctgttccagctcccggggcagggctgttcgaggatcccgtgtggttaaaccagaagaccagttctctctgcactactcatcggcttacccgtggatccaggctcagaaaacattccacctgtgtgaaactgtgcaagacccacggatccaggctcagaaaacttgccacctgtgtgaaactgtgcaagacccgtggatccaggctcagaaaacattccacctgtgtgaaactgtgcaagacccacggatccaggctcagaaaacttgccacctgtgtgaaactgtgcaagacccgtggatccaggctcagaaaacattccacctgtgtgaaactgtgcaagacccacggatccaggctcagaaagcattccacctgtgtgaaactgtgcgagacccacggatccaggctcagaaagcattccacctgtctgaaactgtgcgagacccacggatccaggctcagaaagcattccacctgtctgaaactgtgcgagacccgcggatccaggctcagaaagcattccacctgtgtgaaactgtgcgagacccgcggatccaggctcagaaagcattccaccttacagaaagacagacaccaaataaactaccaggggagcacattgtacagggccttgtagaccaaaataaggacttggaactggctacgggatgggaagccaaagaagtttgcacaaaagcacgtcacaatccgattgaacaggctgtcgagagaacaaacttcggcgatggagagctgtcggagaaaagtgttaatgtgtacaaagtggtccgggtgctcagcggggtgtttttggaggacagtgagaagctcagcgggatagccacaggctcaagactgtggatagagaagtga

SEQ ID NO: 24013 - DNA, 1511 bp, Homo sapiens
  SIMILAR (996)..(1130): 971254mologous to Homo sapiens dJ41P2.1 (novel protein similar to APOL (apolipoprotein L) and TNF-inducible protein CG12- 1),accession number AL049748,Smith-Waterman Score=225.
atgccatgtggcaaacaaggaaatttgcaagttcccggttccaaggtgttacctggcttgggagaaggttgtaaagaaatgtggcttcgaaaggtaatctacggaggtgaggtctgggggaagtccccagaacctgagttcccctcactcgtgaacctgtgccagagttggaaaattaacaatttgatgtcaactgtccacagtgatgaggctggtatgctgtcctactttctgtttgaagagctgatgcgatgtgacaaagattccatgccagatggaaatctgtcagaggaggaaaaattgtttctctcatattttcctttgcacaagtttgagctagaacagaacatcaaagaacttaacacccttgcggaccaagttgacaccactcacgagttgcttaccaagaccagcctggtggccagctcttccggggctgtttctggggtcatgaacatcctgggtttggccctagcacctgtgacagcaggaggcagtctcatgctctcagcaactgggacagggttgggggcagcagctgccatcaccaacatagtaacaaatgtcttagaaaatagaagcaattcagcagcaagagacaaagccagccgactggggcctctgacaacatcacatgaggctttcggaggaataaattggtctgaaatcgaggctgctggcttttgtgttaataagtgtgtaaaagctatccagggcatcaaggatcttcatgcctaccagatggccaaatccaactctggcttcatggctatggtcaagaattttgtggccaagagacacatccctttctggacggctagaggggtgcagagagcctttgagggcacaactctggccatgaccaatggtgcctgggtgatgggtgctgctggggctggcttcttacttatgaaagacatgagcagcttcctgcagagctggaagcacctggagggatggggcaaggacggagacagcagaggaactgagagcacttgctaaagaagctggagcaggagctggaccggctcacccagcaccaccggcacctgccgcagaaggcgagccagacctgttccagctcccggggcagggctgttcgaggatcccgtgtggttaaaccagaaggatgcttggccaccagccagccccaccagcaccagcaagaaaggggagacaggccccgggaagacaccgacaatgagaagagaggtggtgagaagtggtcagattttggatctgttctgaagggagagcccacaggatttgttcatggactggacctgtggtgtgagggaaagaagagccaggataacggggggttgtggcctgagcaactggcgggatggagctgttggcacctgaaatggacaggtgggagccggagtgggctcccagtgcccgtgttggatgcagcctgcactggaaccctgtctccagacctgacatcctggcggtaccatcccagctccatcccacttcccaagcagcctctgcagcatggtttttag

SEQ ID NO: 24014 - DNA, 515 bp, Homo sapiens
  SIMILAR (382)..(513): 771254mologous to Homo sapiens A human proliferation and apoptosis related protein,accession number Y84901,Smith-Waterman Score=173.
gggtcggcacccaggctggggccgctccaggccccgtgcagttcctcagctctgcctgggttgccttacagtgagacggagctgcctcctctgactgcgcgggaggcgaagcaaattcggcgggagtatcagccgaaagtagcaagtgggtggatatgctgggagactgggagaaatacaaaagcagcagaaagctcatagatcgagcgtacaagggaatgcccatgaacatccggggcccgatgtggtcagtcctcctgaacactgaggaaatgaagttgaaaaaccccggaaggataccaggtacgctcagccagagcacaaccaacaggacaggccgtgtcaggggcccaggtctccagctggagggaacgtcaagaccaccctggggagctgggggtgaagatcatgaaggagaagggcaagaggtcatctgaacacatccagcagatggacctggacgtaagcgggacattaaggaggcatatattcttcagggatcgatacggaaccaa

SEQ ID NO: 24015 - DNA, 1320 bp, Homo sapiens; identical to SEQ ID NO: 21337
  SIMILAR (478)..(1017): 961254mologous to Homo sapiens oncogene,accession number X63547,Smith-Waterman Score=906.

SEQ ID NO: 24016 - DNA, 8180 bp, Homo sapiens
  SIMILAR (4369)..(6126): 971254mologous to Homo sapiens oncogene,accession number X63546,Smith-Waterman Score=3063.
ctaaaaataccattaagtaatagtattagcttttgtattctgagattcaacagcagcagtcacttccctccactcctatgtgtatcccaggaccaccctgggcggggagggctgaggtcagggaggtctgaagctggtcctgggctccgggggtgacagtgatgaggaactgggtgcacacatgagtggggcagccgggcctggccagagaagcaacacacacgtgcacagacatgtttatccacatacacatgtgcacgcatgtgcacaaacacattgcaggcaggcatgttgacgcctcaggcagcggaggaccctgactctgggccctgctgacccgggcaaggcccattgtgatgcgtgccatgacctcagaatgtcactggtgcttagcacctatccgctctccagactgcgtctgtgttctacggcagttacacacacgcagtggtattcacaagcggttttgtggactcaaaggttttctccctgagaggcataacccaggccagctgattcatcagaatcaggtgagtgtgacctgctctcttccctccaggctgacttggggacagtggctatggtatgggcggtgttggcctctgggcagctacagaggagggtcatccctgagcactcaccgggcgcccgttctacactgcccatgtagacgattttctctttcgtcttcatggtggcttcgtagagtgggtgctgttcccaaatgtacccattcgacaggtgagccgtctggggtcagagaggcagtaactggcctgggaatccagacaagaccctgggttttgctctcagccctgctgtgtgccatgctagacttcaggcctcaaccctgagacctccctgctctagatcccaaatctgcccagatttccgatccaatgggcagagcctggccctggcagagacactgggatggatccactgtgggtggggaggagggaagggtcctcagaacacacctggggcctaagctgggtcttgatggtcactgtgggacccactggacacacacagtcccttgtctgggagtggcatggggagccttctgcccttgggcagttgtggaaagtgaaggagccctggagagctggctgaggggagactatcttcccttgtgttcaaaggggtccaggcactggggctctccccaagtatttcttattctgtctggcctcgctttccttttgccctgagtattctcaggagggacggtccatctagatgtcctccaggagcaaggacccactgttcttcatcagtgacccaggaaaatgaagccccctcctgtggggacagctcagaatggtggagtccacagtccctccctgagagacatggtttccatgagcacagtggctgctttggagacagtaatcattttcatccccaaaaccaaacacactcctgctcaaatggtgttattgctaaagcagcttcactggttagactgaagggccatggtagcccaagtgatgagcggggtagaatggagcagtcaggagagatcttgttccccgtaggaaactgggcatctctgtggccctgaacatcccaggaggccgatcgtacagagacctctggtgcctgaccgcagttcacatccacatccctggaatagaccatcacaggctcttcacccttggcaggtggacaccattcaacctgccggggcaggatggacatggtagagaatgcagatagtttgcaggcacaggagcggaaggacatacttatgaagtatgacaagggacaccgagctgggctgccagaggacaaggggcctgagcccgttggaatcaacagcagcattgatcgttttggcattttgcatgagacggagctgcctcctgtgactgcacgggaggcgaagaaaattcggcgggagatgacacgaacgagcaagtggatggaaatgctgggagaatgggagacatataagcacagtagcaaactcatagatcgagtgtacaagggaattcccatgaacatccggggcccggtgtggtcagtcctcctgaacattcaggaaatcaagttgaaaaaccccggaagataccagatcatgaaggagaggggcaagaggtcatctgaacacatccaccacatcgacctggacgtgaggacgactctccggaaccatgtcttctttagggatcgatatggagccaagcagagggaactattctacatcctcctggcctattcggagtataacccggaggtgggctactgcagggacctgagccacatcaccgccttgttcctcctttatctgcctgaggaggacgcattctgggcactggtgcagctgctggccagtgagaggcactccctgccaggattccacagcccaaatggtgggacagtccaggggctccaagaccaacaggagcatgtggtacccaagtcacaacccaagaccatgtggcatcaggacaaggaaggtctatgcgggcagtgtgcctcgttaggctgccttctccggaacctgattgacgggatctctctcgggctcaccctgcgcctgtgggacgtgtatttggtggaaggagaacaggtgttgatgccaataaccagcattgctcttaaggttcagcagaagcgcctcatgaagacatccaggtgtggcctgtgggcacgtctgcggaaccaattcttcgatacctgggccatgaacgatgacaccgtgctcaagcatcttagggcctctacgaagaaactaacaaggaagcaaggggacctgccacccccaggcccaacagccctgggacgaaggtgtgtggcaggaagcccccagccagtctgaaccctgggggcagtcccaggagccacccaccatgccccaacggcttccccatgccaggcagcacacacccctccctctgggatcagcagactacaggcgtgtcgtcagtgtcagaccacaggggccacacagagaccccaaggactccagagatgcagccaaacgcgagcaagggtccttggcacccaggcctgtgccggcttcacgtggtgggaagaccctctgcaaggggtataggcaggcccctccaggcccaccagcccagttccagcggcccatttgctcagcttccccgccatgggcatctcgtttttccacgccctgtcctggtggggctgtccgggaagacacgtaccctgtgggcactcagggtgtgcccagcctggccctggctcagggaggacctcagggttcctggagattcctggagtggaagtcaatgccccggctcccaacggacctggatatagggggcccttggttcccccattatgattttgaacggagctgctgggtccgtgccatatcccaggaggaccagctggccacctgctggcaggctgaacactgcggagaggttcacaacaaagatatgagttggcctgaggagatgtcttttacagcaaatagtagtaaaatagatagacaaaaggttcccacagaaaagggagccacaggtctaagcaacctgggaaacacatgcttcatgaactcaagcatccagtgcgttagtaacacacagccactgacacagtattttatctcagggagacatctttatgaactcaacaggacaaatcccattggtatgaaggggcatatggctaaatgctatggtgatttagtgcaggaactctggagtggaactcagaagagtgttgccccattaaagcttcggcggaccatagcaaaatatgctcccaagtttgatgggtttcagcaacaagactcccaagaacttctggcttttctcttggatggtcttcatgaagatctcaaccgagtccatgaaaagccatatgtggaactgaaggacagtgatggccgaccagactgggaagtagctgcagaggcctgggacaaccatctaagaagaaatagatcaattattgtggatttgttccatgggcagctaagatctcaagtcaaatgcaagacatgtgggcatataagtgtccgatttgaccctttcaattttttgtctttgccactaccaatggacagttacatggacttagaaataacagtgattaagttagatggtactacccctgtacgggtatggactaagactgaatatggatgaaaagtacacaggcttaaaaaaacagctgagtgatctctgtggacttaattcagaacaaatccttctagcagaagtacatggttccaacataaagaactttccttaggacaaccaaaaagttcgactctcagtgagtggattcttgtgggcatttgaaattcctgtccctgtgtctccaatttcagcttctagtccaacacagacagatttctcctcttcgccatctacaaatgaaatgttcaccctaactaccaatggggacctaccccgaccaatattcatccccaatggaatgccaaacactgttgtgccatgtggaactgagaagaacttcacaaatggaatggttaatggtcacatgccatctcttcctgacagcccctttacaggttacatcattgcagtccaccgaaaaatgatgaggacagaactgtatttcctgtcatctcagaagaatcgccccagcctctttggaatgccattgattgttccatgtactgtgcatacccggaagaaagacctatatgatgcggtttggattcaagtatcccggttagcgagcccactcccacctcaggaagctagtaatcatgcccaggattgtgacgacagtatgggctatcaatatccattcactctacgagttgtgcagaaagatgggaactcctgtgcttggtgcccatggtatagattttgcagaggcttgtaaattgattgtggagaagacagagctttcattggaaatgcctatattgctgtggattggcaccccacagcccttcaccttcgctatcaaacatcccaggaaagggttgtagataagcatgagagtgtggagcagagtcggcgagcgcaagccgagcccatcaacctggacagctgtctccgtgctttcaccagtgaggaagagctaggggaaagtgagatgtactactgttccaagtgtaagacccactgcttagcaacaaagaagctggatctctggaggcttccacccttcctgattattcaccttaagcgatttcaatttgtaaatgatcagtggataaaatcacagaaaattgtcagatttcttcgggaaagttttgatccgagtgcttttttggtaccacgagacccggccctctgccagcataaaccactcacaccccagggggatgagctctccaagcccaggattctggcaagagaggtgaagaaagtggatgcgcagagttcggctggaaaagaggacatgctcctaagcaaaagcccatcttcactcagcgctaacatcagcagcagcccaaaaggttctccttcttcatcaagaaaaagtggaaccagctgtccctccagcaaaaacagcagccctaatagcagcccacggactttggggaggagcaaagggaggctccggctgccccagattggcagcaaaaataagccgtcaagtagtaagaagaacttggatgccagcaaagagaatggggctgggcagatctgtgagctggctgacgccttgagccgagggcatatgcgggggggcagccaaccagagctggtcactcctcaggaccatgaggtagctttggccaatggattcctttatgagcatgaagcatgtggcaatggctgtggcgatggctacagcaatggtcagcttggaaaccacagtgaagaagacagcactgatgaccaaagagaagacactcatattaagcctatttataatctatatgcaatttcatgccattcaggaattctgagtgggggccattacatcacttatgccaaaaacccaaactgcaagtggtactgttataatgacagcagctgtgaggaacttcaccctgatgaaattgacaccgactctgcctacattcttttctatgagcagcaggggatagactacgcacaatttctgccaaagattgatggcaaaaagatggcagacacaagcagtacggatgaagactctgagtctgattacgaaaagtactctatgttacagtaaagctaccactctggctgctagacagcttggtggcgagggagatgactccttgtagctgatacttggcaaaagtgtcactgaaagacaagctaaatgtagttattttatcctgttagaacaaaaattctaattaaaatagttaacttgaagagtagaaacaattgtattttgaagtctcatacaagctgtctgatagagaactttcaggcagatcccaccattagcctgtaaacaaaaggtgtggcaccagccacctgggaccaaataagaattgaattgtgcttgtccagatatgaacaaatatgtagtgagtatagagtttaccaataatcataacaaatattaaagatttccttggagtcagaggaaaaaacaaacaattataatgttgtctagggacgacatgatacgctacctcctttttcctgaagttttattccattatattgacaagatggagaaagcaagatcatgaaggtgtgcaaatgattcttacggcatggacaaggatttttcaatttattttttaaactgtttccataccctttctttttcttgctttttgtttttgccattgtgtttacgtttgagacacaaccagtcattggtggcaggggcatagagtggtcagtctgaaagggaggctctcttaagagctatgtgccttccaaccagagggagacccagtagaaagaaaaacatcctgggaaatccagctaccagggccctcccagtggaggcatcttacatttaggctacttcaagtatcctcagaaatgtattctgcacccccggccccgcccatgctgagggaaggggagcagttgccaatatttgcaccatcttcacatgcacatgttgcaacaagagcttctgggaaggtaagcggcatcggagctagatcacgtttcacaattagtggttattcttttctgtgtttgttttgcactttaaaaaagagagaacacatgcaaatgaacttgcttgtgtgtatttgatggctctaagggctataaattacaaacaaaacacatcccagacattaggagttcataagtatatttaatgaaattggtggttttaggaagtcaactttagttttgctttgtttgcatgtccactggtttttttattttgatatttgtctttttttaaattttacagtagtcattgaaagttatgtttctttgcttacttcattttttccctctaattatttaagattggaacaaaagtataaatattatttatttgaggtagaatttttttcatgtagtttcttaatatatacttgaaggaaatgtttcaccttatttttggtctttgtttattcatttagaccctgcaagttgattctcattgccagattccattaccctttcttcctcataggtagtaattaccaatgtaactaagcatttgtgttctgatatctgaggccagtaactattaatatctagttctcagagcatttggaaaggttatcttaaatggctacctaaattgaaatccttttcagaaaaaatataattgcaagtaggtaggagtggcctaaattgtctaatgtaataaagtcagacaaaatgcacactttatagtttcaagattttcagtaaataaaatctgtccattcctacctggacatgtcccattaaaaagtggaagattttaaataatttctttacagatgttttatttaaacaggtagcacaatctactaatgttgtgtgatttgtgttatactggttgtaattaatttttttaattcatgaactagcggaaaatttattaaattaactattaactacattcaccttgtaaattactgtataaaacttgttgacaatgcactgactttagaaagatgttaatgtacataaatagagtgtaaataaaatagtgttgatgtactgaaatatgaactgtatcaaaagtattggtaattgtatatggggtgtacctgtttatctgttaactattatccaaacaaattaaatactgtggttgcctctatgtgctgtttttcctcatacaagtaaacacagaaagtc

SEQ ID NO: 24017 - DNA, 7856 bp, Homo sapiens; identical to SEQ ID NO: 21335
  SIMILAR (1697)..(4054): 1001254mologous to Homo sapiens oncogene,accession number X63546,Smith-Waterman Score=4233.

SEQ ID NO: 24018 - DNA, 3904 bp, Homo sapiens
  SIMILAR (3675)..(3722): 871254mologous to Homo sapiens oncogene,accession number X63546,Smith-Waterman Score=78.
tccagctggtggaattccagcagattaacatttgctaacggggcctggtgcggtgacaccttcgtaaggttgctttttgcatgcctgtgctttggggttggtggtgggggcaaggcggtggtaggggcgaggtcagggcagtgagtgaggtcgcccatggtcattctctgccgtgctggggggttgtcatctctcggggcttaacacttgttggggatgggtgaagtccagtcccgagtcacagtgtgtgttgggggaggttgctgatattcatagccctgtatgtttgagtaatgacaacatccatctccaccttcagggtgaggagctgttggcctatctgggtctgtctgtctgtctgtctgtcatccgtacctgtctcttccagggagagaaggcaggccccagggtctttccccaggatggccttgggtgagttcctgctgtcctctctgcccaggaaatgaacgccctttgaggtcaggtggacgaggatgtcagtgtgaagatggacactgtgcctggagtgaacctgagctgcatcctgaatgagatgcgtgaccaggacaagaaactggtggagaagagctacaaggatgccaagggctgtttcttcagcatgggtgagcccagccttatagacccctgcttggaggtgtgttacgggacccaactggcccagctgcaggggctcatcagaagcatggagcagcagctgtgcgagctctgctgcgacgcggagcaccaggaccatgagcaccaggtccttctggacgtgaagacacggctggagcaggagatcgccacctacagccgcttgctagaggttgaggacgctcagcaaggccccattgtgatgcgtgccatgacctcagaatgtcactggtgcttagcacctatccgctctccagactgcgtctgtgttctacggcagttacacacacgcagtggtattcacaagcggttttgtggactcaaaggttttctccctgagaggcataacccaggccagctgattcatcagaatcagagtgggtgctgttcccgaatgtacccattcgacaggaaactgggcatctctgtggccctgaacatcccaggaggccgatcgtacagagacctctggtgcctgaccgcagttcacatccacatccctggaatagaccatcacaggctcttcacccttggcaggatggacatggtagagaatgcagatagtttgcaggcacaggagcggaaggacatacttatgaagtatgacaagggacaccgagctgggctgccagaggacaaggggcctgagcccgttggaatcaacagcagcattgatcgttttggcattttgcatgagacggagctgcctcctgtgactgcacgggaggcgaagctcatagatcgagtgtacaagggaattcccatgaacatccggggcccggtgtggtcagtcctcctgaacattcaggaaatcaagttgaaaaaccccggaagataccagatcatgaaggagaggggcaagaggtcatctgaacacatccaccacatcgacctggacgtgaggacgactctccggaaccatgtcttctttagggatcgatatggagccaagcagagggaactattctacatcctcctggcctattcggagtataacccggaggtgggctactgcagggacctgagccacatcaccgccttgttcctcctttatctgcctgaggaggacgcattctgggcactggtgcagctgctggccagtgagaggcactccctgccagctgcctgggctcctgctgcccttggtgcccacaaatgggctgaccaagcccaggtggcagcatctcaccatcccgtgtcccctggcccgaccccacttccaggagatgaccaggaagctcagcacccaccctgttctggccgctctgttgtggcctcaaagtcaggcttgcccttttgcaccctggcccaggaggcttccaggggaacctccagccaggctccaggggatgttcctgtcccacctccccagggcaaaggccgcatgatctctctcgggctcaccctgcgcctgtgggacgtgtatttggtggaaggagaacaggtgttgatgccaataaccagcattgctcttaaggttcagcagaagcgcctcatgaagacatccaggtgtggcctgtgggcacgtctgcggaaccaattcttcgatacctgggccatgaacgatgacaccgtgctcaagcatcttagggcctctacgaagaaactaacaaggaagcaaggggacctgccacccccagccaaacgcgagcaagggtccttggcacccaggcctgtgccggcttcacgtggtgggaagaccctctgcaaggggtataggcaggcccctccaggcccaccagcccagttccagcggcccatttgctcagcttccccgccatgggcatctcgtttttccacgccctgtcctggtggggctgtccgggaagacacgtaccctgtgggcactcagggtgtgcccagcctggccctggctcagggaggacctcagggttcctggagattcctggagtggaagtcaatgccccggctcccaacggacctggatatagggggcccttggttcccccattatgattttgaatggagctgctgggtccgtgccatatcccaggaggaccagctggccacctgctggcaggctgaacactgcggagaggttcacaacaaagatatgagttggcctgaggagatgtcttttacagcaaatagtagtaaaatagatagacaaaaggttcccacagaaaagggagccacaggtctaagcaacctgggaaacacatgcttcatgaactcaagcatccagtgcgttagtaacacacagccactgacacagtattttatctcagggagacatctttatgaactcaacaggacaaatcccattggtatgaaggggcatatggctaaatgctatggtgatttagtgcaggaactctggagtggaactcagaagagtgttgccccattaaagcttcggcggaccatagcaaaatatgctcccaagtttgatgggtttcagcaacaagactcccaagaacttctggcttttctcttggatggtcttcatgaagatctcaaccgagtccatgaaaagccatatgtggaactgaaggacagtgatggccgaccagactgggaagtagctgcagagctaagatctcaagtcaaatgcaagacatgtgggcatataagtgtccgatttgaccctttcaattttttgtctttgccactaccaatggacagttacatggacttagaaataacagtgattaagttagatggtactacccctgtacggtatggactaagactgaatatggatgaaaagtacacaggtttaaaaaaacagctgagggatctctgtggacttaattcagaacaaatcctactagcagaagtacatgattccaacataaagaactttcctcaggataaccaaaaagtacaactctcagtgagcggatttttgtgtgcatttgaaattcctgtcccttcatctccaatttcagcttctagtccaacacaaatagagactacactgtctctcgtcctcaggatacttgagaaaagagcaaagatgaaaataccacaagcttatgatgctgtacttatctttgaatttgtagatttctcctcttcaccatctacaaatggaatgttcaccctaactaccaatggggacctacccaaaccaatattcatccccaatggaatgccaaacactgttgtgccatgtggaactgagaagaacttcacaaatggaatggttaatggtcacatgccatctcttcctgacagcccctttacaggttacatcattgcagtccaccgaaaaatggttagttaa

SEQ ID NO: 24019 - DNA, 1533 bp, Homo sapiens
  SIMILAR (1251)..(442): 371254mologous to Human endogenous retrovirus K gag protein,accession number Y10392,Smith-Waterman Score=488.
ttaaatgaggttatttgttgttttcttgttgatttgtttaagttcctcataggttctggatattatagctttgttggaggcatagtctgcaaatattttctccaaatctgcaggccatctgattatttgcccgctttccagtcgggaaacctgtcgtgccagctgcattaatgaatcggccaacgcgcggggagaggcggtttgcgtattgggcgccagggtggtttttcttttcaccagtgagacgggcaacagctgattgcccttcaccgcctggccctgagagagttgcagcaagcggtccacgctggtttgccccagcaggcgaaaatcctgtttgatggtggttccgaaatcggcaaaatcctttttatcctgttggcatttggctgatatatcttgaaagaaaggatcagtcgagccagtttgattgctgtcctttatggcccatgcccacagaacggctttgtgggtctctgatccaatgtcttcacaagctttaatatatgcaggcaacacctcctgatcaggtacattttgttgctggacggaacgcatggccattttacactcatggttcgcattctcaaaagctaacatacgagggagaatttcttgagcatgctcatccgagacagatttttcaaccccgtcttgtaatttagctaaaaaatcagggtataattcattgtgaccttgtttaacagtaggagcttggcctggggtgcgtaatttatcccaagctctcatacacacctttgttacttgttccgtggtaacagcatcaaagcctaattgggcataaatatcagagaagtcatcggagcctgtgagctgagcctgagtaattagaatgccatcagcccgatttagctgagcctgcagacgggcctcctctgaccaccaggtacggaattgtaaatgctgagatggggttagaacagcttttgccaaaaggtcccagtctaaaggaagcaaaatgacctcagtacaaaaagtctgtaataccattttaacacaaggagaagtaggaccatactgagtacaagcatccttgaattcttttaaaaaggtaagattgagcggcgcatagcgacgcatttgtacaccttgagcattatgaggttctagcgtgaccggacaagcccatgcctctaatccacttgtttccttgtgttggcgtaataagagttgcattgaagtttcaagagtaggcaccggtatgagagtgtgagaaaggggcattgggggagcagaagaggcagaagtgcactggtgattactggtatccatgtgtgaagaagggtacagagaagcagcctgagtggatggcaaagtgaccggttgaggaactgaaacgacaggagggcgaggggctgcagaggagggggaagggcctgcagaattataggtgaattgtagtttggccccggagccattagctgactccagaggcaaatgctgcctctctttcatctcttcggctttcagactttgcttgtacagctccggaatggatacctgtctctccat

SEQ ID NO: 24020 - DNA, 2019 bp, Homo sapiens
  SIMILAR (931)..(1089): 411254mologous to Homo sapiens Gag protein,accession number AF164612,Smith-Waterman Score=163.
ggatttacttcatcaatgactctataataagtaataagggtagaacacattacaattcacaaaataattccacaaacattatctcacttgcttttaataacaacagtggaagaatgaacaactcattccagtgaggaatttaagactcagaggttaaataaagctgaatatgggaaagattaggcaatttgcccacctcaggacttgaactttggtgggcaggctttagctctaaagttcttctataccaaagctgtgtcaacattaaagctgggactggacttccaatctgaggacccagaagagtcagcatatcctacttaacttctaagggtagggtggcggggtatgatttctttattttgaactataatttatatggtgtctcctagaagtttatggcccatacaggtatcttccactgttgcgggaagtcaaggaccccgaacagagggaccggctggagcctcggcagaggaacataaattgtgaagatttcattttaatatggacatttatcagttcccaaattaatacttttataatttcttacgcctgtcttactttaatctcttaatcctgttatctttgtaagctgaggatgtatgtcacctcaggaccactattgtacaaattgattgtagaacatgtgtgtttgaacaatatgaaatctgattgtaaaacaggtgtgtttgaacaatatgaaatcagtgcaccctgaaaaagaacagaataacagtgattttcagggaacaagggaagataaccataagactggccgacacttagggaaaatagaaaagaacctacattgaaatattgggggctggttcccctgatatctggcatgccaacatggtttttctttttcctaagtgcatgtgggaacctgattccctctggaggtattcgggtaccgatggaaaatatgttaccgtattcagggcagtggaagaacactgtccttggtttcctgaaaaaggaaccttaagtgtagaacaatgggatagtgttggtgcaaaattccaggaactggtccctacagggaattatgttcccatcactgtgtggggtgattgggccttgttactacagttttctgaatctggagaccctctacctcttcctcagctttcttctcccacggggccttcgttatctgatcagcctctcccttcgcctactcctcccccacctgatgatgttgagaattcaatatctaattctggtgactttggcttaacattaccccctggtgatcttattttatttcccgaagagccgctacttgcagcttccgcggccccgaataggacagccctgggccatatatatgctaattcttccctcttcaaacctttgcagcatttgcctctggagtcagctaatggctccggggccaaactacaattcacctataattctgcaggcccttccccctcctctgcagcccctcgccctcctgtcgtttcagttcctcaaccggtcactttgccatccactcaggctgcttctctgtacccttcttcacacatggataccagtaatcaccagtgcacttctgcctcttctgctcccccaatgcccctttctcacactctcataccgtctgatgaaacaacctgcaatgtttttaattaccctttgaagaagcccacaggcagagaactaagggaagccaagaataaagggtctcagcccaaagttcatgagaaaacaaatcctggcaacatccgttgcataagcactgaggaaaggccacatgagaacaaagggttcaatcacttgctagagtggcttgcagaactcaaaaccacaattcacctattagattgctggtttattgcaaaggacgtaaatagggaacagccagatgggagagatgcaggggacaagaggctgtgtgttaaattcttaagggagattgctgctaacacttataaaactgaggttggagctgcaaaagtaatggagatattgctccatagtcatggagcaacaactaccattgcaaactag

SEQ ID NO: 24021 - DNA, 675 bp, Homo sapiens
  SIMILAR (378)..(55): 331254mologous to Gallus gallus alpha-2 type I collagen,accession number M25984,Smith-Waterman Score=99.
tcatgagatcatcacaggagagtgaatatgaggacaaggacccgtggctgcatgtcctgcagggtggctggggccgcgggcaaggccagccttgcaggctgcagcgagtgaagctgcaggatgctggtaccagctgcgcccatttcttggggactgcgtgcttgcctccaagcccagagctccagcaaggggtggcaactgtggagaggtgtggccaactggaccctgcccagtctggttcccagagaacctggctttcttgggaggcagacgcaccccggagtctcctcgggctggggacaaccggcctgtggtcagggctacagccgtggcaggggtggcaggggtggcagggttggggtgaggtctgggtggcggaccctgttcccacatccgaagtgacaggagcaggttgatttccctgcacagagggcatggaactccaggcccacgtgtagcccgttctcctctgggaagtctctccgaggccgccgagtctggctcaggtgcctgtgctgggccctgctgggcttcttcacccctgctcatgtccctagcaccagcattgcccgcctctggcttgttccaactagcctgtgctcccttgatgaactgttcatccttcaagaaaagcacaattcgccacccctggaagtcctcctcctctccctccat

SEQ ID NO: 24022 - DNA, 1194 bp, Homo sapiens; identical to SEQ ID NO: 1814
  SIMILAR (640)..(894): 891254mologous to Homo sapiens HSPC263,accession number AF161381,Smith-Waterman Score=384.

SEQ ID NO: 24023 - DNA, 1959 bp, Homo sapiens
  SIMILAR (588)..(1058): 701254mologous to Homo sapiens HSPC263,accession number AF161381,Smith-Waterman Score=474.
gcggaaccggaccggaattcctggcacgacccacgcgttcgatggtgggggaggaacctcagcagcatatgcaggagccgctgggcagcgactccgaaggtgttaactgtctggcctatgatgaagcgcatcatggctcagcaggaccgaattcagcaagagattgctgtgcagaaccctctggtgtcagagcggctggagctctcggtcctatacaaggagtatgctgaagatgacaacatctatcaacagaagatcaaggacctccacaaaaagtactcgtacatccgcaagaccaggcctgacggcaactgtttctatcgggctttcggattctcccacttggaggcactgctggatgacagcaaggagtttgcagcggtgagaagggtgggcactgggcaccgaggcaggtgggtgtctacctcctccccgggcgagtaggatgtgtctcgagtagggtgtctccctccttcccgggcgatgggctggactctggccttgccaggcggggcagtgctgtctcggccctggcgtctgggctggtcgaggagcccatgctgggcccgcctttccatcccacccccaggttcaaggctgtgtctgccaagagcaaggaagacctggtgtcccagggcttcactgaattcacaattgaggatttccacaacacgttcatggacctgattgagcaggtggagaagcagacctctgtcgccgacatgctggcctccttcaatgaccagagcacctccgactaccttgtggtctacctgcggctgctcacctcggggctacctgcagcgcgagagccaagttcttcgtgcacttcatcgaagggtggacgggactgtccaaaggagttctgccaagcaggaggtggagcccatgtgcaaggagagcgaccaccattcacatcattgcgctggcccagggccttcagcgtgtccatccagggtgggagtacatgggaccgcggcgagggcggcaccaccaatccgcacatctttccctgaggggttccgagcccaaaggtctaccttctctaccggcctgggacactacgatatcctctacaaactagggctgggttccagcccgcttggttgccctggttgcccccttcttgccagggcgttaggacattgttacagaggtttttctgtggttgtaaatggtcctatttcacccccttcttcctgtcacatgaccccccccccatgttttattaaagggggtgctggtggtgagccgtgtgtgcgtgtccctgctctgctgcccgcctggctgctctgtctgctgccccctccccccaggtgggtccccctgcttttcacctatctactcctgagcttccccaacaggagcaggtttgaggggccaggcctcttggaggcccctcctgcttcgttgggttctgcttccttcccttcttagctggctcaggggcttctatgggatcctggaagttccttagggacttgcccagggtcccagggccacccacacttcatctgctccctcataggccccacctccacgtcccggctgggccccagaccccagcttcctgccctccaccgggagtctgcatggttgggagtcctgggtggaggggcctttgtgaggctggacccggctcagggcaggtggaggagctgggcctcccacagggtgcccgggcagtgccatcctggtgggggagggcagccttcaaacgtgtggggtctacagtcctcaggtctaggcagggctgccggttctccacctccccatccgccccaggccccctgcctgtgcctgccttgcaccccctctgcttgggccacggtgtctctgcattgcctgcctttttgccttcacctcttttcttccccgccccctgcacattcggggtctcagcccccaggctgtgagctccttgggggcaggccctcaataaatgtgaactgctgctgc

SEQ ID NO: 24024 - DNA, 891 bp, Homo sapiens
  SIMILAR (265)..(888): 551254mologous to Homo sapiens HSPC263,accession number AF161381,Smith-Waterman Score=423.
tgtattccgttctaggcaccagggctgtttaaagatggcggcggaggaacctcagcagcagaatcagtatccgctgggcagcgactccgaaggtgttaactgtctggcctatgatgaagccatcatggctcagcaggaccgaattcagcaagagattgctgtgcagaaccctctggtgtcagagcggctggagctctcggtcctatacaaggagtatgctgaagatgacaacatctatcaacagaagattcaaggacctccacaaaaagtacttcgtacatccgcaagaccagggcctgaccggaacttgtttctattcgggctttcgggattctcccacttgggagggcacttgctggattgacagcaaggagttgcagcggtttcaagggctggtgtctgccaaagaagcaaaggaaagaccttggtgtcccaggggctttcacttgaatttcacaattttgagggattttccacaacaacgttcattgggacctgattgagcaggtggagaaagcagacctctgtcgccgaccatgcctggcctccttcaatgaccagagcacctccgactgaccttgtggtctacctgcggctgctcaccctcgggcctacctgcagcgcgagagcaagttcttcgagcacttcatccgagggtggacggactgtcaaggaagttctgccagcaggaaggtggagcccatgtggcaaggagaagcgaccacatccacatcattggcgttggcccaggccctcagcgtgtccatccaggtggagtacatggaccgcggcgagggcggcaccaccaatccgcacatcttccctgagggctccgagcccaaggtctaccttctctaccggcctggacactacgatatcctctacaaatag

SEQ ID NO: 24025 - DNA, 2145 bp, Homo sapiens
  SIMILAR (36)..(113): 731254mologous to Drosophila melanogaster GS1-like protein,accession number U66356,Smith-Waterman Score=98.
cagaaggcgccaccatggcggcgcccccgcagcccgtcacccacctcatctttgacatggacggacttcttctggatactgaacggctgtattcagtggtatttcaagacatatagtcatcgctatgacaagaaatacagctgggatgtaaagtccctggttatgggtaagaaggcattagaggcggcacagattataatagacgtcttgcagctcccgatgtccaaagaggagctggtggaagaaagccaaacgaagttaaaggaagtgttccccacggctgcgctcatgccaggggcggagaaactcatcatccacctgcggaaacatggcatcccctttgcactagccaccagctcggggtccgcatcgttcgatatgaagacaagccgccacaaggagttcttcagcttgttttcccacattgtgctgggagatgaccccgaagtgcagcatggcaagccagacccagacatcttcctagcttgtgccaagaggttctctccccctcctgctatggagaagtgccttgtctttgaagatgctcccaatggggtggaggcggccctggcagctgggatgcaggtggtcatggttcctgacggaaacttgagccgagatctgacaacaaaggccaccctggtgctgaattccctgcaggactttcagcccgagctgtttggtttgccctcctatgagttagaagggagggcctcagtcttccgcccccagcccactctcatggtccacactgctgggggaaagggaaaggaaatcagcaactcttcaatcccaacctgcgctgtgattttagcctcctgagattggaagtttccatcccatgttggtttgtcccagtctaacgtgttgactaaaatgtgacttgacggttgagacaaaaaatacagtagagacagaaacgaagcccagaacaaagatgaaacttgaattaccatctcagaagtcaagctgatggagtatgtgataaagtgaatgtacatgtatatacacacacacctccatatatacatgtgtgtatcagtttggtaatatgcaggtaggcattacatgcatatgtatgtagacatatgcatgcatgtatatgtaaaatatatacttttccaagacaaaatgggaacatcacttctctcttctagtttttctggaacactggctggggaaatgtaaactgtgtatgcctataagtatatgctttatgtatggcatatgtatgtaggagatgtttatatcctatccgtctggcatcactctcctcagtgttgatgtcaacatgcaatgacaactgataaagcgagatggtagttctgcctggtttgcagtctgagtgggaaagtcctgtttttgatgagcactccttgttagctaacatttaaattctttttgtgacctcagaatgtctctggatctttcctcattgactgactctgtgccacgtcatccatagtttattgttagtatgaacacaactgtaacatttacctgggtatctacatccttacctgcattggaaaatgtttgctacctcacaacaaccatttggcctcctttaaggaacacttgatggggctggcactttttgggataggaaataggaatttggatttcaggatgtatggcttgggtgagtctcagtggcccaggggacacttttgggaataattttattcaggacattgaacttctgtggattaatccgccttttataggattttactccagtcttttaaaaattcggtctctgatttggcccagagaaaaacgggtggtagcccatgggaaatcggggagtgaagggagcactgcttccattgtgggctcagccctttcctagggggcctctgccctttgatgtccttgagctactcttcagctctggaagttgtggacaaaccgtaggaaatgtatgtgtgctgtgtggtggagtgattgtctgtgaatgacaggccctggctcattgattgatgttgtcatcaatttagcaaattcatttcctcattcttgatggcctgaatatatgtctgcacttttaatgctcctcttaaccagttgttaacatctttaccatttccctaaacaaatttgaattaagtttaataaaatcttttggcccatgaaaaaaaaaaa

SEQ ID NO: 24026 - DNA, 607 bp, Homo sapiens
  SIMILAR (262)..(582): 581254mologous to Homo sapiens zinc finger protein (583 AA),accession number X51760,Smith-Waterman Score=284.
cggccgctggatgtgggtgggccggcagccgggactccgggcgtcctgtcccgtccctgcccgtcgactgcggccttggccccgaagcccttttgtgcagctccgcgcccgcagcccgacgccccagcttgtgcgggggccacgggagggtcatgcgcggatttcgactcgggtgtggatttcgtccgtaggaggagcagcggtctgtggggcccacagcctccactttttcctgttaaaaattatactgagatgtttcaggacccagtggcttttaaggatgtggctgtgaacttcacccaggaggagtgggctttgctggatatttcccagaagaatctctacagggaagtgatgctggaaactttctggaacctgacctctataggaaaaaagtggaaagaccagaacattgaatatgagtaccaaaaccccaggagaaacttcaggagtgtcacagaagagaaagtcaatgagattaaagaagacagtcattgtggagagacttttaccccagttccagatgacaggctgaacttccagaagaagaaagcttctcctgaagtaaaatcatgtgacagctttgtgtggtgaagttgggctaggt

SEQ ID NO: 24027 - DNA, 508 bp, Homo sapiens
  SIMILAR (505)..(362): 351254mologous to Homo sapiens Human secreted protein clone yb219_1 protein sequence SEQ ID NO:110,accession number Y73444,Smith-Waterman Score=71.
tgatccatcattttccctgcaattcctgtctctctgaaatgaataaaaccaaactgtcctgagccgcctccggaccacttactccaggctgcttggggttgtgtttccctcggccaaggtctctcctactcggctctgaatacacttctgtattttacatagtctgttttttttccgttgacaaaccacaagccaggaccgggtgtttctcattcgtgaatggctgtttcctcaaatgaactttttgttaacgtacctcagtataatttttaacaggagaaagtggaggctgtgggccccacagaccgctgctcctcctacggacgaaatccacacccgagtcgaaatccgcgcatgaccctcccgtggcccccgcacaagctggggcgtcgggctgcgggcgcggagctgcacaaaagggcttcggggccaaggccgcagtcgacgggcagggacgggacaggacgcccggagtcccggctgccggcccacccacatccagcggccg

SEQ ID NO: 24028 - DNA, 2283 bp, Homo sapiens
  SIMILAR (1033)..(1770): 271254mologous to Lycopersicon esculentum extensin (class I),accession number M76670,Smith-Waterman Score=216.
aaaacaaaaacaaacaaagtaccttcccagctaagtgaagtgactggctcttggccaagggaacccccaaaacaccctgaaaattgagtgcctctgtatgacaggatgggaggtgagacaggtctccttataccctctccctttaggagtttacatgcagcaactgacgcacattcatgtaaaaacagacattctctgactggaaaaacagactccttgtggcaacaagataccaaattacaaacaagacctaaggccacgcaaggcaaaggagaaagtggaggctgtgggccccacagaccgctgctcctcctacggacgaaatccacacccgagtcgaaatccgcgcatgaccctcccgtggcccccgcacaagctggggcgtcgggctgcgggcgcggagctgcacaaaagggcttcggggccaaggccgcagtcgacgggcagggacgggacaggacgcccggagtcccggctgccggcccacccacatccagcggccgcggggaccgagggccgagcagctctaggaggactcggtcccagaccccggagtcgcccacagggaggcccgggtcccgccagttccaggcagcccctcccccatcgcaccactcccggccagcacacgcaccatttcccggctttcagatgtaccggggtcctctctacagctcctccccagcaccagcaacacctaatacatctgcttatgaatcaccacggttctgctccacctcctacatcagctcatcaccacggttctgccccacctcctacatctgctcatcaccacggttctgctccacctcctacatctgctcatcaccacggttctgctccacctcctacatctgctcatcaatcaccacggttctgctccacctcctacatctgctcatcaccacgattctgctccacctcctacatctgctcatcaccacggttctgctccacgtcctacatctgctcatcaccacggttctgctgctccacctcttacatctgcttatcaatcaccacgattctgctccacgtcctacatctgctcatcaccacggttctgccccaccccctacatctgctcatcaccacggttctgctccacctcctacatctgcttatcaatcaccacggttctgctccacctcctacatctgctcatcaatcaccacggttctgctccacctcctacatctgctcatcaatcaccacggttctgctccacctcctacatctgctcatcaccacggttctgctccacatcctacatcagctcatcaccacggttctgccccacctcctacatctgctcatcaccacggttctgctccacctcctacatctgctcatcaccacggttctgctccacctcctacatctgctcatcaatcaccatggttctgctccacctcctacatctgctcatcaatcaccacggttctgctccacctcctacatctgctcatcaatcaccacggttctgctccacctcctacatctgctcatcaccacggttctgccccacctcctacatctgctcatcaatcaccacggttctgctccacctcctacatctgctcatcaatcaccacggttctgctccacctcctacatctgctcatcaatcaccacggttctgctccacctcctacatctgctcatcaccacggttctgctccacctcctacatctgcttatcaatcaccacggttctgctccacctcctacatctgctcatcaccacggttctgctccacctcctacatctgcttatcaatcaccacgattctgctccacctcctacatctgctcatcaccacggttctgctccacctcctacatctgcttatcaatcaccacgattctgctccacctcctacatctgctcatcaccacggttctgccccaccccctacatctgctcatcaccacggttctgctccacctcctacatctgcttatcaatcaccacggttctgctccacctcctacatctgctcatcaatcaccacggttctgccccacgtcctacatctgctcatcaccagggtaggtgtcacagaaggaatagtgatccccaacggtgtccacatcctcgtccctggaacctggtgtgaaactggtgatatggatgggagttacccaacgcaacagtcgagagaccaggatgttggagcagacgtggaccctccaactctcccccgagtgcgggcagagttctgctgtccccgcgcgctcctgagctcctccggctcctgccgtagagacatccagccctga

SEQ ID NO: 24029 - DNA, 1014 bp, Homo sapiens; identical to SEQ ID NO: 95
  SIMILAR (553)..(945): 721254mologous to Mus musculus Pro-Pol-dUTPase polyprotein,accession number Y12713,Smith-Waterman Score=498.

SEQ ID NO: 24030 - DNA, 275 bp, Homo sapiens
  SIMILAR (204)..(1): 621254mologous to Mus musculus Pro-Pol-dUTPase polyprotein,accession number Y12713,Smith-Waterman Score=197.
caataagtccagtgtgtttgctacctcttgctcactggacccaattagcataatgtcattaatgtaatggaccagtgtgatatcttgcagaagtaaaaagtgatcgaggtctctccgaataaggttatgacacaaagccaaagagttgatataccccctaccagtcagggagtcaatgtgggggtactgccagctgctaagtatgtctatgccaattatgcatgctggcactggggaaatgaccacaggatgagtccggggacccactggaccca

SEQ ID NO: 24031 - DNA, 1680 bp, Homo sapiens
  SIMILAR (1449)..(802): 781254mologous to Mus musculus Pro-Pol-dUTPase polyprotein,accession number Y12713,Smith-Waterman Score=869.
ttagcagccggcgccggcgtcggcggcggcggcggcggcggccatggcctcctgcgtttgctcctcccgcccccggcgctctgcggcggccgcggcccgacttccgcactctgcgcctgcagggaccacgtgggagaatttgaagggctgatcctgtcccggtgcattcgcagtagcaatgatgcgagaattcgttttaacctcgtcactgactggactagactgtaaactccttggcgtctgggatggctcagccgtgcccagcaccaagtgcaggcactcaaacccctgccagatgcagacaacctgaagaccaccagcaacctgcactgccttagctggcttctgcccaggtggggtctgatgcagctgctggtgccagggcgcttctgctaaaatgggtctgttgttcatggaggagctgggagtaatggctctggaagtgtggggagaccaacagctgacagggatcagccctttcagtccaagtgggacactgctgcctacattatcttcctcaccttcgtcagcaccctgttgttcttgctgttgctcattatcatccactgttgctgcagctgctgctttgcgggactgtggctgtgcccctcgcagtaaatttggaggttctacatccttgtgccttctaagcagctcaggtcgcatggtgacttgatgacccataatcaagccttcagtttctaccaaagcccagtaacaagccaagagctgtgtctcaaaaggagagtaggtatctgcagaagatggcagggccttgctccaaaatcctagaggtctctgctgtgattcactgggtccaatccgcataatgtcatcagtagaatagaccagtgtgatatcttgtggaagagaaaagtgatcaagatctctgtgaacaaaattatgacacaaagctggagacttgatatacccctgaggcaggacagtgaaggtatattgctgactttgcaagctgaaggcaaattgcttttggtgggccttatggacaggaatggagaaaaaggcatttgtcgaatcaatggctgtataccaggtacaaggatatatgttaatttgctcaagcaatgaaaccacatctggtacagcagctgcagttggggtcaccacttggttaagcttacagtaatccactgtcattctccaagatccatctgtcttttgcacaggccaaataggaaagttgaatggggatatggtgggaatcaccacccctgcatctttcaagtccttgatggtggcactaatctctgcaatccctccagggttgtgatattgtttttgacttactatttttctaggtagaggcagctctaatgccttccatttggccttttccaccatgataggcctcaccctaccagtcagggagccaatgtagggattctgccagctgctaagtatgtctatgccaattatgcattctggcactgttctccagatttctgctttataagttagaaaactctgttcttttggagtgtagcgcacctcctcattggtcacactctgaaccttacatctagagcctgctggaacttgagtcttgactcctggttcaacgacaggcataactgtgtctggtactgtgctctttctaatactgctctcctgcttcctctcctcaactccctttaggctcaagctagcatgtttaagttt

SEQ ID NO: 24032 - DNA, 2541 bp, Homo sapiens
  SIMILAR (2151)..(1432): 751254mologous to Mus musculus Pro-Pol-dUTPase polyprotein,accession number Y12713,Smith-Waterman Score=949.
ttaataaattatacctctcagaggaggacccataacaggtttctgtttattgcttgtaagaagtacgttcagtgctgcttctaagttgttgccattatccataagagcttgcctcgatgcttccttactgaagcccatttccgttatgtgcttcagagctttctcatcaacattactttgggcagtatggccattttcatgatattgattcttcctatccgtgagcatggaatatttttccattcgtttgtatcctctcttatttccttgagcaatggtttctagttctccttgaagaggtccttcacatcccttgtaagttgtattcctaggtattctctttgtagcaattgtgaatggcagttcactcatgatttggctctctgtttgtatatgaccagtgtataggaatgcttgtgatttttgcacattggctttgtatcctgagagtttgctaaagttgcttatcagcttaaggagattttgaactgagacaatgaggttttctaaatatacaatcatgtcatctgcaaacacagacaatttgacttcctctcttcctatgtgaatactctttatttctttctgttgcctgaatgccctggccagaacatccaatactttctctctggcttcccttaatattttttccttcatttcaaccttggtgaatctgatgattatgtgtcttggggttgctcttctcaaggagtatttttgtggtgttctctgtattttctgaatttgaatgttggcctgtcttgctaggttggggaagttcttccggacaatatcctgaagtgtgttttccaacttggttccattcttcctgtcactttcaggtacaccaatcaaatgtaggtttggtcttttcacatagtcccatatttcttggaggctttcattgttccttttcattcttttttctctaatcttgtctttccactttatttcattaagttgatcttcaatctctgatatcctttcttccactttatcaattcggctattgatacttgtgtatgcttcacaaagttctcgtgctatgtttttcaattccatcgggtcatttatgttcttctctaaactagttattccagttagcaattcctctaaccttttttcaagtttcttagcttccttgcattgggttagaacatgctcatgggatacaaacatcttcacagtttttgaccactcagagtggtccatcaacatacctctttcccaaatttctttgtcaccaattttccaatcatgcttcttccaagtccctgataatccagccaaaccattggctacagcccataaatcagtatataatcgcacatttcgccatttctcctcaagcaccattggatctgctgggtcatatggcccaagtggcagagcagcttgcacagcagcctggacctgttgcagagccttctcctgttctggaccccactcaaaactggcagccttttgggtcacttgataaatccgccagagtaacacatccaaatgagtaatgtgttgccaggtaccaggagatgtgttaatttgctcaagcaatgaaaccacatctggtacagcagctgcaattggagtcaccacttgataatccactgtaattctccaagatccatctgtcttctgcacaggccaaatgggagagttgaatggggatgtggtgggaatcatcacccctgtgtctttcaggtccttgatggtggcactaatctctgcaatccctccagggatgcaatattgtttttgatttactatttttctaggtagaggcagctctaatggcttccatttggccttttccaccataatcaccctcaccctaccagtcagggagccagtgtgagggttctgccagctgctaagtatgtctattccaattatgcattctggcactggggaaatgaccacaggatgagtccgcgtacccactggacccactgtaatttggacctgagctaaaactcctttaatttcctgacctctataagctcctactttaactggaggaccacagtgacattttgggtcccctggaatcaacgtcagctcagagccagtgtccagtagtccccaaagtgtctgatcatttcccttttcccaatgcacagttaccctggtaaaaggccagaggtctccctggcgaggctgtgcatgcatcttctgttgcaggtcagccactagcatgataagagcttgtgtctgtttgtccacaatttcagttctctttctacaggagataagcctctcagtcagggcaatcctagcagatttgaggttcaatatctgcttctgaagctgggagacagaatccttgagttcataattttctttcatcactttttccactgaatttaggggcaaccaaccagctttattatgttccttggttctccacatatggtcaaaggtattatgtgtagagtcactaaactccttgcctctcatgagcaatgaatcaagtgtgtcaaatgcatttattttggataactccctaaacagctcatgccaaggactatcagtgttctccat

SEQ ID NO: 24033 - DNA, 2783 bp, Homo sapiens
  SIMILAR (1791)..(1841): 941254mologous to unidentified cloning vector non-functional lacZ alpha peptide,accession number U13866,Smith-Waterman Score=92.
  misc_feature (1)...(2783): n = a,t,c or g
tattaccttttacnccattttgctcagtatttgatgatctgtattgnccctgatgaagctgctgtggctgtgatttaggttcttccacattcaaagttcccattttagattccaagaaatcaaataatgtgcttggtgctgatggccttgcatttcccaggtcctcttcatcttcagatcttattcgccccctgccttttcctctacctctcagaggaggacccataacaggtttctgtttattgcttgtaagaagtacgttcagtgctgcttctaagttgttgccattatccataagagcttgcctcgatgcttccttactgaagcccatttccgttatgtgcttcagagctttctcatcaaccagcaccattggcatgctctgactgcttgttagaggatggaggatctcaggccccacccaaaccttctgaattagaatctgcagtttaacaaggtccgcaggtgattccttgttgtcttcccaataaagtgcaaaacattcatctccaggtttccacatttttgcatactccataggaatagatgattctagtattttttctggcttaattggcccagatcttcgtttgggcccactattgtaaaatattttatcatcacagggtacagctgtgacaggtcctgctggcttaataggtcctattcgtcttcctttcagtggcatttctacttctccatttggaacaccaatgaaactattacttcgaactggattctgataatcagtatttacattaaaatgtttttcaatttttataccactgaaagcttcattatttattgtttgtgatttcctgtcataaaaataatcaggaatagatgtttggctttctctttttccacgtttttgattattataatctacagatccttgaggaagtggattttctttttgcctctgcaaaggagggaccttttccctgatctgctttgcatagagttatctctttttttaaaagcaccatcactatgctgaggaacctaaagggatatgaagtatctttagttctgtcatatctaggaatacgggtctatccacatttggattctgtcttcagcccatactttcagatactgaagaagtacttggtctttcagaacctctatttctaggtaatccactgccttctaaaactgactttgaattttgggagtctctttgaaaacgaggcggtttttcatttcttggctgcctggtatcatttcgaggaggatgtctcaagatgattattatcttttactccattttgctcagtatttgatgatctgtattgtccctgatgaaagctgctgtggctgtgatttaggttcttccacattcaaagttcccattttagattccaagaaatcaaataatgtgcttggtgctgatggccttgcatttcccaggtcctccttccaccttcaagatcttattcgccccctgcccttttccctcctacctcctcaagaggaggaccccataacaggtttctgtttattgcttgtaagaagtacgttcagtgctgccttcctaagttgttgcccattatccataagagcttgcctcgatgcttccttactgaagcccatttccgttatgtgcttcagagctttctcatcaaccagttctctatagacaccttcatgttttccctctgatttggttgacttttctttctgtaaaacttccctatttcggttaccagcagcattcatattgagattacttctagcaccaccaccacctcctccaaatgtcttggtctgcaggcatgcaagcttggcactggccgtcgttttacaacgtcgtgactgggaaaaccctggcgtacccaacttaatcgccttgcagcacatccccctttcgccagctggcgtaatagcgaagaggcccgcaccgatcgcccttcccaacagttgcgcagccttgttgtcttcccaataaagtgcaaaacattcatctccaggtttccacatttttgcatactccataggaatagatgattctagtattttttctggcttaattggcccagatcttcgtttgggcccactattgtaaaatattttatcatcacagggtacagctgtgacaggtcctgctggcttaataggtcctattcgtcttcctttcagtggcatttctacttctccatttggaacaccaatgaaactattacttcgaactggattctgataatcagtatttacattaaaatgtttttcaatttttataccactgaaagcttcattatttattgtttgtgatttcctgtcataaaaataatcaggaatagatgtttggctttctctttttccacgtttttgattattataatctacagatccttgaggaagtggattttcttttgcctctgcaaaggagggaccttttcctgatctgctttgcatagagttatctctttttttaaaagcaccatcactatgctgagaacctaaaggatatgaagtatctttagttctgtcatatctagaatacggtctatcacatttgattctgtcttcagcccatacttcagatactgaagaagtacttggtctttcagaacctctatttctaggtaatccactgccttctaaaactgactttgaattttgggagtctctttgaaaacgaggcggtttttcatttcttggctgcctggtatcatttcgaggaggatgtctcagatgattattatcttttactccattttgctcagtatttgatgatctgtattgtccctgatgaagctgctgtggctgtgatttaggtt

SEQ ID NO: 24034 - DNA, 1728 bp, Homo sapiens
  SIMILAR (172)..(522): 341254mologous to Homo sapiens Intestinal mucin deduced from clone SMUC 40,accession number R07670,Smith-Waterman Score=124.
ggtaaactaactgaggcacgcacccgctgttgcatgcaactcaccagtgacagacaccgtcacacggcactcaaccacacgacgtgttcgcatcactgcaattctggcgttatggccggcaggctaggaccaattacggtactctctggagatgtgaccaaaggggatgagagcactaaccatgtggcacacgctagcccgcccaacgggagatctagaggcgcctcgccacggacggccacggcgcataacggcgacccaaccggaccacgcacccccggcgacaagcagaaaccgagccgcgcacccgcgacaaccacactccgcgcacccacagacggcacatcaaccgccacacacagccacctcacatacagaaccccgcgacccacgccagctacgcgcacacctctgccccccactcccaccagcagtatccctaccaaccacacagaggtcgccataccttcatcccccgccagcaccaccacacatctccctccacccatcaaccacccgagcgacagtcaatgcaccagataccaggcccactatatatgcgagggagtctgttccttttggccggctgctgaacctagggaggcagcgtgggatggagttggcaaacatcctgcaagtccacggcccatgaagagccgctatggtaccactagcagtgctaggacccagaaactggcgaaactgtttaggagaagctgcgggctggacgccaccagcggtgctgccacggaggtcaatcctgctttgacaaaccgcgtaggactctcacatctgatacacgcatcactagtctctgcgctagtacatgaccaactaccacgccgatcagcgtacgtcgtcgtcgtagctcctcgagtctacgatacattcagccgtcagcgacgtagttcacatcactatgcgcggacgccacgttgccgtgacgatgacgatcctgcgcgtcctgcggaggagcgcgtacgacctgatggtcggtcgcaggtctgcactagttatcgtgtgctgcgccgtcgctcatacacgctgcgtcgcttcgttccctcggctgctctagtcggttgccgcgtgcatcagtctgcggagcggcggcggtatgttctcacaattgatcgcgtatttgtaggggcagataatgagaggcacacccaataccgccgcggtcaacgtgccgtatccctagatacaaaagacgtaatgcatatctggtgcgagtgcatcagtgttgatagcggccactgtgacaccctgtctcgagatacctgctacacagtaatgttgacgactgctagcacgctgctcgtcagcacactacagcgtcggtcgcacgctccgtatgtcattcatcgatatcgctgtctacacgcgctatcacaacaggcggtcattcgctactacgagtcgcatgtatcaacaccccagactcgtgtcgtcgattgtcagtcccgcttcctgctcgcgtactaccttcgctgtctctcgaaggtgcacgattgcgttattaatcggtcgcctcgagtactatcagatcagagtattcgtagcatctatgttagtcgctgtcgcgctagtacgatcgttgtagtttcagtcgatctcgtgcatcgtcgtcgtgtcggcctactcgtagccgcagtcgtcgtatcagatgaggcagtcgtcgcagcagtagctgtccgtggtcgaagtgtactgtacgcgtcgcagtag

SEQ ID NO: 24035 - DNA, 450 bp, Homo sapiens
  SIMILAR (121)..(264): 871254mologous to Homo sapiens Rab5 GDP/GTP exchange factor homologue,accession number AJ250042,Smith-Waterman Score=197.
  misc_feature (1)...(450): n = a,t,c or g
gagttcctgcggcgacgatttcgcgcggngcgaggaggagggtgggtatgaggcggtagcggaccgcggagtcgagacctacccgaacgacgcgggcgagcggggctttggacgccggtggagacgcaggcgagactccagcgggaggaagaagaggcctttgccagcagtcagagcagccaaggggcccaatccctcatattctccaagtttgaaggaaagaaaaccaacaagaagacccgcaaggttaccacagtgaagaaatcttcagtacgtcttccagggtcggatcaaagaannnnnnnnnnnnnnnnnnnnnnnnnnnnnnnnnnnnnnnnnnnnnnnnnnnnnnnnnnnnnnnnnnnnnnnnnnnnnnnnnnnnnnnnnnnnnnnnnnnnnattgaaatggattgcatgcgtgtgcctcgagacaagctggactgcatcacn

SEQ ID NO: 24036 - DNA, 541 bp, Homo sapiens
  SIMILAR (453)..(421): 541254mologous to Homo sapiens Human secreted protein fragment encoded from gene 99,accession number Y07950,Smith- Waterman Score=38.
accaaggagccagacccacacagatggatttggggatcagtttggttatcttagggccagtgctgagatccttgcaatgggaaatgggatgctgttgatttccaggaagtgacctcacaatgactcaagctaccacttagtgttgattgtgatgaaatgccagctgtgcatatgccattgggagctaaagtggctgctgcacttgaccactatgaagactggtgtggaagggtccttctggatgtaacttgggcagggtccccaacgccagagccatggaactgtaaggagccacacagccggaggtgaatggtgttgaatgagggaagcttcatctgtgtttacagccactccccattgctcacattcctgcctgagctctgccttctctcagatcagcagcagcattagattctcataggagcatgcaccccattgtgaaccatgcatgtgagggatctacgttgcgctgtccctatgagaatctaatgcctgatgctctgtcactttctccaatattatcttccagctcatgccgaat

SEQ ID NO: 24037 - DNA, 1084 bp, Homo sapiens
  SIMILAR (131)..(1045): 971254mologous to Homo sapiens Rab5 GDP/GTP exchange factor homologue,accession number AJ250042,Smith-Waterman Score=1552.
  misc_feature (1)...(1084): n = a,t,c or g
tttcgtgggcgagcaggagggtgggtgtgaggcgggagctggccgcggagcccatacctacccgggcgaagcgggcgagcggtggtttggacgccggcggagacgcgggcgagtggttagcaggaagaagatgagccttaagtctgaacgccgaggaattcatgtggatcaatcggatctcctgtgcaagaaaggatgtggttactacggcaaccctgcctggcagggtttctgctccaagtgctggagggaagagtaccacaaagccaggcagaagcagattcaggaggactgggagctggcggagcgactccagcgggaggaagaagaggcctttgccagcagtcagagcagccaaggggcccaatccctcacattctccaagtttgaagaaaagaaaaccaacgagaagacccgcaaggttaccacagtgaagaaattcttcagtgcatcttccagggtcggatcaaagaaggaaattcaggaagcaaaagctcccagtccttccataaccggccaaccagccattgaacggatagaagtgtctaaggagttcatagaatttctcaagaccttccacaagacaggccaagaaatctataaacagaccaagctgtttttggaaggaatgcattacaaaagggatctaagcattgaagaacagtcagagtgtgctcaggatttctaccacaatgtggccgaaaggatgcaaactcgtgggaaagtgcctccagaaagagtcgagaagataatggatcagattgaaaagtacatcatgactcgtctctataaatatgtattctgtccagaaactactgatgatgagaagaaagatcttgccattcaaaagagaatcagagccctgcgctgggttacgcctcagatgctgtgtgtccctgttaatgaagacatcccagaagtgtctgatatggtggtgaaggcgatcacagatatcattgaaatggattccaagcgtgtgcctcgagacaagctggcctgcatcaccaagtgcagcaaacacatcttcaatgccatcaagatcaccatgtattgcggccgctcganaatatcccagcatacgtcc

SEQ ID NO: 24038 - DNA, 499 bp, Homo sapiens
  SIMILAR (437)..(390): 561254mologous to Homo sapiens Human secreted protein (clone cg426_8),accession number Y16782,Smith-Waterman Score=39.
actgggcctgaggtggccaggctcgaggcaagagcccggcccccatgggccactgtgcgggagaagctatggttgttcgggcatccaacacacatgcgctgttcctggcgaggcttatttcaggacgatttgggcctgcagaagccattatcaggaggcagtagctcggcctatagaggctgcgaaaatttaaattcttgacctgcagaggccatgatcacgtaacatctaggcctggaagggtccacttgtcaggcagcggcgcatcctgaagggggcctacaacaggcaggatcttcggccttgtggagaggcatccccttgattcctaaagaggccagtgtgagtgatcacatgggcccacagaagcaagtgtcaggccagatcgtcgcttggagagtcttgagaaaggcatgagatggacctaaacagaccattgccgattcagcacctgggcctatagaggcaagtgttaggcaggagctttgacctggagagg

SEQ ID NO: 24039 - DNA, 1749 bp, Homo sapiens
  SIMILAR (472)..(903): 561254mologous to Homo sapiens GrpE-like protein cochaperone,accession number AF298592,Smith-Waterman Score=381.
cttacttcttgttcctgtctctagtttctctacccttcaagttgttcacacagctacctgcatgatctttctaaagtacatacaacgatctgacaacgataacttcttggatttacagtctttcttgcttccccaccacatgatgaaatccagaatagtgggctcagcaatcaagattccctaccctctggagccttcctgtgtatccagcatcacagttcatcacacgcccagtgctctggctacattcagcttgttgtgaagcaaaccacaggcttgcacatttgtagttccttcttcctggaatgtcctttcacactccagtgggaggaagaggcctttgccagcagtcagagcagccaaggggcccaatccctcacattctccaagtttgaaggaaagaaaaccaacgagaagacccacgaggttaccacagtgaagaaatcttcagtgcgtcttccagggtcggatcaaagaaggtatcccggtgttggcattgtctccaggccttctcctcagttctgcacacagctacaaaacaaaagaacagttgccagcacttggaagaggatgtggatccaaaccaaatggaggacagatactccctctatggacaagatactcatggaagaagtcaagttagaagagcagctgaaggaggctgtggaagaagataagcaagcactggcagatactgagggctcagagcagagcagccaaaaattggtggaggagggaaatatgtatagcattcagggcttctgcaaggactcgttagaggttgcagatgttttggagaaggcaacacagtgtgttccagaagaagaaattaaagacaataaccctcacctgaagaacctctgtgaaactctcacaatgagtgaagagttaagccagatggtcgactgctgcaggcttccacaggatgtatcggtgcttggcgtagcccttcactgggttacacctcagatgctgtgtgtccctgttaatgaagacatcccagaagtgtctgatacggtgttgaaggcaatcacagccccgcctcgagttccgattgggcgcacctctggtgacgtcacggggacgggcgttcgccgaaggcgcgtgtcttcggcgatgtcacagcaccgggccttccgcgacgtcacagtgacggtacagtgcctggagctaggctgttttctccttagagtggagcttgcttcgcagtttctaaaaagaccacgaagccctgagagtaatgaaaaggttcctgaaattgaggtcactgtggaagcctcagccaagatgtctcaccctactctctatgatgcaacaagaagcccctggggaatgtttcagtcccagtctgtactattgtcatgtgctcatcacagtctgctaaggggtgctacacttgaccgctgcggtagtatagatgagtctgaagaatggtatgggatggatactttcgaatgcactggagtaggggtctccatccgcagggccacagagccggagaggagcagtggatcagcagcagcattagattctcataggagcatgcaccccattgtgaaccatgcatgtgagggatctacgttgcgctgtccctatgagaatctaatgcctgatgctctgtcactttctccaatattatcttcaagatcaggggatgcctctccacaggccgagatcctgcctgttgtaggccccttcaggatgcgccgctgcctgacagtggaccctccaggcctagatgttacgtga

SEQ ID NO: 24040 - DNA, 656 bp, Homo sapiens
  SIMILAR (355)..(104): 681254mologous to Homo sapiens Rab5 GDP/GTP exchange factor homologue,accession number AJ250042,Smith-Waterman Score=276.
caggagatggaggttattgacatcactggctggagaagatcctgaaggcccgaaagcatgtccacatggtcatcattagccagctgcagtgagtgcccagcctcagattggtgaaatagtagccatcctctccagtcatcagtcggcttggattgcagaagcacgtgatatactggatattagactgaaggcatgggggttgcccttcaaaacaatgtagatgagggtggggaggaagtcatctgctgacgccagctcgttctaggtgatcttgatggcatcgaaagatgtgcttgctgcacttggtgatgcaggccagcttgtctcgaggcacacgcctggaatccatttcaatatccttctttgatccgaccctggaagacgtactgaagatttcttcactgtggtaaccttgcgggtcttcttgttggttttctttccttcaaacttggagaatatgagggattgggccccttggctgctctgactgctggcaaaggcctcttcttcctcccgctggagtctcgcctgcgtctccaccggcgtccaaagccccgctcgcccgcgtcgaacggagtaggtctcgactccgcaatcagctaccgcctcatacccaccctcctcacgaaatcgtcgacccggaaatttcagtactt

SEQ ID NO: 24041 - DNA, 2152 bp, Homo sapiens
  SIMILAR (688)..(2010): 981254mologous to Homo sapiens dJ412I7.1 (similar to radial spokehead protein),accession number AL132795,Smith-Waterman Score= 2302.
atggaggactcaacctccccgaagcaagaaaaagaaaaccaagaagaactaggggaaacaaggcggccatgggaaggaaagacagcagcttctccccaatattctgagcctgagtcgtctgagcccttggaggcgaagcaggggccagaaactggacgccagtcccgaagcagccgtccttggagcccgcagtctagagccaagacgcctctgggtggccccgcgggaccagaaacatcatcacctgctcctgtctctccgcgggagccctcttcctctccttctcccctggctccggccagacaagacctcgcggcaccacctcagtcggacaggaccacgagtgtgattcctgaagctgggacaccttatcctgatcctttggaacaatcatctgataaaagagaatcaactcctcatcacacaagccagtcagaaggaaacacctttcaacagtctcagcaacccaaaccccacctgtgtggacgaagggacgtgagctataacaacgctaaacagaaagagctgagatttgacgtttttcaggaggaagactcaaacagtgactatgatttacagcagccggcgcctgggggctctgaagtggcccccagcatgcttgagatcaccattcagaatgctaaggcttacctgctgaagactagcagcaattcgggctttaatctatatgatcatctttctaatatgttgaccaagatattaaatgagcgtcctgaaaatgctgttgacatctttgaaaatattagccaagatgtgaagatggcacattttagtaaaaaatttgatgcactacaaaatgagaatgagttgcttccaacatatgaaatagcagaaaagcaaaaggctctttttctccagggacatttggaaggagttgaccaagaattggaagatgaaatagcagaaaacgctcttccaaatgtaatggagtcagctttttattttgaacaagctggagttggtttgggcacagatgagacataccgcatatttcttgccctcaagcagcttactgatacccacccaatccaaagatgccgcttctggggaaagatcttgggtctggaaatgaattatattgtagctgaagtggaatttcgtgagggggaagatgaagaggaagtggaagaggaagatgtagctgaagagagggacaatggagaaagtgaagctcatgaagatgaggaagatgaattaccaaagtccttttacaaggccccacaggctataccaaaagaagaaagtagaacaggtgccaacaaatatgtctattttgtttgcaatgaaccaggaagaccatgggtgaagttaccaccagttatacctgcacaaattgttattgcaagaaaaatcaagaaatttttcactgggcgattggatgctcccatcataagctacccacctttcccaggaaatgagagtaattatttacgagcacaaattgcccgaatttcagcaggaacccacgtcagtcctctaggattttatcagtttggtgaagaggaaggagaggaggaggaagaggcagaaggtgggcgaaatagctttgaggaaaaccctgattttgaaggcatccaagtgattgatctagtagaatccctatccaattgggttcatcatgtacagcatattctctctcagggtcgctgtaattggttcaactccatacaaaaaaatgaggaagaagaagaggaagaagatgaagaaaaagacgattctgactacatagaacaggaagtggggcttcctcttttgacaccaatctctgaagatttagagattcagaatatacccccctggacaacacggttatcctcaaatctcattccacaatatgctattgcagtccttcaatccaacctttggcctggagcatatgccttctccaatggcaaaaagtttgaaaatttctacataggctggggtcataagtatagtccagacaattatacacccccagttcctgccaccagtttatcacgaataccccagtgttccagaaatggcagaaatggatgatcctagtgtggaggaggagcaggctttcagggctgcacaagaagcagttctactcgcagctgagaatgaagaatctgaggaagatgaagatgaggaagatgattatgactaa

SEQ ID NO: 24042 - DNA, 489 bp, Homo sapiens
  SIMILAR (331)..(438): 661254mologous to Homo sapiens Human secreted protein, SEQ ID NO: 5370,accession number G01289,Smith-Waterman Score=116.
atgccccctgccagtgccccatggggcagctctcttcacatggccatgctagtgaggagtgctcctcattcctgctgctgctcctttgggggaaaatatcagcaggctctcagtccatgctcccatctcatgggtgcttctgcaataccaacaacttcccctttgaatatcatcctggaaccaccagagagcagttttgattttgcccccagaagagtcttaaatgcatcggaacagtatagtagcacccagaaagcaagtggctacaaaagccgcctgcaagagtgcgcccactactggaaggatgaagaagcctcattgttacaggccggttctgtggcactccgagaaattaaacattatcagaagtccactgaacttccgattcgcaaacttccctttcagtatctggtggagaaattgctcaggactttaaaacagatctgggctgcagagcgcagctactggtgctttgcaggaggcaagtga

SEQ ID NO: 24043 - DNA, 1142 bp, Homo sapiens
  SIMILAR (146)..(412): 341254mologous to Giardia intestinalis histone H3,accession number AF139875,Smith-Waterman Score=91.
  misc_feature (1)...(1142): n = a,t,c or g
tctagtgtggtggaattcgccgccgccgcgccgcgntacgctctccaacgccagacgccgcctctcgctcgcagtgctccagccgaaggagaaggggggtaagtaaggaggtctttgtatccatggctcgtacaaaagcagactggcccgcaaatcggaccggtgggtaaagcacccccnggaagccaactgggcctacaaaaagcccgcttcgcaagagtgcgcccctcctactggagggggtgaaagaaaccctcatcggttacagggcctggtaactgtggcggctccgtgaaatttagacggttatcagaaggtccactcgaacttcttgattcgcaaactttcccttcccagcgtctgggtgcgagaaattgcttcaggacttttaaaacagaatctgcgcttccaggagcgccagntattcgggtgctttgcagggaggcaagttgaggccttattctggttgggccttttttgaagacacccaacctgttgtgctaatccatgcccaaacgtgttaacaatttattgccaaaaggacatcccagctaggcacggccgcatacgtgggaggaacgttgctttaaggaatccactgatggatggggaaacattttcatttctcaaaaaaaaaaaaaaaaaatttctcttcttcctgttattggtagttctgaacgttagatattttttttccatggggtcaaaaggtaccctaagtatatgattgcgagtggaaaaataggggacgagaaatcagggtgtggccagtttctccattttccattggtgtgagaatttttaagataaatgcggagacgtaacgcattaatgcaagttaaaatgtttcagtgaacaagtttcagcggttcaactttataataattataartgcaccctgttaaatttttctggacaatgccagcatttgggatttttttaaaacaagtaaatttcttattgatggcaactaaatggtggtttgtagcatttttatcatacagtagattccatccattcactatacttttctaactgagttgtcctacatgcaagtacatgtttttaatgttgtctgtcttctgtgctgttcctgtaagtttgctattaaaatacattaaactataaaaaaaaaaaaaaaa

SEQ ID NO: 24044 - DNA, 384 bp, Homo sapiens
  SIMILAR (313)..(101): 361254mologous to Autographa californica nucleopolyhedrovirus AcOrf-91 peptide,accession number L22858,Smith-Waterman Score=103.
cttctctgagcttcccagaggagcaggacccgagagctcacttcacagggtcctgtgtgtctccccttccacaggacagggaagcccgtccagccacgcggggctggggtctccgcccgggtggacagtggctgggaggttctgaacacgctgcggctgctcctggccagtcaggtggggagggcggcaggggtgggagggacgtggtgtcacagagcggcagtgaaagacactcaacggccgctatggggtggggggttgatcttgaggggctgggcggtctctacagaggagggttaggaagcttcgccacgttatgcctcgctcaaagtccttgttgtctctttgggaaaaaaccttcagaaaatgaagttgatattaaat

SEQ ID NO: 24045 - DNA, 585 bp, Homo sapiens
  SIMILAR (189)..(371): 431254mologous to Homo sapiens dynamin,accession number L07810,Smith-Waterman Score=94.
atgctgcagaatgtgaccccggccagagccgagtggcaacggaaaacggctctccagggtgtggaggacccagtgcccgcgcgaccgcccatcagttcccctgaggatttgttacgttctggggagtgctcgacagcccccacacagcgacaggtcccacaacccgttcacgaatacacaggcccacccaggactccccaggtgcaagaagaaaacccacgtcagaaagaggccacactgagcagagggctgcgcctgacagggaagcccgtccagccacgcggggctggggtctccgcccgggtggacagtggctgggaggttctgaacacgctgcggctgctcctgggccatcagaccatcctcggggcagatgccgccatcacacgattttacagaggcctaggctgctcagtggcaaaacggaaagttaaaccagaggcccgccccccaccccagcagcctcccctgctggctgtccgcagatacatgagctgtgggcgagcacatgaacaagggcacacggaccctcctgggagtagtcttgcctgcgagccattcccaccatcctctgaagaaccctag

SEQ ID NO: 24046 - DNA, 326 bp, Homo sapiens
  SIMILAR (184)..(222): 1001254mologous to Homo sapiens Human secreted protein, SEQ ID NO: 7115,accession number G03034,Smith-Waterman Score=74.
tcaccgggccttagctgccttcccgtggggcgtggctcgggacctgcagcccgccatgcctgagcctcccaccccctccatgggctcctgtgcggcccgagcctccccgatgagcgccaccccctgctccacggcgcccagtcccatcgaccacccaagggtctttgggtccacactgcttttatgagctgtaacactcaccgcgaaggtctgcagcttcactcctgaagccagcgagaccacgagcccaccaggaggaacgaacaactccagacgcgccgccttaagagctgtaacactcaccgtgaagatctgcagcttcactc

SEQ ID NO: 24047 - DNA, 405 bp, Homo sapiens; identical to SEQ ID NO: 10567
  SIMILAR (14)..(100): 481254mologous to Arabidopsis thaliana F24O1.6,accession number AC003113,Smith-Waterman Score=69.

SEQ ID NO: 24048 - DNA, 349 bp, Homo sapiens
  SIMILAR (65)..(27): 921254mologous to Homo sapiens Human secreted protein, SEQ ID NO: 7115,accession number G03034,Smith-Waterman Score=67.
agggttcggtctcgctggctttaggagtgaagctgcagaccttcgccgtgagtgttacagctcataaaggcagtgtggacccaaagagtgagcagcagcaagatttattgcaaagagcgaaagatcaaagcttccgcagtgtggaaggggacccgagcggcccttgggtggttgatgggactgggtgctgtggagtgggggcggcactcgttggggaggctcgggccacacaggagcccacggagcagcggggaggctcaggcatggcgggctgcaggtcccgagccctgccccatgcgaaggcagctaaggcctggcgagaaattgagcacagcagctgctggcccag

SEQ ID NO: 24049 - DNA, 669 bp, Homo sapiens; identical to SEQ ID NO: 14110
  SIMILAR (294)..(605): 341254mologous to Homo sapiens type III procollagen (aa 892- 1023),accession number X01655,Smith-Waterman Score=112.

SEQ ID NO: 24050 - DNA, 395 bp, Homo sapiens
  SIMILAR (322)..(366): 601254mologous to Homo sapiens A Bcl-2 associated protein designated Bax-beta,accession number W87806,Smith-Waterman Score= 44.
acttatagtgacagagaggagatcagtggttggctggggactgcagaagaagagaccagaatagccttcaaaaatgagggctaaataaggacatattcatatatgcccaagtgagagaatctgtaaccagcagaactgcactacatagtatgctaaagatgctcttcatgccaaagggaaatgactccatatggaaagtaaaatgtgcagaaaagactcaagacaaccaaaaatggatctatgtaattgaagagccatattctgagcaccccagagcaagccagcctcccctacctcatcacaccactgttacagccagcagcaccagcaccacctttaatgccccgtccatcgccaccaccaggaatcagtgtggcctaatatccagggatgcc

SEQ ID NO: 24051 - DNA, 553 bp, Homo sapiens
  SIMILAR (218)..(144): 361254mologous to Plasmodium falciparum merozoite surface protein 1,accession number AF034635,Smith-Waterman Score=42.
atgcctgagcctcccaccccctccgtgggctcctgtgcggcccaagcctccccgatgagcaacgccccctgctccacggcgcccagtaccatcaaccacccaagggctgaggagtgcgggcgcacggcgcgggactggcaggcagctccacctgcagcccctgtgcgggatccactgggtgaagccagctgggctcctgagtctggtggggacgtggagaacctttatgtccagctcagggattgtaaatacaccaatcagcaccctgtgtctagctcagggtttgtgaatgcaccaatggacactctgtatctagctactctggtggggccttggagaacctttatgtctagttcagggattgtaaatacaccaattggcactctgtatctagctcaaggattgcagccactggactccagcaactcgaggaagaggcagccattgataccagacctagaattcactaaaggtcaatgccttcaggaattttcatctgatttgatgattgatgccctccccatcatgagccccaggaagtctcccatgccac

SEQ ID NO: 24052 - DNA, 855 bp, Homo sapiens; identical to SEQ ID NO: 19337
  SIMILAR (46)..(153): 751254mologous to Homo sapiens hypothetical protein,accession number AL162044,Smith-Waterman Score=155.

SEQ ID NO: 24053 - DNA, 2154 bp, Homo sapiens
  SIMILAR (593)..(682): 731254mologous to Homo sapiens putative p150,accession number U93563,Smith-Waterman Score=118.
atgcctgagcctcccacccactccatgggctcctgtgcggcccgagcctccccgatgagcaccaccccctgctccacggcacccagtcccatcgaccacccaagggctgaggaatgtgagcgcacggcgcaggactggcaggcagctccacctgcagccccggtgtgggatccactaggtgaagccagctgggctcctgagtctggaactaacatttccattacacctggaaatgccacatttgtgacccgggtgcagggacaggcttggtttgcctcatgtatcactggtcatgatatgtctagtttaaaaacttccagtgtcgtggtattaaggagacaatctgaggcacttctaccagccaatttgacatgcaattggcaagattcttctgcccttgccaccttagaaagtgccctgtcccaggtcagacacaaaagattcacatttacacttatggtctttacaggctcagccatagtcattatggcaactgttagcattgctgttgtatctattactgaatcagtacaaacaactgcttttgtagataatctggccaaaaatatatgtgatgaacttctcctacaggacatggatgaagctggaaaccaacattctcagcaaaataacacaagaacagaaaaccaaacaccacatgttctcactcataagtgggagttgaacaatgagaacatacggatacagggaggggaacattacatactggggcctgttggtggcaggttgccaacatccaaactcgctgttgattgccagctcctgctccttgcagcagcccagcatgctctctgctggtgccaaaatacccttccaccaaaccccgctaacttctggaactgtcctagagggtttcctaccctagcaagtgagcttgcctatgtcagccctaaccttgctcttgtcattcagctgagccagaggaaaaaatttgagctattctggggtggtctacagagaaccatcttctttcccttcagtgttctcagaatattgactgttgatgaacaagccaatgatgtgagtgtggctgcagcaaggacccttcaaattttcagagatgacatgattgtatatctagaaaaccccattgtctcagcccaaaatctccttaagctgataagcaacttcagcaaaatctcaggatacaaaatcaatgtacaaaaatcacaagcattcttatacaccaacaacagacaaacagagagccaaatcatgagtgaactcccattcacaactgcttcaaagagaataaaatacctaggaatccaacttacaagggatgtgaaggacctcttcaaggagaactacaaatcactgctcaaggaaataaaagaggatacaaacaaatggaagaacattccatgctcatgggtaggaaaaatcaatatcgtgaaaatggccatactgcccaaggtaatttacagattcagtgccatccccatcaagctaccaatgactttcttcacagaattggaaaaaactactttaaagttcatatggaaccaaaaaagagcccacactgccaagtcaatcctaagtcaaaagaacaaagctggaggcatcacactacctgacttcaaactatactacaaggctacagtaaccaaaacagcatggtactggtaccaaaacagagatatagatcaatggaacagaacagagccctcagaaataacgctgcttatctacaactatctgatctttgacaaacctgagaaaaacaagcaatggggaaaggattccctatttaataaatggtgctgggaaaactggctagccatatgtaggaagctgaaactggatcccttccttataccttatacaaaaatcaattcaagatggattaaagacttaaatgttagacctaaaaccataaaaaccctagaagaaaacctaggcattaccattcaggacataggcatgggcaaggacttcttgtctaaaacaccaaaagcaatggcaacaaaagacaaaattgacaaatgggatctgattaaactaaagagcttctgcacagccaaagaaactaccatcagagtgaacaggcaacctacaaaatgggaaaaaattttcgcaacctactcatgtgaaaaagggctaatatccagaatctacaatgaactcaaataa

SEQ ID NO: 24054 - DNA, 1336 bp, Homo sapiens
  SIMILAR (113)..(9): 801254mologous to Homo sapiens Human secreted protein, SEQ ID NO: 7678,accession number G03597,Smith-Waterman Score=137.
cgcggtgttacagctcttaaggcagcgcatctggagttgtttgttcctcctggtgggttcgtggtctcgctggcttcaggagtgaagctgcagaccttcgcggtgagtgttagagctcataaaggcagtgtggacgcaaagagtgagcagtagcaagatttattgcaaagagcgaaagaacaaagcttccacggcgtggaagggggacccgaggggggttgtcactgctggctcaggcagcctgcttttcttctcttatctggccccacccacatcctgctgattggtccattttacagaaagtcagtctgttttacagagagcccccagtggtctgttttgacagggcgatgattggtgcgtttacaatccctgagctagacacaaatgtttctccacttccccaccagattagctagatacagagtgtggacacaaaggttctccaaggccccaccagactagctagatacagagtgtcaattggtgcattcacaaaccctgagctagacacacggtgctgattggtgtgtttacaaaacttgagctagatacacagtgccaattggtgtatttacaatcccttagctaaacataaaggttctccacgtccccacccgactcaggagcccagctggcttcacctagtggatcccgcacagcgctgcaggtggagctgcctgctagtcccgccttgcgcccgcacttctcagcccttgggtggtcgatgggactgggcgctgtggagcagtgggtggcgctcactggggaggcttgggccgcacaggagcccacggagggggtgggaggctcaggcatggcgggctgcgggttccgagccccgctccgcgggaaggcagctaaggcccgccgagatatcgagcgcagcgctggtgggctggcactgctggaggacccagtacactctccgcagctgctggcccgggacattaccatcaaagtgacgggaaatgactccatatggaaagtaaaatgtgcagaaaagactcaagacaaccaaaaatggatctatgtaattgaagagccatattctgagcaccccagagcaagccagcctcccctacctcatcacaccactgttacagccagcagcaccagcaccacctctaatgccccgtccatcgccaccaccaggaatcagtgtggcctaatatccagggatgccctggacctgtcccttctattggcaataaatacaccacttggaggtagtagggatccatctttttctcaaagaaggtttcaagagaaagctatttgtcaacctaaggaagcatgtgcatccgtggctcagtcacttgcacttgttttatag

SEQ ID NO: 24055 - DNA, 1345 bp, Homo sapiens
  SIMILAR (489)..(406): 891254mologous to Homo sapiens Human secreted protein, SEQ ID NO: 7102,accession number G03021,Smith-Waterman Score=128.
agcttacagtggcgtgaagcatagtggcgtgaaagcaaggatacagaggcagcacaaaggcaattaattcatcaaattgtgacaggtgcataattcaggattacatactgtgtcggaattgatgggttcttggtctcactgacttcaagaaagaagccacggaccctcatggtgagtgttatagttcttaaaggcggcatgtccggcgtttgttccttctgatgttcggatgtgttcagagtttcttccttctggtgggttcgtggtctcgctggcttaggagtgaaactgcagaccttcgcggtgagtgttacagctcttaaggcggcgcacctggagttgttcattgcgcgcctggagttgggatttgatcgttcctcccggtgggctggtggtctcactggcttcaggagtgaagctgcagaccttcgcggtgagtgttacagctcttaaggaagcgcgtctggatttgttcgttcctcccggtgggctcgtggtctcgctggcttcaggagtgaagctgcagacctttgcggtgagtgttacagctcataaaagcagtgtggacccaaagaactcaggagcccagctggcttcacctagtggatcccgcaccgagactgcaggtggagctgcctgccagtcccgcgccgtgcgctcgcattcctcagcccttgggtggtcgatgggactgggcgccatcgagcagggggcggcgctcgttcggggaggctcgggccgcacaggagcccatggagtgggtgggaggctcaggcatggcgggctgcaggtcccgagccctgccccgcgggaaggcagccaaggcccagcgagaaatcgagcacagtgccggtgggccggcactgctgggggactcagtacaccctccgcagccactggcccgggtgctaagtcccccattgcccggggccagcagggcttgctggctgctccgagtgcggggcccaccaagcccacgcccacccggaactccagctggcccgcaagcgccgcacgcagccccggttcccgctcgtgcctctccctccacacctcccttggtccacttgacaaacgatgttctaagagtgaaggtcaagtgggcctttttctttacactccacaagtagctcaaaacattccacactgcagtctttgtcagatttggtccgtggcttcctgatacaggattttgctcttctttgagtttccagttttcttttttaatttccctggatactcttccatatagaaagggagtcatctgtttattggaggcattggatgatctgctgtttttcttggttgagacttggtaccaccaagaagcagtcagtgccctcat

SEQ ID NO: 24056 - DNA, 1623 bp, Homo sapiens
  SIMILAR (330)..(836): 621254mologous to Homo sapiens adrenal gland protein AD- 003,accession number AF110776,Smith-Waterman Score=444.
gtgtgatcttgagaaagaggtgagcctctctgggccctggcttccccaacaaccaaaggctgtacagagagcggcttatgagagagctcctgtgtgcgccgccgagggctctgctggctcaggacatctgtaggaccagttccagctccagtgggcaccgccagcacgcccaggagagtcgcggttgctgatcgtggtgcttgagtagagccgtggttggtgacagcatgacgagcgaggtgatagaagacggagaagcaattcttattccaaggcccaagacctactggaaacaaatcccacccacggtggaccggcatgcttggggggaaggcccgaacaagacaggaacgtcctgtgccctggactgtggagctggcattgggaggatcaccaagcggctgctcctgccgctgttcagagaggtggatatggtcgacataacggaggacttcctggttcaagccaagacctacctgggggaggagggcaagagggtgaggaactacttctgttgtgggctccaggacttcacccccggagccggactcttacgacgtgatctggaatccagtgggtgataggccacctcaccgaatcagcacctggccgaagtttcctgcggccgtgcaaagggcaagcctccgcccccaacggcatcatcgtcatcaaaagacaacattgccccaggagggcgtgattctggacgacggtggacagcagcgtgtgccgggaccttgacgtggtccgcaggatcattttgcagtgcaggcctcagcctcctggccgaggagaggcaggagaaccttcccgattgagatcttaccattgtctattagcttttcccttgagatgagccggggttggcaggagaaactgaggaaccacagtcctggtggggggagctggcagctgggcaagatcccaggcgccacgctgccggttcgtgagtgtcgaggcaccactaaatatagcttgtctgccgtccactcattatgcgggctcttcttcaaaaaggcaaggtgggacccggcggggagggtgctgctgaaccagcggtgaggcaggagcccagaccctgctctcctgcgagatgggattgggtggaaggggctccagggctcctggtgctccccatgtgggaatagggtggccacatcagtaaccgattccctgggcctccagcccggccttccagccatgggcctggctgcctgaagaggaaggaaaccacccccaacttggttgctggggacttgaagacttcagtgtgatctttacctaggggagggacagagctgggctggtggagcccatgggtgctgccctgatggtgctgtggggtgggtgctcatgtgccaagtcctgcttggcagtggagacctggggcccttaaagtgttacaacagcctgcagcaagggaagttccccgtagcctcagtcttctctgggcttgaggctgctccttggcaggcatttaaagtaaaaaataaaatggggctgggcgcggtggctcacgcctgtaatcccagcactttgggaggccgaggcgggcagatcacgaggtcaggagattgagaccatcctggctaacaggtgaaaccccgtctctacttaaaatac

SEQ ID NO: 24057 - DNA, 516 bp, Homo sapiens
ttttttttttttgagacggagtctcgctgtgtcgccaggctggagtgcagtggcgcaatctcagctcactgcaacctctgcctcccaggtgcaagtaattctcctgcctcagcctcccaagtagctgggactacaggtgtgtaccatcacgcctggctaattttttgtattttagtacagacggcatttcaccatgttggcccaggatggtctcaaatctcctaacctcatgatcggcctgcactggcctcccaaagtgctgggattataggcgtgagccaccgcgcctggccaacatccttctcttacaaaaacaaaacaaaaaaccctccctaggtctctccttcctccaaaactccttcctctgaatgactttgacgagttgacagaagtaggcttcagaagatcggtaataaccaacttctccgagctaaaggaggatgttcgaacccatcgccaagaagctaaaaaccttgaaaaaagattagacaaatggctaactagaataaacagcac

SEQ ID NO: 24058 - DNA, 717 bp, Homo sapiens
  SIMILAR (717)..(418): 771254mologous to Homo sapiens PRO2221,accession number AF116695,Smith-Waterman Score=383.
tcaatttgatgggttaatgcatttgaaagcatctgctacgtggtagacacttgcaaattcagagaatttcaaggcaaaactggtcttctcagaaccgtctgagtgataagtcgtcagtacaccaaacctctgagacacgcaatatacccatgcaacaaatctgcacaggtaccccctctggtacaattcggctgtgaatctgtctggtcctcgacgttttttggttggtaggctattaattattgcctcaatatcggagggtgttattgatctattcagggattcaacttcttcctggtttaggcttgagaaggcgtatgtgtccaggaatttattcatttcttctagattttctagtttatttgcgtagaggtgtttatagtattctctgatggtagtttgtatttgtagttctcgtgccatggttttcagctccatcaggtcatttaaggtcttctctatgctgtttattctagttagccattcatctaatcctttttcaagatttttagcttctttgcgatgggtttgaacatcctcctttagcttggagaagtttgttattaccgatcgtctgaagccttcttttctcaactcgtcaaagtcattctccatccagctttgttctgttgctggcaaggagctgcatttctttggaagggaagaggcactctgatttttagaattttcagcttttctgctctgttttttccccat

SEQ ID NO: 24059 - DNA, 4551 bp, Homo sapiens
  SIMILAR (4239)..(4322): 411254mologous to Mus musculus ZP1 precursor,accession number U20448,Smith-Waterman Score=43.
atgggccttgctcacctattcgtcacactgattctggtctgtgtgctgggaggagccttccagccccagttcttagtttcaggagcaaccaccctggtcatctcagcaaactgcacagttccccgggtgccctggaagagtctctcggtgctgctgctgttcttcaccatcctggcactaggcatcgccttcttgtctaccttcctgggcttccatgccaccttctgctacacccagctgtttctcatttcagggatcttggcgataacaatgaagaccttttctaaaacttacctgaagatgttgtgcctgatgacaaacctcatcagcctcttttgcgtgctgtctggcctcttcgtcatctccaaggatctctttctggagagcccatttgagtccccgatctggagaatgtaccccaactccacggtccacatccagaggctggagctggccttgctctgcttcactgtcctagagctcttcctgccagtgcccacagctgtcacagcctggagaggggactgcccatctgcaaagaatgatgatgcatgccttgttccgaatacaccattgcatctcaaaggcctgccggtggagcccccgccatcctaccagagtgtgattcaaggcgacgcacaacacaagcaacatcagagcctggtagtcacatctagaagaccctcgaatcttggttcaatgcaggtctctaacgaagtgccggagcacccatgtgtatcccctgtctctaatcatgtttatgagcggcggctcatcgagaagtacattgcggagaatggtaccgaccccatcaacaaccagcctctctccgaggagcagctcatcgacatcaaagttgctcacccaatccggcccaagcctccctcagccaccagcatcccggccattctgaaagctttgcaggatgagtgggatgcagtcatgctgcacagcttcactctgcgccagcagctgcagacaacccgccaagagctgtcacacgctctgtaccagcacgatgccgcctgccgtgtcattgcccgtctcaccaaggaaggtgcgggtgagccaatggatttgggtgagctggtgggaatgaccccagagattattcagaagcttcaagacaaagccactgtgctaaccacggagcgcaagaagagagggaagactgtgcctgaggagctggtgaagccagaagagctcagcaaataccggcaggtggcatcccacgtggggttgcacagtgccagcattcctgggatcctggccctggacctctgcccgtccgacaccaacaagatcctcactggtggggcggataaaaatgtcgttgtgtttgacaaaagttctgaacaaatcctggctaccctcaaaggccataccaagaaggtcaccagcgtggtgtttcacccttcccaggacctggtgttttctgcttcccccgatgccactatcaggatttggtcggtccccaatgcctcttgtgtacaggtggttcgggcccatgagagtgctgtgacaggcctcagccttcatgccactggcgactatctcctgagctcctccgatgatcagtactgggctttctctgacatccagacagggcgtgtgctcaccaaggtgacagatgagacctccggctgctctctcacctgtgcacagttccaccctgacggactcatctttggaacaggaaccatggactctcagatcaagatctgggacttgaaggaacgtactaatgtggccaacttccctggccactcgggccccatcactagcatcgccttctctgagaatggttactacctggctacagcggctgatgactcctctgtcaagctctgggatctgcgcaagcttaagaactttaagactttgcagctggataacaactttgaggtaaagtcactgatctttgaccagagtggtacctacctggctcttgggggcacggatgtccagatctacatctgcaaacaatggacggagattcttcactttacagccctcatggatgactttgagggattgaggacttccatggagggagtaactgcagatgtggaggaaatggtaagagaattagaatccaaaggggagtctaaagatgggactgaattgctgcaatctcatgttaaaactttaatggatgaggagctcttagggatgaccaaagaaagtggtttcttgatggaatcttctactggtgaagatgccgtgaacattgttgaaatgataatgaaggatttagaatattacataaacttaattgataaagcagaaattgtcacagccacttcagccttcagcaaacaccacccttgtcagttagcagccatcgacatcaaggcaagaccctgctgctgctgtcaggagctgactgcctccagggctggaatcctgtgctccctctgtgcccagagccccacgatgtcggccaacgccacactgaagccactctgccccatcctggagcagatgagccgtctccagagccacagcaacaccagcatccgctacatcgaccacgcggccgtgctgctgcacgggctggcctcgctgctgggcctggtggagaatgagtcatcctcttcgtggtggctccagcccgaccctggcctcccaggcctccggcacagctacgactgtgggatcaagggaatgcagctgctggtgttccccaggccaggccagactctccgcttcaaggtggtggatgaatttgggaaccgatttgatgtcaacaactgctccatctgctaccactgggtcacctccaggccgcaggagcctgcagtcttctcggccgattacagaggctgccacgtgctggagaaggatgggcgtttccacctgagggtgttcatggaggctgtgctgcccaatggtcgtgtggatgtggcacaagacgctactctgatctgtcccaaacctgacccctcccggactctggactcccagctggcaccacccgccatgttctctgtctcaaccccacaaaccctttccttcctccccacctctggccatacctcccaaggctctggccatgcctttcccagcccactggacccagggcacagctctgtccacccaacccctgctttaccatcccctggacctggacctaccctcgccaccctggctcaaccccactggggcaccttggaacactgggatgtgaacaaacgagattacataggtacccacctgagccaggagcagtgccaggtggcctcagggcacctcccctgcatcgtgagaagaacttcaaaagaagcctgtcagcaggctggctgctgctatgacaacaccagagaggttccctgttactatggcaacacagctactgtccagtgcttcagagatggctacttcgtcctcgtagtgtcccaagaaatggccttgacacacaggatcacactggccaacatccacctggcctatgcccccaccagctgctccccaacacagcacacggaagctttcgtggtcttctacttccctctcacccactgtggaaccacaatgcaggtggctggcgaccagctcatctatgagaactggctggtgtctggcatccacatccaaaaggggccacagggttccatcacgcgggacagcaccttccagcttcatgtgcgctgtgtcttcaacgccagtgacttcctgcccattcaggcatccattttcccacccccatcgcctgctcctatgacccagcccggccccctgcggcttgagctgcggattgccaaagacgagaccttcagctcgtactatggggaggatgactatcccatcgtgaggctgctccgagaaccagtccatgtggaggtccggcttctgcagaggacagaccccaacctggtcctgctgctgcaccagtgctggggcgctcccagtgccaaccccttccagcagccccagtggcccatcctgtcagacggatgccctttcaagggcgacagctacagaacccaaatggtagccttggacggggccacacctttccagtcgcactaccagcgattcactgttgctaccttcgccctcctggactcaggctcccagagagccctcagaggactggtttacttgttctgcagcacctctgcctgccacacctcagggctggagacttgctccactgcatgtagcactggcactacaagacagcgacgatcctcaggtcaccgtaatgacactgccaggccccaggacatcgtgagctctccggggccagtgggctttgaggattcttatgggcaggagcccacacttgggcccacagactatccatgtgggaagggctggcacaggaggaatggcagcctgctggccctgacactggctgcgatggtgggcatggccaccagacaggaacgcagctcctcgccagcaacggaacaaagctggatagagaatgactttgacgagttgagagaaggcggcttcagacgatcggtaataacaaacttctccgagctaaaggaggatgttcgagcccatcgcaaagaagctaaaaccttgagaaaagattag

SEQ ID NO: 24060 - DNA, 1159 bp, Homo sapiens
  SIMILAR (1002)..(82): 571254mologous to Homo sapiens p40,accession number U93569,Smith-Waterman Score=797.
tcatgccatggttttcagctccatcaggtcatttaaggccttctctacactggttattccagttagcctttcatctaatcttttttcaaggtttttagcttctttgccatgggttcgaacatcctcctttagctcagagaagtttgttattaccgattgtctgaagccttcttctctcaactcgtcaaagtcattctccgtccagctttgttccgttgctggcaaggagctgtggttcctgggtatcaccagcagaggctgcagaaccacaaatattgcagaagggcaaatgtagctgtctgattgttcctctggaagctttgtgtcagaggggcaccaggctttctctctggctgcctttaacattttttccttcatttcaactttggccagtctgacaattatgtatcttagagttgctcttctcgccgagtatctttgtggcgttctctgtatttcctgaatttgaatgttggcctgccttgctaggttcaggacgtcttcctgaataacatcctgcaaagtgttttccaacttggttccattctccccatcattttcatgtacaccaatcagacacagatttggtcttttcacatagtcccatatttcttggaggctttgttcatttctttatactcttttttctctaaacttctcttctcgctccatttcattcatttgatcttcaatcactgataccctttcttccacttgatcgaattggctactgaagcttgtgcatgcatcatgtagttctcgtgccatggttttcagctccatcaggtcatttaaggtcttcttctctacgctgtttattctagttagccattcatctaatcttttttcaaggtttttagcttctttgcgatgggttcgaacatcctcctttagctcggagaagtttattattaccgatcgtctgaagccttcttctctcaactcgtgaaagtcattctctgtccagctttgttccattgctggcaaggagctgcgttcttttcaatgttgatgcatatttttcttgtgatgccacattcattaaactccttgaggatggtcttggctccctgctcctactagcagcagttttgcctcctacatcatcacaataatgaacttgaagttgtctgggtatccttgctcctttttcatgcat

SEQ ID NO: 24061 - DNA, 1784 bp, Homo sapiens
  SIMILAR (440)..(502): 711254mologous to Homo sapiens Human secreted protein sequence encoded by gene 2 SEQ ID NO:250,accession number Y91577,Smith-Waterman Score=74.
ctatcttttttcaaggtttttagcttctttgcgataggttcgaacattctctttagctcggagaagtttattattaccgatcatctgaagccttcttctccaacttgccaaagtcattctctgtccagctttgttccgttgctggcaagagttgcattcagatggggttttggtgtggatgtcctttcgtttgttagttttccttctaacagtcaggaccctcagctgcaggtctgtggagtttgctggaggtccactccagatcgtttgcctggttatcaccagcgaggcagcggtggctgcagaacagcggatattattgaaccgcaaatgctgcgcctgatcgttcgtctggaagttttgtctcagaggagtacccggccacagaggtgtcaagtctgcccctactggggggtgcctcccagttaggctgctgtgggtcagggacctacttgaggaggcagtctgcccgttctcagatttgagctgcatgctgggaaaaccactactctcttcaaagctgtcagacagagcatttaagtctgcagaggttattgctgtcttttgtttgtctgtgcccaacttagagcagttaggatgaagcaagaggctgtgcacatgatctaatgcaacgaagagccctaacaggttacacctggtgagtatgcagacgtagagatcttctttgcttaaaacaggttttagctgtggcacggacattttggacccaatcaatcttgtggtgggggctgtcctgtacatcacagcatatttaccagcatccctctttccactccccagagcctgcaccaccccctcctcaagctgtgatgacaaaactgtctcctgacattgctctaatgtctccatggggagcaaaatcatcctggagaaaggaccagggctatcccgcttcgtatccacgagctgcatctggacattggcaggcattccacctccatacctcccttggactgcatttggttctgaatggagctgctgtacagataatttcatcacccaggtaataggcatagtaaccattaggtcgttttttgatcctctccctcctcccaccctctactctcagatgggtcctggtatctgttgttgccttctttgtgaccatgtgtactcaatgtagctcccactgagctgagaatggctcttctctggcaagaagtttctagaatgtgtttgctgggccaaagcttggcacctgatctcttcagagatcttgtggatagaaggtctcatcataaccaaggggatgatacagtagaaaatggcaaagggcatgactactaggacaccagggtggcagactgtatttttcaaaaacagccacagcaatattctctgacatggtcttctagaaccttgttactttttatcaacaatttcctctgcttccctgtcactgaacctaagcctatccttttcacccctacttttgccatccttgacagcatcgtggaggagttacagtatcagccccggacagttttgtctgtagacttttctactgtaagaagaaaaagaaacagccaacaataacaaaaagacaagccccaattgagtttaagccactgttaacttggtatgccatcaaacacaattttttaaacctaaacaatagctatggtgtttcacagatttgacataaccaacaacaaatggaccactccaatttttctggatagttaaaaaataaggccttcacaccaacacaagtcccagactggcactctcgaatgactaagtttgtaattatttcatcagtt

SEQ ID NO: 24062 - DNA, 825 bp, Homo sapiens; identical to SEQ ID NO: 10360
  SIMILAR (262)..(579): 951254mologous to Cloning vector pSacBII RepL,accession number U09128,Smith-Waterman Score=493.

SEQ ID NO: 24063 - DNA, 1983 bp, Homo sapiens
  SIMILAR (906)..(280): 841254mologous to Homo sapiens MAP kinase kinase,accession number X96757,Smith-Waterman Score=869.
  misc_feature (1)...(1983): n = a,t,c or g
ttatatgcagacctttgccagctcctctggcataagtggctgggttccagtgactgctgttgctctctccacattggcttggtgtgtgcggatttctccatctggttcaacaggaagtatgtactgtttgcaggatgctattgagcactgtgaggtaaagtcaacaaactctgcagagaacttgtctgctgggagttgtggcgatggctcctctaccacctgtttgagctgctgaaatggagttccccatgaatcatagggaaatcgaaggatggccaactcaatggccatgtatggtttgcaacctgcatcaattgttttagcaacagagtccaccaagtagccactgattccaaaatcgcacatcttcacttgaccgagagcattgatgagtacattagaaggcttgacgtctctgtgaatgacagacagcttactatgtaaatgttctaatgcttttacaatagaaactgctattttccctaagatgtcctctggaattgtctggcctttatcaataacttgtttgtagaatttatctagtgatgtatccatgagctccatgcagatccacacatcaccctcccgaaacagtgcgccataaaaggtgacagtgaatggacagtccaccgtcctcatggaaatatccaaatccatcagtagccgtttctgttcctggctatttactgtggctcggatccgcctcctttttccacaaatggagacaattttctctcccaattctggtttcttgattttcagaggcaattctcgtcccagttccattataggctccaggtcatctgccttcacctcaaagttctgatttccaatagaaatgcaagccttggagtctaaatctcgaggtggtaatgtcaagctcgaccgatgcccctgagagccttcaacccagtcagctccttccggtgggcgcggggcatgactatcgtcgccgcacttatgactgtcttctttatcatgcaactcgtaggacaggtgccggcagcgctctgggtcattttcggcgaggaccgctttcgctggagcgcgacgatgatcggcctgtcgcttgcgntattcggaatcttgcacgccctcgctcaagccttcgtcactggtcccgccaccaaacgtttcggcgagaagcaggccattatcgccggcatggggccgaacgcgctgggctacgtcttgctggcgttcgcgacgcgagggctggatggccttccccattatgattcttctcgcttccggcggcatcgggatgcccgcgttgcaggccatgtggttagcagaatgaatcaccgatacgcgagcgaacgtgaagcgactgctgctgcaaaacgtctgcgacctgagcaacaacatgaatggtcttcggtttccgtgtttcgtaaagtcctgtggaacacctacatctgtattaacgaagcgctggcattgaccctgagtgatttttctctggtcccgccgcatccataccgccagttgtttaccctcacaacgttccagtaaccgggcatgttcatcatcagtaacccgtatcgtgagcatcctctctcgtttcatcggtatcattacccccatgaacagaaatccccgcttctggagaaactcaacgagctggacgcggatgaacaggcagacatctgtgaatcgcttcacgaccacgctgatgagctttaccgcagctgcctcgcgcgtttcggtgatgacggtgaaaacctctgacacatgcagctcccggagacggtcacagcttgtcaaataccatctttccatctcaacccaagttttatagtagtggctttcacagggatttgcctgtttgctccaatgtggaactggtctgaggttgttcaaatgcttcttttggaattttaaggccagggtttcgcttcttgccttattgagtttctttgctgtctggattctgaattctatatctgtcatttcggccatttcaatctggttaaagaccat

SEQ ID NO: 24064 - DNA, 2040 bp, Homo sapiens; identical to SEQ ID NO: 10369
  SIMILAR (859)..(1944): 971254mologous to Homo sapiens The human homolog of mouse Cux -2,accession number AB006631,Smith-Waterman Score=1796.

SEQ ID NO: 24065 - DNA, 2016 bp, Homo sapiens
  SIMILAR (1899)..(1291): 731254mologous to Bacteriophage P1 non-essential to replication and lytic development,accession number X15639,Smith- Waterman Score=712.
tcagaggttttcaccgtcatcaccgaaacgcgcgaggcagctgcggtaaagctcatcagcgtggtcgtgaagcgattcacagatgtctgcctgttcatccgcgtccagctcgttgagtttctccagaagcgttaatgtctggcttggtcgcttccggtccttgagcccgatataagcgtgggagccgaagtggtactccaccacggccacgcggacccacttctgggagatgcgcagccgctccatcatgtccaccacaaaggccttcagcacttcaaactcagcctcggacagcctggaggagccatccagcaggaagaccaggtccagtagcctgctgcagtagaaatcgtgcaacggcggttccgagatgtcctccacatacagagtggtggggctcaccggggcatctttgtcggcgtcggcgttaaattcgctgatcgactcccggagcaaccgctgagtgtcagcaggaatacgctggcgaacattacccgccgcaaccagttgaaaatgttgccagcccctgacccagatggatttagcagtggaagcccttttcagtgacccagcaggtactatttgtttcatgttgcgctcttcctcttcattgggcacgggcacatccaaggctacatccgtatctgagccagtagtgcaacaggacccggaaatagcctgcaactctgcggccagactggcggggataactgccctgactgtggtgcggtgatgggcgacgcaacataccaggaaacattcgatgaagagagtcaggttgaagctaaggaaaatgatccggaggaaatggaaggcgctgaacatccgcacaatgagaatgctggcagcgatccgcatcgcgattgcagtgatgaaactggcgaagtcgcagatcccgtaatcgtagaagacatagagccaggtatttattacggaatttcgaatgagaattaccacgcgggtcccggtatcagtaagtctcagctcgatgacattgctgatactccggcattttgcatagttgccgattagaaccccgttggcggtagcaacgcgttcagcgaatcgaactttaggtgcatccataagcatttttggctccagccgttgcttttgctctgccaggtcggcagccaaacggagagcttcagggagactctgcggaatagcaggttgtaatcttccggttcgatagtcgataaatgtctggtttaccttcagccgaaacgcgggagaaatccagcctgcgtactccacagcgagcaattcatgggcaaaagtgccgccgccacggccttcgaccggtaaacgagtcgtgaagaaatcctgctccaatgctgtatcgatcacggtccctttaagggtgaaaaccccacgagataagtatcctagtatggggacgttcctgcgttcaccggttgcgatcagaattccgttatcacgcaaccaggtgaagagatagttttggcccaggccgagcactttggcatagttgccgattagaaccccgctggcggtagcaacgcgttcagcgaattcgactttaggtgcatccataagcattttttgctccagccgttgcttttgctctgccaggtcggcagccaaacggagagcttcagggagactctgcggaatagcaggttgtaatcttccggttcgatagtcgataaatgtctggtttaccttcagccgaaacgcgggagaaatccagcctgcgtactccacagcgagcaattcatgggcaaaagtgccgccgccacggccttcgactttggcatagtcgccgattagaaccccgctgtcggtagcaacgcgttcagcgaattcgactttaggtgcatccataagcattgtttgctccagccgttgcttatgctctgccaggtcgtcagccttcagccgaaacgcgggagaaatccagcctgcgtactccacagcgagcatttcatgggcaatagtgccgccgcctcggccttcgacctggttgtccacatttgtttggtttttcgacat

SEQ ID NO: 24066 - DNA, 777 bp, Homo sapiens
  SIMILAR (1)..(378): 971254mologous to Cloning vector pSacBII RepL,accession number U09128,Smith-Waterman Score=609.
atgagcgattttactttttctggctatgaattggcctgctttgtaacacactccggtctatcccgtagcgccgggcatatcctgtcgcaatgtgcaaatctcgcggcaacaaccagtgaatacttcattcacaagcctcaccgcctgatcgcggcagaaactggttatagccaatcaaccgtcgttcgtgcattccgtgaagctgtaaacaaaggaattctgtctgtagagattgttatcggcgatcaccgtgaacgtcgcgctaacctgtaccggtttacaccatcctttttggccttcgcacaacaagccaaaaatgcgctgatagaaagcaaattaaagatctcttcagcggcaaccaagaagatcgtcgttttgccaggtgaccacgttggtcaagaaatcacagccgaagccattaaggttcttaaagctatttctgatgttcgttccaatgtcaagttcgatttcgaaaatcatttaattggtgagaaaattggcagtcttgatcaggctgttaaggaacgtgataagtcaataatggatcttaaccagaccattgagacgatgaacaaagcagagcaacattttcacagccaggaagtgaaaaatgaatcagaacaagccaagtatgctgacaggcaaatggaacgaaaagctgaagttcagaaacaactggttgcggcgggtaatgttcgccagcgtattcctgctgacactcagcggttgctccgggagtcgatcagcgaatttaacgccgacgccgacaaaggttaa

SEQ ID NO: 24067 - DNA, 2124 bp, Homo sapiens; identical to SEQ ID NO: 10378
  SIMILAR (407)..(562): 1001254mologous to synthetic construct tet protein,accession number M20189,Smith-Waterman Score=264.

SEQ ID NO: 24068 - DNA, 851 bp, Homo sapiens
  SIMILAR (39)..(584): 951254mologous to Bacteriophage P1 non-essential to replication and lytic development,accession number X15639,Smith- Waterman Score=882.
  misc_feature (1)...(851): n = a,t,c or g
gaaacagctatgacccatggatttacgccaagcttgcatgcctgcaggtcgaaggccgtggcggcggcacttttgcccatgaattgctcgctgtggagtacgcaggctggatttctcccgcgtttcggctgaaggtaaaccagacatttatcgactatcgaaccggaagattacaacctgctattccgcagagtctccctgaagctctccgtttggctgccgacctggcagagcaaaagcaacggctggagcaaaaaatgcttatggatgcacctaaagtcgaattnnntgaacgcgttgctaccgccagcggggttctaatcggcaactatgccaaagtgctcggcctgggccaaaactatctcttcacctggttgcgtgataacggaattctgatcgcaaccggtgaacgcaggaacgtccccaaacaagaatacatatctcgtgggtatttcacccttaaagaaaccgtgatcgatacaagcaatggaagcaggatttctttcacgactcgtataaccggcaaaggtcagcagtggctgatgaagcgattgcttgatgctggtgtgctggatgacgtggcaataaagaataagaagtcacaagttaaaaaaacaaaaagatcagtttccggcggtgccggaacaaccagcctcaaaaaattgacttcatggatcgctaaggcaaaagcaaaggctgacaatctgcggttatccaaaaaacgcactcaaaaacatgagttcaagcagaaagtagaggcggctgcgcggaaatatgcttacctgaagaacaagcgttcgcctgatattggcgggatatcaaacttcgataacctaccgcattgcatgacg

SEQ ID NO: 24069 - DNA, 694 bp, Homo sapiens; identical to SEQ ID NO: 10354
  SIMILAR (14)..(421): 811254mologous to Bacteriophage P1 non-essential to replication and lytic development,accession number X15639,Smith- Waterman Score=531.

SEQ ID NO: 24070 - DNA, 630 bp, Homo sapiens; identical to SEQ ID NO: 10357
  SIMILAR (1)..(387): 981254mologous to Bacteriophage P1 non-essential to replication and lytic development,accession number X15639,Smith- Waterman Score=640.
  misc_feature (1)...(630): n = a,t,c or g

SEQ ID NO: 24071 - DNA, 4458 bp, Homo sapiens
  SIMILAR (1153)..(2685): 951254mologous to Homo sapiens The human homolog of mouse Cux -2,accession number AB006631,Smith-Waterman Score=2537.
atgattgatgtcttagggccggagaaacgcagacggcgtaccacacaggaaaagatcgcaattgttcagcagagctttgaaccggggatgacggtctccctcgttgcccggcaacatggtgtagcagccagccagttatttctctggcgtaagcaataccaggaaggaagtcttactgctgtcgccgccggagaacaggttgttcctgcctctgaacttgctgccgccatgaagcagattaaagaactccagcgcctgctcggcaagaaaacgatggaaaatgaactcctcaaagaagccgttgaatatggacgggcaaaaaagtggatagcgcacgcgcccttattgcccggggatggggaacgaaccgatgactggatggatggccgccgcagtcgtcacactgatgatacggatgtgcttctccgtatacaccatgttatcggagagctgccaacgtatggttatcgtcgggtatgggcgctgcttcgcagacaggcagaacttgatggtatgcctgcgatcaatgccaaacgtgtttaccggatcatgcgccagaatgcgctgttgcttgagcgaaaacctgctgtaccgccatcgaaacgggcacatacaggcagagtggccgtgaaagaaagcaatcagcgatggtgctctgacgggttcgagttctgctgtgataacggagagagactgcgtgtcacgttcgcgctggactgctgtgatcgtgaggcactgcactgggcggtcactaccggcggcttcaacagtgaaacagtacaggacgtcatgctgggagcggtggaacgccgcttcggcaacgatcttccgtcgtctccagtggagtggctgacggataatggttcatgctaccgggctaatgaaacacgccagttcgcccggatgttgggacttgaaccgaagaacacggcggtgcggagtccggagagtaacggaatagcagagagcttcgtgaaaacgataaagcgtgactacatcagtatcatgcccaaaccagacgggttaacggcagcaaagaaccttgcagaggcgttcgagcattataacgaatggcatccgcatagtgcgctgggttatcgctcgccacgggaatatctgcggcagcgggcttgtaatggggccagaagaccccctgtctcccagccccgggcagcccctgctgggccccagcttggggctgacggcactcggactttctcgctgtcccccttccccagcctggcatcaggggagagactgatgatgcccccagccgccttcaagggagaggcgggcggcctgctggtgttccccccagccttctatggcgccaagccccccacagcccctgccaccccggcccctggccctgagccactgggcggtcctgagcccgcggatggtggtgggggcggagcggcggggcccggggcagaggaggagcagctggacacggcagagatcgccttccaggtgaaggagcagctgctgaaacacaacatcgggcagcgggtgtttgggcattacgtgctggggctgtcgcagggctcggtcagcgagatcctagcccggcccaagccctggcgcaagctcacggtgaagggcaaggagcccttcatcaagatgaagcagttcctgtcggatgagcagaatgtactggcgctcaggaccatccaagtgcggcagcgaggcagcatcaccccgagaatccgcacgcctgagacaggctcagacgacgccatcaagagcattctagagcaggccaagaaggagatcgagtcgcagaagggcggcgagcccaagacctcggtggccccgctgagcatcgccaacggcacgacccccgccagcacctcggaggacgccatcaagagcatcctggagcaggcacgccgtgagatgcaggcgcaacagcaggcgctgctggagatggaggtggcgcccaggggccgctcggtgcccccctcgcccccggagcggccatcactggccaccgcgagccagaacggggccccggccttggtgaagcaggaggagggcagcgggggccccgcgcaggcgccgctcccgcatcatccgcaagtcaagtccgagatcggcgacgccggctacttcgaccaccactgggcctccgaccgcggcctgctcagccgcccctacgcctccgtgtcgccctcgctgtcctcctcctcctcctctggctactctggccagcccaacggccgcgcctggccccgcggggacgaggcccctgtgccccccgaggacgaggcggcggcaggggcggaggacgaaccccccaggacgggcgagctcaaggctgagggcgcgacggccgaggcgggcgcgcggctgccctactacccggcctacgtgccgcgcaccctgaagcccaccgtgccgccgctgacccccgagcagtacgagctgtacatgtaccgtgaggtagacacgctggagctcacccgccaggtcaaggagaagctggccaagaacggcatctgccagaggatcttcggggagaaggtgctgggcctgtcacagggcagcgtgagcgacatgctgtcccggccgaagccatggagcaagctgacgcagaaggggcgggagcccttcatccgcatgcagctgtggctctctgaccagctcggccaggcagtgggccagcagcctggtgcctcccagggccgtggcggcggcacttttgcccatgaattgctcgctgtggagtacgcaggctggatttctcccgcgtttcggctgaaggtaaaccagacatttatcgactatcgaaccggaagattacaacctgctattccgcagagtctccctgaagctctccgtttggctgccgacctggcagagcaaaagcaacggctggagcaaaaaatgcttatggatgcacctaaagtcgaattcgctgaacgcgttgctaccgccagcggggttctaatcggcaactatgccaaagtgctcggcctgggccaaaactatctcttcacctggttgcgtgataacggaattctgatcgcaaccggtgaacgcaggaacgtccccaaacaagaatacatatctcgtgggtatttcacccttaaagaaaccgtgatcgatacaagcaatggaagcaggatttctttcacgactcgtataaccggcaaagacgtagtaagaaccaccagcattgtaatgctggctaaagtcactttcctgagctgtataacgatgagcgattttactttttctggctatgaattggcctgctttgtaacacactccggtctatcccgtagcgccgggcatatcctgtcgcaatgtgcaaatctcgcggcaacaaccagtgaatacttcattcacaagcctcaccgcctgatcgcggcagaaactggttatagccaatcaaccgtcgttcgtgcattccgtgaagctgtaaacaaaggaattctgtctgtagagattgttatcggcgatcaccgtgaacgtcgcgctaacctgtaccggtttacaccatcctttttggccttcgcacaacaagccaaaaatgcgctgatagaaagcaaattaaagatctcttcagcggcaaccaaggttaaagctgttctcgctaagacattggctttatttaattttttatccacacccccatgtcaaaatgataccccctccccctgtcaggatgacgtggcaataaagaataagaagtcacaagttaaaaaaacaaaaagatcagtttccggcggtgccggaacaaccagcctcaaaaaattgacttcatggatcgctaaggcaaaagcaaaggctgacaatctgcggttatccaaaaaacgcactcaaaaacatgagttcaagcagaaagtagaggcggctgcgcggaaatatgcttacctgaagaacaagcgttcgcctgatattggcgggatatcaaacttcgataacctaccgcattgcatgacggtaaacgaagctcttaatgcggttttagccaaaaataaagataacgaacaatggggtgcggttgctggcgcctatatcgccgacatcaccgatggggaagatcgggctcgccacttcgggctcatgagcgcttgtttcggcgtgggtatggtggcaggccccgtggccgggggactgttgggcgccatctccttgcatgcaccattccttgcggcggcggtgctcaacggcctcaacctactactgggctgcttcctaatgcaggagtcgcataagggagagcgtcgaggagaacttctaaagatcgtcgttttgccaggtgaccacgttggtcaagaaatcacagccgaagccattaaggttcttaaagctatttctgatgttcgttccaatgtcaagttcgatttcgaaaatcatttaattggtggtgctgctatcgacctgcaggggggggggggaaagccacgttgtgtctcaaaatctctgatgttacattgcacaagataa

SEQ ID NO: 24072 - DNA, 1650 bp, Homo sapiens; identical to SEQ ID NO: 13319
  SIMILAR (838)..(1353): 891254mologous to Drosophila melanogaster Sog,accession number U18774,Smith-Waterman Score=783.

SEQ ID NO: 24073 - DNA, 1905 bp, Homo sapiens
  SIMILAR (634)..(1467): 991254mologous to Cloning vector pSacBII RepL,accession number U09128,Smith-Waterman Score=1401.
atgccagagacggctgcagtcctgtgcctggcctggccggcctcggtgctacccgccacccctcacgtcttcccttctggctccttgtacgtcactggtcagtccgcgaaccctgactctccatcagtcgaaggccgtggcggcggcacttttgcccatgaattgctcgctgtggagtacgcaggctggatttctcccgcgtttcggctgaaggtaaaccagacatttatcgactatcgaaccggaagattacaacctgctattccgcagagtctccctgaagctctccgtttggctgccgacctggcagagcaaaagcaacggctggagcaaaaaatgcttatggatgcacctaaagtcgaattcgctgaacgcgttgctaccgccagcggggttctaatcggcaactatgccaaagtgctcggcctgggccaaaactatctcttcacctggttgcgtgataacggaattctgatcgcaaccggtgaacgcaggaacgtccccaaacaagaatacatatctcgtgggtatttcacccttaaagaaaccgtgatcgatacaagcaatggaagcaggatttctttcacgactcgtataaccggcaaagacgtagtaagaaccaccagcattgtaatgctggctaaagtcactttcctgagctgtataacgatgagcgattttactttttctggctatgaattggcctgctttgtaacacactccggtctatcccgtagcgccgggcatatcctgtcgcaatgtgcaaatctcgcggcaacaaccagtgaatacttcattcacaagcctcaccgcctgatcgcggcagaaactggttatagccaatcaaccgtcgttcgtgcattccgtgaagctgtaaacaaaggaattctgtctgtagagattgttatcggcgatcaccgtgaacgtcgcgctaacctgtaccggtttacaccatcctttttggccttcgcacaacaagccaaaaatgcgctgatagaaagcaaattaaagatctcttcagcggcaaccaaggttaaagctgttctcgctaagacattggctttatttaattttttatccacacccccatgtcaaaatgataccccctccccctgtcaggatgacgtggcaataaagaataagaagtcacaagttaaaaaaacaaaaagatcagtttccggcggtgccggaacaaccagcctcaaaaaattgacttcatggatcgctaaggcaaaagcaaaggctgacaatctgcggttatccaaaaaacgcactcaaaaacatgagttcaagcagaaagtagaggcggctgcgcggaaatatgcttacctgaagaacaagcgttcgcctgatattggcgggatatcaaacttcgataacctaccgcattgcatgacggtaaacgaagctcttaatgcggttttagccaaaaataaagataacgaacaatggggtgcggttgctggcgcctatatcgccgacatcaccgatggggaagatcgggctcgccacttcgggctcatgagcgcttgtttcggcgtgggtatggtggcaggccccgtggccgggggactgttgggcgccatctccttgcatgcaccattccttgcggcggcggtgctcaacggcctcaacctactactgggctgcttcctaatgcaggagtcgcataagggagagcgtcgaggagaacttctaaagatcgtcgttttgccaggtgaccacgttggtcaagaaatcacagccgaagccattaaggttcttaaagctatttctgatgttcgttccaatgtcaagttcgatttcgaaaatcatttaattggtggtgctgctatcgacctgcaggggggggggggaaagccacgttgtgtctcaaaatctctgatgttacattgcacaagataa

SEQ ID NO: 24074 - DNA, 2901 bp, Homo sapiens
  SIMILAR (1630)..(2463): 991254mologous to Cloning vector pSacBII RepL,accession number U09128,Smith-Waterman Score=1401.
atggccccggcgcccctgggactcggccccagccatctcaccacccgcgccagggggcggggctcccacggcccggccccgggttcgggctccgttggccgagggggccgtacggaggtggcagctgtgggaggaggcggcgtggaaggccgaggagctcaagcccggaccaatccccacgttccgggccgcgaccctgaccctgcagcgtaccgggaagcgaaaccggccggatgggccgctgagcccgaatcgggcactggtgaggctcgggcagagctggcagccccggacgggagcgggcccacggggctgcagggtctgggagcccgggatgcgggtgtggagccccctggagctgagatcaggatgttccgcttcatgagggacgtggagcctgaggatcccatgttcctgatggatccctttgctattcaccgtcagcatatgagccgtatgttgtcaggtggctttggatatagccccttcctcagcatcacagatggcaacatgccagggaccaggcctgccagccgccggatgcagcagtcgggtggtttcatggacatgtttgggatgatgaatgacatgattggaaacatggaacacatgacagctggaggcaattgccagaccttctcatcttccactgtcatctcctactccaatacgggtgatggtgcccccaaggtctaccaagagacatcagagatgcgctcggcaccaggcgggatccgggagacacggaggactgttcgggattcagacagtggactggagcagatgtccattgggcatcacatccgggacagggctcacatcctccagcgctcccgaaaccatcgcacgggggaccaggaggagcggcaggactatatcaacctggatgagaccttcgccgctttggcccgaaaagctgtggctcgctcgcacatcggcctccaggagccaggccgcacacaggcctcatgtccgctctgtcctttccaggtcactcacctccctggacctgagttatgtggggcccttctagccacaaaatatcaggcccagcctctcaacccggattttagttccagtgcccacacgcgcatgtgtagtcttgagtgtgactgcggcagagtcgaaggccgtggcggcggcacttttgcccatgaattgctcgctgtggagtacgcaggctggatttctcccgcgtttcggctgaaggtaaaccagacatttatcgactatcgaaccggaagattacaacctgctattccgcagagtctccctgaagctctccgtttggctgccgacctggcagagcaaaagcaacggctggagcaaaaaatgcttatggatgcacctaaagtcgaattcgctgaacgcgttgctaccgccagcggggttctaatcggcaactatgccaaagtgctcggcctgggccaaaactatctcttcacctggttgcgtgataacggaattctgatcgcaaccggtgaacgcaggaacgtccccaaacaagaatacatatctcgtgggtatttcacccttaaagaaaccgtgatcgatacaagcaatggaagcaggatttctttcacgactcgtataaccggcaaagacgtagtaagaaccaccagcattgtaatgctggctaaagtcactttcctgagctgtataacgatgagcgattttactttttctggctatgaattggcctgctttgtaacacactccggtctatcccgtagcgccgggcatatcctgtcgcaatgtgcaaatctcgcggcaacaaccagtgaatacttcattcacaagcctcaccgcctgatcgcggcagaaactggttatagccaatcaaccgtcgttcgtgcattccgtgaagctgtaaacaaaggaattctgtctgtagagattgttatcggcgatcaccgtgaacgtcgcgctaacctgtaccggtttacaccatcctttttggccttcgcacaacaagccaaaaatgcgctgatagaaagcaaattaaagatctcttcagcggcaaccaaggttaaagctgttctcgctaagacattggctttatttaattttttatccacacccccatgtcaaaatgataccccctccccctgtcaggatgacgtggcaataaagaataagaagtcacaagttaaaaaaacaaaaagatcagtttccggcggtgccggaacaaccagcctcaaaaaattgacttcatggatcgctaaggcaaaagcaaaggctgacaatctgcggttatccaaaaaacgcactcaaaaacatgagttcaagcagaaagtagaggcggctgcgcggaaatatgcttacctgaagaacaagcgttcgcctgatattggcgggatatcaaacttcgataacctaccgcattgcatgacggtaaacgaagctcttaatgcggttttagccaaaaataaagataacgaacaatggggtgcggttgctggcgcctatatcgccgacatcaccgatggggaagatcgggctcgccacttcgggctcatgagcgcttgtttcggcgtgggtatggtggcaggccccgtggccgggggactgttgggcgccatctccttgcatgcaccattccttgcggcggcggtgctcaacggcctcaacctactactgggctgcttcctaatgcaggagtcgcataagggagagcgtcgaggagaacttctaaagatcgtcgttttgccaggtgaccacgttggtcaagaaatcacagccgaagccattaaggttcttaaagctatttctgatgttcgttccaatgtcaagttcgatttcgaaaatcatttaattggtggtgctgctatcgacctgcaggggggggggggaaagccacgttgtgtctcaaaatctctgatgttacattgcacaagataa

SEQ ID NO: 24075 - DNA, 2607 bp, Homo sapiens; identical to SEQ ID NO: 10418
  SIMILAR (1417)..(2169): 971254mologous to Cloning vector pSacBII RepL,accession number U09128,Smith-Waterman Score=1229.

SEQ ID NO: 24076 - DNA, 1254 bp, Homo sapiens; identical to SEQ ID NO: 10400
  SIMILAR (238)..(810): 771254mologous to Bacteriophage P1 non-essential to replication and lytic development,accession number X15639,Smith- Waterman Score=707.
  misc_feature (1)...(1254): n = a,t,c or g

SEQ ID NO: 24077 - DNA, 2949 bp, Homo sapiens
  SIMILAR (1678)..(2511): 991254mologous to Cloning vector pSacBII RepL,accession number U09128,Smith-Waterman Score=1401.
atgcccttgagagccttcaacccagtcagctccttccggtgggcgcggggcatgactatcgtcgccgcacttatgactgtcttctttatcatgcaactcgtaggacaggtgccggcagcgctctgggtcattttcggcgaggaccgctttcgctggagcgcgacgatgatcggcctgtcgcttgcggtattcggaatcttgcacgccctcgctcaagccttcgtcactggtcccgccaccaaacgtttcggcgagaagcaggccattatcgccggcatggcggccgacgcgctgggctacgtcttgctggcgttcgcgacgcgaggctggatggccttccccattatgattcttctcgcttccggcggcatcgggatgcccgcgttgcaggccatgctgtccaggcaggtagatgacgaccatcagggacagcttcaaggatcgctcgcggctcttaccagcctaacttcgatcattggaccgctgatcgtcacggcgatttatgccgcctcggcgagcacatggaacgggttggcatggattgtaggcgccgccctataccttgtctgcctccccgcgtttgcgtcgcggtgcatggagccgggccacctcgacctgaatggaagccggcggcacctcgctaacggattcaccactccaagaattggagccaatcaattcttgcggagaactgtgaatgcgcaaaccaacccttggcagaacatatccatcgcgtccgccatctccagcagccgcacgcggcgcatctcgggcagcgttgggtcctggccacgggtgcgcatgatcgtgctcctgtcgttgaggacccggctaggctggcggggttgccttactgtaacccgtatcgtgagcatcctctctcgtttcatcggtatcattacccccatgaacagaaatcccccttacacggaggcatcagtgaccaaacaggaaaaaaccgcccttaacatggcccgctttatcagaagccagacattaacgcttctggagaaactcaacgagctggacgcggatgaacaggcagacatctgtgaatcgcttcacgaccacgctgatgagctttaccgcagctgcctcgcgcgtttcggtgatgacggtgaaaactctgacacatgcagctcccggagacggtcacagcttgtctgtaagcggatgccgggagcagacaagcccgtcaggctgttcacgggatgttggcggctaaaccagacatttatcgactatcgaaccggaagattacaacctgctattccgcagagtctccctgaagctctccgtttggctgccgacctggcagagcaaaagcaacggctggagcaaaaaatgcttatggatgcacctaaagtcgaattcgctgaacgcgttgctaccgccagcggggttctaatcggcaactatgccaaagtgctcggcctgggccaaaactatctcttcacctggttgcgtgataacggaattctgatcgcaaccggtgaacgcaggaacgtccccaaacaagaatacatatctcgtgggtatttcacccttaaagaaaccgtgatcgatacaagcaatggaagcaggatttctttcacgactcgtataaccggcaaaggtcagcagtggctgatgaagcgattgcttgatgctgacgtagtaagaaccaccagcattgtaatgctggctaaagtcactttcctgagctgtataacgatgagcgattttactttttctggctatgaattggcctgctttgtaacacactccggtctatcccgtagcgccgggcatatcctgtcgcaatgtgcaaatctcgcggcaacaaccagtgaatacttcattcacaagcctcaccgcctgatcgcggcagaaactggttatagccaatcaaccgtcgttcgtgcattccgtgaagctgtaaacaaaggaattctgtctgtagagattgttatcggcgatcaccgtgaacgtcgcgctaacctgtaccggtttacaccatcctttttggccttcgcacaacaagccaaaaatgcgctgatagaaagcaaattaaagatctcttcagcggcaaccaaggttaaagctgttctcgctaagacattggctttatttaattttttatccacacccccatgtcaaaatgataccccctccccctgtcaggatgacgtggcaataaagaataagaagtcacaagttaaaaaaacaaaaagatcagtttccggcggtgccggaacaaccagcctcaaaaaattgacttcatggatcgctaaggcaaaagcaaaggctgacaatctgcggttatccaaaaaacgcactcaaaaacatgagttcaagcagaaagtagaggcggctgcgcggaaatatgcttacctgaagaacaagcgttcgcctgatattggcgggatatcaaacttcgataacctaccgcattgcatgacggtaaacgaagctcttaatgcggttttagccaaaaataaagataacgaacaatggggtgcggttgctggcgcctatatcgccgacatcaccgatggggaagatcgggctcgccacttcgggctcatgagcgcttgtttcggcgtgggtatggtggcaggccccgtggccgggggactgttgggcgccatctccttgcatgcaccattccttgcggcggcggtgctcaacggcctcaacctactactgggctgcttcctaatgcaggagtcgcataagggagagcgtcgaggagaacttctaaagatcgtcgttttgccaggtgaccacgttggtcaagaaatcacagccgaagccattaaggttcttaaagctatttctgatgttcgttccaatgtcaagttcgatttcgaaaatcatttaattggtggtgctgctatcgacctgcaggggggggggggaaagccacgttgtgtctcaaaatctctgatgttacattgcacaagataa

SEQ ID NO: 24078 - DNA, 1533 bp, Homo sapiens; identical to SEQ ID NO: 10386
  SIMILAR (1)..(531): 1001254mologous to synthetic construct tet protein,accession number M20189,Smith-Waterman Score=889.

SEQ ID NO: 24079 - DNA, 1989 bp, Homo sapiens; identical to SEQ ID NO: 10420
  SIMILAR (718)..(1551): 991254mologous to Cloning vector pSacBII RepL,accession number U09128,Smith-Waterman Score=1401.

SEQ ID NO: 24080 - DNA, 2265 bp, Homo sapiens
  SIMILAR (1183)..(2016): 991254mologous to Cloning vector pSacBII RepL,accession number U09128,Smith-Waterman Score=1401.
atggatgaagctggaaacaatcattctcatcaaactaacacaggaacagaaaatcaagcaccgcatgttctcactcataagtgggagttgtacaatgagaacacatggacacagggaggggaaaatcacactgaggactgtcgggggatgcggggaggaatagcattagtagaaatacctaatgtagatgacgggttgatgcatgcagcaaactaccatggcacggcatgtgatgggggtgtggctcacttatgtggtgccctgctgctccagcccctaggacaagccacagttctgacttttacgactgcacttctggcaggaggagcgactcaagccttcgcgaaagaaaataaccaaaaagcatacaaagaaacgtacggcgtctctcatattacacgccatgatatgctgcagatccctaaacagcagcaaaacgaaaaataccaagtgcctcaattcgatcaatcaacgattaaaaatattgagtctgcaaaaggacttgatgtgtgggacagctggccgctgcaaaacgctgacggaacagtagctgaatacaacggctatcacgttgtgtttgctcttgcgggaagcccgaaagacgctgatgacacatcaatctacatgttttatcaaaaggtcgaaggccgtggcggcggcacttttgcccatgaattgctcgctgtggagtacgcaggctggatttctcccgcgtttcggctgaaggtaaaccagacatttatcgactatcgaaccggaagattacaacctgctattccgcagagtctccctgaagctctccgtttggctgccgacctggcagagcaaaagcaacggctggagcaaaaaatgcttatggatgcacctaaagtcgaattcgctgaacgcgttgctaccgccagcggggttctaatcggcaactatgccaaagtgctcggcctgggccaaaactatctcttcacctggttgcgtgataacggaattctgatcgcaaccggtgaacgcaggaacgtccccaaacaagaatacatatctcgtgggtatttcacccttaaagaaaccgtgatcgatacaagcaatggaagcaggatttctttcacgactcgtataaccggcaaaggtcagcagtggctgatgaagcgattgcttgatgctgacgtagtaagaaccaccagcattgtaatgctggctaaagtcactttcctgagctgtataacgatgagcgattttactttttctggctatgaattggcctgctttgtaacacactccggtctatcccgtagcgccgggcatatcctgtcgcaatgtgcaaatctcgcggcaacaaccagtgaatacttcattcacaagcctcaccgcctgatcgcggcagaaactggttatagccaatcaaccgtcgttcgtgcattccgtgaagctgtaaacaaaggaattctgtctgtagagattgttatcggcgatcaccgtgaacgtcgcgctaacctgtaccggtttacaccatcctttttggccttcgcacaacaagccaaaaatgcgctgatagaaagcaaattaaagatctcttcagcggcaaccaaggttaaagctgttctcgctaagacattggctttatttaattttttatccacacccccatgtcaaaatgataccccctccccctgtcaggatgacgtggcaataaagaataagaagtcacaagttaaaaaaacaaaaagatcagtttccggcggtgccggaacaaccagcctcaaaaaattgacttcatggatcgctaaggcaaaagcaaaggctgacaatctgcggttatccaaaaaacgcactcaaaaacatgagttcaagcagaaagtagaggcggctgcgcggaaatatgcttacctgaagaacaagcgttcgcctgatattggcgggatatcaaacttcgataacctaccgcattgcatgacggtaaacgaagctcttaatgcggttttagccaaaaataaagataacgaacaatggggtgcggttgctggcgcctatatcgccgacatcaccgatggggaagatcgggctcgccacttcgggctcatgagcgcttgtttcggcgtgggtatggtggcaggccccgtggccgggggactgttgggcgccatctccttgcatgcaccattccttgcggcggcggtgctcaacggcctcaacctactactgggctgcttcctaatgcaggagtcgcataagggagagcgtcgaggagaacttctagtatatctacatacctaa

SEQ ID NO: 24081 - DNA, 1014 bp, Homo sapiens
  SIMILAR (4)..(468): 1001254mologous to Homo sapiens epithelial protein lost in neoplasm beta,accession number AF198454,Smith-Waterman Score=815.
atgaacaccgaaaatctctcccagcactttagaaaggggaccctgactgtgttaaagaagaagtgggagaacccagggctgggagcagagtctcacacagactctctacggaacagcagcactgagattaggcacagagcagaccatcctcctgctgaagtgacaagccacgctgcttctggagccaaagctgaccaagaagaacaaatccaccccagatctagactcaggtcacctcctgaagccctcgttcagggtcgatatccccacatcaaggacggtgaggatcttaaagaccactcaacagaaagtaaaaaaatggaaaattgtctaggagaatccaggcatgaagtagaaaaatcagaaatcagtgaaaacacagatgcttcgggcaaaatagagaaatataatgttccgctgaacaggcttaagatgatgtttgagaaaggtgaaccaactcaaactaagacaagctgtgaccgtctccgggagctgcatgtgtcagaggttttcaccgtcatcaccgaaacgcgcgaggcagctgcggtaaagctcatcagcgtggtcgtgaagcgattcacagatgtctgcctgttcatccgcgtccagctcgttgagtttctccagaagcggggatttctgttcatgggggtaatgataccgatgaaacgagagaggatgctcacgatacgggttactgatgatgaacatgcccggttactggaacgttgtgagggtaaacaactggcggtatggatgcggcgggaccagagaaaaatcactcagggtcaatgccagcgcttcgttaatacagatgtaggtgttccacagggtagccagcagcatcctgcgatgcagatccggaacataatggtgcagggcgctgacttccgcgtttccagactttacgaaacacggaaaccgaagaccattcatgttgttgctcaggtcgcagacgttttgcagcagcagtcgcttcacgttcgctcgcgtatcggtgattcattctgctaa

SEQ ID NO: 24082 - DNA, 1158 bp, Homo sapiens
  SIMILAR (334)..(924): 1001254mologous to Cloning vector pSacBII RepL,accession number U09128,Smith-Waterman Score=993.
atgcttattgaggcacctaaagtcgaattcgctgaacgcgttgctaccgccagcggggttctaatcggcaactatgccaaagtgctcggcctgggccaaaactatctcttcacctggttgcgtgataacggaattctgatcgcaaccggtgaacgcaggaacgtccccaaacaagaatacatatctcgtgggtatttcacccttaaagaaaccgtgatcgatacaagcaatggaagcaggatttctttcacgactcgtataaccggcaaaggtcagcagtggctgatgaagcgattgcttgatgctgacgtagtaagaaccaccagcattgtaatgctggctaaagtcactttcctgagctgtataacgatgagcgattttactttttctggctatgaattggcctgctttgtaacacactccggtctatcccgtagcgccgggcatatcctgtcgcaatgtgcaaatctcgcggcaacaaccagtgaatacttcattcacaagcctcaccgcctgatcgcggcagaaactggttatagccaatcaaccgtcgttcgtgcattccgtgaagctgtaaacaaaggaattctgtctgtagagattgttatcggcgatcaccgtgaacgtcgcgctaacctgtaccggtttacaccatcctttttggccttcgcacaacaagccaaaaatgcgctgatagaaagcaaattaaagatctcttcagcggcaaccaaggttaaagctgttctcgctaagacattggctttatttaattttttatccacacccccatgtcaaaatgataccccctccccctgtcaggatgacgtggcaataaagaataagaagtcacaagttaaaaaaacaaaaagatcagtttccggcggtgccggaacaaccagcctcaaaaaattgacttcatggatcggtgacactatagaaggatccgcggaattcttaggcctgtttggagagttaagcaaaataaatgcatttgatactcctgattcaccgctcttgagaggcaaggagtttagtgactctatacataatacctttaaccatctgtggagaaccaaggaatataatgaagttggttgtttgctcctaaattcactggacaaagtgatgaaagaaaatgatgaacttaaagtaaaataa

SEQ ID NO: 24083 - DNA, 1252 bp, Homo sapiens
  SIMILAR (1252)..(647): 731254mologous to Bacteriophage P1 non-essential to replication and lytic development,accession number X15639,Smith- Waterman Score=710.
ctgagccagtagtgcaacaggacccggaaatagcctgcaactctgcggccagactggcggggataactgccctgactgtggtgcggtgatgggcgacgcaacataccaggaaacattcgatgaagagagtcaggttgaagctaaggaaaatgatccggaggaaatggaaggcgctgaacatccgcacaatgagaatgctggcagcgatccgcatcgcgattgcagtgatgaaactggcgaagtcgcagatcccgtaatcgtagaagacatagagccaggtatttattacggaatttcgaatgagaattaccacgcgggtcccggtatcagtaagtctcagctcgatgacattgctgatactccggcattttgcatagttgccgattagaaccccgttggcggtagcaacgcgttcagcgaatcgaactttaggtgcatccataagcatttttggctccagccgttgcttttgctctgccaggtcggcagccaaacggagagcttcagggagactctgcggaatagcaggttgtaatcttccggttcgatagtcgataaatgtctggtttaccttcagccgaaacgcgggagaaatccagcctgcgtactccacagcgagcaattcatgggcaaaagtgccgccgccacggccttcgaccggtaaacgagtcgtgaagaaatcctgctccaatgctgtatcgatcacggtccctttaagggtgaaaaccccacgagataagtatcctagtatggggacgttcctgcgttcaccggttgcgatcagaattccgttatcacgcaaccaggtgaagagatagttttggcccaggccgagcactttggcatagttgccgattagaaccccgctggcggtagcaacgcgttcagcgaattcgactttaggtgcatccataagcattttttgctccagccgttgcttttgctctgccaggtcggcagccaaacggagagcttcagggagactctgcggaatagcaggttgtaatcttccggttcgatagtcgataaatgtctggtttaccttcagccgaaacgcgggagaaatccagcctgcgtactccacagcgagcaattcatgggcaaaagtgccgccgccacggccttcgactttggcatagtcgccgattagaaccccgctgtcggtagcaacgcgttcagcgaattcgactttaggtgcatccataagcattgtttgctccagccgttgcttatgctctgccaggtcgtcagc

SEQ ID NO: 24084 - DNA, 2931 bp, Homo sapiens
  SIMILAR (214)..(951): 931254mologous to synthetic construct tetracycline resistance,accession number V00083,Smith-Waterman Score=1137.
atgacgatgtgggtactacattgcgcattcacctactttgtgagcgcatggtcgaagcatggatatgcgcatgctgtgactgccaagatcctctacgccggacgcatcgtggccggcatcaccggcgccacaggtgcggttgctggcgcctatatcgccgacatcaccgatggggaagatcgggctcgccacttcgggctcatgagcgcttgtttcggcgtgggtatggtggcaggccccgtggccgggggactgttgggcgccatctccttgcatgcaccattccttgcggcggcggtgctcaacggcctcaacctactactgggctgcttcctaatgcaggagtcgcataagggagagcgtcgaccgatgcccttgagagccttcaacccagtcagctccttccggtgggcgcggggcatgactatcgtcgccgcacttatgactgtcttctttatcatgcaactcgtaggacaggtgccggcagcgctctgggtcattttcggcgaggaccgctttcgctggagcgcgacgatgatcggcctgtcgcttgcggtattcggaatcttgcacgccctcgctcaagccttcgtcactggtcccgccaccaaacgtttcggcgagaagcaggccattatcgccggcatggcggccgacgcgctgggctacgtcttgctggcgttcgcgacgcgaggctggatggccttccccattatgattcttctcgcttccggcggcatcgggatgcccgcgttgcaggccatgctgtccaggcaggtagatgacgaccatcagggacagcttcaaggatcgctcgcggctcttaccagcctaacttcgatcattggaccgctgatcgtcacggcgatttatgccgcctcggcgagcacatggaacgggttggcatggattgcttttgcaaaaagcttcacgctgccgcaagcactcagggcgcaagggctgctaaaggaagcggaacacgtagaaagccagtccgcagaaacggtgctgaccccggatgaatgtcagctactgggctatctggacaagggaaaacgcaagcgcaaagagaaagcaggttctccggccgcttgggtggagaggctattcggctatgactgggcacaacagacaatcggctgctctgatgccgccgtgttccggctgtcagcgcaggggcgcccggttctttttgtcaagaccgacctgtccggtgccctgaatgaactgcaggacgaggcagcgcggctatcgtggctggccacgacgggcgttccttgcgcagctgtgctcgacgttgtcactgaagcgggaagggactggctgctattgggcgaagtgccggggcaggatctcctgtcatctcaccttgctcctgccgagaaagtatccatcatggctgatgcaatgcggcggctgcatacgcttgatccggctacctgcccattcgaccaccaagcgaaacatcgcatcgagcgagcacgtactcggatggaagccggtcttgtcgatcaggatgatctggacgaagagcatcaggggctcgcgccagccgaactgttcgccaggctcaaggcgcgcatgcccgacggcgaggatctcgtcgtgacccatggcgatgcctgcttgccgaatatcatggtggaaaatggccgcttttctggattcatcgactgtggccggctgggtgtggcggaccgctatcaggacatagcgttggctacccgtgatattgctgaagagcttggcggcgaatgggctgaccgcttcctcgtgctttacgttcttctgagcgggactctggggttcgaaatgaccgaccaagcgacgcccaacctgccatcacgagatttcgattccaccgccgccttctatgaaaggttgggcttcggaatcgttttccgggacgccggctggatgatcctccagcgcggggatctcatgctggagttcttcgcccaccccgggctcgatcccctcgcgagttggttcagctgctgcctgaggctggacgacctcgcggagttctaccggcagtgcaaatccgtcggcatccaggaaaccagcagcggctatccgcgcatccatgcccccgaactgcaggagtggggaggcacgatggccgctttggtccggatctttgtgaaggaaccttacttctgtgaaacgctggtgaaagtaaaagatgctgaagatcagttgggtgcacgagtgggttacatcgaactggatctcaacagcggtaagatccttgagagttttcgccccgaagaacgttttccaatgatgagcacttttaaagttctgctatgtggcgcggtattatcccgtgttgacgccgggcaagagcaactcggtcgccgcatacactattctcagaatgacttggttgagtactcaccagtcacagaaaagcatcttacggatggcatgacagtaagagaattatgcagtgctgccataaccatgagtgataacactgcggccaacttacttctgacaacgatcggaggaccgaaggagctaaccgcttttttgcacaacatgggggatcatgtaactcgccttgatcgttgggaaccggagctgaatgaagccataccaaacgacgagcgtgacaccacgatgcctgcagcaatggcaacaacgttgcgcaaactattaactggcgaactacttactctagcttcccggcaacaattaatagactggatggaggcggataaagttgcaggaccacttctgcgctcggcccttccggctggctggtttattgctgataaatctggagccggggggcggagcctatggaaaaacgccagcaacgcggcctttttacggttcctggccttttgctggccttttgctcacatgttctttcctgcgttatcccctgattctgtggataaccgtattaccgcctttgagtga

SEQ ID NO: 24085 - DNA, 2562 bp, Homo sapiens
  SIMILAR (1207)..(2559): 1001254mologous to Cloning vector pBACe3.6 levansucrase,accession number U80929,Smith-Waterman Score=2385.
atgcccttgagagccttcaacccagtcagctccttccggtgggcgcggggcatgactatcgtcgccgcacttatgactgtcttctttatcatgcaactcgtaggacaggtgccggcagcgctctgggtcattttcggcgaggaccgctttcgctggagcgcgacgatgatcggcctgtcgcttgcggtattcggaatcttgcacgccctcgctcaagccttcgtcactggtcccgccaccaaacgtttcggcgagaagcaggccattatcgccggcatggcggccgacgcgctgggctacgtcttgctggcgttcgcgacgcgaggctggatggccttccccattatgattcttctcgcttccggcggcatcgggatgcccgcgttgcaggccatgctgtccaggcagcctaacttcgatcattggaccgctgatcgtcacggcgatttatgccgcctcggcgagcacatggaacgggttggcatggattgtaggcgccgccctataccttgtctgcctccccgcgttgcgtcgcggtgcatggagccgggccacctcgacctgaatggaagccggcggcacctcgctaacggattcaccactccaagaattggagccaatcaattcttgcggagaactgtgaatgcgcaaaccaacccttggcagaacatatccatcgcgtccgccatctccagcagccgcacgcggcgcatctcgggcagcgttgggtcctggccacggtctggaaacgcggaagtcagcgccctgcaccattatgttccggatctgcatcgcaggatgctgctggctaccctgtggaacacctacatctgtattaacgaagcgctggcattgaccctgagtgatttttctctggtcccgccgcatccataccgccagttgtttaccctcacaacgttccataaccgggcatgttcatcatcagtaacccgtatcgtgagcatcctctctcgtttcatcggtatcattacccccatgaacagaaatcccccttacacggaggcatcagtgaccaaacaggaaaaaaccgcccttaacatggcccgctttatcagaagccagacattaacgcttctggagaaactcaacgagctggacgcggatgaacaggcagacatctgtgaatcgcttcacgaccacgctgatgagctttaccgcagctgcctcgcgcgtttcggtgatgacggaggagcgactcaagccttcgcgaaagaaaataaccaaaaagcatacaaagaaacgtacggcgtctctcatattacacgccatgatatgctgcagatccctaaacagcagcaaaacgaaaaataccaagtgcctcaattcgatcaatcaacgattaaaaatattgagtctgcaaaaggacttgatgtgtgggacagctggccgctgcaaaacgctgacggaacagtagctgaatacaacggctatcacgttgtgtttgctcttgcgggaagcccgaaagacgctgatgacacatcaatctacatgttttatcaaaaggtcggcgacaactcaatcgacagctggaaaaacgcgggccgtgtctttaaagacagcgataagttcgacgccaacgatccgatcctgaaagatcagacgcaagaatggtccggttctgcaacctttacatctgacggaaaaatccgtttattctacactgactattccggtaaacattacggcaaacaaagcctgacaacagcgcaggtaaatgtgtcaaaatctgatgacacactcaaaatcaacggagtggaagatcacaaaacgatttttgacggagacggaaaaacatatcagaacgttcagcagtttatcgatgaaggcaattatacatccggcgacaaccatacgctgagagaccctcactacgttgaagacaaaggccataaataccttgtattcgaagccaacacgggaacagaaaacggataccaaggcgaagaatctttatttaacaaagcgtactacggcggcggcacgaacttcttccgtaaagaaagccagaagcttcagcagagcgctaaaaaacgcgatgctgagttagcgaacggcgccctcggtatcatagagttaaataatgattacacattgaaaaaagtaatgaagccgctgatcacttcaaacacggtaactgatgaaatcgagcgcgcgaatgttttcaaaatgaacggcaaatggtacttgttcactgattcacgcggttcaaaaatgacgatcgatggtattaactcaaacgatatttacatgcttggttatgtatcaaactctttaaccggcccttacaagccgctgaacaaaacagggcttgtgctgcaaatgggtcttgatccaaacgatgtgacattcacttactctcacttcgcagtgccgcaagccaaaggcaacaatgtggttatcacaagctacatgacaaacagaggcttcttcgaggataaaaaggcaacatttgcgccaagcttcttaatgaacatcaaaggcaataaaacatccgttgtcaaaaacagcatcctggagcaaggacagctgacagtcaactaa

SEQ ID NO: 24086 - DNA, 2922 bp, Homo sapiens
  SIMILAR (1651)..(2484): 991254mologous to Cloning vector pSacBII RepL,accession number U09128,Smith-Waterman Score=1401.
aataaagccattattgcccgtgtcacaaccttgtcagatgtagtagttggtctggaatcatttattggttctgagagagaaactaacccattgtataaggattatcatggattgattcatatacggcagattcctcggcttaataacttgatctgtgatgaatcagatgtcaaagacttagcttttaaattaaaaaggaagctattcaccattgagagcaatatagtcctacaatgtcaagctcgaccgatgcccttgagagccttcaacccagtcagctccttccggtgggcgcggggcatgactatcgtcgccgcacttatgactgtcttctttatcatgcaactcgtaggacaggtgccggcagcgctctgggtcattttcggcgaggaccgctttcgctggagcgcgacgatgatcggcctgtcgcttgcggtattcggaatcttgcacgccctcgctcaagccttcgtcactggtcccgccaccaaacgtttcggcgagaagcaggccattatcgccggcatggcggccgacgcgctgggctacgtcttgctggcgttcgcgacgcgaggctggatggccttccccattatgattcttctcgcttccggcggcatcgggatgcccgcgttgcaggccatgctgtccaggcaggtagatgacgaccatcagggacagcttcaaggatcgctcgcggctcttaccagcctaacttcgatcattggaccgctgatcgtcacggcgatttatgccgcctcggcgagcacatggaacggtaaccgggcatgttcatcatcagtaacccgtatcgtgagcatcctctctcgtttcatcggtatcattacccccatgaacagaaatcccccttacacggaggcatcagtgaccaaacaggaaaaaaccgcccttaacatggcccgctttatcagaagccagacattaacgcttctggagaaactcaacgagctggacgcggatgaacaggcagacatctgtgaatcgcttcacgaccacgctgatgagctttaccgcagctgcctcgcgcgtttcggtgatgacggaaacagctatgaccatgattacgccaagcttgcatgcctgcaggtcgaaggccgtggcggcggcacttttgcccatgaattgctcgctgtggagtacgcaggctggatttctcccgcgtttcggctgaaggtaaaccagacatttatcgactatcgaaccggaagattacaacctgctattccgcagagtctccctgaagctctccgtttggctgccgacctggcagagcaaaagcaacggctggagcaaaaaatgcttatggatgcacctaaagtcgaattcgctgaacgcgttgctaccgccagcggggttctaatcggcaactatgccaaagtgctcggcctgggccaaaactatctcttcacctggttgcgtgataacggaattctgatcgcaaccggtgaacgcaggaacgtccccaaacaagaatacatatctcgtgggtatttcacccttaaagaaaccgtgatcgatacaagcaatggaagcaggatttctttcacgactcgtataaccggcaaaggtcagcagtggctgatgaagcgattgcttgatgctgacgtagtaagaaccaccagcattgtaatgctggctaaagtcactttcctgagctgtataacgatgagcgattttactttttctggctatgaattggcctgctttgtaacacactccggtctatcccgtagcgccgggcatatcctgtcgcaatgtgcaaatctcgcggcaacaaccagtgaatacttcattcacaagcctcaccgcctgatcgcggcagaaactggttatagccaatcaaccgtcgttcgtgcattccgtgaagctgtaaacaaaggaattctgtctgtagagattgttatcggcgatcaccgtgaacgtcgcgctaacctgtaccggtttacaccatcctttttggccttcgcacaacaagccaaaaatgcgctgatagaaagcaaattaaagatctcttcagcggcaaccaaggttaaagctgttctcgctaagacattggctttatttaattttttatccacacccccatgtcaaaatgataccccctccccctgtcaggatgacgtggcaataaagaataagaagtcacaagttaaaaaaacaaaaagatcagtttccggcggtgccggaacaaccagcctcaaaaaattgacttcatggatcgctaaggcaaaagcaaaggctgacaatctgcggttatccaaaaaacgcactcaaaaacatgagttcaagcagaaagtagaggcggctgcgcggaaatatgcttacctgaagaacaagcgttcgcctgatattggcgggatatcaaacttcgataacctaccgcattgcatgacggtaaacgaagctcttaatgcggttttagccaaaaataaagataacgaacaatggggtgcggttgctggcgcctatatcgccgacatcaccgatggggaagatcgggctcgccacttcgggctcatgagcgcttgtttcggcgtgggtatggtggcaggccccgtggccgggggactgttgggcgccatctccttgcatgcaccattccttgcggcggcggtgctcaacggcctcaacctactactgggctgcttcctaatgcaggagtcgcataagggagagcgtcgaggagaacttctaaagatcgtcgttttgccaggtgaccacgttggtcaagaaatcacagccgaagccattaaggttcttaaagctatttctgatgttcgttccaatgtcaagttcgatttcgaaaatcatttaattggtggtgctgctatcgacctgcaggggggggggggaaagccacgttgtgtctcaaaatctctgatgttacattgcacaagataa

SEQ ID NO: 24087 - DNA, 2126 bp, Homo sapiens
  SIMILAR (653)..(712): 801254mologous to synthetic construct tetracycline resistance,accession number V00083,Smith-Waterman Score=84.
atgacgatgtgggtactacattgcgcattcacctactttgtgagcgcatggtcgaagcatggatatgcgcatgctgtgactgccaagatcctctacgccggacgcatcgtggccggcatcaccggcgccacaggtgcggttgctggcgcctatatcgccgacatcaccgatggggaagatcgggctcgccacttcgggctcatgagcgcttgtttcggcgtgggtatggtggcaggccccgtggccgggggactgttgggcgccatctccttgcatgcaccattccttgcggcggcggtgctcaacggcctcaacctactactgggctgcttcctaatgcaggagtcgcataagggagagcgtcgaccgatgcccttgagagccttcaacccagtcagctccttccggtgggcgcggggcatgactatcgtcgccgcacttatgactgtcttctttatcatgcaactcgtaggacaggtgccggcagcgctctgggtcattttcggcgaggaccgctttcgctggagcgcgacgatgatcggcctgtcgcttgcggtattcggaatcttgcacgccctcgctcaagccttcgtcactggtcccgccaccaaacgtttcggcgagaagcaggccattatcgccggcatggccggccgacgcgctgggctacgtctggctggcgttcgcgacgcgaagctggatgggccttccccattatgattcttctcgcttccggcggcatcgggatgcccgcgttgcaggccatgctgtccaggcagcctaacttcgatcattggaccgctgatcgtcacggcgatttatgccgcctcggcgagcacatggaacgggttggcatggattgtaggcgccgccctataccttgtctgcctccccgcgttgcgtcgcggtgcatggagccgggccacctcgacctgaatggaagccggcggcacctcgctaacggattcaccactccaagaattggagccaatcaattcttgcggagaactgtgaatgcgcaaaccaacccttggcagaacatatccatcgcgtccgccatctccagcagccgcacgcggcgcatctcgggcagcgttgggtcctgcagatccggctgtggaatgtgtgcttttgcaaaaagcttcacgctgccgcaagcactcagggcgcaagggctgctaaaggaagcggaacacgtagaaagccagtccgcagaaacggtgctgaccccggatgaatgtcagctactgggctatctggacaagggaaaacgcaagcgcaaagagaaagcaggtagcttgcagtgggcttacatggcgatagctagactgggcggttttatggacagcaagcgaaccggaattgccagctggggcgccctctggctattcggctatgactgggcacaacagacaatcggctgctctgatgccgccgtgttccggctgtcagcgcaggggcgcccggttctttttgtcaagaccgacctgtccggtgccctgaatgaactgcaggacgaggcagcgcggctatcgtggctggccacgacgggcgttccttgcgcagctgtgctcgacgttgtcactgaagcgggaagggactggctgctattgggcgaagtgccggggcaggatctcctgtcatctcaccttgctcctgccgagaaagtatccatcatggctgatgcaatgcggcggctgcatacgcttgatccggctacctgcccattcgaccaccaagcgaaacatcgcatcgagcgagcacgtactcggatggaagccggtcttgtcgatcaggatgatctggacgaagagcatcaggggctcgcgccagccgaactgttcgccaggctcaaggcgcgcatgcccgacggcgaggatctcgtcgtgacccatggcgatgcctgcttgccgaatatcatggtggaaaatggccgcttttctggattcatcgactgtggccggctgggtgtggcggaccgctatcaggacatagcgttggctacccgtgatattgctgaagagcttggcggcgaatgggctgaccgcttcctcgtgctttacggtatcgccgctcccgattcgcagcgcatcgccttctatcgccttcttgacgagttcttctga

SEQ ID NO: 24088 - DNA, 2904 bp, Homo sapiens
  SIMILAR (407)..(562): 1001254mologous to synthetic construct tet protein,accession number M20189,Smith-Waterman Score=264.
atgcccttgagagccttcaacccagtcagctccttccggtgggcgcggggcatgactatcgtcgccgcacttatgactgtcttctttatcatgcaactcgtaggacaggtgccggcagcgctctgggtcattttcggcgaggaccgctttcgctggagcgcgacgatgatcggcctgtcgcttgcggtattcggaatcttgcacgccctcgctcaagccttcgtcactggtcccgccaccaaacgtttcggcgagaagcaggccattatcgccggcatggcggccgacgcgctgggctacgtcttgctggcgttcgcgacgcgaggctggatggccttccccattatgattcttctcgcttccggcggcatcgggatgcccgcgttgcaggccatgctgtccaggcagcctaacttcgatcattggaccgctgatcgtcacggcgatttatgccgcctcggcgagcacatggaacgggttggcatggattgtaggcgccgccctataccttgtctgcctccccgcgttgcgtcgcggtgcatggagccgggccacctcgacctgaatggaagccggcggcacctcgctaacggattcaccactccaagaattggagccaatcaattcttgcggagaactgtgaatgcgcaaaccaacccttggcagaacatatccatcgcgtccgccatctccagcagccgcacgcggcgcatctcgggcagcgttgggtcctggccacggtctggaaacgcggaagtcagcgccctgcaccattatgttccggatctgcatcgcaggatgctgctggctaccctgtggaacacctacatctgtattaacgaagcgctggcattgaccctgagtgatttttctctggtcccgccgcatccataccgccagttgtttaccctcacaacgttccataaccgggcatgttcatcatcagtaacccgtatcgtgagcatcctctctcgtttcatcggtatcattacccccatgaacagaaatcccccttacacggaggcatcagtgaccaaacaggaaaaaaccgcccttaacatggcccgctttatcagaagccagacattaacgcttctggagaaactcaacgagctggacgcggatgaacaggcagacatctgtgaatcgcttcacgaccacgctgatgagctttaccgcagctgcctcgcgcgtttcggtgatgacggaaacagctatgaccatgattacgccaagcttgcatgcctgcaggtcgaaggccgtggcggcggcacttttgcccatgaattgctcgctgtggagtacgcaggctggatttctcccgcgtttcggctgaaggtaaaccagacatttatcgactatcgaaccggaagattacaacctgctattccgcagagtctccctgaagctctccgtttggctgccgacctggcagagcaaaagcaacggctggagcaaaaaatgcttatggatgcacctaaagtcgaattcgctgaacgcgttgctaccgccagcggggttctaatcggcaactatgccaaagtgctcggcctgggccaaaactatctcttcacctggttgcgtgataacggaattctgatcgcaaccggtgaacgcaggaacgtccccaaacaagaatacatatctcgtgggtatttcacccttaaagaaaccgtgatcgatacaagcaatggaagcaggatttctttcacgactcgtataaccggcaaaggtcagcagtggctgatgaagcgattgcttgatgcaagaaaccgtgatcgatacaagcaatggaagcaggatttctttcacgactcgtataaccggcaaagcgccgggcatatcctgtcgcaatgtgcaaatctcgcggcaacaaccagtgaatacttcattcacaagcctcaccgcctgatcgcggcagaaactggttatagccaatcaaccgtcgttcgtgcattccgtgaagctgtaaacaaaggaattctgtctgtagagattgttatcggcgatcaccgtgaacgtcgcgctaacctgtaccggtttacaccatcctttttggccttcgcacaacaagccaaaaatgcgctgatagaaagcaaattaaagatctcttcagcggcaaccaaggatgacgtggcaataaagaataagaagtcacaagttaaaaaaacaaaaagatcagtttccggcggtgccggaacaaccagcctcaaaaaattgacttcatggatcgctaaggcaaaagcaaaggctgacaatctgcggttatccaaaaaacgcactcaaaaacatgagttcaagcagaaagtagaggcggctgcgcggaaatatgcttacctgaagaacaagcgttcgcctgatattggcgggatatcaaacttcgataacctaccgcattgcatgacgatcctctacgccggacgcatcgtggccggcatcaccggcgccacaggtgcggttgctggcgcctatatcgccgacatcaccgatggggaagatcgggctcgccacttcgggctcatgagcgcttgtttcggcgtgggtatggtggcaggccccgtggccgggggactgttgggcgccatctccttgcatgcaccattccttgcggcggcggtgctcaacggcctcaacctactactgggctgcttcctaatgcaggagtcgcataagggagagcgtcgaggagaacttctaaagatcgtcgttttgccaggtgaccacgttggtcaagaaatcacagccgaagccattaaggttcttaaagctatttctgatgttcgttccaatgtcaagttcgatttcgaaaatcatttaattggtggtgctgctatcgacctgcaggggggggggggaaagccacgttgtgtctcaaaatctctgatgttacattgcacaagataa

SEQ ID NO: 24089 - DNA, 3663 bp, Homo sapiens
  SIMILAR (960)..(82): 911254mologous to Drosophila melanogaster Sog,accession number U18774,Smith-Waterman Score=1343.
ttaacgcttctggagaaactcaacgagctggacgcggatgaacaggcagacatctgtgaatcgcttcacgaccacgctgatgagctttaccgcagctgcctcgcgcgtttcggtgatgacggtgaaaacctctgacacatgcagctcccggagacggtcacagcttgttggcgctccaatcgcctcgatgggcttctcctccagatacagctgcagatcctgggcgggcacaccgttgagcgtcacctcgtagtgcagattgcactcgttgtcaatggacatccaggccatgccgacggcatgtggattctgtgcatccgtgtgctcctgtcgcttcagcagaatgggttccgccgagtcccgagcatcggccactggacggggcactaggcggccacggatcaggctcgtctcatgctcggtggccacattaacgcccagttcgccggcatacagcgactcgaggaccttgggacccaacttctccacactaccaatggcctggttgaagttgaagctcggcgtcagatcctccagcttggccttccgcttgccctgctcctcaatcaaactgatgttgggcctatcccgggtgttcacgtgctccgtttcgatgttgtaggccagagatccatcggtgttcaagtagacccacgccaaaccgctgctcttggtcgaggattcggcactgtgcggcgccagcagggtctggaagatttcgcagctggctcgggtcacgatgtgtccctggatgcgcagatgtgggtacttcttggactccacggtcagcaggagtttgccacgcgacatcagtcgaagattctgtatggaaatgggcgacgacagctccaggacattgatctcggcagagggtttgcgcacacgtggaatctcatcgaagatcacctccttccgttctgccagctcaattttcacactcagtgctgcatcggcgtacttgttcctgcgttcaccggttgcgatcagaattccgttatcacgcaaccaggtgaagagatagttttggcccaggccgagcactttggcatagttgccgattagaaccccgctggcggtagcaacgcgttcagcgaattcgactttaggtgcatccataagcattttttgctccagccgttgcttttgctctgccaggtcggcagccaaacggagagcttcagggagactctgcggaatagcaggttgtaatcttccggttcgatagtcgataaatgtctggtttaccttcagccgaaacgcgggagaaatccagcctgcgtactccacagcgagcaattcatgggcaaaagtgccgccgccacggccttcgaccaggtgaagagatagttttggcccaggccgagcactttggcatagttgccgattagaaccccgctggcggtacaacgcgttcacgaattcgactttaggtgcatccataagcattttttgctccagccgttgcttttgctctgccagatcggcagccaaacggagagctacagggagactctgcggaatagcaggttgtaatctaccggttcgatagtcgataaatgtctggtataccttcagccgaaacgcgggagaaatccagcctgcgtactccacagcgagcaattcatgggcaaaagtgccgccgccacggccttcgactagtgggtagatccacaggacgggtgtggtcgccatgatcgcgtagtcgatagtggctccaagtagcgaagcgagcaggactgggcggcggccaaagcggtcggacagtgctccgagaacgggtgcgcatagaaattgcatcaacgcatatagcgctagcagcacgccatagtgactggcgatgctgtcggaatggacgatatcccgcaagaggcccggcagtaccggcataaccaagcctatgcctacagcatccagggtgacggtgccgaggatgacgatgagcgcattgttagatttcatacacggtgcctgagaagtgctcggcgttcgtattacgtgaaactttaacacttcagatccagagacgtcacagctgtcagaagatttaacgcgctcaataatgtcgcgatatacagtctggaatttgccacgaatgatggttgcccatacatcaaaggactggttaaccggcagagcgatgtcaaaggtgtcggtcgcaagagtgcgccagatcatgatgcgaagacgcagcatatcctgttcatgagacaggtattccttcagggtgcggaaaatgcgctcatcgtcatcctcggcaccgtcaccctggatgctgtaggcataggcttggttatgccggtactgccgggcctcttgcgggatatcgtccattccgacagcatcgccagtcactatggcgtgctgtagcgctatatgcgttgatgcaatttctatgcgcacccgttctcggagcactgtccgcacactctggccgccgcccagtcctgtctcgttcgcgtcatcaccgaaacgcgcgaggcagctgcggtaaagctcatcagcgtggtcgtgaagcgattcacagatgtctgcctgttcatccgcgtccagctcgttgagtttctccagaagcgttaatgtctggcttctgataaagcgggccatgttaagggcggttttttcctgtttggtcactgatgcctccgtgtaagggggatttctgttcatgggggtaatgataccgatgaaacgagagaggatgctcacgatacgggttactgatgatgaacatgcccggttatggaacgttgtgagggtaaacaactggcggtatggatgcggcgggaccagagaaaaatcactcagggtcaatgccagcgcttcgttaatacagatgtaggtgttccacagggtagccagcagcatcctgcgatgcagatccggaacataatggtgcagggcgctgacttccgcgtttccagaccgtggccaggacccaacgctgcccgagatgcgccgcgtgcggctgctggagatggcggacgcgatggatatgttctgccaagggttggtttgcgcattcacagttctccgcaagaattgattggctccaattcttggagtggtgaatccgttagcgaggtgccgccggcttccattcaggtcgaggtggcccggctccatgcaccgcgacgcaacgcggggaggcagacaaggtatagggcggcgcctacaatccatgccaacccgttccatgtgctcgccgaggcggcataaatcgccgtgacgatcagcggtccaatgatcgaagttaggctgcctggacagcatggcctgcaacgcgggcatcccgatgccgccggaagcgagaagaatcataatggggaaggccatccagcctcgcgtcgcgaacgccagcaagacgtagcccagcgcgtcggccgccatgccggcgataatggcctgcttctcgccgaaacgtttggtggcgggaccagtgacgaaggcttgagcgagggcgtgcaagattccgaataccgcaagcgacaggccgatcatcgtcgcgctccagcgaaagcggtcctcgccgaaaatgacccagagcgctgccggcacctgtcctacgagttgcatgataaagaagacagtcataagtgcggcgacgatagtcatgccccgcgcccaccggaaggagctgactgggttgaaggctctcaagggcat

SEQ ID NO: 24090 - DNA, 3032 bp, Homo sapiens
  SIMILAR (1761)..(2594): 991254mologous to Cloning vector pSacBII RepL,accession number U09128,Smith-Waterman Score=1401.
atgcccttgagagccttcaacccagtcagctccttccggtgggcgcggggcatgactatcgtcgccgcacttatgactgtcttctttatcatgcaactcgtaggacaggtgccggcagcgctctgggtcattttcggcgaggaccgctttcgctggagcgcgacgatgatcggcctgtcgcttgcggtattcggaatcttgcacgccctcgctcaagccttcgtcactggtcccgccaccaaacgtttcggcgagaagcaggccattatcgccggcatggcggccgacgcgctgggctacgtcttgctggcgttcgcgacgcgaggctggatggccttccccattatgattcttctcgcttccggcggcatcgggatgcccgcgttgcaggccatgctgtccaggcagcctaacttcgatcattggaccgctgatcgtcacggcgatttatgccgcctcggcgagcacatggaacgggttggcatggattgtaggcgccgccctataccttgtctgcctccccgcgttgcgtcgcggtgcatggagccgggccacctcgacctgaatggaagccggcggcacctcgctaacggattcaccactccaagaattggagccaatcaattcttgcggagaactgtgaatgcgcaaaccaacccttggcagaacatatccatcgcgtccgccatctccagcagccgcacgcggcgcatctcgggcagcgttgggtcctggccacggtctggaaacgcggaagtcagcgccctgcaccattatgttccggatctgcatcgcaggatgctgctggctaccctgtggaacacctacatctgtattaacgaagcgctggcattgaccctgagtgatttttctctggtcccgccgcatccataccgccagttgtttaccctcacaacgttccataaccgggcatgttcatcatcagtaacccgtatcgtgagcatcctctctcgtttcatcggtatcattacccccatgaacagaaatcccccttacacggaggcatcagtgaccaaacaggaaaaaaccgcccttaacatggcccgctttatcagaagccagacattaacgcttctggagaaactcaacgagctggacgcggatgaacaggcagacatctgtgaatcgcttcacgaccacgctgatgagctttaccgcagctgcctcgcgcgtttcggtgatgacggaaacagctatgaccatgattacgccaagcttgcatgcctgcaggtcagaaggccgtgagcggcggcacttttgcccatgaattgctcgctgtggagtacgcaggctggatttctcccgcgtttcggctgaaggtaaaccagacatttatcgactatcgaaccggaagattacaacctgctattccgcagagtctccctgaagctctccgtttggctgccgacctggcagagcaaaagcaacggctggagcaaaaaatgcttatggatgcacctaaagtcgaattcgctgaacgcgttgctaccgccagcggggttctaatcggcaactatgccaaagtgctcggcctgggccaaaactatctcttcacctggttgcgtgataacggaattctgatcgcaaccggtgaacgcaggaacgtccccaaacaagaatacatatctcgtgggtatttcacccttaaagaaaccgtgatcgatacaagcaatggaagcaggatttctttcacgactcgtataaccggcaaagacgtagtaagaaccaccagcattgtaatgctggctaaagtcactttcctgagctgtataacgatgagcgattttactttttctggctatgaattggcctgctttgtaacacactccggtctatcccgtagcgccgggcatatcctgtcgcaatgtgcaaatctcgcggcaacaaccagtgaatacttcattcacaagcctcaccgcctgatcgcggcagaaactggttatagccaatcaaccgtcgttcgtgcattccgtgaagctgtaaacaaaggaattctgtctgtagagattgttatcggcgatcaccgtgaacgtcgcgctaacctgtaccggtttacaccatcctttttggccttcgcacaacaagccaaaaatgcgctgatagaaagcaaattaaagatctcttcagcggcaaccaaggttaaagctgttctcgctaagacattggctttatttaattttttatccacacccccatgtcaaaatgataccccctccccctgtcaggatgacgtggcaataaagaataagaagtcacaagttaaaaaaacaaaaagatcagtttccggcggtgccggaacaaccagcctcaaaaaattgacttcatggatcgctaaggcaaaagcaaaggctgacaatctgcggttatccaaaaaacgcactcaaaaacatgagttcaagcagaaagtagaggcggctgcgcggaaatatgcttacctgaagaacaagcgttcgcctgatattggcgggatatcaaacttcgataacctaccgcattgcatgacggtaaacgaagctcttaatgcggttttagccaaaaataaagataacgaacaatggggtgcggttgctggcgcctatatcgccgacatcaccgatggggaagatcgggctcgccacttcgggctcatgagcgcttgtttcggcgtgggtatggtggcaggccccgtggccgggggactgttgggcgccatctccttgcatgcaccattccttgcggcggcggtgctcaacggcctcaacctactactgggctgcttcctaatgcaggagtcgcataagggagagcgtcgaggagaacttctaaagatcgtcgttttgccaggtgaccacgttggtcaagaaatcacagccgaagccattaaggttcttaaagctatttctgatgttcgttccaatgtcaagttcgatttcgaaaatcatttaattggtggtgctgctatcgacctgcaggggggggggggaaagccacgttgtgtctcaaaatctctgatgttacattgcacaagataa

SEQ ID NO: 24091 - DNA, 1942 bp, Homo sapiens
  SIMILAR (670)..(1047): 871254mologous to Cloning vector pSacBII RepL,accession number U09128,Smith-Waterman Score=560.
atgaacaggcagacatctgtgaatcgcttcacgaccacgctgatgagctttaccgcagctgcctcgcgcgtttcggtgatgacggtgaaaacctctgacacatgcagctcccggagacggtcacagcttgtctgtaagcggatgccgggagcagacaagcccgtcgaaggccgtggcggcggcacttttgcccatgaattgctcgctgtggagtacgcaggctggatttctcccgcgtttcggctgaaggtaaaccagacatttatcgactatcgaaccggaagattacaacctgctattccgcagagtctccctgaagctctccgtttggctgccgacctggcagagcaaaagcaacggctggagcaaaaaatgcttatggatgcacctaaagtcgaattcgctgaacgcgttgctaccgccagcggggttctaatcggcaactatgccaaagtgctcggcctgggccaaaactatctcttcacctggttgcgtgataacggaattctgatcgcaaccggtgaacgcaggaacgtccccaaacaagaatacatatctcgtgggtatttcacccttaaagaaaccgtgatcgatacaagcaatggaagcaggatttctttcacgactcgtataaccggcaaagacgtagtaagaaccaccagcattgtaatgctggctaaagtcactttcctgagctgtataacgatgagcgattttactttttctggctatgaattggcctgctttgtaacacactccggtctatcccgtagcgccgggcatatcctgtcgcaatgtgcaaatctcgcggcaacaaccagtgaatacttcattcacaagcctcaccgcctgatcgcggcagaaactggttatagccaatcaaccgtcgttcgtgcattccgtgaagctgtaaacaaaggaattctgtctgtagagattgttatcggcgatcaccgtgaacgtcgcgctaacctgtaccggtttacaccatccttttttggccttcgcacaacaagccaaaaatgcgctgatagaaagcaaattaaagatctcttcagcggcaaccaaggttaaagctgttctcgctaagacattggctttatttaattttttatccacacccccatgtcaaaatgataccccctccccctgtcaggatgacgtggcaataaagaataagaagtcacaagttaaaaaaacaaaaagatcagtttccggcggtgccggaacaaccagcctcaaaaaattgacttcatggatcgctaaggcaaaagcaaaggctgacaatctgcggttatccaaaaaacgcactcaaaaacatgagttcaagcagaaagtagaggcggctgcgcggaaatatgcttacctgaagaacaagcgttcgcctgatattggcgggatatcaaacttcgataacctaccgcattgcatgacggtaaacgaagctcttaatgcggttttagccaaaaataaagataacgaacaatggggtgcggttgctggcgcctatatcgccgacatcaccgatggggaagatcgggctcgccacttcgggctcatgagcgcttgtttcggcgtgggtatggtggcaggccccgtggccgggggactgttgggcgccatctccttgcatgcaccattccttgcggcggcggtgctcaacggcctcaacctactactgggctgcttcctaatgcaggagtcgcataagggagagcgtcgaggagaacttctaaagatcgtcgttttgccaggtgaccacgttggtcaagaaatcacagccgaagccattaaggttcttaaagctatttctgatgttcgttccaatgtcaagttcgatttcgaaaatcatttaattggtggtgctgctatcgacctgcaggggggggggggaaagccacgttgtgtctcaaaatctctgatgttacattgcacaagataa

SEQ ID NO: 24092 - DNA, 1233 bp, Homo sapiens
  SIMILAR (1)..(282): 961254mologous to unidentified cloning vector chloramphenicol acetyltransferase,accession number U13846,Smith-Waterman Score= 489.
atggagaaaaaaatcactggatataccaccgttgatatatcgcaatgtcatcgtaaagaacattttgaggcatttcagtcagctgctcgatgtacctataaccagaccgttcagctggatattacggcctttttaaagaccgtaaagaaaaataagcacaagttttatccggcctttattcacattcttgcccgcctgatgaatgctcatccggaattccgtatggcaatgaaagacggtgagctggtgatatgggatagtgttcacccttgttacaccgttcccatgagcaaactgaaacgttttgagcgctctggagtgaataccacgacgatttccggcagtttctacacatatattcgcaagatgtggcgtgttacggtgaaaacctggcctatttccctaaagggtttattgagaatatgtttgtcgtctcagccaatccctggtgataataagcggatgaatggcagaggggatcctctagagtgctttgtgtgtgggcatgatggcaagacgacgaagtacattcaaagcagcatcataatcaacgagaaaccttgcagaggagcacgcaagcgcagcatacaactaaaagctaagcagatatggttcgatatgtacactgtaacgccctctggatgcactgtgcgcacgtttgataaaccaaggaaaagattcatagccttgttcatcgccggcatcctcatcgagggcgataaaaaaccacttccttccccgcgaaactcttcaatgcctgccgtatatccttactgcttccgcagaggtcaatccgaatatatcagcatatttagcaacatgaatctcgcagactaccgtcatgttcctatttgtcacactctgacagagaagcttgttgccatgacaatgggctctggggccaagatgaagacttcagccattgtcagcgacatgattgtggtggccaagtggaacagccccagggtagatgatgttgtgaagtcgatgtaccctccgttggaccccaagctcctggacacagggacgactaccctgctcctgtctgtcagtcgcctggtgctggtgacaaggaatgcctgccatctgacggggggcctggagtggattgaccagtcactatcagctgctgaggagcatttggaagtccttcgagaagtagccctagcttttgagccagataaaggcctcccaggccctgaaggcttcctgcaggagcagtctgcaatttag

SEQ ID NO: 24093 - DNA, 837 bp, Homo sapiens
  SIMILAR (784)..(737): 751254mologous to Homo sapiens Human secreted protein, SEQ ID NO: 7420,accession number G03339,Smith-Waterman Score=60.
atgaagccacggacctacacggtgagtgttacagctgttaaagatggtgtgtctggagtttgttccttcagatgttcagatgtgtccagagtttcttccttccagtgggttcgtggtcttgctgacttcaggagtgaagctgcggaccttcacaactcaggagcccagctggcttcacccattggatcccgcactggggccacaagtggagctccctgccagtcccgcacccatgcgcccgcactcctcagcctttgggctgtcgatgggaccgggcgccatggagcagggggcagcactcgtcggcaaggctcgggtggcacgcaggagcccatggtggcggggaaggctcaggcatggcgggctgcaggcttcagtggtagtggtgatggagtaggagtatctatccttgtgccctggggtgggacttgtattggcagtttcaggcaggccaattcttggatttctgggggggctttttcagatgctggttgtgatagtgatagactaggtaaagattggaacagtttggagggctcagaagaagaaaggaaaatgtgggaaagtttggaacttcctagagacttgaagagctcagaagacaggaagatgtgggaaagtttggaacttcctagagacttgctgaatggctttgaccaaaatgctgatagcaatatgcacaatgaagtccaggctaaggtggtctcagatggagatgaagaacttgttgggaactggagtaaatgtcactcttgttatgctttagcaaagagactggaggcatttgctcctagtctaaagatctgtggagatttgaaattgagagagataatttag

SEQ ID NO: 24094 - DNA, 1074 bp, Homo sapiens
  SIMILAR (604)..(666): 851254mologous to Homo sapiens Human secreted protein, SEQ ID NO: 7678,accession number G03597,Smith-Waterman Score=95.
tcagagttcttgaggactgtcttggcagttcagagggttcctgtcttcatccatcagactggaccagctccccatgaaggctggcttggtgttacctgctttctgtagagtagcaattgatccatactctctaatagccccagttctgactctgtacaaatgggatggaaagtaattcaagacccttgtctcttcttccccattggattctgctgggaagggctccagtgtcttcttcccatcaccattctgttcattcttgctcttcctctcagctatggcacccatggcttttcttttacttctccatccatctttgcttgtggagaactcagatgactccatgaagataaatggttttggcaataacaacaacacaactttcatcttctcactcacaacagctggcttctgaggaatagcctccggggatgacagggtggctggggtgtgctgggggtatcgtgcggagaaacagctgtttctcagatttgctggcccactgtgctccaaagccatgtggatttgccactccatcttagagagggccagccatgcccctcttctcctgccttttccttttcgtaaatgtggaaaccaattgcaaaggtctgcagcttcactcctgaagtcagcgagaccacgaacccactggaaggaagaaactccagacacatctgaacatctgaaggagcaaactccagaaacaccatctttaagagctgtaacactcaccgtgagggtccgcagcttcattcgattccctgtgacatagcttactcttagagaattcaaactaaggtgttcagactgtcctgtatcaatgtactcaccattcctgaaacaactgctttcatattggaggcccatgggccttctccactcaagccaatgaaatgaagcattaatggtggaaattccaggcctcatctttaacttccttatgaaacactcgtagatcttgttaacctgaagacactgctccagcaggtctgggggaaggggcctgagaatcagaatttctaacaagctccaggcactgctgctgcagctgatcttgggcagtatggccat

SEQ ID NO: 24095 - DNA, 882 bp, Homo sapiens
  SIMILAR (3)..(44): 921254mologous to Homo sapiens Human secreted protein, SEQ ID NO: 7115,accession number G03034,Smith-Waterman Score=74.
atgtttgtggcttcactcctgaagtcagcgagaccacgaacccaccaggaggagcgagcaactcccgttgcgccacctttaagagctgtaacactcactgcaaaggtctgctgcttcactcctgaagtcagcaagaccaagaaagaaactctggacacatctgaacatctgaaggaacaaactccggacacaccatctttaagaacggtaacactcactgctagggtccacggcttcattcttgaagtcagcgagaccaagaacccaccggaaggaaccaattccggacacaatagctctttggccataggtgttggggatggcatgatccgtgtatggaatacactctccataaagaacaactatgatgtgaaaaatttttggcaaggcgtgaagtccaaggttacagcgctgtgctggcacccaaccaaggaaggttgcttagcttttggaactgatgatggaaaagtgggattgtatgacacctactccaacaagcctccacagatttctagcacatatcataagaagactgtatatactttagcctgggggccaccagtaccccccatgtcacttggaggagaaggagacagaccttcccttgctttatacagctgtggaggagaagggattgtcttacagcataatccctggaagcttagtggagaagcctttgacatcaacaaactcatcagggacaccaattcaatcaaacatcacaagcttgtgaataccattagctggcatcatgagcatggcagccagccagaattgagctatctgatggcctctggctccaacaatgcagtcatttacgtgcacaacctgaagactgtcatagtcccatcgtcggagctggtggcacagaggttgtactga

SEQ ID NO: 24096 - DNA, 739 bp, Homo sapiens
  SIMILAR (165)..(362): 951254mologous to Homo sapiens TADA1 protein,accession number AF132000,Smith-Waterman Score=322.
cttttttatttgagcatggagccaactttaaattgggtgggtaccaacatcctagggaagggtgtgcagtttggggaatactagtcaaaaagactatctatttgggcttttgtgcaaagcccctcatttcctacgaaacctgaccctattttctttttttccctaggacgactgccctgctcctggctgtcagtcacctggagctggcgacaaggaatgcctgccatctgacgggaggcctggactggattgaccagtctctgtcggctgctgaggagcatttggaagtccttcgagaagcagccctagcttctgagccagataaaggcctcccaggccctgaaggcttcctgcaggagcagttctgcaatttagtgcctacaggccagcagctagccatgaaaggcccctgcccccatccctggatggctcagcttagccttctactttttcctatagagttagttgttctccatggctggagagttcagctgtgtgtgcatagtaaagcaggagatccccgttcagttttatggcctcttttgcagttgcaaactgtgggctggtgagtgggcagtctaatactacagtttaggggagatggccattcactctctggcaagagggagttattggaaaactggtggactgtcagctttatttagctcacctagtgttttcaagaaaattgagccaccgtctaagaaatcaagaggtttcacattaaaattagaatttg

SEQ ID NO: 24097 - DNA, 1269 bp, Homo sapiens
  SIMILAR (617)..(1114): 741254mologous to Homo sapiens TADA1 protein,accession number AF132000,Smith-Waterman Score=568.
atgagggatattttgcagaagtatgtgtcagatgatgaaattttcttcaaacaagaagaaataaggatccattcacatggattctcacagaggctaaaaaacttgcctaaggttgcacacctagcaggtggtaacattcctggacaatgtcttcaccagtccttgaggaaaacaagagcaatggcactcaataatactgtcagctgccccagaaatgttgtgtacaatattggtgggttcttggtctcgctgactttcaagaatgaagctgcggaccctcgtggtgagtgttacagttcttaaagatgttgtgtctggagtttgttccttcagatattcagatgtgtccggagtttcttccttccagtgggttcgtggtcttgctgacttcaggagtgaagctgcagaccttcggggactgaagctgcagacctttgtggtgagtgttacacctcataaaggcagtgtggacccaaagagtgaccagcagcgagatttattgcaaagagtgaaagaacaaaacttccgcaatgtgaaaggggacccagcagccttagcccatgaggacgatgtgaacgggactgagtcaggagctccccggaagcatggagaccgtgaactggatgacgttgttatcaccaacccccacattgaggccattctggagaacaaagactggatcgaagatgcctcgggtctcatgtcccactgcattgccatcttgaagatttgtcacactctgacagagaagcttgttgccatgacaatgggctctggggccaagatgaagacttcagccattgtcagcgacatgattgtggtggccaagtggaacagccccagggtagatgatgttgtgaagtcgatgtaccctccgttggaccccaagctcctggacacagggacgactaccctgctcctgtctgtcaagtcacctggtgctggtgacaaggaatgcctgccatcttgacgggaaggcctggactggatttgaccagtctctgtccggctgctgaggagcatttggaagtccttcgagaagcagccctaagcttctgagccagataaaggcctcccaggccctgaaggcttcctgcaggagcagtctgcaatttagcgcctacagaccagcagctagtcctgaagacccctgccgccatcactgggtggctcagattagccttccactttttcctgtagaattagttgttctccacggctcaagagttcagctgtgtgtgcatagtaaagcaggagatctctgtcaaa

SEQ ID NO: 24098 - DNA, 855 bp, Homo sapiens
  SIMILAR (450)..(4): 891254mologous to Homo sapiens p40,accession number U93569,Smith-Waterman Score=674.
ttacaatctgacatgtttttgcagtggctggtactggttgttcctttccatgtttagtgcttccttcaggagctcttttagggcaggcctggtggtgccgaaatctctcagcatttgcttgtctgtaaaggattttatttctccttcacttatgaagcttagtttggctggatatgaaattctgggttgaaaattcttttctttgagaatgttgaatattggcccccactctcttctggcttgtagagtttttaccaagagatctgctgttagtctgatggggttccctttgtgggtaacctgacctttctctctggctgcccttaacattttttccttcatttcaactttggtgaatctgacaattatgcatcttggagttgctcttcttgaggagtatctttgtggcattctctgtatttcctgaatttgaatgttggcctgccttgctttggtctttgatgatggtgacgtacagatggggttttggtatggatgtcctttctgtttgttagttttccttctaacagtcaggatcctcagctgcaggtctgttggagtttgctggaggtccactccagaccctgtttgcctgggtatcagcagtggaggctgctttgtcctcatgagatcactggagaaagcatgagtaaacttcacattattcagaaatataccagcagctgctgcttgtttaaatccagtttctgaaagaggttcatctactccttgtccatcatggttgggttctggtgagggcctctccacattacacgctactgacttctccttcagtgctcccatggcacaaagaggaaagagctctctggtgtctcttgaataaattccattcat

SEQ ID NO: 24099 - DNA, 456 bp, Homo sapiens; identical to SEQ ID NO: 19126
  SIMILAR (366)..(37): 761254mologous to Homo sapiens putative p150,accession number U93563,Smith-Waterman Score=426.

SEQ ID NO: 24100 - DNA, 392 bp, Homo sapiens
  SIMILAR (387)..(292): 621254mologous to Homo sapiens Human secreted protein sequence encoded by gene 11 SEQ ID NO:72,accession number B24447,Smith-Waterman Score=86.
cgaggtgctctgtccctgggagatgggagttttgtttataagcccctgactggggctgctgcctttctttcacagatgccctacacagagaggaggaatctagagaggcagtctggctacagcggctttgctgagctgtggagggctgtgcccagttggatctttcccggcatctttgtttacactgtgaggggaaaacggcccactcaagcctcagtaatgggagatgcccttccccccaccaagctcgagtgtcccaggtcagcttcaggttgctgtgccggcagcgataatttcaagccagtggatcttagcttgctgagctccatggggttgggatccactgagctagaccacttggctccctggcttcagccccctttccagggcag

SEQ ID NO: 24101 - DNA, 549 bp, Homo sapiens
  SIMILAR (158)..(409): 551254mologous to Homo sapiens Human secreted protein, SEQ ID NO: 4473,accession number G00392,Smith-Waterman Score=230.
tcattctccgtccagttttgttcccttgttggcgatcctttggggtgatccagttgtgatcctttggaggagaagaggtgttctggtttttggaatattcagcctttttgcgctggtttctccccatctttgtgggattatctgagtttggtctttgatgtcgatgaccttcagatgaggtctctgagtggatgtcctttttgttgatgttgatactattcctttctgtttgttggttttccttctaacagtcaggcctctctgctgcaggtctggtggaggttgctggagatccactccagaccctgtttgcctgggtatcaccagtggaggctgcaaaatagcaaagattgctgcctgttccttcctctggaaacttcgtcccagagctctagagcgctcctgtatgaggtgtctgttggcccttgtctcaagtcgatgaaggccaactgcagcgtgtcctcctggaacccaggcaccgggccggatctggcaaactctgaatgcttgggagctggctacacattcttgaatctccttattgggcat

SEQ ID NO: 24102 - DNA, 378 bp, Homo sapiens; identical to SEQ ID NO: 14801
  SIMILAR (374)..(213): 831254mologous to Homo sapiens Human secreted protein, SEQ ID NO: 4473,accession number G00392,Smith-Waterman Score=235.

SEQ ID NO: 24103 - DNA, 2964 bp, Homo sapiens
  SIMILAR (2608)..(2961): 791254mologous to Homo sapiens p40,accession number U93566,Smith-Waterman Score=479.
atggtggtgtatgcctgtagtcccagctatctggaggctgaggtgggaggatcattgagcctggaagttgaggccacaaaccctaaaaactcatccaaaaagttcctagatctgatcagcgaattctgtaaagtctcaggatacaaaatcagtgtacacaaatcagtagcactgctgtacaccaaaaatgaccaagctgcgacccaaatcaagaacttaatcccttttacaacagctgcaaaacaattcaaatactttggaatatacttaaccaaggaggaggagcgactcaagccttcgcgaaagaaaataaccaaaaagcatacaaagaaacgtacggcgtctctcatattacacgccatgatatgctcgcagatccctaaacagcagcaaaacgaaaaataccaagtgcctcaattcgatcaatcaacgattaaaaatattgagtctgcaaaaggacttgatgtgtgggacagctggccgctgcaaaacgctgacggaacacctccgctggtgatacccaggcaaacagggtctggagtggacctccagcaaactccaacagacctgcagctgagggacctgactgtcagaaggaaaactaacaaacagaaaggaacagcatcaacatcaagaaaaaggacatccacaccaaaaccccattgtgtatctgaaagtgacggggagaatggaaccaagttggaaaacactctgcaggatattatccaggagaactcccccaacctagtaaggcaggccaacattgaaattcaggaaataaagagaacaccacaaagatactcctcaagaagagcaaccccaagacacataattgtcagattcaccaaggttcaaatgaaggaaaaaatgttaagggcagccagagagaaagtattggaagttctggccagggcaatcaggcaagagaaagaaataaagggcattcaaacaggaagagaggaagtcaaattgtctctgtttgcagatgacatgattgtatatttagaaaatcacatcatctcagcccaaaatcgacttaagctgataagcaacttcagcaaagtctcaggatacaaaatcaatgtacaaaaatcacaagcattcttatacaccaataacagatcaacagagagccaaatcatgagtgaactccattcacattgcttcaagagaggttttccgggaacatacaggcctgcagtctctatagtagagcgctcggccacataccccaacgcgcatgccctacagccgcacacagtacggctatcaagggcgccaattcgccacatttcgaggcgccccaaacctccttggcaacggccaatcccctgcggcgccctcctcgcatccctcaacccaggctggccgcccgcggggattatgccgccaggcaacttaaagttggctaacgcccacgcgcctaacgcccccactgggtatgaaatactgagacaggtggagtgcgaaagacagataaagaatgcttctatgaagcttagagcctatgacatgacagaagataagttaggaagaagaatggctctacaacaaggtaaattgcttttcttattgattaagggcctctggatggcatgcttcaggcagctcagttctaggtcagtggaccctgagaggaagaaaagcaaagcccccagtcctcagagatggaagaagtcaccagaaggaacaagacaagaatatgtcacaatggttcagtacctgcacatctatagagacaaagcactagcaccgtccagcatggagtcactgctgctgagctcattagccctggtcagcctggcagcaggtggaggacaggaagtggtgctcattcctcgtggcctgagcccacggcacccaggccatggtggggtgcaggtgatatttagaaagtgtgcaccagacaggcccagaagccagaggctgtccgctaaccatactccagtagctgggcaagtcccccccgaagggcccctgggcagccgtctccacgtcaaccacagaaggcatttccaactccaactccagttggtgttaaggtcagatctcctctctggtgtggcctatctgccggagcaggccctaagcagctgcttaaatggagctgaagaagagccaaagcttccatcactctcaccctctcttagcttcagtcttgactccttctctgagcccctgtacccatcttgtgctgcctacgtcctaccttgggctgctcggtattggctggcacaggagacccagagctccgtgacatcagggacggggctggctctgtggaatgatagctgccaacccagcctggtgcctgtgttgtgcaggatgcaagagccgcaagcatatgtgctgccactcggggcacctatgggccaactgacacctcatacagccgggtgcccctctgagatgaagcttccagaggaaggatcaggcagcaacaccttccgttctgcaatatttgctgttctgcagcctccgctggtgatatccaggcaaacagggtctggagtggacctccagcaaactccaacagacctgcagctgagggtcctgactgttagaaggaaaattaacaaacagaaaggacacccacaccaaaaccccatccgtatgttaccatcatcaaagaccaaagcacaagaactacgtgatgcatgcacaagcttcaatagcagatttgataaagtggaagaaagggtatcagagattgaagatcaaatgaatgaaatgaagcgagaagagaagtttagagaaaaaagattaaaaagaaatgaacaaagcctccaagaaatatgggactatgtgaaaagaccaaatctacgtctgattggtgtacctgaaagtgacggggagaatggaaccaagttggaaaaccctcttcaggatattatccaggagaatttccccaacctagcaagtcaggccaacattgaaattcaggaaatacagagaacgccataa

SEQ ID NO: 24104 - DNA, 2007 bp, Homo sapiens
  SIMILAR (1496)..(786): 971254mologous to Homo sapiens phosphatidylinositol 3-kinase homolog,accession number U26455,Smith-Waterman Score=1164.
ttatttcttgtctcctgctagctttttaatttgtttgctcttgcttctctagttcttttaattgtgatgttcggatgtcaattttagatctttcttgctttctcttgtgggcatttagtgatataaattcccctgtacacactgctttaaatgtgtcccagggattcttgtacattgtgtctttgatctcattggtttcaaagaacatctttatttctgccttcatttcgttatttaaccagcagtcattcaggagcaggttgtccagtttccaggtagttgtgccattttgagtgagtttcttaatcctgagttctaatttgattgccccgtggtctgagaggctgtttgttgtgatttcttttcttttacatttgctgaggactgttttacttccaattatgtggtcaattttagaaaaagtgtgaagtggtgctgaaaagaatgtatattcttttgatttggggtggagagttctatagatgtctattaggtccgcttggtccagagctgagttcaagtcctggatatccttgttaattttgtcttgttgatctgtcttcaaatggagtctctgagtggatgtcctttttgttgatgttgacgctattcctttctgtttgttagttttccttataacagtcaggcccctctgctgcaggtctgctggagtctgctggagttccactccagaccctatttgcctgggtatcaccagtggaggctgcagaacagcaaagattgctgactgttccttcctctggaagctttgtcccagaggggcacctgtttgtctgaattttatgttccctaaggagacctacttcctctttggctcttttcaggagagcttgcttgttttcaaattccgatgatttcatgtagttttcaattctttggtattgagtatctgaaaaccgggctaatgagagaaatgccttcatttttccatttcttagctcatcactactttctccatcataatttccagcaacttctactgccttttctagataggtctgcatgatgaccgcaggattttctaagcacgtttctgctaaccagttgccacaaaccctcagacattctgtgtatgtaagttttaggctgggattgttcgctgcacagctggcatccaacttcttgatcatttgcttgagaatactcagggcaagactctgctccttttttgcccagaatacttgtgcttcttccagctgccactcagagactccacagctaactgaattgtactgtttaatttgaaatattgccctttcagggagctgagtgttcttgaaagttctggccagtatagagagttctacaaggtgtttggtgagaatgtccttaatacattctctttgtgagttgtccatttccttttccatcaggatctccaaaatgactgtgcgtagagccatgataggctcctgaaaactaaaatccctgtccttgagaaggtgttcttttttctgccgcttaatctttacttcctttggcttcataggaagtccccatgacaagttaacaggggggaatatgttggaggaataagttggatctatacaggatgctgcatcatctaaaaatggacagttaatgatttcaattcctcggttggctggtgtgagatggtatctcagcgtgattttgatttgcatttctctaatgatcagtgatgttgagctttttttcatatgttcatcagcctcatgtatgtctgcttttgagaagtatctgttcatgtcctttgcccactttttgatggggtggtttgatttttttcttgtaaatttgtttaagttctttgtagattcttgatattagccctttgtcatatgggtagattggaaaaattttctcccattctgtaggttgcctgttcactctgatggtagtttcttttgctgtgcagaagctctttagtttaattagatcccatttgtcaattttggcttttgttgccattgcttttggtgttttagtcatgaagtccttgcccat

SEQ ID NO: 24105 - DNA, 471 bp, Homo sapiens
  SIMILAR (143)..(271): 351254mologous to Caenorhabditis elegans C10A4.2 gene product,accession number U23454,Smith-Waterman Score=61.
tcgaactgtcagccttatcagtgtaaccctgtccttctctatcaccacctccaccttaactaactctagacctgccctcagtcgcttctgtggtatggggattgacataaatggaaaagaccccctaggtattttttaaatacgcattattcccccatctcccccttcttcagtagcgtcagttatagatctcacaccggttgcttctacatctaataataaaactagggtgtctattgtaaaaataagagatctaaaacagaccttagccatcgagagagtatcaagatgcaaatccctggctgaaatggattaaatattccgttcgcactttaaataaaagcgattgttacgcatcaggttataaatgagcctgtctcctttgttcggtgtactctcatggcaaagctgctggcgagtgtaccctttctgcaggaagtaaaaatggccttgctgaggtaattaaaaaaa

SEQ ID NO: 24106 - DNA, 1173 bp, Homo sapiens; identical to SEQ ID NO: 975
  SIMILAR (592)..(630): 611254mologous to Arabidopsis thaliana F24O1.6,accession number AC003113,Smith-Waterman Score=47.

SEQ ID NO: 24107 - DNA, 391 bp, Homo sapiens
  SIMILAR (312)..(16): 371254mologous to Gleditsia fera NADH dehydrogenase-like protein,accession number AF020484,Smith-Waterman Score=87.
atgccagcacctctcatgtgccgcagccgatatgcgggctggacgatctggcgatacggcattcagcggtacggcttaatcgcgaaagggtacactcgacagcagttttgccatgagagtacaccaaacaaaggagacaaggtcacttataacctgatccctataaaaaagagggcgcagcgacgaacgaagacgcattacttctgcgatgggaacggggtagaggagcgcgactacacatcccaggatgcaaagcgccccaactctagtcacaacctggcttgctttctggctggcgttccccgccaaagggacactaggggaggggattgtttcggttggggaatccccgaagtctactggaccgtgacatttcgaaagaggaaggaaa

SEQ ID NO: 24108 - DNA, 1425 bp, Homo sapiens
  SIMILAR (1072)..(1164): 711254mologous to Plasmodium lophurae histidine-rich protein,accession number X01469,Smith-Waterman Score=176.
tcagctgggcttttctccttcctctcctgccctgtgttccagggcgcgaccccgctctgtccagacgctggctcccggactgatcctcaggtaggtgggtcggagcccttgcttatcggaaggttgatagctagggattgccagagtgtctgaactcagaggtaacttcccctgaagatcaacggctgtctgcagctcctggctggaagccggcttgccaacatcagtccttccacttggagcaattcttgtgcagtcattttcctgaagattgaggacgataaggggtacgaagatttcactgaatacaaagagcctgagaaactgggtgatttgactaataaaggccagtccgttatcggactgtatagagatgggaaggccaaactgaggaattatgtctgacaaaagggaagaaatgaccacggtggccttctcagatcctgtgggaaaggcttctacccatccagtgaaagtgtctacccagaccaagaggtattttagtttcctgacttggggcatgtgagtaaagtcaatttgccagtcccccttgaccactggaacactaagactgttttgggatctctgcctgactttctcagaggtgctggtgaggacattatgagtctggaacctagaaaagcgttctgactctgctgactttctcagaggtgatataaggtgattgtgatgagcatcatcatcgtcaacatcatcatcaccatccacattgccaccaccactcccattatcatcttcatcaacatcatcaccaccgccaccatcaccattatcattaccaccaccgctatcactattatcatcaccctcaacatcatcaccatcatcactatcatcaccaccaccatcatcgttactaccactaccaccaccatcaggggatcctctagagtcgcacggggttggggcaatgcaggtctgtaaactggaattgtaaaagtgaagtggcccaggtcccatttgctgtagtggtgcacagagagacagtcttgagaggtgaggagacatttcccagaggaagtgacatccaagttgagacttagaagacagcaccaccactgtcactattatcatcatcctcaacatcatcaccaccaccatcatcattattaccaccagcaccaccatcaccatcatcatcattctaccaccatcaccattatcatcaccatcaccatcaccaccgctatcatcatgataatcattatcattaccatcaccattagcattatcattaccaccaccatcactatcactatcaccatcaccacgaccactaccaccatcaccaacaccatcattactacccaccaccaccatcatcatcattccaccaccatcacaattattaccaccaccaccatcaccaccaccaccaccatcactatcatcatcagtagacat

SEQ ID NO: 24109 - DNA, 675 bp, Homo sapiens
  SIMILAR (65)..(157): 641254mologous to Homo sapiens PRO1488,accession number AF116636,Smith-Waterman Score=93.
ttaaatgtttctttcatacgcgtccgtgtgaagagaccaccaaacaggctttgtgtgagccataaagctgtttatttcacctgggtgcaggtgggctgagtccgaaaagagagtcagcgaagggagataggggtggggccgttttataggatttgggtagataaaggaaaaaggggggttgttctctttctcagcaagtaacttgtggaaacaagttacttcctccttcctttgttctcctctgcctttgtctcttttgaaaagttctaagttgctagccaatcgggacaaatacagaatgtgtggtcctgttccagccaatggaaaccggacacagcagtagagtaaacatgtcaggttataaatgaccctgtctcctttgttcggtgtactctcgtggcaaaactgctggcgagtgtaccctttctgcctgttgtttggtggccccctttcagtgatggatccagaaggcagcccaagtggctgcctaattctcttggactgggggctgactctgttactctgtctactggtggggtattccaacccaatgtgcgtggacttaattgcaatggaaaaatagtcatggggagatgtcccttggagttcgttcccattcccgctacttcccccatcagcaggaagaagccagagcgatcgacggccttttcccat

SEQ ID NO: 24110 - DNA, 6743 bp, Homo sapiens
  SIMILAR (657)..(4): 1001254mologous to Homo sapiens solute carrier,accession number AY008285,Smith-Waterman Score=1123.
ctagtcaaaacactttaagatgcgctctccaatcccaataaaatagaccccttgagcaatcccaaagagaggtgctatgaccagtgcccggcagccagcgcctttcatgaaggcagatggtccctcctgaatccagagtttcctggcacagtcggtgatcccactgtacatgtcctcgcccaggcctttcttgagggtttggattcgagttttcagaacatctagaggcgtcactgcgaccgcagctatggaacctgccacacagcctgacacgaaggaatgtgcaaaggacgccttaccggcgagctcgttgaaccccaggttgttaaggttggcaaacagtgggaagtagatgatggagaaaggaatgtctctgaggagagtggcacccaggcccctgtagagcccagccaggccctgagtgcggagcagctcccaggcaatgagggtggcagaggggcgcctgtgggtggaagccgaaccagttgtgtaggacctggaggtggagggtgctgaggccgagccctgatgatggacggccaggcgtccagcatcctgcagctgaatcttgagcatttccatgggacaggtcaccacgacctggcacatcccagccccacacccggcaagcatctccatcttcaggttccgctgcatcctatgggaacaggcgtcaggctccttcagccgcaggccacaggcctgccctggtgcagctgccctcttgtgagagggggactttccctggccatacccatcttccatgagcagccgccggaaaaagtcgttggccgccagcttgatggccttctctggagtgaccagagtgaggttcactgcagcccctcggtacatgccgaagaagccctccgcccgagccgtcttcatcaggcagtcgatcattcctttgtacatggctttcccatgctggttctgcaggcgagtcttggccaagtcgatggggaacacgcaggtcacccccacgagccctgctacacctccattgatgagtttggctgtgatgctcagatcctggtgggtcattctgcaggggctggggatcccaggacacaaggctgctggctccttggggtagccgctgttggggctgtcttcccggcaagtgacgacctccttgggctgcggcttcctcccctgctttcggtaagaacctctgccttttctggaacccaggatatagttcagatcgctgctgagctgatccaggggaagtgttggaggcttatgaggcggcacctcctcctgtgatgttgctgctgtgggggtctttgggaacgaggcctgcgactggaccgggtgcatctgcattcctgatggtctgtacatttcctggaaaggtcctcttattccacttctagtgccaatttgttccatcatcacagcttgaaagtgacccaggccttcttcctggcagcgatagatgggaccctcctgagagaggccgttgggctgggtggcccctgggtggtgaggtgggagggcagccacaggggaagagtaagccctgggctgaaagtgactggccggccgctgaggggtatagggaggccccgtctgcagcatcacactgtggggtggaaatgcagatgaaccaaatcccattcctgaactcagaggcggaggagttccatagagatactcgctggctgacaacgagctctgccgcttggtagctgcgttatggttgtccaggtctaaaaattctttgggactctctggcctctccatagattcatccagcttctcttcctctggaccaggattctgcccgtcatttgggactttagcagccactgcatccatacgggttggagaagttaaggcagcattcagtgtctcacagccttgcagactggccatggcattcttatctgagaagagggaccttggtgggggaggctgactggctgggggtccgcttgggcttccctggggatggagaggtctctgccagtcagaaaagctctgtggacaggcatagtaaggagttcgctgatagtggtggtaggaaggctgtggcggtgggtggtaggaatacctcattccttgtggggggcgataccggggaaagcctccagaatgtgggtggttagactgaaagccccttgggggaaaatgctggggatgggatgctggggacttccctcccatcacagggcccacaccctgcaggcctggactgatgtggtaatgggcagctgaattcgggtactctaggccaggcatatacagcgggggaaactggctcacagtgcctcccgtcaaaccggggtctgtgctgggcggtgtcgctgcgttctgtcccgtgcatggcatggtttcctgcaacgttctgcctctggggcagagcagcttttcggaaccactgctaccaaggcccttcccctccgatccacaaggagatgcttccccaatgactccgttctcggatagagcgcccctgtctgccaccgtggagaggtctctcacgcacccttgggcggctgggccggggtagctgctatccgagggccagggattcttgcccttcattgctttacagttgtccgcagattcggaggagctgcttttgagctccgggcccactgtttccctttcttgtggtgagctctgcctggtgcagtcagtctgcaggggaggtgtggggtgaggtagttgtgtgaggtagaccccctctgaagtaccaacacctggtggtttctcttcaaggccaggcaacggctctgcttggtcattctcaggctcttgtgcttcactgttctccggtgccctcccagggttgcccagggcaggcttgggggctgacacagtgactgacattgggtgagctacctgcggaaaagggccaggtaaacgggggtgtgcaggctggtgggggtggtaaggcacacctggggggcagacgcgggaggagagctgctgcatcgcaatcatctctgggctgtccatcatggagtcccctccctgcaccccccgaagagcctgggcaggtgctccaaacaaagaactgggtgctggcactggaggtggctgtaaccgatgtccggcagacttgcagggcggtcgcatgtaccctgaggaaggaactccatgaggtaggaagcctgattgttcagtccactggttgggggggacaggtggtctcatgactcgggaatccatcacgtgaccgagagtgcgaggctggtgagagggtcctggccccaggtggggcttctcatctgggcccaagggtccttggttcgtagcaccatggttcccattccagacggcagagtgtactcgattcaggtacttgtacgatcgatacatatggctgggaggaatttctgagctttcaggaaagtctggtggccgggctggagcccccccatgccggggaggaatgaatcctggctggaactgagctggagcatacatgcttccatcctgacttgggccacttatctgcccaagctgcaaggatccagggtgtgggcccatgttagaaaggtgtgtcagccccccgcacatttgcttctcctctggtgtgcctagcctgggtcctcggaggctgttaattccaactggaggctgcatggtgaaaggctgacgctgctgcacaggctccccggggtgtggctccaggactccagaggagccatacaaggtggcaggatctgatcctcgcagagggccaaatgttcctggtactgctggcctctcccgcgggggctgtgtggagctgctgctctgatcgtccccagaagagggcgctcggcgtgtggggggcaacgactttcctccattctccatgggctgctgtttcctgctggacccttctgggtccctggagcgggtccaaacatggctcccaccacttcgcccagcccgactccgtcttttctcccgcttttcatcctctcgaatccaaaattcttcatctgtgtctccatcttctccaggaaaatgtttcatcattgcccgatggaaacacctctctaaattatcagacatcttggtatactcactactttccccattatactttcgacaattcctgaacatggtcttcatgtcatttacaaattcctccttggtacagtataaacctccattcagtttcttctccatgctggaaatatccatgggggccttaataatctgataatagttaggggcataagattcatccacaggttccaagaagggccaggaatccttgtgagcctttaccacgtctagaactttatacatagcagtgaaatcatcatccaactcaaagaggtctttagtctttttttcctctctcatgggggaattggggtccagatgggaaagttctggagggagctcctttccttgagccagcagccatgccctttcttccctgagctttctcctcttcgctcgatctacaatgaacacaaaggctgagtgagctaagcacactccagacactgacatggcgtgttccttcatcacttccactgccttgaccttctcctccaactcgcgtttcctctcttcctttagcatctgctcctgctccttcttctgcactgctagaagaatctgacgctcttcttcctcctctttgcgcttttgtttttctattctggtcagcacaggagtctcctcttgcttgacgggtttgatggacaggtggtcagacatccacctaggatgcaactctgcctttgtgcgctgtggacgttttcccttctgggcgatcatgttgcagatctcaggcaggaagtcctcactgaggagcttgtagagctgccgttctcgaagggaggtcctctcgcgaaaactctcggtgacctgtctccattcctcttctgtctggcacaggagccaccaagtaccttggcctggcccttgggacccatgtcttgtctgtggctcggatgccaaggaattttcttcctgcttttcactgctcaaagagagttctccattggattttccttgcaccgggtcctctttgtacattcgtgttccatagaaataccaatatagtgccccagaattgtcttcacccaatggctccacacggagactgtctgcatccaggccctttagaagatcgaagacatcgtctgcatccagccggtaatcacagagtcggtgcaggatctccacccgtgtgcgaagaggcaggtcctggaaactggcttccctcagagggttgggcttcccttcttcgagctcccagcggtagttgatgatgtcctctaggtagctgtggaatgtctgaggcgtgatatctcttcgttgatagcagccctgaagcaggcaggcaatcaggtcactgataaactccacgtcatctctgtgaagagcggcttctaactcctttctcagcattccacaagttacttcctccttcctttgttctcctctgcctttgcctctttttaaaagttctaagttgctagccaatcgggacaaatacagaatgtgaggtcctgttccagccaatggaaaccggacacagcagtagggtggacgtgtcaggttataaatgaccctgtctcctttgttcggtgtactctcatggcacaactgctggtgagtgtaccctttctgccttgctttcctgggcattatggatttaaggatttgtagaatggctgctgagaagtttcgtttgtcctttaagaaaacgagagctgcaggtgcatttccacagggggacgatgagcactcagacatcgccttccatttctgagtgtactttggccattgggtgatcatgaacagccatgagtgtgggcctggaagtgtgaggagagatccaacaatatgcccgctgaggatggcagagtatttgagctccacatcatcgtgctggacaatgaataccaggcaatggtaaacggccatcactgttacacagctttgcccatcgactgctgccagggtctgtgaagatggtccaagtgtggagagatgtctccctgaactcaaggtgtgtctccagtggagaaactgtttcttcttcttcttcttttcttcctcctcctcctcctcctcttcctcttcctcttcttcttcttcttcctcctcttcctcttcctgatgaggctctgtttctgagtcttccttcacatgctcttccttcaggccgatgtggagttctctcactctgtggttcccattatccgcagccaggtggcctgctccagtcttccgcgggagcttctgggaggaggggcgccccaggcgtcccctggcaagtgctcgtgctccagggatgcgtgggcgagttgtccacaagccgctgctggtgatggagctgggcgagcagccattttccttcccgtcagtcaggacagccacgtcatccgcgtctgggaaggcgcctccgcggtgcccttggccagggccccgggctttgtctccgagcagtgtcccctgaggcgaggcggggcccagccgataggctccagctccagcctctcgctggctccaccagtccaggatgtacagggtatttgcttggaaacgaagaaatcctgcaaaggagtatgtcatgccctctgctgctgtcagtgccctgttttcctccacactctccaaggttagaaccatcaacctgctctctttgttctcctctgtgttttcctcacaagaatacttttctgatactacttcccttatgggaggtccattccccatcagataaccctcatccatcaccagcctcaccactgactccaggaagacaaaaggct

SEQ ID NO: 24111 - DNA, 794 bp, Homo sapiens; identical to SEQ ID NO: 19087
  SIMILAR (141)..(188): 931254mologous to Homo sapiens plasminogen-like protein,accession number M93143,Smith-Waterman Score=81.

SEQ ID NO: 24112 - DNA, 701 bp, Homo sapiens
  SIMILAR (384)..(701): 881254mologous to Homo sapiens A multifunctional protein of the invention,accession number Y02100,Smith-Waterman Score=543.
atgccgcagcggaagtctctatgcacccacccccgtctatacctgagcaacacattcctctttgctgctctcttacaggctacagagtgcggtggcgccagcacagagctctgctcaacgtccctctgtgctttcacgatgctgatggattatgaaggtcaaggagagcctctggatgactatgtgaatacccagggggcttcactgttcagtgtcactaagaagcagctgggagcaggaagtatagaagaatgtgcagcaaaatgtgaggaggacgaagaattcacctgcagggcattccaatatcacagtaaagagcaacaatgtgtgataatggctgaaaacaggaagtcctccattaattcattagggatgaggagatgttagttttattttgaaaaagaaagtgtatctctcagagtgcaagactgggaatgggaaagaattacagagggacgatgtccaaaacaaaaaatggcatcacctgtcaaaaatggagttccacttctccccacagacctagattctcacctgctacacacccctcagagggactggaggagaactactgcaggaatccagacaacgatccgcaggggccctggtgctatactactgatccagaaaagagatatgactactgcgacattcttgagtgtgaagaggaatgtatgcattgcagtggagaaaactatgacggc

SEQ ID NO: 24113 - DNA, 879 bp, Homo sapiens
  SIMILAR (163)..(330): 661254mologous to Homo sapiens NAG13,accession number AF194537,Smith-Waterman Score=194.
atgtcctatagtcagtgcgtctcagaccccaaggcccatggcatactacctgggtatcactgctggttattccgggaccaagggctccttaagagtcagcacgtgattaatcctgccaaagctagtactggattcttccttcaagacacactcatggtcctggaaataaaaacaaccatcagaaactactacaaacacctctatgcacacgaactagaacgcttagaagagatggataaattcctggacacatacaccctccgaagactgagccaggaagtaattgattccccaaacagaccaataatgagctccaaaattgaatcagtaaaagggtacacccaccagcagttttgccacaagagtacactgaacaaaggagacagggtcattgataacctgacgtgcccaccctactgctgtgtctggtttccattggctggaacgggacctcacattctgtatttgtcccgattggttagcaacttagaactttttaaaagaggcaaaggcagaggagaacaaaggaaggaggaagtaacttgtggaatgctgagaaagtccctagtcacctcggatcttccagaacctggaggtgtcaccagtgaaggctgtgaaacagcgaaggtaacagcctgttcctccctctgggagctttgtcacagggaggtactgaccccttattgtcccaaagacacctgcaggaagtggctggagaccccagttaggaggtcctgcccagtgaggaggagcaggatcagtacctgcttaagaaagaagtttggccacattttggcggagcagctgagctgtgctggggttccacctcagcccccagtcatgtcacgcactctgaagcctaaaggctggaatggctaa

SEQ ID NO: 24114 - DNA, 1245 bp, Homo sapiens
  SIMILAR (854)..(967): 471254mologous to Hordeum vulgare pZE40,accession number X68600,Smith-Waterman Score=69.
tcagtagtgattcatcattttaaattctttggaaagcaaaatagggtaaaataaataaataaaccaaaatatttgcaagggatctggtgtgataaatacatgctgagtaacaaatgatgaaattggtcctccacactggttgctgactgaattttctggtactcctcgagtatagggtagacagtccaatggcagcaggctgaacaggagaaccgccttacgtacagaaatggtatcgtggcagcaggctgaacgagatatccgccttacataccatccagtggagatgggctggacaagataaccacagggcccagtggccacagtggtgggctggcaaccttcatccaacccaaaactcagggcttcaatcctctgggtggcctgtgttccaatggatgagacaggggctaagttgttcctcatatacaaggaatgaatctccgggttgaccactccacacattccggtgtgtccttgaatggccctcacattcttatcacgccagtggtccgtgatttccctggggccaggtatgcaaaggagcctaggagtaaatgccagcaacaatataaacatcttagaagtacgaggggaagtagggtgcaaaacaactgtgacctgtatgtcctgttctaggccttttccagtgctagaggctgggaagtccaagatcaaagtgctggcagagtcgtggtctggtgagggcctgctctctggttcatagatggtactgtctagctctgtcctcccaataccaccacactggtgatcaaattccaacatacaggttttggaggcacacaaacatttagactctagcatggagtaagcaaatatgtttcccgccttcgccgcagtagcagctggagcagcgacagaggcggcagctgcggcggcggcggcgcccgcgcccctcgcgccagcgcgtagagcggcggcggcagctcgggggccgccactgccccggctgccatgagttgtgcggaggtgatgtatcacccccagccttatggagcgtcccagtatctgcccaaccccatggcagcgacaacctgccccacagcctactatcagccggcgccccaacctggccagcaggtgagtcaccggacgggcagcctgctgggggcgggggcgaagggcatcgagagtatcggtctggggctcggcgacgtcccgccggcacgcgtggcgcagaggatgctctgggatctgcgggagcgtccttgagcagaaagccat

SEQ ID NO: 24115 - DNA, 1285 bp, Homo sapiens
  SIMILAR (308)..(799): 321254mologous to Homo sapiens Human HRPI protein,accession number Y50834,Smith-Waterman Score=102.
tgggcccgtgagaggcagggctgaattccactagaactgacaccagattcttttgccagcctagtacaaggtccacattacaagccaaagctcagaaatttctggaggtggtgtatcaaaatttactctgcgagactctgctgaactggctgcatcagggagaaatttcatctcccagaagggtcgttgctcatcgtttcttcccggaaacatctgcagagactagcttttcaggctaaggtatcctccatgatgttaccattgcaaggtgcccagatgctgcagatgctggagaaatccttgagggaagagcctccccaggaatcctttaaaggtttatggaactggtctttcacataaaccatgggaaatccattcaatctgaaggctgtggtgggacaagtgggcctgattttaattacagtggttgtcttgccctcagggagcaggatatggacagatggaccttggatcactataccattactttaccaaatctactccaaagatccccaaaactgtcaggaattccttggatcaccagaactcatcaactggaaacagcatttacagattcaaagttcacagcctagcctgaatgaggctatacaaaatcttgcagccattaagtccttcaaagtcaaacaaaacacaacgcattctctatatgggcaggctggaaacagccaagggaactgactcctttcctggctggaaatcaaaggattttatctccccagtgggtgggccaaacccaaggccatgtgagtttgataaaatccagtctgtaccactcacacttctcaagtaacctcccaacttctctccctgcattcactctggctttcctacaatcaatgttgtacaaagaaatcagaattacatttttaaaaaatgtaactcagaacatgtttctctcctgcttaaaagactccaccatctcccttctcatctagaataaaccgaggcctctgggctaccacttggacctttattgcccttcctgctttccttcctccaacagctctgaccgttcactctgttccgtctttcatcacaagctcatctatattcccaggacttcacatttgttatttcttctgtctactctgtctctcaagacaatagaggtcacagcaaatacaaacctttatactaatggattttgttttcttcttggaccctccatagcaaccaagagatgtttaaactctcatccatggatgttacccgatgctcacttggtgaataaattctggcattttggtggtaaaaaaaaaaaaaa

SEQ ID NO: 24116 - DNA, 1255 bp, Homo sapiens
  SIMILAR (456)..(515): 951254mologous to Gallus gallus histone H4-VIII,accession number U37576,Smith-Waterman Score=97.
cctatttcccagcaattgcaagagacgcctccgcggagccggcgctcagatgccaaaggctggagtcgttggtgacgtcatccagggctgggctatgcagggtggggccaagaagcaggaccaaagttccggtatgcgcgctttcagtcttcaattaggtccgaattcccggcatataagggcgttgctttgccttggcgtttaggtttcttaagttggttttagaagttgcttagtcatgtctggccgtggtaaaggtggaaaaggtttgggtaagggaggggctaagcgtcatcgcaaggttttgcgcgataacatccagggcatcactaagccagctatccggcgccttgctcgtcgcggcggtgtcaagcgaatttctggccttatctatgaggagactcgtggtgttctgaaggtgttcctggagaacgtgattcgtgacgctgtcactttacacagagcacgccaaacgcaagaccgtgacagcaatggatgtggtctacgcgctggaagcgacagggacgcactctttacggcttcggtggctaaggctcctgcttgctgcactcttattttcattttcaaccaaaggcccttttcagggccgcccacttttttcataaaagagcagacatcttgttatcctgctttgttccagatttttgctgagaagtagttactgtgcacatgtgtagatttgcaagtctggggctcctgatggactctgaggaagatggacgtggaggatgaaaatctgtctgattattttgaactgatgtttgttgctatggagatgctgcctatatgttgatgttgcagacgttaagtcactagcccacagccttgtattccatactcagagaccctgctacttacttgacatctcaacttgaaagtccaattaatatgcacttcaaactttaataggcttcaaacagaatttctttcattatctctgcaaaacagcttctctcatcatcttgaaattagtgaatggcattttactgttttagttggagtcatttctgtggttttctttcacatcctacataacaatccatcagtaagttctatgagctcttctttgaaaacaaacagaatccaactgtttcattcccacttttgctctggtcaagccactgccaacactcacctttattattgtagcaccctcattgcctagttctgtcccacagatttccaataaaaggtgaataaaatcaggtcactcttctgctgaaaaaaaaaaaaa

SEQ ID NO: 24117 - DNA, 840 bp, Homo sapiens
  SIMILAR (792)..(685): 611254mologous to Homo sapiens Human secreted protein, SEQ ID NO: 7131,accession number G03050,Smith-Waterman Score=110.
tcactctattaaatcttgcagctgcacactgttctggtccgtgtttgttatggttccagctgagctttcgctcaccatccaccagtgctgttggccgctgtcgcagaccctccgctgacttccatccctccagatccagcagggtgtcagctgtgctcctgatccagcgaggtgcccattgccaatcctgatccagctaaaggcttgccattgttcctgcacggctaagtggctgggttcgtctcccaagccggagacattttttgaaattatacacccttcaccatcatgaggacctaaatagcgacaccagtaataaccttttgcagtgctgtggagtagctctggtcctttcttcacaaggcctgctgaaatatcagatgtattagtcagtgttctaaaccaatcagcacacactccccattctgagtccataaaaggccccacatagagccacagggggggaattttcccaccttctggtaggggaaacatccccaccatgtcccctctctgatgaaagccattttcatcattcagaaaaattcttctccacccttctcgcccttcaatatcctgtctatcctcatttttctcgagcatggtacaagagcttgcaaactgctgaatgcaggtacaagcctcgtggtgagtgttacagttaaagatggtgtgtccagagtttgttccttctgatgttcggatgtgtccggagtttcttccttcaggtgggttcgtggtttcgctgacttcaggaatgaagccgcagaccttcgcagtgaccgttacagctgaggtcaggagttcaagaccagcctggccaacatggagaaactccat

SEQ ID NO: 24118 - DNA, 792 bp, Homo sapiens; identical to SEQ ID NO: 7949
  SIMILAR (496)..(344): 561254mologous to Homo sapiens novel transcript; similar to transcription factors activation domains; linked at 5' end to AT hook motif of HMGI-C; Method: conceptual translation supplied by author,accession number U28131,Smith-Waterman Score=135.

SEQ ID NO: 24119 - DNA, 633 bp, Homo sapiens
  SIMILAR (30)..(161): 781254mologous to multiple sclerosis associated retrovirus element unknown protein U5/1,accession number AF123880,Smith- Waterman Score=169.
tcactctgttaaatcttgcaactgcactctcttctggtccatgtttgttacggctcgagctgagctttcactcgccatccaccactgctgtttgctgccgccacagacccgccgctgacttccctccctttggcagggtgtcctctctgctcctgatccagcgaggtgcccattgccgctcctgatcgggctaaaggcttgccaatgttcctgcgctgctaagtgctgcgttcgtcctaatcgagctgaacagtagtcactgggttccacggttctcttccatgacccacggcttctaacagagctataacactcaccccgtggcccaagattccattccttggaatcaagaaacctggaatgcagtggttttaagtccacactgtatccatagtagcccctccttttacctgcatgccaggtttctggtttcccttctctgagtgctttgatggccctgcttgctgtgccatagccacggaacatcacactcttctttactttgatgatatcaggctcactgaacctgatgggcacaggtaaccataccccagaggcctgaattgtgtatgtcggtacccaacagtgacttcttctgccagttctttcatcattggcgttcattcgtatcat

SEQ ID NO: 24120 - DNA, 423 bp, Homo sapiens
  SIMILAR (2)..(76): 1001254mologous to Homo sapiens transcription-associated zinc ribbon protein,accession number AF024617,Smith-Waterman Score=135.
cggctcggtcctgcctctgcccggggctcaggatacggtcacctgtattcgctgtggcttcaacatcaacgttcggggttgacaggcgctgccctcgatgtggtcatgaaggaatggcataccacaccagacagatgcgttcagccgatgaagggcaaactgtcttctacacctgtaccaactgcaagttccaggagaaggaagactcttgacctttttcctgggcaactctacagtccctccctcctttggaaggtgaaggatactgcgtttttagatgccttgtccatcctgtctggttgcaatgttttgctcccagaagagaatcagatcatcatgtggggattaccattgttcctggagtactcctacccttagttgaatttccttattaaagttatatttttctataagaccctgaaa

SEQ ID NO: 24121 - DNA, 493 bp, Homo sapiens
  SIMILAR (11)..(265): 971254mologous to Homo sapiens transcription-associated zinc ribbon protein,accession number AF024617,Smith-Waterman Score=444.
acccgaccgcatgtctgtcatggacctcgccaatacttgctccagctttcagtcggacctggatttctgttcagattgcggctcggtcctgcctctgcccggggctcaggatacggtcacctgtattcgctgtggcttcaacatcaacgttcgggactttgaggggaaggttgtgaagacttcggttgtgttccaccaactggggacagccatgcctatgtcggtggaggaagggcctgagtgccagggacctgtggagaaccggagccttaccatcaaacttcggaaacggaagccagagaaaaaggtagaatggacaagtgacactgtggacaatgaacacatgggccgccgctcatccaaatgctgctgtatttatgagaaacctcgggcctttggcgagagctccacggaaagtgatgaggaggaagaagagggctgtggtcatacacactgtagggaagaggaagaggaggacgaacagagatcctga

SEQ ID NO: 24122 - DNA, 373 bp, Homo sapiens
  SIMILAR (122)..(310): 921254mologous to Homo sapiens transcription-associated zinc ribbon protein,accession number AF024617,Smith-Waterman Score=289.
  misc_feature (1)...(373): n = a,t,c or g
agcccacggagttggttaactcctctcaccggcccctggaaagggttccaagtcctttagtacccgacgctgtctgggaattccgggcgtttcggctccttggtcgcagagacccgaccgcatgtctgtcatggacctcgccaatacttgctccagctttcagtcggacctggatttctgttcagattgcggctcggtcctgcctctgcccggggctcaggatacggtcacctgtattcgcttgggcttcaacatcaacgttcgggacttttgagggaaggttgggaagacttcggttggggtcacccactggggacagccatgcctatgtctggggaggaaaggcctgaatggccaggacctgtgggtgacn

SEQ ID NO: 24123 - DNA, 879 bp, Homo sapiens
  SIMILAR (190)..(435): 1001254mologous to Homo sapiens transcription-associated zinc ribbon protein,accession number AF024617,Smith-Waterman Score=440.
tagtacccgacgctgtctgggaattccgggcgtttcggctccttggtcgcagaggcaggaggcgtgcgtggcaggagggttcgggttatatactcctaggtcctgggacagaatagttacgacctctgggacaggaactcttctctcttttgttaataaacttccaactccctcctcagacccgaccgcatgtctgtcatggacctcgccaatacttgctccagctttcagtcggacctggatttctgttcagattgcggctcggtcctgcctctgcccggggctcaggatacggtcacctgtattcgctgtggcttcaacatcaacgttcgggactttgaggggaaggttgtgaagacttcggttgtgttccaccaactggggacagccatgcctatgtcggtggaggaagggcctgagtgccagggacctgtgggtgtcgctctgtcacctagcctggagtgcagcgaggcaatcttggctcactgcaacctccgcctcctgggctcagcgcctgcgcgctgtcacgttacggcggaactaatccagcgacgcctgcgctttgacgcatttggtgccgtggaagggaaaaagggggactgcagtatgcgtcacacccggaagcggcgagccggaagtggggagaaccggagccttaccatcaaacttcggaaacggaagccagagaaaaaggtagaatggacaagtgacactgtggacaatgaacacatgggccgccgctcatccaaatgctgctgtatttatgagaaacctcgggcctttggcgagagctccacggaaagtgatgaggaggaagaagagggctgtggtcatacacactgtagggaagaggaagaggaggacgaacagagatcctga

SEQ ID NO: 24124 - DNA, 1596 bp, Homo sapiens
  SIMILAR (1416)..(1033): 641254mologous to Homo sapiens HCG V,accession number U53588,Smith-Waterman Score=380.
gtgattttgggttatttattttgtgcatctgtggcaataaatgagatctcagtggtggtatggatttgactgatctctgtaactgtgtatggcaaaaggaccggaaaatgaaaaccagatcccagtaaggggtagagaggggccaagagaactgaacatctgggctgccggagaaatcaaagtctaggaagtaagaggtaagagtgtactacaggggacataccccaatctctttgctccctccctcttccttcctctcccagagacccaggtccctgggactatattggatctgtctctgaagctgaaaaacaaaaggcagaggagacagtcggctctaagtgaccaatctcaagccagctttgtcagaaatcctaaataacaggagaagggtgggaagaaaggatatgattatttcttattccattttccataagaggtgagaatgacaaggacctcttttctaactcctcttgagggtgtgagaagggttagcaggaggagaagggctgggagctctgaggtctcctgtaagacctcatatctcacaggcaaggactaagaattaggattaaatattttagtgggatagctctaaaccaggattagcaagcaaagttagggcgcaaattcctggaatctgactgggaccctggcagtgaaagctgggactgttgaaaacccaatttaagtgttcgctactcatgttgagagtgcagggccaagataactagatcccaggacaggcagtttggcagtgagaacaaaaggaagacactgggaccaaggtgcctagatccctcgagagagaagggtgggtattgggaggaaaaatgaggactggggaaacccaggaggctgggttctggaatagcagcaagtcagaatttcaggatctctgttcgtcctcctcttcctcttccctctatcaggcaagaagagagggaaggagggggcttggagaagtagccacatggatacatttagggccagacagacacaggaatgctggaggagagagggatttagtgcttgcattggccctggagaggggctgggaagggtcaggaggctggggaggggtggtgggggtcggtcctagggttgcaacgacgccgtcctttgcggtggcgcgcgtacacagtgtgtatgaccacagccctcttcttcctcctcatcactttccgtggagctctcgccaaagggccgagggtttctcataaatacaagcaagcatttggatgagcggcggcccatgtgttccattgtccacagtgtcacttgtccattctacctttttctcggggcttcccgtttccgaagtttgatggtaaggctccggttctcgggctcggttgtcacggtaaccgttgtctcagtgacggtctcgctcagcccagcccctacatcggccatggctaaggctcaggacagggaggagaggaggaatgggggatgagacacccttccctttttctgtcgctgaggtgtaagagaagcggtatcggattcagagtggtagccacgatcctccaccttctttattccccatcactcctaaacctccgcttctccacccctggggataacctggct

SEQ ID NO: 24125 - DNA, 921 bp, Homo sapiens
  SIMILAR (273)..(314): 1001254mologous to Homo sapiens transcription-associated zinc ribbon protein,accession number AF024617,Smith-Waterman Score=71.
cgcgggcgcaaagctggcgctctatcccacggagttggttaactcctctcaccggcccctggaaagggttccaagtcctttagtacccgacgctgtctgggaattccgggcgtttcggctccttggtcgcagaggcaggagggcgtgcgtggcaggagggttcgggttatatactcctaggtcctgggacagaatagttacgacctcttcggacaggaactcttctctcttttgttaataaacttccaactcccctcctcagacccgaccgcatgtctgtcatggacctcgccaatacttgctccagctttcaagtcgggacctggaatttctggttcaaattgcggttcggtcctgcctctgcccggggctcaggatacggtcacctgtattcgctgtggcttcaacatcaacgttcgggactttgaggggcaaggttgtgaaagacttcgggtttgtgtttccaccaccttggggacagccatgcctatgtccggtggaggaaagggccttgagttgccagggacctgtggttgacagccgctgccctcgatgtggtcatgaaggaatggcataccacacccagcagatgcgttcagccgatgaagggcaaactgtcttctacaccctgtaccaactgcaagttccaggagaagtgaagactcttgacctttttcctgggcaactctacagtccctccctcactttcggaaggtgaaggatactgggtttttagatgccttgtccatcctgtctggttgcaatgttttgctcccagaagagaatcagatcatcatgtggggattaccattgttcctggagtactcctacccttagttgaatttccttattaaagttatatttttctgtaagaccccgaaaaaaaaaaaaaaaaaaaaaaaaaaaaagtcgtatcgatgt

SEQ ID NO: 24126 - DNA, 326 bp, Homo sapiens
  SIMILAR (324)..(259): 1001254mologous to Homo sapiens integral membrane transporter protein,accession number AJ276485,Smith-Waterman Score=123.
  misc_feature (1)...(326): n = a,t,c or g
annnnnnnnnnnnnnnnnnnnatgacaaccgttatttagtttgtatttcataatcataaacttaactctgcaatccagctaggcatgggagggaacaaggaaaacatggaacccaaagggaactgcagcgagagcacaaagattctaggatactgcgagcaaatggggtggaggggtgcgtcgggtctgcgagagcgccagctatcctgagggaaacttcggagggaaccagctactagatggttcgattagtctttcgcccctatacccaggtcggacgaccgatttgcacgtcaggaccgctacggacctccaccagagtttcc

SEQ ID NO: 24127 - DNA, 598 bp, Homo sapiens
  SIMILAR (11)..(238): 981254mologous to Homo sapiens peptidylprolyl isomerase,accession number X52851,Smith-Waterman Score=410.
  misc_feature (1)...(598): n = a,t,c or g
tcgcgacgaggtcaaccccaccgtgttcttcgacattgccgtcgacggcgagcccttgggccgcgtctcctttgagctgtttgcagacaaggtcccaaagacagcagaaaattttcgtgctctgagcactggagagaaaggatttggttataagggttcctgctttcacagaattattccagggtttatgtgtcagggtggtgacttcacacgccataatggcactggtggcaagaccagcaagaagatcaccattgctgactgtggacaactcgaataagtttgacttgtgttttatcttaaccaccagatcattccttctgtagctcaggagagcacccctccaccccatttgctcgcagtatcctagaatctttgtgctctcgctgcagttccctttgggttccatgttttccttgttccctcccatgcctagctggattgcagagctaagcctatgattatgaaataaaaactaaataacnnnnnnnnnnnnnnnnnncctnnnnnnnnnncccgggccccaattccccctataggggggcggattacaattcccgggccggcgtttaacaacggggggactggggtacacccg

SEQ ID NO: 24128 - DNA, 778 bp, Homo sapiens
  SIMILAR (5)..(55): 881254mologous to Canis familiaris cyclophilin A,accession number AF243140,Smith-Waterman Score=73.
  misc_feature (1)...(778): n = a,t,c or g
tttcgtgggccgcgtctcctttgagctgtttgcagactttgtcccaaagacagcaggttggtccattttctaagtttaacaaagatgttccaattgtgacagtttgtgtgtgtgtgtgtatatatatatttttatgtatgtatatatgtgtttaannnnnnnnnnaaacagaaaattttcgtgctctgagcactggagagaaaggatttggttataagagttcctgctttcacagaattattccagggtttatgtgtcagggtggtgacttcatacgccataatggcactggtggcaagtccatctatggggagaaatttgatgatgagaacttcatcctaaagcatacaggtcctggcatgttgtccatggcaaatgctggacccaatacaaatggttcccagtttttaatctgcactgccaagactgagtggttggatggcaagcttgtggtctttggcaaggtgaacggcatgaatattgtggaggccatggagtgctttgtgtccaggaatggcaagaccggccagaagatcaccattgctcgactgtggacagctcttataagtttgacttgtgttttatcttaaccaccagaccattccttctgtagctcaggggagcaccctccaccccatttgctcccagtaacctagaatctttgtgctctcgctgcggttccctttgggttccatgttttccttgttcccttccatgcctagctggattgcagagttaagtttatgattatgaaataaaaactaaataacaaaataaa

SEQ ID NO: 24129 - DNA, 992 bp, Homo sapiens
  SIMILAR (153)..(440): 421254mologous to Homo sapiens peptidylprolyl isomerase,accession number X52851,Smith-Waterman Score=126.
  misc_feature (1)...(992): n = a,t,c or g
aaaccgtgtactattagccatggtcaaccccaccgtgttcttcgacattgccgtcgacggcgagcccttgggccgcgtctcctttgaggtaaggggcctggataccaagaagtgactgctcatctaatccataaagctatgttaacagattggagctgtttgcagacagggtcccaaaggccagccagaaaattttcgttgctctgagccactggagagaaaaggattttggttataaggggttccctgcttttcacagattatttcccagggttttatgtgtcaaggggtggtgaccttcaacaacgccattaatggcaactggtggcaaagtcccatcctatggggaagaaaatttgaaagattgaagaacttccatccctaaaggcataccgggtcccctggcatcttgtccccatgggcaaaatgctgggacccaaaaccacaaaatggtttccccagtttttttaacatcttgcactgcccaagacctgagtggttgggatgggcaagcaatgtggtgtttggcaaaagtgaaaggaaggccatgaatatttgtgggaggcccattggagccgctttggggtccaggaatgggcaaagacccagcaaagaaagatcatcagcattgctgactgtgggacaacttcgaattaagttttgactttgtggtttatctttaaccacccagatcatttctttttgtagctcagggagagcaccccctccaccccatttggctcggagtaatcctaggaatcttttgtggctcttcgctgcaagttccctttggggttccatgttttcctttgttccctccccatgcctagctggatttgcagcagttaaagtttatgattattgaaataaaaactaaataacnnnnnnnnnnnnnnnnnncctcgggggggggccgggcccccattcccccttatgggggggggaataacattcccggggccgcggtttaacaccgcggggagggggaaaaa

SEQ ID NO: 24130 - DNA, 439 bp, Homo sapiens; identical to SEQ ID NO: 18593
  SIMILAR (293)..(436): 771254mologous to Homo sapiens neutral protease large subunit,accession number M27826,Smith-Waterman Score=186.
  misc_feature (1)...(439): n = a,t,c or g

SEQ ID NO: 24131 - DNA, 1059 bp, Homo sapiens
  SIMILAR (732)..(601): 881254mologous to Homo sapiens calbindin D28K,accession number S46006,Smith-Waterman Score=211.
ctaagccaagaagatctgggaagcagtcagagagccttgggccagagttccaggggctctgggagtggctgccaggtgagttggacagtccgatttccagtggggtcccgcacagatgggacgcagcttaggaggaatcccgggctgcaggcattccttggcctggtggccagatttctggcacttgtagcaagctccttccagaaaagcgggaaaggggttgggtcgtggaaataaggggttggggtgcagagataagaggtcggggcatggaaataagggattggggcacagagatataagaggttggggtgcagaaataagggattgggccacagagataagaggtcggggcgtggaaataagggactggggcacagagatacgaggttggggtacttgctcctctagaaaagcggacttgccactcagggtgaaggagaaggggttgggtgtttcttgccccccagaaaggcggagaaggggtagagacacagagagaaggggttggggtacttgccccttccccagaaaagcgggacttgccgctaagggtgaaggaccaaggcaggcgtccctgcgtggtctgacacctctgaaacccgatttaaaattggtgagatgttccttgggctggtcggtctgaggacctgaggccgtaggtggatctttctcatggagcaaagaacaggaggacaggggattgatctcccaagggaggtcccccgattgggctgcataggtgccagctggggcttcagtctcatctggaacttgggtcctattccaagctcttgtaaattgttggcagaattcaggactttttggttgcaggactgagtcccttagcttcttagtagctgtcagctggagactgccttcagtttctagaggcctcccacagtttcctgccacatggccctctccacaggcagtttgcaacaccactgtttgcaccttcaaggccagcaggagagtgtctctccccagtatatctgatgtcttagggctcactgagctctttccatacatgtctaatcctttggggcctttccacat

SEQ ID NO: 24132 - DNA, 1134 bp, Homo sapiens; identical to SEQ ID NO: 11864
  SIMILAR (985)..(1134): 721254mologous to Homo sapiens Human secreted protein, SEQ ID NO: 7420,accession number G03339,Smith-Waterman Score=170.

SEQ ID NO: 24133 - DNA, 381 bp, Homo sapiens; identical to SEQ ID NO: 12907
  SIMILAR (87)..(146): 501254mologous to Homo sapiens Human secreted protein, SEQ ID NO: 5576,accession number G01495,Smith-Waterman Score=64.

SEQ ID NO: 24134 - DNA, 602 bp, Homo sapiens
  SIMILAR (411)..(79): 341254mologous to Bovine leukemia virus gag polyprotein,accession number M10987,Smith-Waterman Score=144.
ctaagccaagaagatctgggaagcagtcagagagccttgggccagagttccaggggctctgggagtggctgccaggtgagttggacagtccgatttccagtggggtcccgcacagatgggacgcagcttaggaggaatcccgggctgcaggcattccttggcctggtggccagatttctggcacttgtagcaagctccttccagaaaagcgggaaaggggttgggtcgtggaaataaggggttggggtgcagagataagaggtcggggcatggaaataagggattggggcacagagatataagaggttggggtgcagaaataagggattgggccacagagataagaggtcggggcgtggaaataagggactggggcacagagatacgaggttggggtacttgctcctctagaaaagcggacttgccactcagggtgaaggagaaggggttgggtgtttcttgccccccagaaaggcggagaaggggtagagacacagagagaaggggttggggtacttgccccttccccagaaaagcgggacttgccgctaagggtgaaggaccaaggcaggcgtccctgcgtggtctgacacctctgaaac

SEQ ID NO: 24135 - DNA, 531 bp, Homo sapiens; identical to SEQ ID NO: 23971
  SIMILAR (219)..(82): 531254mologous to Human T-cell lymphotropic virus type 2 gag polyprotein,accession number AF139382,Smith-Waterman Score=160.

SEQ ID NO: 24136 - DNA, 375 bp, Homo sapiens; identical to SEQ ID NO: 441
  SIMILAR (51)..(122): 831254mologous to Homo sapiens Human secreted protein, SEQ ID NO: 5576,accession number G01495,Smith-Waterman Score=90.

SEQ ID NO: 24137 - DNA, 306 bp, Homo sapiens; identical to SEQ ID NO: 15032
  SIMILAR (285)..(208): 761254mologous to Homo sapiens Human secreted protein, SEQ ID NO: 5576,accession number G01495,Smith-Waterman Score=91.

SEQ ID NO: 24138 - DNA, 909 bp, Homo sapiens; identical to SEQ ID NO: 810
  SIMILAR (353)..(391): 761254mologous to Homo sapiens calbindin D28K,accession number S46006,Smith-Waterman Score=45.

SEQ ID NO: 24139 - DNA, 1764 bp, Homo sapiens; identical to SEQ ID NO: 1396
  SIMILAR (727)..(834): 581254mologous to Homo sapiens Human secreted protein fragment encoded from gene 42,accession number Y07785,Smith- Waterman Score=97.

SEQ ID NO: 24140 - DNA, 368 bp, Homo sapiens; identical to SEQ ID NO: 18552
  SIMILAR (362)..(315): 501254mologous to Human T-cell lymphotropic virus type 1 Gag,accession number S74562,Smith-Waterman Score=36.

SEQ ID NO: 24141 - DNA, 1850 bp, Homo sapiens; identical to SEQ ID NO: 18557
  SIMILAR (1709)..(1008): 851254mologous to Mus musculus protocadherin,accession number AF281899,Smith-Waterman Score=1033.

SEQ ID NO: 24142 - DNA, 1247 bp, Homo sapiens
  SIMILAR (1)..(858): 991254mologous to Homo sapiens RCK,accession number D17532,Smith-Waterman Score=1458.
gcaaccacaggaggaaccaatttacgagatgacataatgaggcttgatgatacagtgcacgtggtgattgctacccctgggagaatcctggatcttattaagaaaggagtagcaaaggttgatcatgtccagatgatagtattggatgaggcagataagttgctgtcacaggattttgtgcagataatggaggatattattctcacgctacctaaaaacaggcagattttactatattccgctactttccctcttagtgtacagaagttcatgaattcccatttgcagaaaccctatgagattaacctgatggaggaactaactctgaaaggagtaacccagtactacgcatatgtaactgagcgccaaaaagtacactgcctcaacacacttttctccaggcttcagataaaccagtcgatcattttctgtaactcctctcagcgagttgaattgctagccaagaagatttctcaactgggttattcttgcttctatattcatgctaaaatgaggcaggaacatcgaaatcgtgtatttcatgatttccgaaatggcttatgccgcaatcttgtttgcactgatctgtttacccgaggtattgatatacaagctgtgaatgtggtaataaactttgatttcccaaagctggcagagacctatctccatcgtattggaagatcaggtcgctttggtcatcttggcttagccatcaacttgatcacatatgatgatcgcttcaacctgaaaagtattgaggcgcagctgtgaacagaaattaaacctattccgagcaacattgataagagcctgtatgtggcagaataccacagcgagcctgtagaagatgagaaaccttaacaagcatgtacgtccctgacagaacagctaacaggaacctctacatgcgggaaaccaaaatctttctttcctgggggaaaattgacgcccccccattttctattacccctaaagggtaccacacccccttagcctcaactgaccgctcatacccaccctcctcctcgcggggtctgtcaccctacatatccgcacacccccccaaccgaccttcctttgctggcctcacttcccccgcctatactgtgtccctttcttactacttccactctagtcccggcgtgaccatcaaaacgatcgcaccttcactcacagttcacgccctacccgcacacctcgtgtgactacctctcagagccgcgtgcgcgcctgacactctcgtgccg

SEQ ID NO: 24143 - DNA, 1221 bp, Homo sapiens
  SIMILAR (997)..(1218): 901254mologous to Homo sapiens RCK,accession number D17532,Smith-Waterman Score=342.
aaagtgtctaccttggcccaagagttattttggtttcctgacttgggacatgttgaataaagctaatttgccagtcctgggtgggggcaaaaccccctgaaccttgaatgtgtaagggaaagggagggggccctgaagaatccctgaggaatagtagaatagcagatggaacactgagaaattatttccttgaggatagatttccatgatggaaaggaaatgagaggttctgaaaggcgggctagtggcttgtactatagcatagcctgcctttgctggtgagtggcggttaggcctggtggaaccgccatcaataaatcaagtgtgatcagggtgaggaacaggaaagaaggaaatctggggaaatggggtgaatgtcaggtggatcggagagatacagtcatgggggtcagggggcttctgaggcgatctggtagtgtcagtcttcagccgctaagccgagaagatctgggaaggagtcagtcagagagccttgggccagagttccaggggctctgggagtggctgccagaatgcataattgaaacagatatacttagcagcgtggagaatttccatattggtttcctgatatgtggtatgagggctcttatgatgggaaaggctaactggaagccattagagctgcctctacctaagaaaatagcaaataacgaccaatattgcatacttacatggctggcagagatcagtatcaccatcaaaaactttaaagatttacacaaaaacttcatgaagatagctaaacagacaaacaaactctccctaactgaagtaaaaactaacatacaaattgatgctaaagtcatgaaagaaaaagagatgacctatgcaaaggaaatcgatgctcaagatttctgtaagtctgtcagtgtacagaagttcatgaattcccacttgcagaaaccctatgagattaacctgatggaggaactaactctaaagggagtaacccagtactatgcatgtataactgagcttcaaaaactcgcagagacctatctccatcgtattggaagatcaggtcgctttggtcatcctggcttagccatcaacttgatcacatatgatgatcacttcaacctgaaaagtattgaggagcagctgggaacagaaattaaacctattccaagcaatattgacaagagcctgtgtggggcagaataccacagcgagcctgtagaagatgagaagccttaa

SEQ ID NO: 24144 - DNA, 777 bp, Homo sapiens
  SIMILAR (578)..(549): 901254mologous to Homo sapiens neutral protease large subunit,accession number M27826,Smith-Waterman Score=51.
aggaatagtcagggaagcagataatttagttaaagtgtctcagcctaataagggaactgggcaggtggggataactaaaaaggagtgcttaaaagagtattgtctaagttggcaccagagttggggagttttaagaggtttagaagcctggccatcaatacccacaacagttatggaggcaagggaaagaggcccttgaaaagagggtaatgtggagtgagtagcctctgtattgattaagaaggggacgggcttaccttccactgtgaaagttacccgaagctcggcgtccgtgaatggtctagggggcttccgaggcgatcgtgcagtgtcagtcttcagctgctaagccgagaagatctgggaaggagtcagtcagagagccttgggctagagttccaggggctctgggagtggctgccaggtgagatgaacagtccgattttcggtggggtcccacacagatgggacgtggcttaggaggaataccgtgctgtgggcattcgcttggcccagtggccagatttccagcaagtgtagcaagctccggatttaaaattggtgagatgttccttgggctggtcggtctgaggacctgaggtcgtaggtggatctttctcacggagcaaagaacaggagtacaggggattgatctcccaagggaggtcccccgatccgagtcatggcaccaaatttcatgcgcgtccgtgtgaagagaccaccaaacaggctttgtgtgagcaataaagctgtttatttcacctgggtgcaggtagg

SEQ ID NO: 24145 - DNA, 389 bp, Homo sapiens
  SIMILAR (166)..(8): 371254mologous to Oryza sativa putative mutator transposable element,accession number AC084319,Smith-Waterman Score=80.
aacctgtgcagttgggctgaagatgcaaactgaatgaatgacagctggagcacctccccctcctcctcccttcgaaacctccagaaggggtttgaggcaaccccacctgcagtgggggctgagaagatgccagtggaagcaccagatcccagaggcaccctgtagggttgcctgtctcctgtgcgctcagggcctgccacttgaaatgaataaataagctaatgaagtgggagctttctgcagcatagtcacacggtcagcgcttggtgtggaggtcaggggcctattgtgggctgcccccaggaactgctcgaacctctcctctcaatccctgtctttgcagtgctcagtgacctgtggaaaaggctacaaacaaaggcttgtctcgt

SEQ ID NO: 24146 - DNA, 1458 bp, Homo sapiens
  SIMILAR (1404)..(1333): 571254mologous to Homo sapiens Fragment of human secreted protein encoded by gene 8,accession number Y36421,Smith-Waterman Score=80.
atgggtcgaaagaacactggcaataagtccctattatctgggttctgggcccagtttcaaatacataactccggtacatgctccagagaagctcttgcatgtatgtccaaaaagaacacatgcagcgccaaacaaaatactgttagggagacatacttctggcaaaaagcaaagcaaggacacgataaatttgtaactcaagagagtggtacacctcctgtgaaaggtggggaagttgccaactctccaggtggccgagacagggcagtccctcaggtaacaggggtgaacactggggggctgcgtgcctgggcagttgatggtggtttggtagctgtattcataattctccttcccggtgtaaatctcgctgcacgagacaagcctttgtttgtagccttttccacagtggcaggccctgagcgcacaggagacaggcaaccctacagggtgcctctgggatctggtgcttccactggcatcttctcagcccccactgcagaaaagcaaaagaaagtgaggaatgattatttgagagctgaaacagggctatttggaaaagagagtattataactggccagggtctgagcatcccagagaagactgggccacaggccctcgggggccagatcgtagtaggtatcgagtgggaacaggatatggcacaattcttgaagtgtgtttcatggaaccctggttatttgggggaaattacaagctgtaacttcgaaaagaagtttttgtgcttggcttcatttagctccctggggcgattagcacaccgcgtactaagcacagcagggcgggacttcaaagaagaggcgctttccccaggacggtcagcagagggcagggttggcctgctcaagaccacctgggcctggaggatgcggctttcaggctccggcaggagagaggtacccaaacataaagccccaccccacttctgtggcccctcttgtgctgtgtatttgctatttaatgctatgctaccttgggcatggagctactggagaggagcacggaggccctcaaggcacccaggagccttcccctgcagtgtggcccaccagtgcccatctgctgccaggtcccctacactgaggcaagaggacccggagaagggaagccaggcatcctcctttcccacaggcccttcaccccaatccatggtggacaggtgccttaaaggacctcaactggatgtgtccagaaagcaactcagtctccctcaaactggtcttcgcccagtattggtaaaccagttgtctaagaagcctaccggctaccctcagacccaaatccagtgggtcctcatgagagacacaggcaaagacacagacacagaggagaaagaaggccatgcaaagatggaggcagagattggagtgatgtacccacaggaacacctggagccaccagagtctggaagagcaaaaggagagattcccctttaa

SEQ ID NO: 24147 - DNA, 354 bp, Homo sapiens
  SIMILAR (103)..(258): 731254mologous to Mus musculus Pro-Pol-dUTPase polyprotein,accession number Y12713,Smith-Waterman Score=190.
atgacagtggattatcgtaagcttaaccaagtggtgactctaattgcagctgctgtaccagatgtggtttcattgtttgagcaaattaacagtctcctggggtacatcaactctccaggtttgtgtcataatcttattcagagagaccttgatcgcttttggtttccacaagatatcacactcgtgccttacattgatgacattatgctgattcgatccagtgagcaagaagtagcaaacatactggacttattggttgcacagtgccatagagaggattccccagaacccacagtttttacagcaggaaaagagaaccaaggaggcagacatctagcttccgtggcattctga

SEQ ID NO: 24148 - DNA, 594 bp, Homo sapiens; identical to SEQ ID NO: 5069
  SIMILAR (3)..(53): 941254mologous to Mus musculus Pro-Pol-dUTPase polyprotein,accession number Y12713,Smith-Waterman Score=79.

SEQ ID NO: 24149 - DNA, 278 bp, Homo sapiens
  SIMILAR (121)..(2): 901254mologous to Mus musculus Pro-Pol-dUTPase polyprotein,accession number Y12713,Smith-Waterman Score=184.
caggagtcgtgttaatttgctcaagcaatgaaaccacatctggtacagcagctgcaattggagtcaccacttggttaagcttatgataacccactgtcattctccaagatccatctgtctgacctccataaacccgtactttaactgggggacagcaatgacgttttgggtaccctggaatcaatgtcagctcagagccagtgtccagtagtccctgaaatgtctgatcatttgcctttcccaatgcacagttaccctggtaaaaggccagaggtctc

SEQ ID NO: 24150 - DNA, 266 bp, Homo sapiens; identical to SEQ ID NO: 3627
  SIMILAR (3)..(137): 861254mologous to Mus musculus Pro-Pol-dUTPase polyprotein,accession number Y12713,Smith-Waterman Score=211.

SEQ ID NO: 24151 - DNA, 564 bp, Homo sapiens; identical to SEQ ID NO: 14401
  SIMILAR (2)..(316): 771254mologous to Mus musculus Pro-Pol-dUTPase polyprotein,accession number Y12713,Smith-Waterman Score=422.

SEQ ID NO: 24152 - DNA, 879 bp, Homo sapiens
  SIMILAR (349)..(849): 751254mologous to Mus musculus Pro-Pol-dUTPase polyprotein,accession number Y12713,Smith-Waterman Score=636.
atgctggatctcccttggtttaatgtagaggaggggatccaaaggctaagggaaattgggatgctagagtggcttagtcactttagacctacccgtctcagcagggaggatccagaagacataccgttcaccaataccttgccaaataaatttgtgaggggagtacctgcatccttgaagagctctttcattggtcttctctgtatgccagatcttaccaagacagttggatcttggagaatgacagtggattatcataagcttaaccaaacggtgactccaattgcagctgctgtaccagatgtggtttcattgcttgagcaaattaacacatctcctggtacctggtatgcagccattgatttggcaaatgccattttctccattcctgtccataaggtgaaggataagttgctgcatttggcccctcctacaaccaaaaaagaggcacaatgcctagtggggctatttggattttggaggcaacactttcttcatttgggtgtgtcactctgggtcatttatcgagtgaccctaaaggctgccagttttgagtggggtccagaatatgagaaggctctgcaacagatccaggctgcagtgcaagctgctctgctactaaggccatatgacccagaatatccaatggtgcttgaggtgtcagtgacagataaggatgctgattggagcctttggcaggcccccataggtgaatcacagcagaggcctctaggattttggagcaaggccttgccattttctgcagataactactctccttttgagagacagttcttggcctattactgggctttagtagaaactgaacgtttgactatgggtcacaagtcaccacatgacctgaactgcgtatcatga

SEQ ID NO: 24153 - DNA, 838 bp, Homo sapiens
  SIMILAR (651)..(292): 541254mologous to Mus musculus Pro-Pol-dUTPase polyprotein,accession number Y12713,Smith-Waterman Score=282.
tcagagcaaggtggccatggcagcttctggagaagcagtggggtcttcaggaaaaccagaggcctggtgacctctggtgacccaggttgttttcagattgtttcccaccaacagcagcctggacctgttgcagagccttctcctgttctggaccccactcaaactggcagcctttcggatcactcgataaatgggctggtgtaaaacacccaaatgaggaatgtgctgcctccaaaatccaaacaggcccaccatgtgttgtacctcttccttggttgtaggaggagccaaatgcagcaatttatccttcaccagtaagtccagtttgttttctacttcttgcacactggatccaatcagcataatgtcatcaatgtaatggaccagtgtggtatctcgtggaagtgaaaagcaatcaagttctctccaaataacattatgacacaaagccagagagttgatataccccttatggacaggaatggagaaaagggcatttgccaagtcaatggctgcataccaggtatcaggagatgtattaatttgctcaagcaatgaaaccacatctggtatagcagctgcaattgcagtcaccacttggttaagcttacaataatccactgtcattctccaagatccatctgccttcttgttaaagcttctgatacatattgacaatttgtcttccacaaagactgtatgaatataaatttccaccagcttagaggcaggtgggtgcccatagcattcaatccatttgcctattttctctgggctttcattcagtgtcattcttctctcttggaatgtctttctcctcctatttctaccacgtggt

SEQ ID NO: 24154 - DNA, 1200 bp, Homo sapiens
  SIMILAR (651)..(292): 541254mologous to Mus musculus Pro-Pol-dUTPase polyprotein,accession number Y12713,Smith-Waterman Score=283.
tcagagcaaggtggccatggcagcttctggagaagcagtggggtcttcaggaaaaccagaggcctggtgacctctggtgacccaggttgttttcagattgtttcccaccaacagcagcctggacctgttgcagagccttctcctgttctggaccccactcaaactggcagcctttcggatcactcgataaatgggctggtgtaaaacacccaaatgaggaatgtgctgcctccaaaatccaaacaggcccaccatgtgttgtacctcttccttggttgtaggaggagccaaatgcagcaatttatccttcaccagtaagtccagtttgttttctacttcttgcacactggatccaatcagcataatgtcatcaatgtaatggaccagtgtggtatctcgtggaagtgaaaagcaatcaagttctctccaaataacattatgacacaaagccagagagttgatataccccttatggacaggaatggagaaaagggcatttgccaagtcaatggccgcataccaggtatcaggagatgtattaatttgctcaagcaatgaaaccacatctggtatagcagctgcaattgcagtcaccacttggttaagcttacaataatccactgtcattctccaagatccatctgccttctcctcatgggtcacactctgaaccttgcctctaggggcccaccaggactttagtctagttatagctctagaagcaaacagggatgttggcagtggctcctgaggagaatcaacattatcttgcctggcaactgcctcaggggaggccatcactgttgcctcaggcagtgcagggtttatctcctcagacaaaggtggaaaggctgatggcagcatcggttggagagggaatgttgccaatactggggatggagaagctgtttcttctggcaaaaaagattgatcagggtttacaagctcagtgtccccagcttcatcagggtcctcccacacgtccccattccaagttgcagggtcccattcttttccaatcaatgccttcactttaacagtagacacctggtgaggcttggccctcatgcattggaaccgttcaccagaccacagagtccccagagatgtcaagagactgggttctgctcccattgtgactgctttagcctgcttctcaaagtttgtgaaggtctttttcgtaacttcaaatttgtacat

SEQ ID NO: 24155 - DNA, 636 bp, Homo sapiens
  SIMILAR (453)..(346): 751254mologous to Homo sapiens reverse transcriptase,accession number AJ233632,Smith-Waterman Score=144.
ttaacctctcagagcctcaatttcttcatctgcatctgcatctgtcttactcatttttatatcttcaggtgctttccatgtgagctgaagctgagaagtattatcttgtccctgcagggaagctgtggtaaggaggacaaaagcatttgggaaatactcctttatatctccagagctgggcacttgttcccacggcagtgtctgttcatgacttttctgctctggtaagcatgacactctaatcctggaagcagcagtgtgctctgcttccttacttctcttatgaatcaataagtccagtgtgtttactacttcttgctcactggatccaatcagcagaatgtcatcaatgtaatggaccagtgtgatatcttgtagaagcaaaaagaaatcaagttctctccgaataagattatgacacaaagctggaaagttgatatacccctgaggtagtgaaggcaaattgcttctggtgggcctcatggacaggaatggagaaaaaggcatttgccaagtcaatggctgcataccaggtaccaggaaatgtgttaatttgctcaagcaatgaaaccgcatctggtacagagctgccattggagtcaccacttggttaaacttacgataatccacggtcat

SEQ ID NO: 24156 - DNA, 1041 bp, Homo sapiens
  SIMILAR (1)..(363): 721254mologous to Mus musculus Pro-Pol-dUTPase polyprotein,accession number Y12713,Smith-Waterman Score=474.
aagacagatggttcttggagaatgacagtgcattatcataagcttaaccaaatggtgactccaattgcagctgctataccagatgtggtttcattgcttgagcaagttaacacatctcctggtagctggtatgcagccattgacttggcaaatgcctttttcttcattcctgtccataaggcccaccagaagcaattcgccttcagctggcaaggccagcaatatacctttactgtcctacctcagggagagaccttggttaatttttcccttcctcaagatatcacactgttccattacattgatgacattatgcagattggatccagtgaccaagaagtagcaaacacactggacttattgcccattaatcaagtgacccgaaaggctgccagttttgagtggggtccagaacaggagaaggctctgcaacaggtccaggctgttgaattttggagcaatgccctgccatcttctgcagataacatctctgcttttgagagacagctcttggcgagttactggaccttggtggaaactgcatgtttggctctgggtcatcaagtcaccatgcgacctgaactgcctataatgaactgggtgctttctgacccatctagccataaagtggttcaggcacagcagcattccatcatcaaatggaggtggtatatatgtgattgggctgtagtaggtcgtgagagcacaaaggaggatttcaataatcaatgggatggaatgacctgttctgtggacaccactcatcctctttccctaaccacctctgtcatcgccaagtgggcccatgaacaaagtgaccatggtggcagcaaagcatacccctacaccaagagacagtcaaagtgcttcattaaatgggtcctgttccctgtgctactcaactggataagatccaccaacaagggttttcagatccctatagaggagctgtcctactggcatcaggttggtgccccaagaggccagagatcccagaagaaggagcaaccacccatctttgctgtttccccgcctctttga

SEQ ID NO: 24157 - DNA, 4265 bp, Homo sapiens
  SIMILAR (287)..(3712): 1001254mologous to Homo sapiens cancer/testis antigen CT7,accession number AF056334,Smith-Waterman Score=5814.
gtctgaaggacctgaggcattttgtgacgaggatcgtctcaggtcagcggagggaggagacttatagacctatccagtcttcaaggtgctccagaaagcaggagttgaagacctgggtgtgagggacacatacatcctaaaagcaccacagcagaggaggcccaggcagtgccaggagtcaaggttcccagaagacaaaccccctaggaagacaggcgacctgtgaggccctagagcaccaccttaagagaagaagagctgtaagccggcctttgtcagagccatcatgggggacaaggatatgcctactgctgggatgccgagtcttctccagagttcctctgagagtcctcagagttgtcctgagggggaggactcccagtctcctctccagattccccagagttctcctgagagcgacgacaccctgtatcctctccagagtcctcagagtcgttctgagggggaggactcctcggatcctctccagagacctcctgaggggaaggactcccagtctcctctccagattccccagagttctcctgagggcgacgacacccagtctcctctccagaattctcagagttctcctgaggggaaggactccctgtctcctctagagatttctcagagccctcctgagggtgaggatgtccagtctcctctgcagaatcctgcgagttccttcttctcctctgctttattgagtattttccagagttcccctgagagtattcaaagtccttttgagggttttccccagtctgttctccagattcctgtgagcgccgcctcctcctccactttagtgagtattttccagagttcccctgagagtactcaaagtccttttgagggttttccccagtctccactccagattcctgtgagccgctccttctcctccactttattgagtattttccagagttcccctgagagaagtcagagaacttctgagggttttgcacagtctcctctccagattcctgtgagctcctcctcgtcctccactttactgagtcttttccagagttcccctgagagaactcagagtacttttgagggttttccccagtctccactccagattcctgtgagccgctccttctcctccactttattgagtattttccagagttcccctgagagaactcagagtacttttgagggttttgcccagtctcctctccagattcctgtgagcccctccttctcctccactttagtgagtattttccagagttcccctgagagaactcagagtacttttgagggttttccccagtctcctctccagattcctgtgagctcctccttctcctccactttattgagtcttttccagagttcccctgagagaactcagagtacttttgagggttttccccagtctcctctccagattcctggaagcccctccttctcctccactttactgagtcttttccagagttcccctgagagaactcacagtacttttgagggttttccccagtctcctctccagattcctatgacctcctccttctcctctactttattgagtattttacagagttctcctgagagtgctcaaagtgcttttgagggttttccccagtctcctctccagattcctgtgagctcctctttctcctacactttattgagtcttttccagagttcccctgagagaactcacagtacttttgagggttttccccagtctcctctccagattcctgtgagctcctcctcctcctcctccactttattgagtcttttccagagttcccctgagtgtactcaaagtacttttgagggttttccccagtctcctctccagattcctcagagtcctcctgaaggggagaatacccattctcctctccagattgttccaagtcttcctgagtgggaggactccctgtctcctcactactttcctcagagccctcctcagggggaggactccctatctcctcactactttcctcagagccctcctcagggggaggactccctgtctcctcactactttcctcagagccctcagggggaggactccctgtctcctcactactttcctcagagccctcctcagggggaggactccatgtctcctctctactttcctcagagtcctcttcagggggaggaattccagtcttctctccagagccctgtgagcatctgctcctcctccactccatccagtcttccccagagtttccctgagagttctcagagtcctcctgaggggcctgtccagtctcctctccatagtcctcagagccctcctgaggggatgcactcccaatctcctctccagagtcctgagagtgctcctgagggggaggattccctgtctcctctccaaattcctcagagtcctcttgagggagaggactccctgtcttctctccattttcctcagagtcctcctgagtgggaggactccctctctcctctccactttcctcagtttcctcctcagggggaggacttccagtcttctctccagagtcctgtgagtatctgctcctcctccacttctttgagtcttccccagagtttccctgagagtcctcagagtcctcctgaggggcctgctcagtctcctctccagagacctgtcagctccttcttctcctacactttagcgagtcttctccaaagttcccatgagagtcctcagagtcctcctgaggggcctgcccagtctcctctccagagtcctgtgagctccttcccctcctccacttcatcgagtctttcccagagttctcctgtgagctccttcccctcctccacttcatcgagtctttccaagagttcccctgagagtcctctccagagtcctgtgatctccttctcctcctccacttcattgagcccattcagtgaagagtccagcagcccagtagatgaatatacaagttcctcagacaccttgctagagagtgattccttgacagacagcgagtccttgatagagagcgagcccttgttcacttatacactggatgaaaaggtggacgagttggcgcggtttcttctcctcaaatatcaagtgaagcagcctatcacaaaggcagagatgctgacgaatgtcatcagcaggtacacgggctactttcctgtgatcttcaggaaagcccgtgagttcatagagatactttttggcatttccctgagagaagtggaccctgatgactcctatgtctttgtaaacacattagacctcacctctgaggggtgtctgagtgatgagcagggcatgtcccagaaccgcctcctgattcttattctgagtatcatcttcataaagggcacctatgcctctgaggaggtcatctgggatgtgctgagtggaataggggtgcgtgctgggagggagcactttgcctttggggagcccagggagctcctcactaaagtttgggtgcaggaacattacctagagtaccgggaggtgcccaactcttctcctcctcgttacgaattcctgtggggtccaagagctcattcagaagtcattaagaggaaagtagtagagtttttggccatgctaaagaataccgtccctattacctttccatcctcttacaaggatgctttgaaagatgtggaagagagagcccaggccataattgacaccacagatgattcgactgccacagaaagtgcaagctccagtgtcatgtcccccagcttctcttctgagtgaagtctagggcagattcttccctctgagtttgaagggggcagtcgagtttctacgtggtggagggcctggttgaggctggagagaacacagtgctatttgcatttctgttccatatgggtagttatggggtttacctgttttacttttgggtatttttcaaatgcttttcctattaataacaggtttaaatagcttcagaatcctagtttatgcacatgagtcgcacatgtattgctgtttttctggtttaagagtaacagtttgatattttgtaaaaacaaaaacacacccaaacacaccacattgggaaaaccttctgcctcattttgtgatgtgtcacaggttaatgtggtgttactgtaggaattttcttgaaactgtgaaggaactctgcagttaaatagtggaataaagtaaaggattgttaatgtttgcatttcctcaggtcctttagtctgttgttcttgaaaactaaagatacatacctggtttgcttggcttacgtaagaaagtcgaagaaagtaaactgtaataaataaaagtgtcagtg

SEQ ID NO: 24158 - DNA, 7806 bp, Homo sapiens
  SIMILAR (4378)..(6855): 681254mologous to Homo sapiens cancer/testis antigen CT7,accession number AF056334,Smith-Waterman Score=2492.
tctgatcttcaacaaagccatcaagaacatacactggggaaagggcagcctcttcagtaatggtgctggaatatgtggataaccagatgcagaagaatgaaactggactcctgaatatatacacattgcaaataatcatgtaaaaagatgattagcatcttatgtcactagggaattacaaagtaaaacaggataccactacacatcttttagcaggaagggaacacccatgactggtagtgcccctcccctgtccctgtgcctgctgccagctctggaggaccctatcagggtccccaggtttacaactttctgacttgcattttgggagtcagccggaggggaagttttctctgaggagggcagtttcagttaagcagagggaggaaccccaggactggccactcaacgagaagagaactctgtggaaggacagtgaccttccaacatggaggagaggcacaggctacagcccattcaatgaagagcctagcagccaataagatgaagatacaagtacctggcacagcttgccagagagcgagcccttgttcacttatacactggatgaaaaggtggacaagttggtgcagtttcttctcctcaaatatcaagcaaaagagcctctcacaagagcagagatgcagatgaatgtcatcaacacatacacgggctactttcctatgatcttcaggaaagcccgtgagttcatagagattctttttggcatttccctgacagaagtggaccccgaccatttctatgtctttgtaaacacattagacctcacctgtgaggggagtctgagtgatgagcagggcatgccccagaaccgcctcctgattcttattctgagtgtgatctgtgagattttggtcatgtgaaacaataccgtctctagttcctttccaatctcttccaaggatgctttgaaagatgtggaaactcatcccagctgagagggtccagaagatacacccttgaccaatcctttgtgaaacagatttgtgagggcagcacctgcatctttgaagagatctgcagggattggtcttctctgtatgccagatctaacagtgggaattgtagtcactcaactaaaaaatttaaatgcaatgggaatcactggctctgagctgacattgattccaggggacccaaaatgacattttggtcctccagttaaagtaggggcttttggaggtgagatagttaataaatatttagctcagcttggacttacagatgatccagtgggtccccggactcatcctgtggccattttcccagtgccagaatgtataattggcatagacatacttagcagcttgcagaacccccacattggctccctgactgggagggtgagggctattatgaagggaaaggctattatgaagggctattatgaagggaagggaaaggccaagtggaagatattagagctgcctctacctagaaaaataataaatcaaaaacaatatcgcatccctggagggattgtggagatgagtgccaccatcgaggaactgaaatacgcaggggtggtgattcccaccacatcccccttcaactctcccatttggcctgtgcagaagacagttggatcttggagaatgacagtggattatcgtaagcttacccaagtggtgactccaattgcagctgctgtaccagatgtggtttcattgtttgagcaaattaacacatctcctgatacctgggatgcagccattgatttggcaaatgcctttttctccattcctgtccataagtcccaccagaagcaaattgccttcagctggcaaggccagcaatatacctttaccgtcatacctcaggggtacatccactctcctgctttgtgtcataatcttattaggagagaccttgatcgatatccaatgctgcttgaggtatcagtggcggatagggatgctgtttaaaccttttggcaggcccccattggtgaatcacagcagggggctctaggattttggagcaaggcccttcaatcttctgcagataacaactctcctttcaaatcaccatgcaacctgaactgcctatcatgaactgggtgctttctgtcccatctagccataaaatgggtcatgcacagcagcattcaggaagtggcacaaatgcccagggtctccacccctgccaccctgccttctctcccccagcctgcactgatggccccgtggacagttccctatgatcagttgatggaggaagagaaagctagggcacgatatgcaggcaccatccaaaagtggacagctgcagcactacagcccctttctaggacatccctgaaggacagtggtgaagggacttctaagtggggccgttctgtggacaccactcagcctctttccccagccatccctgtcatcttccaataggcccatgaacaaagtggccatagtggcatggatggaggttatgcatgggctctgcaacatggacttgcactcaccaacactgacctagccatccagaaggccctgtatgctctgaatcagtgttcaatatatggtattgtttctcccatagtcaggattcgtgagtccaggaatcaaggggtggaaacaccactcaccatcacccctagggacccactagcaacacttttgcttcctattcccatgacattacattctggtggcctagaggtcttatttccagagggagaaacgctgccgccaggagacacaacaatgattccattaaactggaaaataaggttgtcacctggacactctgggctcgtcctacttttaagcaaacaggctaagaaaggagttacagtgtttgctggggtgattgacccgggctatcaagatgaaatcaatccactactctgcaagggaggtgagaaagagtatgcaaggaatacaggagatccattagggcatctatggagaggaggccccgccccacgctgcctctgctgtcagccctggtcaaccttggcagggttcgcggatgtgctttcccgacttgcattgtgggagtctgaaggacctgaaacattttgaactgagggacttcgcaccaaggacagaagaagccccggtctgccctgcgctgccataggacttgcaggccacagggagaggtcccacgtgcatcagaacagacgtgaggccaccccgactgcccccgtggtagagtgctgggaggtggctgccacctcgctacctcccgctgctctcagggatgtgacctgctgctcctgaacaacaggcctcatgcctctctttccaaaccttccacgcctcagctttgaggaagacttccagaacccgagtgtgacagaggacttggtagatgcacaggattccatagatgaggaggaggaggatgcctcctccacttcctcttcctctttccactttttattcccctcctcctcttccttgtcctcatcctcacccttgtcctcacccttaccctctactctcattctgggtgttccagaagatgaggatatgcctgctgctgggatgccacctcttccccagagtcctcctgagattcctccccagggtcctcccaagatctctccccagggtcctccgcagagtcctccccagagtcctctagactcctgctcatcccctcttttgtggacccgattggatgaggagtccagcagtgaagaggaggatacagctacttggcatgccttgccagaaagtgaatccttgcccaggtatgccctggatgaaaaggtggctgagttggtgcagtttcttctcctcaaatatcaaacaaaagagcctgtcacaaaggcagagatgctgacgactgtcatcaagaagtataaggactattttcccatgatcttcgggaaagcccatgagttcatagagctaatttttggcattgccctgactgatatggaccccgacaaccactcctatttctttgaagacacattagacctcacctatgagggaagcctgattgatgaccagggcatgcccaagaactgtctcctgattcttattctcagtatgatctagtctggccagccccagctgccgtcttagctggaggggctccctcccttcctcttgcaggtgctccagaaagcaggagttgaagacctgggtgtgaggacctgctgctcctgaacaatattcatcatgcctctctttctaaaccttccaggagtcaaggtttgagcaaggcttccagaaggcaattttcatactggagttggtagatgcagaggatcccccagatgaggaagaggaggaagcttcctccattttctcttcctctttccactttttattcccctcgtcctcctcctgtttttctttctcatcctcatcctcctctctgcttctgcgttctccaggggacaaggatatgcctactgctgggatgccgagtcttctccagagttcctctgagagtcctcagagttatcctgagggggaggactcccagtctcctctccagattccccagagttctcctgagagcgacgacaccctgtatcctctccagagtcctcagagtcgttctgagggggaggactcctcggatcctctccagagacctcctgaggggaaggactcccagtctcctctccagattccccagagttctcctgagggcgacgacacccagtctcctctccagaattctcagagttctcctgaggggaaggactccctgtctcctctagagatttctcagagccctcctgagggtgaggatgtccagtctcctctgcagaatcctgcgagttccttcttctcctctgctttattgagtattttccagagttcccctgagagtattcaaagtccttttgagggttttccccagtctgttctccagattcctgtgagcgccgcctcctcctccactttagtgagtattttccagagttcccctgagagtactcaaagtccttttgagggttttccccagtctccactccagattcctgtgagccgctccttctcctccactttattgagtattttccagagttcccctgagagaagtcagagaacttctgagggttttgcacagtctcctctccagattcctgtgagctcctcctcgtcctccactttactgagtcttttccagagttcccctgagagaactcagagtacttttgagggttttccccagtctccactccagattcctgtgagccgctccttctcctccactttattgagtattttccagagttcccctgagagaactcagagtacttttgagggttttgcccagtctcctctccagattcctgtgagctcctcctcctcctccactttattgagtcttttccagagttcccctgagagaactcagagtacttttgagggttttccccagtctcttctccagattcctatgacctcctccttctcctctactttattgagtattttccagagttctcctgagagtgctcaaagtacttttgagggttttccccagtctcctctccagattcctgggagcccctccttctcctccactttactgagtcttttccagagttcccctgagagaactcacagtacttttgagggttttccccagtctcctctccagattcctatgacctcctccttctcctctactttattgagtattttacagagttctcctgagagtgctcaaagtgcttttgagggttttccccagtctcctctccagattcctgtgagctcctctttctcctacactttattgagtcttttccagagttcccctgagagaactcagagtacttttgagggttttccccagtctcctctccagattcctgtgagctcctcctcctcctcctccactttattgagtcttttccagagttcccctgagtgtactcaaaagtacttttgagggttttccccagtctcctctccagattcctcagagtcctcctgaaggggagaatacccattctcctctccagattgttccaagtcttcctgagtgggaggactccctgtctcctcactactttcctcagagccctcctcagggggaggactccctatctcctcactactttcctcagagccctcctcagggggaggactccctgtctcctcactactttcctcagagccctcagggggaggactccctgtctcctcactactttcctcagagccctcctcagggggaggactccatgtctcctctctactttcctcagagtcctcttcagggggaggaattccagtcttctctccagagccctgtgagcatctgctcctcctccactccatccagtcttccccagagtttccctgagagttctcagagtcctcctgaggggcctgtccagtctcctctccatagtcctcagagccctcctgaggggatgcactcccaatctcctctccagagtcctgagagtgctcctgagggggaggattccctgtctcctctccaaattcctcagagtcctcttgagggagaggactccctgtcttctctccattttcctcagagtcctcctgagtgggaggactccctctctcctctccactttcctcagtttcctcctcagggggaggacttccagtcttctctccagagtcctgtgagtatctgctcctcctccacttctttgagtcttccccagagtttccctgagagtcctcagagtcctcctgaggggcctgctcagtctcctctccagagacctgtcagctccttcttctcctacactttagcgagtcttctccaaagttcccatgagagtcctcagagtcctcctgaggggcctgcccagtctcctctccagagtcctgtgagctccttcccctcctccacttcatcgagtctttcccagagttctcctgtgagctccttcccctcctccacttcatcgagtctttccaagagttcccctgagagtcctctccagagtcctgtgatctccttctcctcctccacttcattgagcccattcagtgaagagtccagcagcccagtagatgaatatacaagttcctcagacaccttgctagagagtgattccttgacagacagcgagtccttgatagagagcgagcccttgttcacttatacactggatgaaaaggtggacgagttggcgcggtttcttctcctcaaatatcaagtgaagcagcctatcacaaaggcagagatgctgacgaatgtcatcagcaggtacacgggctactttcctgtgatcttcaggaaagcccgtgagttcatagagatactttttggcatttccctgagagaagtggaccctgatgactcctatgtctttgtaaacacattagacctcacctctgaggggtgtctgagtgatgagcagggcatgtcccagaaccgcctcctgattcttattctgagtatcatcttcataaagggcacctatgcctctgaggaggtcatctgggatgtgctgagtggaataggggtgcgtgctgggagggagcactttgcctttggggagcccagggagctcctcactaaagtttgggtgcaggaacattacctagagtaccgggaggtgcccaactcttctcctcctcgttacgaattcctgtggggtccaagagctcattcagaagtcattaagaggaaagtagtagagtttttggccatgctaaagaataccgtccctattacctttccatcctcttacaaggatgctttgaaagatgtggaagagagagcccaggccataattgacaccacagatgattcgactgccacagaaagtgcaagctccagtgtcatgtcccccagcttctcttctgagtgaag

SEQ ID NO: 24159 - DNA, 372 bp, Homo sapiens
cctaatttaattgtttggggtacagcctgaatttctggattttaaaaagttccccagtaattctaatgtacagtgaagtttgagagttagtactctgagaacctaacataccagttcaggaagatatcaagggtaagcgaatgagaaaggacaggggcagctggatgctctctgctcaagcctttcctgggacccccttggcctgattatctgtctctctagggcctccaagtctggggtccaggttgagcatccctacattaccggtgcaatcaaagatgacacgagagctatagtaaaaactagggacttggcaaacaggttaaaatgagaagctggacctactttaaagccagatgagaagtgactttt

SEQ ID NO: 24160 - DNA, 1076 bp, Homo sapiens
  SIMILAR (420)..(482): 651254mologous to Plasmodium lophurae histidine-rich protein,accession number M15317,Smith-Waterman Score=106.
atggtgcacatgaatgtcctggctgatgctctcaagagcatcgacaatgctgaaaagagaggccatgaactcagaacaaggaaagaatgtctgctgttaccacttatatccaacactgaacttggatgtttagcggcatccccggcctctacccaccagatgcctgaagcacccccacccccaggtgtgacaaccaaaagtctccagacattgccaaacgtcccctgggagctatctgtatagcctgcaatctggtagatggaccacagggaaaccactgcagcaaactaaaagtgtctatctcagatccttccaccaccatcatttccaaaatcaccgtcactatctccaccaccatcacctttaccaccatcaccactatcatcctcatccttcccatcaccatctccactgctatctctcaacaccatcatcatcaccaccaccaccatcatcaccatgagcaccacctctgtcgtcatcaaaaaagcacacaggtagaatacagtgtctttgctgaaagggaaaacgacctgggattgaacggcaccggggatgaagcattgcacgataacggcacaaccgagcgcgtcagcggcccgcccgccggctatttataccgcgcggattatgcaatcgggctccagccattcatgccccgactgggccgccgcacgcccggggcgggggggcctcattcccgggcgccggagctggcctacctgcagaaattaatcacctcacctgccaccttgccatttgtgtaccttgaaactggagggtggagcccaagagatgcccacagggtggataattttgacatggggccaagagagaacatgggctctgtttgggagaaatcttttcttttcaccaggaatccttctaaaagcagttatattgctgataaaaaccttatttatttgtatgcttctgaatgcattggaaggcaatcacaaaaagcacgggcctccaagtctggggtccaggctgagcatccctacattaccggtgcaatcaaagatgacacgagagctatagtaaaaactagggacttggcaaacaggttaaaatga

SEQ ID NO: 24161 - DNA, 381 bp, Homo sapiens
  SIMILAR (281)..(370): 401254mologous to Zinnia elegans phenylalanine ammonia- lyase,accession number AB005288,Smith-Waterman Score=59.
gtctgaataagatcccagagagaaatttggaaacagctttatctcaatcagtacagtctattcctttgtatctcatgccacggccaaattcagtagcagccaccagctctgcccacttggaagaccttgcttacctggatgagcagaaatgtaactcatatgtacttctttcaagatcctatcacgcctcttctgcccttcatcactgtgatcgagctcatctcaaggtgcctgtatctcaaaactcttatcagttcttacgtacgctcacctctactttgccttagagaaggaagtacttaccttcctttccagagcaattgtctcctcctctacactcttaacccacggtgttgctcattctctcacgttatttcattc

SEQ ID NO: 24162 - DNA, 1356 bp, Homo sapiens
  SIMILAR (1070)..(1141): 441254mologous to Gadus morhua metallothionein,accession number X97269,Smith-Waterman Score=50.
tcagggcaaggactgattcttagagcttcttactctgcttttctgtgatgccatttgatagcaggaagtagctaaccactcagggggtttcttgggcatctgagagcccttgatggaaaagcagacattcagacagatgcactgagctctagctgagtagtctcttaaatcctgctgtgtgcgagcaccacccatgctctgtcttggcattcgtagagaagttctcaaaggtgtatgtctctgctcatccaggtaagcaaggtcttccaagtgggcagagctggtggctgctactgaatttggccgtggcatgagatacaaaggaatagactgtactgattgagataacactgtttccaaatttctctctgggatcttattcagactataggtggaagcagtcatgttttcatctactcgatacaaacaggagtccatgctggatttttgagactgccaaggttttatgtttcctccagatcctaattctttactgctttccccagcatattttgtgcgttccacattttcagaatagcttgttaatgtagctaagatgactgagctcctgggaagaggggcagcagccatcactgcagctccagtctgctgtttttcccctactggtgccagggagactgggcggtttagacccaggaagaattccccacagtgcagcacagcaactgtggcagattgtggccagactgctggctggggctcccctgtgggaatttcagtaactccagccagaggtttacgaacagaactctgatctccccagaaggagaggcagccgcagttgcagccgcagtctcggttgatcagcggacttagtctttcccgctgctggctctgaggaatccgggtagtccagacaagtgggattccccccagtgcagtgcaccccctcttatacaggagggttcccgctgacatcgggtcagtgcccctctgggatggagctcctagaggaagaagcaggcagccatctttgctgttctgcagcctccactggtgacacctccagttgtaggagggacccaggtgaacaggatgggatggacccccagcaaactgcagcagccctatggaaggagacagcaatgtacactgcagctgtgtctgctgttgctcctgcttcggactgctactgttgccatacactgctgctgtgctcctccgggctgctctgcctgtggagcagccactttgctgtactctgctcctctgggctcctctgcctatgggatagccctgctctctcctttccatcatgtgaggatgatgctgtctacgaaacaggaagttggccttcaccagacactgaatctgccttgatccaggacttcccat

SEQ ID NO: 24163 - DNA, 726 bp, Homo sapiens
  SIMILAR (330)..(383): 771254mologous to Homo sapiens p40,accession number U93571,Smith-Waterman Score=71.
atgttgaatgtgcaggcactggtggtgatggttatgtgcttcatgtgggctagtctttgggccccaggtgggcacccaagtgctggcaatatctctagttgggtgagtggactggtttcatttcctgagtggagtagttgggagctggtggtttctgtagtgggttgggcagggaaattgtggctgcatgaatccctcttgacactgaacctgtcttgtggcttgcttgtagtgctggtggcactggtgtttgatgagtggcacccatggagtggccatgttgctgaggcctgcagcacaggttattggagtacaggtggtatttggttccatgagattgcagctcctcaccagcaatggaacaaagctggatggagaatgactgatgagctgatagaagtaggcttcagaagattggtaataacaaacttctccgagctaaaggaggatgttcgaacccatcttaaggaagctaaaaaccttgaaaaaagattagatgaatggctaactagaataaacagtatagagaagaccttaaatgatctgatggagctgaaaaccatggcacgagaactacgtgacgcatgcacaagcttcagtagccaattcgatcaagtggaagaaagggtatcagtgattgaagatcaaatgaatgaaatgaagcgagaagagaagtttagagaaaaaagagtaaaaagaaacgaacaaagcctccaagaaatatga

SEQ ID NO: 24164 - DNA, 430 bp, Homo sapiens; identical to SEQ ID NO: 14566
  SIMILAR (86)..(3): 601254mologous to Homo sapiens Human secreted protein sequence encoded by gene 11 SEQ ID NO:72,accession number B24447,Smith-Waterman Score=80.
  misc_feature (1)...(430): n = a,t,c or g

SEQ ID NO: 24165 - DNA, 1982 bp, Homo sapiens
  SIMILAR (1118)..(1945): 601254mologous to Homo sapiens p40,accession number U93567,Smith-Waterman Score=774.
ttacataggagatctggcaagatggctgaataggaacagctctggtctgcagctcctagtgagaccaatgcagaaggcgggtgatttctgcgtttccaactgagtggtgcctggaaccccagcaagacagaaccgttcactttcctggaaagggggcctgaagccagggagccaagtggtctggctcggcggttcccacccccatggagcccagcaagctatgaaccactggaatgaaattctcgctgccagcacagcagtctgaagacaacctgagatgctcaagcttggtgggtggaggggtggccgccattactgaggcaggagtaggaggttttcccctgacattgctaaggaggctgggaagttcgcactgggcagaactcaccacagcgtggcaaagcagctgcggccagactgcctctctagattcttcctcactgggcagggcatctctgaaagaaaggcaatagccccattcaggatcttgaagataaaactcccatctccctgggacagagcacctgggggaaggggtggttgtgggcacagcttcagcggacataaactttcctgcctgccagctatgagagctcctgctggcatcaggctggtgccccctctgggacgaagcttccagaggaaggagcaggcagcaatatttgctgttctgcagcattgctgttctacaatatttgctgttctgcagcctccgctggtgatacccaggcaaacagggtctggagtggacctccagcaaactccaacagacctgcagctgagggacctgactgttaaaaggaaaactaacaaacagaaaggaatagcatcaacatcaacagaaatggacatcaacaccaaaaccccatctgtaggtcaccatcatcaaagaccaaaggtagtataaaaccacaaagatcggggagaaaccagagcagaaaagctgaaaattctaaaaaccagagcacctcttctcctccaaaggattgcagctcctcactagcaatgaaacaaagctggatggagaatgactttgacgagttgacaggagcaggttttagaaggttggtaattacagacttctcagagctaaaggaggatgttcaaacccatcacaaggaagctaaaaaccttgaaaaaaaaattagacaaatggctaactagaataaacagcgtagagaagtccttaaaagacctgatggagctgaaaaccatggcacgagaactatgtgacgcatgtacaagcttcagtagccgatttgatcaagtggaagaaagggtatcagtgattgaagatcaaatgaatgaaatgaagcgaaaagagaagtttagagaaaaaagagtaaaaagaaacgaacaaagcctccaagtaatatgggactatgtgaaaagaccaaaatctacgtctgattggtatacctgaaagtgacgaggagaatggaaccaagttggaaaacactctgcaggatattatccaggagaacttccccaacatagcaaggcaggccaaccgttcagattcaggaaatacagagaacgccacaaagatactcctcgagaagagcaactccaagacacataattgtcagattcaccaaagttgaaatgaaggaaaaaagtgttaagggcagccagacagaaaggtcgagttacccacaaagggaagcccatcagactaacagctgatctctcagcagaaaccgtacaagccagaagagagtgggggccaatattcaacattcttaaaggaaagaattttcaacccagaatttcatatccagccaaactaagcttcataagtgaaggagaaataaaatactttacagacaagcaaatgctgaaagattttgtcacgaccaggcctgccttacaagagctcctgaaggaagcactaaacatggaaaggaacaactggtaccagccactgcaaaagcatgccaaattgtaaagaccatcgaggctaggaagaaagtgcatcaact

SEQ ID NO: 24166 - DNA, 2397 bp, Homo sapiens
  SIMILAR (1822)..(2367): 951254mologous to Escherichia coli membrane component,accession number U73857,Smith-Waterman Score=854.
atgacgaaaattattgcagtaaccgcatgtccttcaggtgttgcccatacctatatggcagcagaggcgctggaaagtgccgcgaaagcgaaaggctgggaagtgaaagtagaaacccaggggtcaattggtctggaaaatgaactgactgcggaagatgtggcgagcgctgatatggtgattctgaccaaagatatcggcatcaagtttgaagagcgttttgctggcaagaccatcgtgcgcgtcaacatcagcgatgcagagttcctcatgacgaatcgtatctctcgcctcaaaactgcactgtttgccaatacccgtgaaatctcgctggagcgggcgctgctttataccgccagccatcggcaaaccgaaggcgaaccggtgatattgcgccgggcgaaagcaacagcgtatatccttgaacatgttgaaatttcgattcgtgatgaagaactgattgccggtaaccgcaccgtaaaaccgcgcgccgggattatgtcgccggaaatggacccttactggctgctgaaagagctggatcaattcccgacgcgtccgcaggaccgctttgctatcagcgaagaagataaacgtatctaccgtgaagagttgttcccgtactgggaaaaacgttcgatgaaagatttcatcaacgggcagatgacagatgaagtaaaagccgcgaccaacacgcagattttcagcatcaaccagacggataaaggccaggggcacattattattgattacccacgcctgttgaatcacgggctggcctcgcagaaacacattttgcgttacgccgaactggcggaaacgatggcggcaaactgcacagatgcccagcgtcgcgaagagctgctgactattgcagagatctcccgccataacgcgcaacataagccgcagacgttctggcaggcgtgccagttattctgcggggtaaatgccatcagggcggccgccagaaacagtgacctgaacattgttattctccttcacgctcgaagccgtcagcggcctgttaacgcaatattacggggagacgattcgaaaatacggcagaacggtatgcgctggtcgcgggacgtgcatgcgatcaaccttttcgccgaaaaatggggaaatctccccgaacatgcggggcacccaacgggtgtataccgccacaattggttaccatgtccgggaatatccccgaagtcgtcccgcaaatatcccgccattttctccgtataccgacatggcagcattcaactggcgggtaagcgtattgagggaccgggagcagagcgtggcgtagtttttcagaatgaagggctactaccgtggcgcaatgtacaggacaacgtggcgttcggcctgcaattggcaggtataaggaggaaaaattgccaggcggactggaaatcgcgcaccaatgctgaaaaagtgggtggaaggcgcagaaaacgctacatctggcagctttccggtggtcaacgtcagcgggtggggattgctcgtgcgctggcggcgaatccccagctgttattactcgacgaaccgtttggtgcgctggacgccttcacccgcgaccagatgcaaaccctgctgctgaaactctggcaggagacgggcaagcaggtgctgttgattacccacgatatagaagaagcggtgtttatggcgactgaactggttctgctttcatccggccctggccgtgtgctggagcggctgccgctcaactttgctcgccgctttgttgcgggagagtcgagccgcagcatcaagtccgatccacaattcatcgccatgcgcgaatatgttttaagccgcgtactggaaaaactactcaccattgccggaccgcaaggctttatggacgccacgctgtggcagcatctggcagccagtctgacgcgcattatgctggcgctatttgcagcggtgttgttcggtattccggtcgggatcgcgatgggacttagccctacggtacgcggcattctggatccgataatcgagctttatcgtccggtgccgccgctggcttatttgccgctgatggtgatctggtttggtattggtgaaacctcgaagatcttactgatctatttagcgatttttgcaccggtggcgatgtcggcgctggcgggggtgaaaagcgtgcagcaggttcgcattcgtgccgaccagtcgctgggtgccagccgtgcgcaggtgctgtggtttgtcattttgcccggtgcgctgccggaaatcctcaccggattacgtataggtctgggggtgggctggtctacgctggtggcggcggagctgattgccgcgacgcgcggttcaggactcatggttccagcagcgggtgcattctccgcactgacgtggtgctggcggggatcgcggtga

SEQ ID NO: 24167 - DNA, 2413 bp, Homo sapiens
  SIMILAR (1)..(804): 1001254mologous to Escherichia coli, K12, Peptide, 514 aa AppC=cytochrome d oxidase, subunit I homolog,accession number S63811,Smith-Waterman Score=1406.
atggaaaccatttacgtggtcaccggcaaaacaatctaccgcgatatgacgcgcttctggggtaagctcttcggtatcaattttgctcttggcgtggctaccggcctgaccatggagtttcagtttggtactaactggtcattctattccaactatgtgggcgatatttttggcgcaccgctggcgatggaagcattaatggccttcttcctcgaatccacctttgtcgggctgttcttcttcggctggcaacggctgaataaataccagcacctgctggtgacgtggctggtggcgttcggttcaaatctctctgcgttgtggatattgaatgccaacggttggatgcaatacccgaccggtgcgcattttgatatcgacaccctgcgtatggagatgaccagcttcagcgagctggtctttaatccggtcagccaggtgaaatttgtgcacaccgtaatggcgggctacgtgaccggggccatgtttattatggcgatcagcgcctggtatttactgcgcggacgggagcgcaatgtcgcattacgctcgtttgccatcggttccgtcttcggtactctggcgattatcggtaccctgcaactcggagacagttctgcgtatgaagtcgcgcaagtacaaccggtaaaactggcggcgatggaaggggagtggcaaacggaacctgcacctgcaccgttccatgtggttgcctggccggaacaggatcaagagcgtaacgcctttgccctcaaaattcccgcgctgctagggatcctcgccactcactcattagataaacccgctggcaaacgcatcgccgtaccgtttatctccaccacccactacagcctgctggcggcactgaaacactggggcattaaacccgggcaagtggagattgtgaacctgcagccgcccgcgattatcgctgcctggcagcggggagatattgatggtgcttatgtctgggcaccggcggttaacgccctggaaaaagacggcaaggtgttgaccgattctgaacaggtcgggcagtggggcgcgccaacgctggacgtctgggtggtcgtgaaagcgttcgctaaaagcgccatcgatgctcagcaaccgtacattgctaacccagacgtgtggctgaaacagccggaaaacatcagcaaactggcgcgtttaagcggcgtgcctgaaggtgacgttccggggctggtgaaggggaatacctatctgacgccgcagcaacaaacggcagaactgaccggaccggtgaacaaagcgatcatcgacaccgcgcagtttttgaaagagcagggcaaggaggcgcagatgctgcaaatctctcatctttacgccgattatggcggcaaaccggcactggaagatatcaacctgacgctggaaagcggcgagctactggtggtgctggggccgtccggctgcggtaaaaccaccctgctgaatctgattgccggttttgtgccttatcagcatggcagcattcaactggcgggtaagcgtattgcagggaccgggagccagcagcgtggcgtagtttttcagaatgaagggctactaccgtggcgcaatgtacaggacaacgtggcgttcggcctgcaattggcaggtatagagcaaaatgcagcgcactggaacatcgcgcaccagatgctgaaaaaagtggggctggaaggcgcagataaacggtacatctggcagctttccggtggtcaacgtcagcgggtggggattgctcgtgcgctggcggcgaatccccagcatgttattactcgacgaaccgtttggtgcgctggacgccttcacccgcgaccagatgcaaaccctgctgctgaaactctggcaggagacgggcaagcaggtgctgttgattacccacgatatagaagaagcggtgtttatggcgactgaactggttctgctttcatccgccccccggccgtgtgctggagcggctgccgctcaactttgctcgccgcttcgtagcgggagagtcgagccgcagcatcaagtccgatccacaattcatcgccatgcgcgaatatgtaaaaagccgcgtattagcgaggcatatccccaaggggccccccaccaccatttgggaaacctggacagggcccaatttcctaaccaagagcaacagacttaccgggaaacctggcctttccaaaaagggtttccaaaagcaacggaggtttggagggcctgcaaagagaggaccccctggaaaaacagagtggcaagccttaaattttagaagaagggcacttttaacacccaaagttgacgtgggtggggcaattcgcagcggaatgcaggcttgttggatcagaccggaaaatggcgatctgatgcaaacctgggacagccgtttactgccgcatctggaaatttcccg

SEQ ID NO: 24168 - DNA, 1301 bp, Homo sapiens
  SIMILAR (317)..(529): 1001254mologous to Escherichia coli groES protein (AA 1- 97),accession number X07850,Smith-Waterman Score=353.
atgggccccacctgctattcacatccgttgtatgccagaggcctacaacttccccaggaagccgttgtccttaataccttctgccatccaaagcaacgagctgatcatcatgaatggcaaccgtgctctcaacatccaactgctgaagagatatcaatgtacccttgacatccgctataagcaaacgtcaatgctcaactgctatgaagggacagtcataacaccgtcccatatccagtatccatgtctctctgatagttatggcctctatgacattggcataagaaatacggactttctcaaaggagagttatcaatgaatattcgtccattgcatgatcgcgtgatcgtcaagcgtaaagaagttgaaactaaatctgctggcggcatcgttctgaccggctctgcagcggctaaatccacccgcggcgaagtgctggctgtcggcaatggccgtatccttgaaaatggcgaagtgaagccgctggatgtgaaagttggcgacatcgttattttcaacgatggctaccggggtgaaatctgagaagatcgactatgaagaagtgttgatcatgtccgaaagcgacattctggcaattgttgaagcgtaatccgcgcacgcctgacatacgattaaggataaaggtaaggcttaaaacatattcgcgcatggcgatgaattgtggatcggacttgatctgcggctcgactctcccgcaacaaagcggcgagcaaagttgagcggcaccgctccagcacacggccagggccggatgaaagcagaaccagttcagtcccataaacaccgcttcttctatatcgtgggtaatcaacagcacctgcttcccgtctcctgccagagtttcagcagcagggtttgcatctggtcgcggggaaggcgtccagcgcaccaaacggttcgtcgagtaataacagccgctgacgttgaccaccggaagctgccagatgtagcgtttttctgcgccttccagccccacttttttcacatctggtgcgcgatttccagtcgctgcattttctctatacctgccaatgcaggccgaacgccacgttgtcctgtacattgcgccacggtagtagccctcattctgaaaaactacgccacgctctgctcccggtccctcaatacgccgccagttgaatgctgccatgctgataaggcacaaaaccggcaatcgattcagcagggtggttttaccgcagccggacggccccagcaccaccagagctcgccgctttccagcgtcaggttgatatcttccagtgccggtttgcgccat

SEQ ID NO: 24169 - DNA, 804 bp, Homo sapiens
  SIMILAR (1)..(333): 1001254mologous to Escherichia coli phosphatidyl glycerophosphate phosphatase,accession number M23546,Smith-Waterman Score=622.
atgaccgataaaatacaggatgcctgcggaaatcaccccggcgacaatatcgtcgatcatgatccccatgccgccatgcacattgcgatcaaaccagcggatcggccacggcttccacatatccagaatacggaaaatcacaaacccggcggcaacccactgccagtcattggtcggcagcgccatgagcgtgatccacataccaataaattcgtcccagacaatgctgccatgatcgtgcacacccatgtctttcgccgtttgatgacaaagatagacgccgatacagatccccagcatcaccaccagcgagtagagctgccagggcaaaaagcgagcccatcgtcccaggaacgatcgggcttaatccacttccgaatccgacagcaagtagatgccacggattactcatcttcaggcgacttttcgcgacatctttatggcgtggcaaaatggtcatatcctttccagtctaatgtaacaggttcgccgtcacgaataaaacaaagcccttcgatatcggcggtcatttgcccgatacaggtaaacggtacgcccaggtgtccgagagccacatccagcgcgccacggttcagttccggcacaggggaacacaactccgaatcttcaacggcagaaaacggccacggcaggccggtgccggtccaccatggcggacctctaaatcgacccggaggcttgaagctggccatggcggcgtttcaaaggcggcctctgtgttgcgtgttgcgtggttttgaaacggttggaaaaaattccggagggttatggatgttttggtaa

SEQ ID NO: 24170 - DNA, 3222 bp, Homo sapiens
  SIMILAR (1800)..(601): 901254mologous to Escherichia coli RNA polymerase (rpoC),accession number M38305,Smith-Waterman Score=1779.
tcagcacgggtataatactgtatgtgtcagtccgagcggccgataaatcgactcgtcaacatagcggtcaagcggctgaccggtaaccgactcgacgataaatccaagcagcatataatcgacatcgctgtagatatgtttgctgccgggctgatattccagcggcgtgcgcttgatcatctccagcgtctggcctttatcctgggaatataacgcgcccgcgaccgctttattcgggtattgcggatctgccgggaaaccgccgctgtgatgcagcaggtcagaaatccgcagggtgtttttgcctttaatggtgtcatttggactatcggcaaaccccggaatatatttcgcaatccgatcgtcaggatgcagtttgccttcgctcatcagcttttgcagggcgaagttcgtggcgtacattttggtgtttgaggccaggtcatacagcgtcccggtggtggctttgacaggctgttccatcaacacgctgccatcgtactttttcgccgctccccaggctttgcgatacacaatctgattatctttaatgatcagcaggtttacgctgggataaccgacatcaacttgctggctaatccagcgatccatctggttaagccgttcgacgttaaaccctgctttctctggcgagctttcagactggaactgctcctgaatttcagcaacttctgcttctgcctcggagatgatttcgtgtttcttctccgggatgaccatgtcatcgataccaacagatgcaccagaacgcgctgcataggcgaagccggtgtacatgatctggtccgcaaaaataacggtcggtttcagaccgagaatgcggtagcaggtgttcagcattttggagattgcttttttacccagcgcctggttgacgatggagtaaggcagacctttcggtacaatcatccacagaatggcacggccaacagtcgtgtctttcaggctggttttcgctactaattcaccgttagcatctttttcatactcggtgatacgcactttaacgcgcgcatgcagagaagccagaccagagcgatacagacgttctgcttctttcgggccagtcagcaccatgccttcgcctttggcgttaacacagtcacgggtcatgtagtacagacccagtacaacgtcctgagacggaacgatgattggttcgccgttcgccggggacaggatgttgttggtagacatcatcagcgcacgcgcttccagctgggcttccagcgtcagcggtacgtgaacagccatctggtcaccatcgaagtcggcgttatatgccgcacaaaccagcgggtgcagctggatagctttaccttcgatcagtaccggttcaaatgcctggatacccagacggtgcagagtcggtgcacggttcagcagtaccgggtgttcgcggataacttcgtccaggatatcccaaacgacagcttcttcgcgctcaaccattttcttcgcagctttaatggtggtagcaagaccacgcagttccagcttgccgtagatgaacggtttgaacagctccagtgccattttcttcggcagaccgcactgatgcagacgcaggtatggacctacggtgattacagaacgaccggagtagtcaacacgcttaccgagcaggttctgacggaaacgaccctgtttacctttgatcatgtcggccaaagatttcagaggacgcgcttcctgcagcatacgtttttcgttacgtacgatgatgtccggcgcagccagatccagcagacgtttcagacggttgttacggttaatgacgcgacgatacagatcgttccagtcggtaccggctaagattaactggcgcagaaagatatagctggcgcagcaaacgtgctggcagaaaatacgacctgtccgatttagaacaaaaacagcaagcgcgttactggcaggcgagaaatcgatgccagccagggcgtccttccattgatttactgcgcgcgttaattgctcaggaaccgctggcaggcgctctcctccatgactcaggaacaggcgaatacgctggtgatcaacgccgacgaaaatattctgcaaggctggctggatctgcagcgcgtctggtttgataaccgtaacgatcccgacatgatgaaagccgggatcgccgactggcagaaacgttatccgaacaatccgggcgcgaaaatgctgccaacgcagttggttaacgtaaaagcgtttaaaccagcctcgaccaacaaaatcgccctgctgttgccactgaatggccaggcagcggtatttggtcgcactattcagcaaggctttgaagcggcgaaaaatatcggcactcagccagtggcagctcaggtagctgccgcacctgccgcagacgtagctgaacaacctcagccgcaaaccgtggatggcgttgccagcccggcacaagcctcggttagcgatctgaccggtgaacagcctgcagcccagccggtgcagactcttttcatccggaccgttgccacgcagacccgcctgcaccagcgacccttcaaagatgacaatcgagaagcccatgatgaacgccgtcagcagcgagaacagcggcaacatttcatagctctgccacaacggatgcaccttgtagcccgccgagatcatcagcgaccccattgaagactggtgcatggtcggcagcagcgcaccgagcgcgatgatgaagaacatcaccttgtttagtcgctgtagcgacaccttccaccccagacgttcaaacagtgccggagcaaactccagtgccatcacgccgatatagatggtcatacagaccgccgtctcgaacagtaccgagttcacgttgaagtgacccggaatgtagaagtacggcaggttccagtagcgacccacgtcgatagtgatcgacaagccacccagtgagtaaccaaacagactcgccaacagcgccggacgcaccagcggatggtattgcccacggttaaagacgtataccgcccacgccagcgcccagccgccacaggcaaagccggtgccaatcagcaggtcaaacgcgatccacacgccccacgggaagccgccgttcaggtcagagacagagcccagaccgaacaccagacgcttcacaatcaggagcatacagatgacgattaacggtccaaaaatcatgaccggtttactgatgattttgccgcccagcggttgtggatcatgactcat

SEQ ID NO: 24171 - DNA, 937 bp, Homo sapiens
  SIMILAR (937)..(278): 991254mologous to Escherichia coli potential repressor envR,accession number X57948,Smith-Waterman Score=1129.
  misc_feature (1)...(937): n = a,t,c or g
ccanggtaatgttatttaccgttctgtaattgtcgcgggtcatcaggccggtcgccctgcgagcccggaggatatcgatgctgtttattaactgagagcgggtacaggcgctgaatcccggctggtcggtacgcaccagcgcgtatttttccacgagaaagttcaccgcatcacacagtgaaatgcctgcctcaatatgctgctcaatcacacgttcatcggcaaaagaaccgtacatcaaatggtgcttcgacggctggatgtcgcgtcgcattactatgacacttaattcattcgtttgatgaattaatttcgttatgttttcatctggcatgaacattcttaatacgttatcgaccagagcgggggcttgtttataaagatcataacccgccatattcattaaccagttttgaacaattccgctgaaggcaccatcaataataatcatcacaacatctaaatcgaggttatttgctacacaaccttgttgctgacacgcctgcaatacttcgcggagagtctgcggattaaagcccatcttttcgcgtatcactccctcggccagcatctcatcattaaattcacatttgtgatataagattttcagcaacgcctgctggcggggaattttggcaatatattgcaagccgacaatcaatttttcacgcaattgttgaaacgggtcatgctctaatccagccgtcaagtgttcctggattaactcccgcaatgaaggctgttgcaaccacatctcattaaacagttgagtcttgttttcgaagtgccagtagatagcgccacgcgtaacgttagcggcgtcggcaatgtcgttgagcgtcgtcttgcttacgccatgctgcgcaaactgggcgatggcagtttcaatcagttcttgccgggtcttcagagcttcggctttggttctttttgccat

SEQ ID NO: 24172 - DNA, 2556 bp, Homo sapiens
  SIMILAR (997)..(1758): 851254mologous to Escherichia coli K12 putative dehydrogenase,accession number AE000371,Smith-Waterman Score=1086.
atgccgaacgttgatgttgtcggagagatggttaacaccatgtcggcgtcacgcagctatcaggccaatgttgaagtgctcaacacggagaaagctatgtccattgcggtaaccaccaccgatccgacaaataccggcgtcagtaccaccagcagtagttcgctcacgggcgagcaacgccgcagatttacaaagcagttttctgactttgctggtggcgcagctgaaaaaccaagacccgaccaatccaatggaaaacaacgagctgacgtcgcaattggcacaaatcagcacgacgctgcgcgcatattaaggaaaggaacaatgacaacattacttaacccctattttggtgagtttggcggcatgtacgtgccacaaatcctgatgcctgctctgcgccagctggaagaagcttttgtcagtgcgcaaaaagatcctgaatttcaggctcagttcaacgacctgctgaaaaactatgccgggcgtccaaccgcgctgaccaaatgccagaacattacagccgggacgaacaccacgctgtatctcaagcgtgaagatttgctgcacggcggcgcgcataaaactaaccaggtgctggggcaggcgttgctggcgaagcggatgggtaaaaccgaaatcatcgccgaaaccggtgccggcgatggttccgtcgcgcatcacgctaattcgatcggcaatctggcgaatttccggcagcttatgcgagataaaaacaatacccacgccagtagcaagcagctcttgcaagcgactaaacaagcgttcggtttccgcaggggtgagtttgaacacaagtattcctggtttgagggcgctctaagagagtctgcgtaccgtgatgacagagtcttgatcctgcacattcagggttccgataccggtggcattgccaccgataatcgtattttcagcccgtccccgttccggattgacccacatttaaaggccttgcattatttccgctatcataccaatgccagctttctaaagcaacaggcaatggttgatgttggcgtggtgcagtctggttataacgatccagctgcagctctgattatcaccgatcttctcgatcgcatcgccgcacctacccgcgaagagatcgacgacgcgctttctggtttgttcagccgcgatgctggctggcagcaatactatcaggtcattgaactggcggttgcacgtaaaaataatccgcaggccaccattgatatcgctccgactttccgtgacgacctagaagtcattggtaagcattatcctaaaactgatgccgcgaaaatggtgcaggcgaaaccctgctatgttgaagaccgcgtaacggctgacgcctgcgtcattaaaatgttacgtagcccacacgctcacgcactgattactcatctggatgtcagcaaagctgaagccttaccgggcgtcgttcacgttattactcacctgaattgcccggatatctactataccccgggtggtcagagcgcaccggaaccggcaccgcttgaccgccgtatgttcggcaagaaaatgcgtcacgtcggcgatcgtgttgctgcggtcgtcgcagaaagtgaagaaattgcggctccgagcactggagcctcatcgacgatggatatgaagtgctttagcccgggatggcgatcgacggagccactggcgggaagagcgcccgtcgtgcacgatgaaccggtggtggttgttgctgggcgccagataccggatactgcggctgattacggcttaatgcgcgtggtcctgaagccacactggtttcggcttcggcttttcaatgaccaccggtgcttcttttggcggttcggggatcggctcaagttccggttctggctctaccaccggctccggtggcggctgaacggcttgtggcggttcgagatcagcaagcgtaaccatcgtgacagaaatcggctgcgcaagcgcagccatttaccgccgcgcatgaaaaactggcgcgataaatacgagcatcatctgctgttaaaaatggcgggcgatggcgtgggcgaagccaaatcgtggctggtggattatttcaaacaggccgaaggcgatttctttgtctgtacgccggaggaaggcagcaaagcgtttttacaccgtttcgccgctgcgggcgcagcaattcgttatcaggcggtgcattccgatgaagtcgaagacattctggcgttggatatcgctctgcggcgtaacgacaccgagtggtatgagcatttaccgccggagatcgacagccagctggtgcacaagctctattacggccattttatgtgctatgtcttccatcaggattacatagtgaaaaaaggcgtggatgtgcatgcgttaaaagaacagatgctggaactgctacagcagcgcggcgcgcagtaccctgccgagcataacgtcggtcatttgtataaagcaccggagacgttgcagaagttctatcgcgagaacgatccgaccaacagcatgaatccggggatcggtaaaaccagtaaacggaaaaactggcaggaagtggagtaa

SEQ ID NO: 24173 - DNA, 422 bp, Homo sapiens
  SIMILAR (365)..(3): 601254mologous to Escherichia coli YbaX,accession number D82943,Smith-Waterman Score=302.
ccgttatagcaggtcaacgtttcgttacggactaaatccatttgccgtaataatctgccagcgcccaggtttccgctttatcaatccactcagcggcgtttcaaaacgaatatctttcgccatgcccaaactgacggctggtttagtgctttcacaaactcatcgcggcaatccgggtagccggagaaatccgtttcgcagacgccagtaattacggcttctgcttttacctgatacgcagatattgccgccagcgtcaggaacaaaatattacgccctgggacaaacgtattcggggataccatcggcttcagggttcagtaagtcagaggcaccggctgagacacgggtgtcacatcacacacaagggcacccactacatccgtcatcagcaccaactggcaaccgacggaaaccaataa

SEQ ID NO: 24174 - DNA, 912 bp, Homo sapiens
  SIMILAR (454)..(909): 1001254mologous to Escherichia coli K12 orf, hypothetical protein,accession number AE000232,Smith-Waterman Score=823.
atgttactgaaaagggcttcagagagcccacggatggatgacctcagccccccagataaaggagaatgtgagctccaactgctccagttggggaagctgaaatgtgcaatgataggggtgcaagaggccaggcccaaccactcaagcacatttcaaccccctatttctgtcacatctgccaaggcaagccatgcagccaaacccaaagtcaaggatttggggaaggatatttcccttgtggagttgagtcttgttttcgaagtgccagtagatagcgccacgcgtaacgttagcggcgtcggcaatgtcgttgagcgtcgtcttgcttacgccatgctgcgcaaactgggcgatggcagtttcaatcagttcttgccgggtcttcagagcttcggcttggttctttttgccatgattaattattcaggaaataaatatattcgacacagaggcttaaatatgttctacggcggtaagatgaaaggtatgcctccgaaactgatgagcgatgatggcaaacatatcgttattcgtccgctggcctactgccgcgagaaagatattcagcgatttgccgatgcaaaagcgttcccgattattccgtgcaacctgtgcggttcacagcctaacctgcaacgtcaggtgattgctgacatgttgcgtgactgggataaacgttatccagggcgtatcgagacgatgttcagcgcgatgcagaatgtggtgccgtcgcatctgtgcgataccaacctgttcgatttcaaaggcatcacccacggttctgaagtggttaacgggggtgatctggcgtttgatcgcgaagagatcccactacaaccggcgtgctggcagccagaagaagatgaaaatcagttggatgagttacggctgaatgtggttgaagtgaaataa

SEQ ID NO: 24175 - DNA, 1031 bp, Homo sapiens
  SIMILAR (253)..(378): 541254mologous to Homo sapiens Human secreted protein, SEQ ID NO: 6434,accession number G02353,Smith-Waterman Score=88.
atggctcaggagatagaaggagatcggttgtttcgggcccgtttgacccgtcgggttcaagggaaaggcccttgtggcccgttgaaggctcctctggggatggtccctgaatgccactcggtcaaaccgtctcgagatactttcgactctacaaaatcatttaaggcattactactgagtttcttgaagatacccgccatagatgtccataagcccattgaccacccaatcaactttacgtttccagaccctgggcatcgagccccggcacgtcaccgtcactcgaccgctgccgctgtcaccatgtcaccatcggggccgctgccgctgcaccatcgccttgttcccccatcccccgccatggctgaggacctctccgggccacatcctactgccccgtctcctggaaacagaagcaaaactctgtctcaaacaaacaaacaaacgaacaaacaaaaacagcaaaagcggagggtgctagaagtagggggcctagaaacaaaattccggggctccctccggggccgcggtctgggctgcgcatttggctgccgcctcctcgcgaaggcagtggcttccaaactcctgcgcgcggtcatcctcaacccccctgctcgggcaagggcaccgagtgccagagcatcgcccagaacttggcttccaggatttctccagtgggcacttcttgtgggagaacatcaagacaaactattcgcgttcggaaataagcctggtcgaagggggtacagcagttcatctgagatatgggtgagcgtggaagcggtatccctcgtagttctttgttttttagaacctagcggccgaacgcggatcgaccacgtattacttaccaaggagtacacctcgtgcgtcaacccaagtagtgcagtcttccgcgcctgcacgtcagcgtcgtccaattttgaccgccgaaaagatttgcgcgttaatcgcctggagcaccatatcggtaccgatcacttgggtgcgacagtgggttgcatcgccgtagtcgcccctgcccgtggtag

SEQ ID NO: 24176 - DNA, 2598 bp, Homo sapiens
  SIMILAR (1818)..(1180): 1001254mologous to Escherichia coli aspartase,accession number X02307,Smith-Waterman Score=1098.
tcagggtctgatgcaatcgatcttcaacacattatgcatcgatcggcacttcaccactccaaacaaatggataggagcaacaaatttacttatcatagcacagagtgcataggttagcagtgtagcacacgatatataacacagcgactcaggattacgcaaaatcaccgtgatattgttcatgccgggaatggcttcaaccacattcggcatatccaccagacgctgcgccagtcgccagatccgtttctggctagccagcgtcaccggcggttccagttccagcactaccgccgtttcacctgcagcataaaaatgcaatccctgctcgcgggctgaatgaatggtctgttcagaaacttcgccagtaataaaagcatccacgccaaaacgcgcggcgctatcgataaaactttgcccgccgcccgtgcaccaggcgacgcgctggaccacctcaggtccggtatcgccacaccataacggcttacgtcccagacgcgcttcaatccaggaagccagctccagtcccggcacaggcatggtcagttcgccccacggcaccaacggctcaatttcgcccatgaccgtgatccccagtaacgccgccagctgtgcgtatgcacagctcaggaggaccgagcaactggaaacgccgtataaaccgcatcctgtcgtaggatttaaataagagtccaggcccagcggccagtgatgaccgataaaatacaggatgcctgcggaaatcaccccggcgacaatatcgtcgatcatgatccccatgccgccatgcacattgcgatcaaaccagcggatcggccacggcttccacatatccagaatacggaaaatcacaaacccggcggcaacccactgccagtcattggtcggcagcgccatgagcgtgatccacataccaataaattcgtcccagacaatgctgccatgatcgtgcacacccatgtctttcgccgtttgatgacaaagatagacgccgatacagatccccagcatcaccaccagcgagtagagctgccagggcaaaaaggtcatcagataccagaacggaatcgctgccagcgagcccatcgtcccaggaacgatcgggcttaatccacttccgaatccgacagcaagtagatgccacggattactcatcttcaggcgacttttcgcgacatcggtttcggcacagattttacccacgatgtcaccgttgtggtgaccgatgaacgggttcaggtaagtaacgataccgatagagttgtaaacgtaaccttcgcacacttctttgttagcagtgatgccgttaatgcatttttccagcaggttgtagcaagcgttggtcagaatgtgaacggattcgaacatggcctggccaatgaccggctccataacgttcaactgcagctgacctgcttctgctgccatggtaacagtggtgtcgttaccgatgactttgaagcatacctggttaaccacttccggaacaaccgggtttactttagctggcatgatggaagagcccgcctgcagttccggcaggttgatctcgttcaggccggcacgtgggcctgaagagagcaagcgcaggtcgttacagattttggacatcttcacagccaggcgtttcagcgcgccgtgaaccataacataagcgccgcagtcagaggtcgcttcgatcaggtcttcagccggtacgcatgggaagccagtaacttcagccagttttttcactgccagcggagagtactctttcggcgtgttcagaccagtaccgattgctgttgcaccaaggttaacttccagcagcagttcagcgtacgttaagttttggcaggtaccgagctgatcatgatccgctatcagcgcatgcagggcaaaaacaccctgtggcaggtcggtactgaccacgccgggatcgctacccagatggtcgttgagcgcaagattgccgcagaagaaggtaaaacccgtcacgactacggccgcgaagctttcatcgacaaaatctgggaatggaaagcggaatctggcggcaccattacccgtcagatgcgccgtctcggcaactccgtcgactgggagcgtgaacgcttcaccatggacgaaggcctgtccaatgcggtgaaagaagttttcgttcgtctgtataaagaagacctgatttaccgtggcaaacgcctggtaaactgggatccgaaactgcgcaccgctatctctgacctggaagtcgaaaaccgcgaatcgaaaggttcgatgtggcacatccgctatccgctggctgacggtgcgaaaaccgcagacggtaaagattatctggtggtcgcgactacccgtccagaaaccctgctgggcgatactggcgtagccgttaacccggaagatccgcgttacaaagatctgattggcaaatatgtcattctgccgctggtaaccgtcgtattccgatcgtggcgacggaccgaggtacgatactgtaatcgcaaggtgattaccttgggaagttaagaaatataaaactatttgcgtggagataccacctggccccttcgtgccatttccttcatccatggcaaaggcttcggcagttttacccat

SEQ ID NO: 24177 - DNA, 1992 bp, Homo sapiens; identical to SEQ ID NO: 10731
  SIMILAR (1823)..(1990): 981254mologous to Escherichia coli BETA-LACTAMASE PRECURSOR (EC 3.5.2.6) (CEPHALOSPORINASE),accession number D90872,Smith- Waterman Score=305.
  misc_feature (1)...(1992): n = a,t,c or g

SEQ ID NO: 24178 - DNA, 4815 bp, Homo sapiens
  SIMILAR (2258)..(2199): 1001254mologous to Escherichia coli HyfR,accession number M63654,Smith-Waterman Score=95.
tcaaggttgagggcggtacgtcccgctggcgatgggggccataacgccaatcgtcagaatgattatcccgatacttagcccctgtttttcaatccacggaaaaaagagcttcgccaacgtggtgcggtaggcgcgcagcaggaaaatcgcttcaacgttatcgccgctggcctgtttcagcgccagcgccgccagttcgcggtcggcaatgccgccttcggtcatcacgcgatctaccgcgaggttaagctgctgttcaatctgggcgacgctcagttcgggcaaatcggtatcgcctcggcgtcggctctcttgcagggcgtgggcggcgtcgatcgccttctcgccccctttcacggcaacgtacatcagcacacctccacatgagtggttcgcggaatagccagcaggcgctcgccacaggtcaggatcaggtcgatgccgagcgggaacggatgcgggcgctcggtgagttcgtgcagaatgcactccggcagctgcggagcgatcattcgttcttcggcaatacccgcaccagtaaggcgcaacatgcgtccgccgctcaggctggcgaccagcggcgcgttggtatgaaaacgcagggctctggttgacgatatcgttatttaatggggtagaaagccacaccggcgtgtcgttatcggccagcgtcagcagcacgctggtggtggcgatattcagcggttgccagccgcgtttgagcatcgtaaagaagtcgacccggctggcgttcacttcggcctggcgtgcggcaatgcgtgccatacggtcagcgtccagcggggcaataagggtttctgataagttttgaaagtggcgagattgctgcatcagcgcgtcaatcagcgcgcagcgttcggcgtgctgtttatcacgcccctgcacccagctgtagccgagcgtgccgtcagtcaggcgcacggcggcgcgggtcagcgtggcgtcgccggcaaaaaaacgttcgccggtgccgcccatccgcgcctgaatctgtaccaggccagtttcagcggcgcggatcccatcatagtcgccggtaatgtttagcgcgaacaggcgtgcaaacagttcagccggttggctgtgcgccagcacggacatccagtgcacagcattatccagacaattgccttttctggacatgctttgtttaataccatgttctttaaggatattttgatatcttctcatacgatactgccatccctggtcagagtgcagaacaggatgctcgtgaggattaagctttttgaatgcctgatcgagcatattctcaaccatgttcatcactggtctttccgaaaggctgtaagaaataacttcgttgttgaagagatctattactggagacaaatacagcttgcgcccattgactgcaaattcagtaacatcggtaacccacttctcgtttggccgcgtagccttgaaatctctttggagaacattaggggcggtttgccctacctctcctctgtaagagcggtatcgcttgaccttaatcgctgctttaagtgagagggttcccatcaggcgctgaacagctttatggttaatctgtttcccttctcgatgaagagacagcgttaccctacggtatccgtatcggcctctattctcgtgataaatctcactaatacgctttttaacgtccgcatacttgtcaggcttgctgagagcctttagatgataataaaacgtactgcgcggtatctccgcagccctgagaagctcatcaagaggataaaactgccttagctcgttgagtactttcactttttcgtgggatgagctaaggctttcagctgccagattaccgcaggccaccagaagtgcgttaatcagccaagttcgccaactaataacgccccgactttttgccatcaccgtcattaccgacgaggtgaacaggctggtgccgcaaaccgccagcaaaataaagccgagtgtaaagcaaaggccgcccaccagatgggttaatgcctgtgaagacggggcatcggcgataacggaaaggtaaaaagtaaatccgatcgccataaacacgccagcggacatcgccattaaaaagaccgacactttactgcgggcaattttatgggcggcaatccgttcagcgattgccgcttttctggcgctcaactgcaagtcgaaagagagtttgtttctcatgcatactccgagatccccagccgctgcattcgtgacagcagcgtggtgcgcttcatccctaatcgcgtcgtgcgccacggggcccggcaacaatgccattggtttctcgcaatacctgaacaatgcgctgacgttcttcttcgtcattctctggcgtcgtcgggtgcagtttactgcgccatttgaactgcgaagcgctgaatcttcatttagcgtcagcagtaactgcgcccgctcaatcacgttttccacgtcgcgcacgttgcccggccaatcccacgacatcaactggcgtagtgcctcggtcgggatggcgtcaattgcgcgattcatatggcgcgccattttttgcgtgaaatgttttgctaaaagagggatatcttccggacggtcgcgtagcggcggcaattccagtgggaagacattcaggcgataaaagagatcgctgcgaaactggcgatcttcaaccatttgccacaaatcacggttggtggcggcaatgactctgacattcaccgggatcgttctactcccgccgagacgctcaatctcccgctcctgcaatacgcgcagcagtttaggctgaagttctaacggcagatcgccaatttcatcgagaaacaacgtgccgccatcggcaatttcaaaacgaccacgatgggtattaatcgcaccagtaaacgcccctttgtcatgaccgaataactcactttccagaagactggcggggatggcagcgcagttgattttgaccagcggcttgtcgcgtcgcgggcggagtagtaaatcttcattcaggatcaaaggtccggttttcaccatattcgccaggctgaataacgccgggcgcttgccatccgggctaagatgacgatggtaaatattcatatcgccaaaaatgaagcccgcttgttgaatgctgttaagaagcagttcaccgtttagctcgctaccgtgatgcgccgcgacgttcatgataatcaccgcttctttgcgcttcggtttatccataactggagcaggttccgctacaggctcaggctgtggtgccgctacgggttctgcaggctggaaagcctgttgtgccggttgcggtgctgaatgcacaggctgcggcgctggcgcgacctgtggcgaaactggctgctgcaacggctgttcaggctgcggctgataggcaggctgctgcaccggctgcgctggatgcggagcatgttgcggcggtacctgcgcttcaggcggctgctggaccggttgacgcggctgcgcagacgcataaggcggttggtactggtgttgcggcgacggacgagcagcctcatgctcctgagcgttagccggggcatgattcacgcggtgaacacgaacctcaccaacgccctcatcatcttcgacatcctcgtcataagaatcgtcgtcacgttttgacttcattcgttttaatggccgatcgcggaacatagaagatcgttctttacggttcgcttcgccgtttttcatttcgcccatagctttcagctttttggagatatcgcggcgttctttggagagctcggcatttttgatgatgtaatcgtcaacgcgatcttcatagtcacctttcatgctggcgatgatgccctggattgcttcaacgctcatccccggcttgatgtaatcgctcaggttgtccagcagcaggacgcgcttctggttgtcacggatctttttctcaacgtcctgaatttcacgttgcagtttgttcttacgacggaacagacgaacaaattccagtacgtcctggaatgaaggcttggtagtttccatttttatacccaaatcgtctttgaagctctgatgagtaacctgcgtaaagaggcgaaaatcaaaattggcgatgcgctggaacagcaataatcctgaagccgcctcgcaaaaaaatgcgttgcagctgtaacaagaaaaggtcgctttcgcggccttttccatttctgaacattgccatttgtttactgttttcactgccgttaaggtgattccactgttaacaaacaaggagaaaacagtatgaaacacggaattaaagcactgctcattaccctgtccctggcctgtgccggaatgtctcatagcgcgctggcggcagcttctgtggcgaaaccgacggcggtagaaaccaaagcggaagctcctgcagcacaaagtaaagcagcagtaccggcgaaagccagtgacgaagaaggcacccgggtcagcattaataatgccagcgcggaagagctgcatgacgtcctgccagacctgcggattttgttcgctcattgggcaaacatcgccgagcaatccggcattatgcaaaacaccatccagacgcggataattaacggcaatgcgctgtgccagttgttggcaattttcggacgtgcaggtcagcaaatcgagaataaaccactgatggtgacgcccagtttcttcgtttatgtggctggctacctgacgtaatttttcttcattacggcccaacagaatcactgtcgcaccatagcgtgcatacgtcatcgcggcttcacgaccaataccatcgctggctcccgtcaccaggataatgcgatcattgagtaaatcttgttttggctggtaatgcat

SEQ ID NO: 24179 - DNA, 503 bp, Homo sapiens
  SIMILAR (498)..(337): 371254mologous to Caenorhabditis elegans Similar to cuticular collagen; coded for by C. elegans cDNA yk58e6.3; coded for by C. elegans cDNA yk71h12.3; coded for by C. elegans cDNA yk100d10.3; coded for b,accession number U53155,Smith-Waterman Score=66.
ttttttttttttttttcctgggagaagccgcgggaatgtctttattggacgttacgaagggaattggggtttctctcctgggaagaaaaagcccgacctgtgccggcgagagcaggctgccttgggctgggggcacctccgagcgctgcggcgggacgtcggggtccggggcgaaaagagccagggcgcggaccgacgtctgctgcttttctgcggcattgctgcccgaacgaacgaacgaacgaacgaacgaagcggtttcgtttaggaaaaataccctcttgacgcgaagccacggctgaagtcccgggccacgcagaggggccagcaattccatgggtggtggggccctccatccctggacgcagcggggagcagcgggcggccctctctcctgcccacttctcctgggcagcgctgcgtctgcggctcgtgggctccgggctcgcccgccgcggactctggctcaggtttcggctccggctggggccccggatccagct

SEQ ID NO: 24180 - DNA, 2760 bp, Homo sapiens
  SIMILAR (2760)..(2365): 1001254mologous to Escherichia coli Rod protein FlgB,accession number D90743,Smith-Waterman Score=657.
atgttgacgatacgacgcaccatgcgatcggcgttaacacgtgaaccggtttcgccacacccatcagcacgggccgacagtcacaccttccgagctggaaacacgcacttccatgttcggcatcaccagaatattggcggaaccttcaaagagctgtccggcatacggtcgttgcgaatcgcttccaccagcgcgcatcgccgtgcatttcaccatcaatcatcagttctggtgcacgttcccgaccagttccagcgcctgacgcattttgctcgacgacgggcagtcagaaaaccaaagttggagtgcgacaacaaagcaacgcgcggctcaataccaaacgacggacagtttctgccgccatcaaggtgttaccactcgcagcagcagcgcgttcatggcacctgcggttggtatagtaaacgaatcagtcagcttgtcgatgtagacgtcgacatcagcaatcggacgagtcgcagcccgactccatcgcggcttagcgaccgaagagcgatctacgatcagccggtcaacgcgttgcaagattatccggaccaagccaaccggaagcaaatgaaccccatcgctggccgctgcgcatcagcgcagacacgcgatgagttacagagcggtcccagccggcctgcaaacgaaaggactccagcgaatcaacgcaatggcagacttagcgaaaatgtagcaagggcacacggcgcatcgcgtaaaccatcgcccaacaaattgaacgccacgtgtagccgcgcacaggcgggcaacgcgggacggacaaagcggatggatatccgttgcatgcgtccacacggaaaaggacgcagaaaaccggagggaagcatcaaggcgaacgacacacgcataaagagaacacagccacgccaaagaaccgggagagtaagggatccaacaaggggcggcacgcgtgtcccaagactctgcgcagatttgtgggagcataacaaagcggaaaagagataccagaaaaggagagcaaaaacagacacaccaaagacacaggaaacagaccaaaaaaaaagcacaaagaacagcaacacacgacaacaggaagaagaacaagaaagatccggtgatacgataaccgcaacggtcagccctgctggatctgcaagcaacagtaaaccggtggacggtgcgaaatccttgaacgacgcttatcctcgttactggcggctttcggcgcatcgaccacgttacagaagatgcgcgagcttcagcggcttcgctgacgcgctggttaagcgcgtcatcatccgcgctgcaatcgccagccagcagttgccgccatcgccaccacgctcggggctaaggttccacgcatcaggtcggggacaaagcccacatcctgcggacgcacgctatcgccagctggatctgccaggagaagaccgcgcggatattctctttggcgatgtccgattgaaatgcgccatcgcaaacgcctgcttccagggtggtggtgccgtaagtgccagatccagcgtattaccgctgttgccgcggatcacaccctgcaccagagaaactgcagcggctgggcaaccagttgtgtaccaccgttactggcgctatcgctacattgtaagaaccgttcggcgcagtgctgccatcagtcaacgtccgtcccagctcaacaccaaacggcgtggtcgtggtcacagcccttcttcactgccggttcccgcaagaacagtggtgccggggatcctcacgcagttgaccgatcaggttacgggcctgtaacgactggctgttatcaatctgtccggaaatagatccgagcgtggtattgagtttttcaatcccgctgaccgtgctgatttgtgccaattgcgacgtcagctcgttgttttccattggattggtcgggtcctggtttttcagctgcgccaccagcaaagtcagaaaactgctttgtaaatctgcggcgttgctgcccgtgagcgaactactgctggtggtactgacgccggtatttgtcggatcggtggtggttaccgcaatggacatagctttctccgtgttgagcacttcaacattggcctgatagctgcgtgacgccgacatggtgttaaccatctctccgacaacatcaacgttcggcatttttacgtagccctttgcatctgccagcggattacccggttcataaaccagtttgtccggggcctgactttctataacatcggcaacctttacgccgcctgtcgcagcacctggtgcagcgttaacctggaataccacctgttttgcccgatatggctgtccatcgggaccggtcacgctatcagcattcgccagattactggccgccacgttcaggcgctgggagttcatcatgcctttgatttgcccgctcaacgcgctaaggctcatctggtattgcaggctgttatcggcaaactgggtgcgttcgcgatccatatcgacggtattaccgtcaagcgaaggctggtccggaatacggtattgcagttctgcggtaggaggcgtcagcgcctgcgccggaatgtgttgcgttgaggtcatcgtcagtgcaaccacactggttgcatcccgtccacgttgcatgacttttttaagttcactggcaaaatcgatatcgcgcgcctgataaccaggggtatcggcattggcgatgtttgctgccagcacttcctgacgctgggcgcgcagattgagcgcctcttgttgaaaacgtaaggcggcgtcgagcttatcgagcat

SEQ ID NO: 24181 - DNA, 1776 bp, Homo sapiens
  SIMILAR (859)..(1584): 981254mologous to Escherichia coli similar to H. influenzae HI1305,accession number U82664,Smith-Waterman Score=1255.
gaacgtgctggcaccaaagttggcaacaaaggtgcagaagctgcactgaccgcgcttgaaatgattaatgtattgaaagccatcaaggcctgaaattagtaaggggaaatccgggaaacctgctgctcgtcgccgcgctcgtgagtgtgccgtccaggcgctctactcctggcagttgtcccagagcgacatcgctgatgttgaataccagtgcctggctgaacaggatgtaaaagacgttgacgtcctgtacttccgtgagctgctggccggggtggcgactaataccgcatgacctcgacggactgatgaagccatacctgtcccgcctgctggaagaactggggcaggtagaaaaagcagtactgcgcattgcgctgtacgaactgtctaaacgtagcgatgtgccatacaaagtggccattaaggaagcgatcgaactggcgaaatcgttcggcgcagaagacagccataagttcgtcaacggcgtactcgataaagcagcacctgtgattcgccctaacaaaaagtgatatccaggccggtagattcacggaagaccgttccatgatcgccggccttttcttttttcctgctgaggcataacgtatggcatgtggcgagttctccctgattgcccttattttgaccgtgtaagaagttctcgtcttgatgtcgaactgggcatcggcgacgattgcgcacttctcaatatccccgagaaacagaccctggcgatcagcactgatacgctggtggcgggtaaccatttcctccctgatatcgatcctgctgatctggcttataaagcactggcggtgaacctaagcgatctggcagcgatgggggccgatccgggcttggctgacgttggcattacccttaccggacgtagacgaagcgtggcttgagtccttcagcgacagtttgtttgatcttctcaattattacgatatgcaactcattggcggcgataccacgcgtgggccattatcaatgacgttgggtatccacggctttgttccgatgggacgagccttaacgcgctctggggcgaaaccgggtgactggatctatgtgaccggtacaccgggcgatagcgccgccgggctggcgattttgcaaaaccgtttgcaggttgccgatgctaaagatgcggactacttgatcaaacgtcatttccgtctatcgccgcgtattttacaggggcaggcactgcgcgatctggcaaattcagccatcgatctctctgacggtttgatttccgatctcgggcatatcgtgaaagccagcgactgcggcgcacgtattgacctggcattgctgccgttttctgatgcgctttctcgccatgttgaaccggaacaggcgctgcgctgggcgctctctggcggtgaagattacgagttgtgtttcactgtgccggaactgaaccgtggcgcgctggatgtggctctcggacacctgggcgtaccgtttacctgtatcgggcaaatgaccgccgatatcgaagggctttgttttattcgtgacggcgaacctgttacattagactggaaaggatatgaccattttgccacgccataaagatgtcgcgaaaagtcgcctgaagatgagtaatccgtggcatctacttgctgtcggattcggaagtggattaagcccgatcgttcctgggacgatgggctcgctggcagcgattccgttctggtatctgatgacctttttgccctggcagctctactcgctggtggtgatgctggggatcccgggtac

SEQ ID NO: 24182 - DNA, 3568 bp, Homo sapiens
  SIMILAR (1794)..(1841): 1001254mologous to Escherichia coli FlgD protein,accession number D90743,Smith-Waterman Score=79.
ttaggttttcccctggtattgtgtcttccctgttctattgttgttccgtgttgttttaattggtgttcttgttgtttcaataggtccaaggtttcccgtcagtcctctctgctgcacggggcgcttgctcgggccggcagcggtgcgaggcgctgtgatcagctccacagacacagcaacccaagggagctgcgccaggattgtctgcctaagtccatggacgctgtctggttcctgagaatggctgagcttggggaagaagactaggaaggaggtagcagctggtcgcacaactgtgccgggagagcaggctgccttgggctgggggcacctccgagcgctgcggcgggagtcggggtccggggcgaagagagccagggcgcggaccgacgtctgctgctttctgcggcattgctgggcagcgctgcgtctgcgctcgtgggctccgggctcgcccgccgcggactctggctcaggtttcggtccggctggggccccgatccagctctggctgggatccttagagtcgaccaggatgccattcctaaaagtctcctgtgacaggacctccacaaagaggcagtccccacaagacaacgaggtccctggggattccagcctgctaccctccagtgggtcaaccttcaagacgcaagtggctgtgtgtgaagaatccacaaaagcaagagaattggagccaataggtgcttggaaggcagaggtgaacgtgtcatgagccgtattaaaaaacacggggtagtgccctcgtgaaacaacagccaggcgcagcaccttcaacatccgtatttctacaaacagttctttcacaacaatgaagtgttttttaaagtgattttggttttctttaccatgttcctcattcttctgagtcttagtaaagttgttaacatccatatttctaatagtagtctggaggtagagatagagggttaaccaaataaccatacagacgaactgattagtacaaccattgtgagactcgtaaggagatagcctcattttatcagtagaagacataacatagcccccgccgttcagcatcgtttgcattaacaccgcaatatgccggtattggaaaacaaacctgcgtgcccggaaacgccgcccatcgaaaaaaggctttttcatcgtgcaccgtagtgtcaggccgagcgggcgataaatcgactcttcaacatagcggtcaagggctgaccggtaaccgactcgacgataaatccaagcagcatataatcgaatcgccccaagttcctcgcccaaatttccaagggcttgcggcaaaccttgtttgggagaaaggggccgaatccggggtccggggccttctttcggcttaattaaccgcccaagcacccccgatccgacaattaccggcgtcagtaccaccgcagtagttcgctcacgggcagcaacgccgcagatgtacaaagcagtttctgactttgctggtggcgcagctgaaaaaccaggacccgaccaatccaaggaaaacaacgagctgacgtcgcaattggcacaaatcagcacggtcagcggattgaaaaactcaataccacgctcggatctatttccggacagattgaaacagccagtcgttacaggccagtaacctgatcggtcacggcgtgatgaccccggcaccactgttcttgcgggaaccggcagtgaagaaggggctgtgccacgaccacgccgtttggtgttgagctgggacggtacgttgctgatggcagcactgcgccgaacggttcttacaatgtagcgattagcgcagtaacggtggtacacaactggttgcccagccgctgcagtttgctttggccgccgaaagattctgcgcgttatcgcctggagcaccatatcggtacgatacttgggtgcgacagtgggttgcatcgccgtagtcgccactgccctggtagacccgcaagcatagcttcggttgaagtagcgcagcagggcaatgctccagtccggctgggctttttgagatcggtgaggatctgttccaccatcagcttgcttttgccgtaagggcttgcggtgtgccggtcgggaagctttcaacgtatggaattttgggctgacgccataaacggtggcggagaagtctgtgtcgaatatatttatttctgaataattaatcatggcaaaaagaaccaaagccgaagctctgaagaccggcaagaactgattgaaactgccatcgcccagtttgcgcagcatggcgtagcagacgacgctcaacgacattgccgacgccgctaacgttacgcgtgggctatctactggcacagcgcatttggccatgcgaaagtattcgttttgaacgccgctgatgtggattataaagcggaaacctgggcgctggcagattattacggcaaactggatttgtccgtaacgaaacgttgacctgctataacggccgggtgccttttcgtcactggctttcgccggtactgctgctttactttgtgctgcaggacttccgctttggtttctaccgccgtcggtttcgccacagaagctgccgcagcgcgtgcaaaggccgccctgtgcttgtgtacaacctttaagggtctggggcgatacgatgcaggcaaaacgtattgggtagcggtgcaaggcttgcacacatgggcatgttataacctgggggatgtcgtacttttcacacgcttctgctccatgggtgtaaccccccacataaaccttacatacactgtgcgggtccgtcataggggccatggcagtgagtagggcacataagcaactccagtccgcccccttccctttacatttcagggcaaccgcggcgccataacggcccggggagcccgcagtcctcctaatgcctggcacgttttcccgcgttgtacgtgccctatgacgtcccaaatccccgggtagcgtagcccggacggggggcgcagtaaacacggcattctcatacgtcatccatgtacgccggcaagtgtgggggtggggtggggtaattgctcggctatccgcaaagggcgatcggggtaggctccacggcacaactgttcgcggggtggttcgccccacaaagtaagggcaaatataattggtatgggttccggcaggtggcgcgcttgaaatgattaatgtattgaaagccatcaaggcctgaaattgtaaggggaaatccgtgaaacctgctgctcgtcgccgcgctcgtgagtggccgtccaggcgctctactcctggcagttgtcccagaacgacatcgctgtgttgaataccagttcctggctgaacaggatgtaaaagacgttgacgtctgtacttccgtgagctgctggccggggtggcgactaataccgcatacctgacggactgatgaagccatacctgtcccgcctgctggaagaacggcgtagacgaagcgtggcttgagtccttcagcgacagtttgtttgatctttcaattattacgatatgcaactcattggcggcgataccacgcgtgggccttatcaatgacgttgggtatccacggctttgttccgatgggacgagc

SEQ ID NO: 24183 - DNA, 2940 bp, Homo sapiens
  SIMILAR (2940)..(1954): 861254mologous to Escherichia coli 2- acylglycerophosphoethanolamine acyltransferase/acyl carrier protein synthetase,accession number L14681,Smith-Waterman Score=1460.
tcacaaatgttgctcggcccagcgtaagaaatcttctttcggtaatgccttgctgtagagccagccctgaccgtagtgcacgccatgctggcgtaaggactcttcttgtttactggtttcgattccctccgctaccattttcagtttcagtgtttttgccatttcgatgatatgcggcgtgacatttttatattccagcgcatcaacgaaagatttatcgatcttcagaatgtcgacatccagatcctgtaaataacttaaacttgaataccccgtaccaaaatcatcaagataaatttcatggcccgcctcccggtagcgagaaattatcggggcgctggttttcggatcggcaaactcgcgttcagtgagttcaagcgcgatctgtctgtcgtaccgggcttcaggagaataagtggcggacggccagtaatggtactggcactgtcgacgcttcccccccggcccaacgcgttgggcggttgattttacttgcagggtctgcgacagcagccccaggtccgtcagcccctgaatattggagtgaccgcgcagggcgttaacgctgccgcctgccatccccatattgccgagcagcagctggatcatcgccatcgtacgaatgttttgcgcaccaacggagtgttgcgtccagccgagggcatacaggaacgaggcagttttatcgtgagcactggtttctgcgatgtattcgcagactttcaggaacgcgtcttttggcgtaccacagatgttttcaaccacatctggcgtgtagcgggaaacgtgctgtttcagcaagttccacacgcagcgcggatgttgcagcgtggtatcgcgtttggcgaagccgttttcgtccagttcataagtccaggaggatttatcgtacttgcgtttttccgcgtcgtagccggtgaacaggccatcttcaaagccgtaatcctcacgcacgatcaggctggcggtggtataggcttcggtgtattcgcggttgaatttttcattgttcagcaggtacagcaatacgcctgacaggaaagcaatgtcagtaccggaacgaataggggcatagtagtcagctaccgccgccgtacgcgtaaagcgaggatcgatcacaatcagcttcgcgccgttgtgaattttggcttccatcgcccagcggaacccgaccgggtgagcgcccatcaccacgacgaggttggcgttcttgatgtcgacccagtggttggtcatcgcaagacgtttttcgatatctggcatgatgatcaattcattgaccagcgggttaggcggttcagcggcgataatcgacggctgcaggaccgcgaacaagttggcctgcaaagcgcgaataattcgcccatcgacaaaagcctcttccgggggattaatcagttccagctttacgccgcgttcacggcgcaagacgttaatatcgacattttcaaaacgagacagcaattctttgctgttatcggtcaaactaccggagttcagtacggcaagtgaacagttgcgaaacagttgatagatgtcgctgctggcggtgcgtttaagcatatccacttccagcagtcttgtggtcgatgggacaaaatcgctattactgcgccacgggttaatgtccagaccgccacgacgggtataacgtgcgtaaacgctcaatttttctggctggcagaagcgtaacaggtcattaaagatgcgttccacgcactgttcgtggaactcgttgtgatgacggaatgagaccaggtaacgcagcagtttttctctgtcaatttggcgtccacgatactgaatttggagcgaaccccaatctgggtgatgggtgatcaggcagtttgatttcagcacgtgggtgacaagcgtctccttcactacttttttcacacaggtggcattctccagataatcagtaggtgaatcatacgtatcgatagtgatatccagcggggcggatagttttgcgcggccctgaatctgcacaaagccctgctcgtcaaaacgcacaatatcgccagtgtcataccagccgcgctccatttcgccgcgaacattctcggcggtgggcacttccagtacacctggcttctccacccgcagatagccgttcattatgttcggccctttcagttgcaggcgtccgccctcttcgataccagggaccgacaacaggcgcgcatccattcctggtagaatacgccctaccgtaccgggtttcgccgccatcggtacgttgatagaaacgacaggcgcgcattcggtcacgccgtagccttcaaggatgcgcaggccaaatttatcctgccaaagctgtttggtactttcttgtaatttttctgcgcctgccaccacatagcgtagacgatagaagtcatacgggttggcgaaacgcgcgtagtgaccgaggaaagtcgaggtgccgaacaacacggtgcaactgcggtcatacaccaactccggcacaatgcggtaatgcagcgggcttggataaaggaacacttctgcacctgtaagcagtggcgtaaacaggcctaccgtcagcccaaaggagtgaaacagcggtaacgccgacataaagcgatcgttggtggtgaagtcggcaatcgttttaatctgctcgacattcgccagaatgcttttatggctatggacgacgcctttcggatggccttcagaaccggagtaaaaaggatcagcgcctcttcttccggctgctgtataacctgtgccagacgcggcatcagcaaagtgagcgaagatccatactttgtcggcagtggtgacatctgcttttaaatctgagtaacttgctccggcagatgccagagtttgcgttttatcgagaaactggcgggaagtcaagatcgttttgacttcagccgccgtaatagcactggtcagcccttttaccccggcagtgtagttcatcat

SEQ ID NO: 24184 - DNA, 1273 bp, Homo sapiens
  SIMILAR (1273)..(848): 761254mologous to Escherichia coli Prophage QIN DNA packaging protein NU1 homolog (fragment),accession number D90798,Smith- Waterman Score=588.
tcagcgtgacacggtcgggtcgcactggccgctaccgtcgctgttgtcctgccagctatagccagcccagaaacgaacactactgaccgcttcattcggcgctttgacttccagacgataagcgccccactctaccggaaaactgaccttgccggtttcgtccgctttcagatccagagtttgttcattttcgatcagatctttttgatcaaactgtgactgccagccttcatcttctgaccagttccagtagtaatcgcgcgttcgcgaatcaggcgcacctctggaactttgtggctcaagcttgatgttagtggatgtgtttgattctaggggcggggagaagtctgcaggaacttcttcggcggcagtgtagagactgctgcttagggccagcctgggtgggaacagatggggctgctcacctcccagcggaggcgcagccatgagcgatctgcataacgagtccatttttattaccggcggcggatcgggattagggctggcgctggtcgagcgatttatcgaagaaggcgcgcaggttgccacgctggaactgtcggcggcaaaagtcgccagtctgcgtcagcgatttggcgaacatattctggcggtggaaggtaacgtgacctgttatgccgattatcaacgcgcggtcgatcagatcctgactcgttccggcaagctggattgttttatcggcaatgcaggcatttttgatgcagggcaggtgacgccaaactgggcttagcctatgagagttcttggctttgcccaggaaagaactcgagggcaaactggaggtagaagaaaatggctttatggaagcagcagtgttacggctctggcggtgatccagctccgtgattgctagaggaactccatcaagaatgctggctacttctccggccatccgcgacgagacgaacgtgcagaatgcggtttccaccacctcagcggaatcttttgcattttttagttcctggacatctgcctgcgctcgggtgaggcggtgacgctcatagtcaatcgtaccaggctgaaggtcggattccgatgcaagacgaaggtcttccacctccttccgtaatttctcattctcaatgcgcgcgtcgcgtgcggaataccattcgatagccgcggaagattcatagaggacctcattaccttttccaccgccacgtgctacaggcattccctgatcctgccagttctgaatggttcgcacgctgaccccaaatatttcagaaagacgctttttgttgacctccat

SEQ ID NO: 24185 - DNA, 483 bp, Homo sapiens
  SIMILAR (36)..(479): 891254mologous to Escherichia coli Aspartate transaminase (EC 2.6.1.1),accession number D90701,Smith-Waterman Score=691.
tgacccgattacggtttcactgtccgtccccttacatcgccgggaccgagaaaaccctggtgttccccgacttatacgccccgctgaacattttacaacagggccatgccagtgtgctggcgcatccgcagctgcgtgagcgggcagtggcggtttcttcatttggcaagacctatcatatgaccggctggaaagtgggttattgtgttgcgccagcgcccatcagcgccgaaattcgcaaggtacatcagtatctgaccttttcggtgaataccccggcacagctggcgcttgctgatatgctacgtgcagaacctgagcattatcttgcgttaccggacttttatcgccagaagcgcgatattctggtgaatgctttaaatgaaagccggctggagattttaccgtgtgaaggtacatactttttgctggtggattacagcgcgctttctaccctggatgatgttgagttttgccagtgtc

SEQ ID NO: 24186 - DNA, 1500 bp, Homo sapiens
  SIMILAR (1038)..(1088): 1001254mologous to Escherichia coli 2,3-dihydroxy-2, 3- dihydro-phenylpropionate dehydrogenase,accession number Y11070,Smith-Waterman Score=94.
ctaatatttcgttagtatggtggtgtttggtcgtggatctcgtttctgatgcgcgtttgctccttctgggatatattggcgagcaattgtgtggttaatagttttcttctgtggcgagggttgtcgatcaactgctgaccattctgcttgtgattctttccgttgtgtcctcattgtttgcgtttgcgtgccgtctatgttgcctccttggtaacctttctggtacggattgagtattcgcttgggtacgggtttgggctcttgcgtaaggttgcctggggatggcctagtgttggctcgatgacgcgttggagctgcctgggcttggagggatcctttgaatgggggctccttggctgcatcgtcctcgacgtgccctccagcgatggcggcttggaagcggtttctcttgtgggagtgggctcgggcttcaggagaataatggcggacggccagtaatggtgctggcactgtcgacgcttccccggcggccaacgcgttgcgggtgtgagttttactgtttaataaagccaggattccgactgggtatgaagtcagtgaaaatggagattcgaggtctctgggctggcggagaagataaaatcgcggttccggccgaaccacgcagtgccgggccggagcgcacactgagcgatctgcataacgagtccatttttttaccggcggcggatcgggattagggctggcgctggtcgagcgatttatgaagaaggcgcgcaggttgccacgctggaactgtcggcggcaaaagtcgcagtctgcgtcacgatttggcgaacatattctggcggtggaaggtaacggacctgttatgccgattatcaacgcgcggtcgatcagatcctgactcgtccggcaagtggttaatactcccgcagagacgctcgaaaccggcttccacgagctgtttaacgtcaatgttctcggttacctgctgggcgcaaaagcctgcgctccggcgttaatcgccagtgaaggcagcatgattttcacactgtcaaatgccgcctggtatccctggcggcggtggcccgctgtacaccgccagtaaacatgccgcaaccggacggtgagctgcatctgttttccgatgagcacatcttccttatgaacgacctccactctcgaaatccatgttgctggaaattccccgcagttacagcaggtgttacccgctaacttcacacggaaaatctccagccggctttcatttaaagcattcaccagaatatcgcgctctggcgataaaagtcggtaacgcaagataatgctcaggttctgcacgtacatatcagcaagcgccagccgtcccgctgaagctgtggagtacatttctcgcaccttgcccagctcgaaaaaggggagagggtctgcgggcaagtcgaccgcgccgcctactaataaagcatcaggattcctgctatcgtgcagctttcccttcaggcgggattcatacgcggccagccatccgtcatccat

SEQ ID NO: 24187 - DNA, 1788 bp, Homo sapiens
  SIMILAR (61)..(774): 811254mologous to Escherichia coli Xylulose kinase (EC 2.7.1.17) (Xylulokinase),accession number D90793,Smith-Waterman Score=963.
atgattgttgccgaaaccatttttgccaattcaggcattggttatcagccgatgaatgcgtgggagtatgttgcaaacgaacgtggtggtagtcgttattattctttacgccctgctcggcaaactggctcccgtcagcgcgcagctgttagagcgcctctggttgcgctggaacccggcttatcatttgaaggaggccacggcaatccggtggtcgttggaggagccgacgtgcagcttggttgccttgggttaggcgttgtgcgtccggcacaacctgcggttcttgacagcacattttggcagctagttgtaaatttagccgcgccggtgacagacccagaaatgaacgtgcgcgttaatcctcatgttattcctggcatggtacaagctgaatctataagcttttttaccggactcaccatgcgctggttccgcgatgctttctgtgccgaagaaaaactgattgccgaacgtttaggcatcgacacctatacgctgctggaagagatggccagtcgggtgccgcttgggtcgtggggcgtaatgccgatcttctccgacagaatgcgctttaaaacctggtatcacgctgcgccttcctttattaacttgtccattgacccggataaatgtaacaaagcgacattgttccgtgcgctggaagaaaatgcggcgattgtatcagcgtgtaacttgcagcaaattgctgatttctcgaatattcatccttcatcgttagtctttgcaggcggaggttcaaaagggaaattaggagtcaaattctcgctgatgtctcgggatatagccgttgttcattcgcgtcgttttgccgtcgatttcgttggtggtgatctgaaagctgccgcgccaaaaggcattgagccggtgattacgctttccagtggggaagcgaagcaaatcgaaattctctatattgaacccatcgatggttatcgtattcagtttgactggtatccgacttcggactccactgatccggtcgatatgcggatgtatctacgttgtcagggggacgctatcagtgaaacatggctgtatcagtatttcccgccagcgccggataaacaataccgagatttaatatcccgtctgaaaaacgaaaatcctcgctttatgtccttgttcgataaacacaataaacttgatcatgaaattgccagaaaggaaggttccgacggtcgagggtacaatgcggaagtggtccgcatgaaagacctgcaggcatgcgagctaggaggacagacgctgttgctgaccaccagagagagagtaaccgctctggtgcaatttatctttggtttcgttccacaatgcggctttggtcaatgcccactgcacgcgctcgtccatgtcggcacgggagagcttctcaaacagacgaacgccaaaagcgatgttgtcgtagatggacatcggaaacggcgtcggtttctggaacaccatgcccactttcgcacgcagcagtgcgatatcctgagagttggtcaggatgttgtcgccatcaagcagaatttcaccttccgcacgctgctccgggtacagttcaaacattttgttgaaggtacgcagcagcgtcgatttaccgcagccggacggcccgataaacgccgttacctggtttttagcgatatccaggttgatgtttttcagggcatggaatttgccgtagtagaagttcaaattacgaacctgaattttactcggggcagtttcaaccatactcattgcaatcttttcctcatcgtgcctgatgcacttcgctaa

SEQ ID NO: 24188 - DNA, 1762 bp, Homo sapiens
  SIMILAR (395)..(1351): 831254mologous to Escherichia coli alpha-amylase precursor,accession number X58994,Smith-Waterman Score=1460.
gaaatctcaactgcacgacccctgctgtgccccaattcagcaggaagcagttagagcagttgttggccaacctcctcaacagcacttgggttttcctgttgagaggggagtctgccaaagagagtgtgattttgaaaaggaactggaagcacgcattgcctctctttccgatagcgtgtctaacgcccgtgaagagcgcatggcactgcgccaggagcaggaacagctgcagtctcgcattcagagtttgatgcagcgtgcgccggtttggctggcagcgcaaaacagtctcaaccagttgagcgaacagtgcggcgaagagtttacctccagccagagaacacatggacacagtgaggggaacatcacaaaacggggcctgctgggggaattacgtttcgaaaacggcgatcccagtaatgaccagagttacggacgtcataaagacggtatggcggaaattggcacttttcacggcggcgatttacgcggcctgaccaacaaactggattacctccagcagttgggcgttaatgctttatggataagcgccccatttgagcaaattcacggctgggtcggcggcggtacaaaaggcgatttcccgcattatgcctaccacggttattacacacaggactggacgaatcttgatgccaatatgggcaacgaagccgatctacggacgctggttgatagcgcacatcagcgcggtattcgtattctctttgatgtcgtgatgaaccacaccggctatgccacgctggcggatatgcaggagtatcagtttggcgcgttatatctttctggtgacgaagtgaaaaaatcgctgggtgaacgctggagcgactggaaacctgccgccgggcaaacctggcatagctttaacgattacattaatttcagcgacaaaacaggctgggataaatggtggggaaaaaactggatcagaacggatatcggcgattacgacaatcctggattcgacgatctcactatgtcgctagcctttttgccggatatcaaaaccgaatcaactaccgcttctggtctgccggtgttctataaaaacaaaatggatacccacgccaaagccattgacggctatacgccgcgcgattacttaacccactggttaaatcagtgggtccgcgactatgggattgatggtttcgggtcgatacgccaaaatgtttacgctgtaatccgtcgattaccatcggcaccaactattcagcatcgtaacctcaatggtcaagcatacctggggctctgtgagggtgacggcatgggctggtgcttgccctgggcaccctcagtcctgctgctggatcatctgagacagggtttcaccatgttggaagaaaacctgggcaataccattcaggacataggcatgggcaaggacttcatgtctaaaacaccaaaagcaacggtaacgaaagccaaaattgaaaagtggaatctaattaaactaaagagcttctgcacagcaaaagaaactaccatcagagtgaacaggcaacctacagaatgggagaaaatttttgcaatctactcatctgacaaagggctaatatccagaatctacaaagaactcaaacaaatttacaaggaaaaaaacaaacaaccccatcaacaagtgggcgaaggacatgaacaaacacttctcaaaagaagacatggatgcagccaacagacacatgaaaaaatgctcaatcatcaatggccatcagagaaatgcaaatcaagaccacaatga

SEQ ID NO: 24189 - DNA, 4473 bp, Homo sapiens
  SIMILAR (2251)..(2210): 641254mologous to Escherichia coli K12 putative pump protein (transport),accession number AE000231,Smith-Waterman Score=51.
ttacggttcccagcgcagttcgtcgtttgacaatgcatcgaacggttcgacaagcgttagcgtgatctcattggaggagacacgctgcccctggttatcttccaccaccacagacaatcgccagtgattgcttgccccttccccgttctgccagtcaggcatgatcagcgtccagccctccgcgctgttggcttgtgcgcccggcgtcaaacttaatatctgcgtatcgccctgccaaatcagttgccgaataccgtaacgactgcggatttgtaatttcagcggcactgtttcgacaggttttagatcccacggcggtgtcgccaaaaacaccgttaacgtttttcgctgtcggtactcaagagtcggtagattatttcgctcggcagccgtaaagcacatcaaatcgaaaataatccgcgcgttagcctgctgttcccgtggcatacccttgagcgccaggtgatggtgatcggtaaagcagaacgactttcgactctcgaagtgatgaaatattttcatagccgcccgcgtgatagccagattggtgcatgggtttcgaagcagtccagtcgcatttctgcccgcggtatccttgaaagtaaattcctggagctgaagcagaagtttcaacagggcgaagtgccattgccgagcttttggggcggttttcgcgttatcttcaatcgtgctcaccgttaagcgcggctgtttgtccagcagctgtacggtcaacaccgggcgctcacgagcggtatccgccaccgcaattccacgatatttcacacgcgtcacttcagataacggttccggctcctgatgaatcgggtgatcaggcgcggcaacgtagacgttcattaacgtatagagcttgcgcgagttgatctccgacgaggaacgaaaatgcatatccggcgcgataacaatatccgcccgcccctgctccagccgttcccacgcccccgccagcacttctgtgatgattgccagttgggtattggcttttgccgccagtttgtcgattaacgggaaaaaggcaggtgtcggtaccagcggatggcccgagcggtcaaacagcaccacatccagctcttcttccagtttttgcatggtgtagctaagtgcggaaggcacgcgtcccagctcatccgccgccgccgcaaaactgccccggcgatcgatcgcatccataacccgtagtgcttccagcgttaatgccctttctttggccatttcgttctcattcaggaaatttgaacataccgggcagaatatctggctaacaatgtagcgtccagcccgtcgagccgcgaaatgtgttgaggcgatgcgcgtcccgtgcggtgtgcttagagcgcagggaaggtgctggcgccgcagggtgccggccttgtgagccgcgagacctatcgccgaaagtcgatattttggatgtgattctgatggagaaccggaaagcacagtgtcgatatgttcttctggcccggggcgaaactgttggtagccaaaggtttcttgtaaaacctgtttagctccggactccagattcaagcacttccgctgcgccacattcaccccgattgcccccacaccgacacgggtctggttgaagttatagtcgatgagcgattcgccatagccgctgtaaacctgagtataaaggcgcacatgtttggtgatcgggtaacttaagcctaactccgcgccgccgtagccggtgttccagttgtactgtcctttcgcactgagcaccgcatcaccgaggtgatagccgattttaagctggtagtaacccatatatttggtgatatccgggttatcgtcagtattacccaccacataccacggcttcacttctaccagccagttaccgttttctgccatcaggcgagtataaaggcggttccagctgcgggaggtcgggtcggaacgcccgttagagtcgtggttataccccatctccacatcgcgcagcgtccaaccggcaaaatattcacgaagcttgtcgcttaaaccgcctggattggtggcagaaatgcgctcatagccttctttgcgataatggatgtccagcagctgcaccatgcgttcgctgtactcttcccattcaaccgcccgcaggcgaaattgctcatcgcaaatcacccacagtggacccagtggcgtggcaattttttcttcaagtaatctcagcatccgttctctcttaagacaaacgtgggtaaatacccggaccggcgctaaaggcaatacggatgagtcggcaatacgaaagaggatttgcgcaaatgccgggtgaaagccaagtagcataaacattggtacgaaaatgggggcgagaatcgaccagattgcggaaccgctggcaataaacatgcataagaaagaggaaagcaacgccagaccgacaaacgccgggatgccgctaagccctgaactttccagtatatcggtcagccccacggcgatgaatttccccatgttgctccagttaaacatggcgacaaattgggcgaggggaaaaaccatcacgataaatcccgccatctctttcatcggttcaatcattaaatgcggtaaatccgcctgacgtcgaattgtgcgggtagcgatgccataagccagcgagacaacaaagaaaaaaagaatgatcagtggcacgatacctttaataaagggtgatggcatcacggtgtgattaatcggatcgcgcaatatcccgttttgcgggatcaccatcagcgcaatcgcagcaataaaaagtagcgatacgacacctgctatgcgtaaaccaaaacgctgactttcggtcaatgtctgcagtttctcatcgctgtttccctgcccggtgagatcctgaaaatcctgcgccatcatgatttccagcagttgcgcgttagtaaagctggtatgcgcgggtacatctgccagaaattgtcgtgtatctgttaccagttcacgggcgtcggcaaggtcaatcggatcggcaaaccagtcatcccaacgttgggttaacgcttttgctgatttctccatttgatcctgatgcggttgtgacgcctcaacactgttcagcgcccagtccgcagcctgggcggtcatctgcacaacatagtacaaacgatcgcgcgcatcggggatggcttccgccgcttcggcaatggcctgatccagccccagttcccgcaaactgtcgcgcagcatacgcgtcaggatgcccagtttctcaaagattttgttgagtttttcctccagcgtcgcggcggtaaatggcttcaccacatagccactggcccccgcttgcgccgcagcaatgatgttctctttcttcgcttctgcagtcaccattaacactggcaatgccgacatcgcgccatccgcacgaattgttttcagcaattccaggccatccatattgggcatgttccagtcggagataacaaatccataaccgcctgcctgcaacttattgagagcgtcgacgccatcttccgcttcctcaacattattgaatcccagctctttcagcaggttacgcactatgcgtcgcatggtggaaaagtcatccacaaccaaaaatttaagttctttatccgccatttcacactcctgatttaaatacgtatcgcccgaacgcgcctgggtgacagcgctgcgggccagcaggttcatcccccgttcgccatccgcgctcaggttcagacggcgaacaacatcggtaattggctcattgcaccaccatccagataaccatgtcccacgtaaacgacggcggcgaacggtcgcatgagcagaaagcgtcaggcagtgttgtatccactcggtgggaaggtgttcttctacataatcacgaccgtagtaggtatccagcagaatctgtttcagctcggagatcagcgggtaacgcgggttagcgccggtgcactggtcatcgaatgcatcttcagacagtttatccacgttcgccaggaagtctgcttcctgaacgccagcttcacggatcgatttcggaatacccagttcactttcagcgtttccagccatgccagcagtttctcgatcccgggttgcaacatttattacaattttaacccgccattttcgagactctgccataacgccccggaaaccgaaattcatggaatcgatccccgttgtgcgtgaaaatgcgggcgatcccatgtgcgtggcaatcttcattgggcttggtatcgccatctgtctatgaacggacgtttctatgcgggcttcctcggcgtcttcctcgggggacgtattggttatgttctgttctacaatttcccgcagtttatggccgatccgctgtatctgttccgtgtctgggacggcggcatgtctttccacggcggcctgattggcgttatcgtggtgatgattatcttcgcccgccgtactaaacgttccttcttccaaaccagtccttgggttagatggaacagggcggatacccat

SEQ ID NO: 24190 - DNA, 416 bp, Homo sapiens
  SIMILAR (243)..(410): 921254mologous to Escherichia coli MukF,accession number D26440,Smith-Waterman Score=259.
aaaaatatactgccgcacggtttacccgtgacctgattgccgggataaccgtcgggattattgctatcccgctggcgatggcgttggctattggtagtggtgtggcaccccagtacggtttatataccgcagctgttgcggggattgtcattgctctgacggaaatagacccggtgcttaaggagttgttgtacgcctattcggtaatatcccgtgcccgacgttatgctggaatggctggggtctcttttctgctggcggttgccacgctgaacggcgagcgtctggatggtgagatgagtgaaggcgagctggtggatgcattccgccatgtgagtgatgcgtttgagcaaaccagcgaaaccatcggcgtgcgcgccaataacgcgatcaacgacatgcctcaagaaccatga

SEQ ID NO: 24191 - DNA, 1935 bp, Homo sapiens
  SIMILAR (958)..(1698): 1001254mologous to Escherichia coli putative aliphatic sulfonate transport ATP-binding protein,accession number AJ237695,Smith-Waterman Score=1233.
atgatgcacaggttgaatctcaatggctatgaacccgaccgacaccatgaagccgcggtcgcattttgtattcacgccggaacggatgagttaaccagtcctgtacatcagcaccgcaaaggacagctgatactggcgctacatggtgcaattacctgtacggtggaaaatgctttgtggatggtgccgccacaatatgcggtttggataccgggcggggtggaacatagcaatcaagtaacagctaatgctgaactctgttttctgtttatcgaacccagcgcagtgacaatgccgacaacatgttgcacattgaaaatatcgcccttatgccgggaattaattttaaccctggcaaacaggacgacgactcagcgtgctgagccaatgacccgcagattaattcaggtcctgtttgatgaactccctcagcagccacaacaacagctgcacctgcccgtttcttctcatcctaaaatccgcacgatggtggagatgatggcgaaagggcctgtcgagtggggggcattggggcaatgggctggcttttttgcgatgagtgaacgcaatcttgcccgactgatagtaaaagagacggggttgagttttcgccagtggcgtcagcagttacagctgattatggcgcttcagggattagtgaaaggcgatactgtacagaaagttgctcatacgctggagggccataatgactgggtgatggatgttgccattagcaacaacaagaaatggatcctgtctgcttccaaggtaaaagtggtcaagcttacaatatcgatcacgttcgccaggattggtgatagtggaagagttattgccaagtataaaattcctgggtgggttcgcgccctgctcggcaaactggctgacgtcagcgcgcagctgttagagcgcctctggttgcgctggaacccggcttatcatttgaaggaggccacgggcacgccattgttgctcaatgcagtaagcaaacattacgcggaaaatatcgtcctgaaccaactggatttacatattccggcaggtcagtttgtggcggtggtgggccgcagcggtggtggcaaaagtaccctgctgcgcctgctggcaggtctggaaacgccaaccgcaggcgatgtgttagcgggcaccacaccgctggctgaaattcaggaagacacgcgaatgatgtttcaggatgcgcgtctgctaccgtggaaatcggtgattgataacgttgggttaggccttaaaggccagtggcgcgatgccgcacgtcgagcgttggctgcggtaggactggagaatcgcgcaggggaatggcctgccgcactttctggcgggcagaaacagcgagtggcgctggcaagagcgttgattcatcgaccgggattattgttgcttgatgaaccgctcggggcgctggacgccttaacgcgactcgagatgcaggatttgattgtgtcactttggcaggagcacggctttaccgtactgttggtgacgcatgatgtgagcgaagcggtagcgatggctgaccgggtgctgttaattgaagagggaaaaattggtctggatttgacagtggatatcccccgtccgcgtcgattagggtcggtgcgattagcggagctggaagcggaggtgttgcaacgggtgatgcaacgtggtgaatctgaaactcgcctgagaaaacaggggcgaatcagcggttcaatcagacgtgaagccacctgcgggttacggctgttgaggtcgtggggagggactgaaagtgctccccgagtgggccacagcatgtttcttgcatgcaaagctcagcgtgcatgtgaacacacgcacacgtgcaaacaggagcattcacctctgtccctggccaatcagcttcagcctgcccacctcagccgcattcgcccatcatccacaatggccggctga

SEQ ID NO: 24192 - DNA, 3453 bp, Homo sapiens
  SIMILAR (101)..(190): 281254mologous to Escherichia coli K12 aerotaxis sensor receptor, flavoprotein,accession number AE000389,Smith-Waterman Score=43.
atggtgcgcgagggaaaaatcagtggctatatgtcgattcgtacccgggcgacggatgaagagatcgcggcggtggagccgctgtacaaagcgttgaacgccggacgtaccagtaagcgtattcataaaggcctggtggtgcgtacaggctggctgggtaaactgccttcattaccgcttcgctggcgggcgctgtggagtgatgaccctgatgtttatcttgctggcggccatgctttggtttgttgctgccccggtggtgacgtatatcctctgtgcgttagtggtattgttggcaagcgcctgttcttgaagtggcagattgtgcgcccgatagaaaatgttgcccatcaggcactgaaggtggcgaccggagaacggcaacttggcctgatgtgccgttggctaattaacgatgtctcaagccaggtgtccagtgtcagaaatggcagtgagacgctggcgaaaggcaccgatgaactgaacgaacatacccagcagacagttgataacgttcagcaaacggtggcgaccatgaaccaaatggcggcgtcggtgaaacagaactctgccacggcgtcggctgccgataaactgtcaatcactgccagtaatgcggcagtgcagggtggggaggcgatgaccacggtgatcaagacaatggacgatatcgccgacagtacccagcgcattggcaccattacttcgctgattaacgatattgcgtttcagaccaatattctggccctgaatgcggcggtggaagcggcgcgtgccggcgaacagggcaaaggttttgcagtggtggcaggggaagtgcgtcatttagccagccgcagcgctaatgctgccaacgatattcgcaagctgattgatgccagtgctgataaggtgcaatccggttcgcagcaggtgaaaaacgtcacccagttgatcgcccagattagccattcaacgctggaacaggccgatgggctttccagcctgacccgtgcagtggatgagcttaacctgatcacccagaaaaatgccgagctggtggaagagagtgcgcaggtgtcggcgatggtgaaacaccgcgccagccgactggaagacgcggtgacgggaattccttcacgacaacctgccccaataatacccaattctgacagttacgttataaattgtgtgagaaatgcggaattcccctcaacgacctactccgttggaggtagccacggacgtcccagcgccgatccctgtaacgagatagagccgatacgataccgtagagatttcaaggctacgcggccaaacgagaagtgggttaccgatgttactgaatttgcagtcaatgggcgcaagctgtatttgtctccagtaatagatctcttcaacaacgaagttatttcttacagcctttcggaaagaccagtgatgaacatggttgagaatatgctcgatcaggcattcaaaaagcttaatcctcacgagcatcctgttctgcactctgaccagggatggcagtatcgtatgagaagatatcaaaatatccttaaagaacatggtattaaacaaagcatgtccagaaaaggcaattgtctggataatgctgtggtggagtgtttctttggaaccttaaagtcggagtgtttttatcttgatgagttcagtaatataagcgaactgaaggatgctgttacggaatatattgaatactacaacagcagaagaattagcctgaaattaaaaggtctgactccaattgaatatcggaatcagacctatatgcctcgtgttaactgtccactttttggggctccgtcccagcggcgtccgtcggcctcgccgccggcatcaccttgcatgcatctggcgatcagctcctggcgggcgctgattggcttttcaattggcggatcgctggggttgattttgggactgattagcgggctatctcgctggggagaacggctgctggatacctcaattcagatgttgcgcaacgtgccgcatctggcgctgatcccgctggtgattttgtggtttggcattgatgaatccgcaaaaatctttctggtggcgctcggtacgctattccccatttatatcaacacctggcatggcatccgtaatatcgatcgcgggttggtggagatggcgcgtagctatggattatccggcataccgctgtttatccatgtgatcctgcctggtgccctgccctcaattatggtcggcgtgcgttttgcgttgggcctgatgtggctgacgctgattgttgccgaaaccatttctgccaattcaggcattggttatctggcgatgaatgcgcgggagtttttgcaaacggacgtggtggtagtcgctattattctttacgccctgctcggccaactggctgacgtcagcgcgcagctgttagagcgcctctggttgcgctggaacccggcttatcatttgaaggaggccacgggcacgccattgttgctcaatgcagtaagcaaacattacgcggaaaatatcgtcctgaaccaactggatttacatattccggcaggtcagtttgtggcggtggtgggccgtcagcggtggtggcaaaagtaccctgctgcgcctgctggcaggtctggaaacgccaaccgcaggcgatgtgttagcgggcaccatcaccgctggtctgaaattcaggaagacacgcgaatgatgtttcaggatgcgcgtctgctaccgtggaaatcggtgattgataacgttgggttaggccttaaaggccagtggcgcgatgccgcacgtcgagcgttggtctgcggactggagaatcgcgcaggggaatggcctgccgcactttctggcgggcagaaacagcgagtggcgctggcaagagcgttgattcatcgaccgggattattgttgcttgatgaaccgctcggggcgctggacgccttaacgcgactcgagatgcaggatttgattgtgtcactttggcaggagcacggctttaccgtactgcttcttaatcaggtcgataacttatttattctgccggtcgctgagtgtatttcgctcggttgggacagcagccgccagacgctggatgcgcaggtcattagcggcgaaggggaagataatgtgctgacgttatcattaccagcctcagccagcgcaccttatgccgttgaacgcatggcggcgcttttgcaacaaacagacgaccccgtgtgtctggtttctggctttgtcagttttgttgaagggcaattgacactggaaccacgggtgatgatgacaaaaacccgtgcctgggcgctggacgcagaaactacgcctgtggcaccgctaccttctgccagcgttttgcctgtgccgtctactgctcatcagttgctgatacgctgccaggcgttacttattcaactgctccataacggctggcgctatcaggaacagagtgctattggtcaggcatag

SEQ ID NO: 24193 - DNA, 2099 bp, Homo sapiens
  SIMILAR (374)..(988): 991254mologous to Escherichia coli MukF,accession number D26440,Smith-Waterman Score=1047.
atgcgctatcgagaaccgccagcaaggggggttgagcccaatgagctccatgcctgcaggtccgaggataaactgtctgaagatgcattcgatgaccagtgcaccggcgctaacccgcgttacccgctgatctccgagctgaaacagattctgctggatacctactacggtcgtgattatgtagaagaccgactctcttttctgctggcggttgccacgctgaacggcgagcgtctggatggtgagatgagtgaaggcaagctggtgatgccattccgccatgtgagtgatgcgtttgagcaaaccagggaaaccatcggcgtgcgcggcaataacgcgatcaacgacatggtgcgtcaacgtctgctgaacccgctttaccagcgagcaggcggaagggaacgcaatttaccgtctgacgccgctcggcatcggcattactgactactacatccgtcagcgcgagttttctacgctgcgtctttctatgcagttgtcgattgtggcgggtgagctcaaacgcgcagcagatgccgccgaagagggcggtgatgaatttcactggcaccgtaatgtctatgcgccactgaaatattcggtagcagaaattttcgacagtatcgacctgacgcaacgtctgatggacgaacagcagcagcaggtgaaggacgatatcgcccagttgctgaacaaagactggcgggcggcgatttccagctgtgaattgttgctttcggaaacttccggaacgctgcgtgaattgcaggatacgctggaagcggcaggcgacaaattgcaggctaatctgttgcgcattcaggatgcgacgatgacccatgacgatctgcatttcgtcgatcgtctggtgttcgatctgcagagcaaactcgatcgtattatcagttggggccagcaatccatcgacttgtggattggctacgaccggcacgtccacaaatttattcgtaccgggatcgatatggataaaaaaccgcgtccctctcgacgctgtctctaagtcatcgaatgactgcggatctccttcgatcagatagagatcttccgggcaatcggtcaagccttccaggtgttcagttacctgtgacagatctggcaccacgatggcgtggcgtgacgggccatacagcgctgagaagtacggcgcatcttccaggctaacgtcgtcataaatttctgacagcagcacaccaccaaaacgctccgccagcgcgttcagacgctgatcttcagagccgccaggctggcttaaacgttcgatctcttcatcgacggcgtttttgcgcgcgcccacttcatcgcgttcaacaatcgcctctcgctcacgctccagcaattgttgcagatattcggtgacgtcctggctggaggtaaactcttcgccgcactgttcgctcaactggtttaggcttgtttggcgttgccagccaaaccggcgcacgctgcatcaaactctgaatgcgagactgcagctgttcctgctcctggcgcagtgccatgcgctcttcacgggcgttagacacgctatcggaaagagaggcaatgcgtgcttccagttcctgatgcagggcttccagttcgtcgatatcaaaattcttgcccgtggcctccttcaaatgataagccgggttccagcgcaaccagaggcgctctaacagctgcgcgctgacgtcagccagtttgccgagcagggcgtaaagaataatagcgactaccaccacgtccgtttgcaaaaactcccgcgcattcatcgccagataaccaatgcctgaattggcagaaatggtttcggcaacaatcagcgtcagccacatcaggcccaacgcaaaacgcacgccgaccataattgagggcagggcaccaggcaggatcacatggataaacagcggtatgccggataatccatagctacgcgccatctccaccaacccgcgatcgatattacggatgccatgccaggtgttgatataaatggggaatagcgtaccgagcgccaccagaaagatttttgcggattcatcaatgccaaaccacaaaatcaccagcgggatcagcgccagatgcggcacgttgcgcaacat

SEQ ID NO: 24194 - DNA, 1338 bp, Homo sapiens
  SIMILAR (13)..(627): 891254mologous to Escherichia coli pdxJ,accession number M76470,Smith-Waterman Score=918.
atgaggattgtcatggctgaattactgttaggcgtcaacattgaccatatcgctacgctgcgcaacgcgcgcggtaccgcttacccggatccggtgcaggccgcgtttattgccgagcaggcgggagcggacggcattaccgtgcatttacgtgaagatcgccgtcacattactgaccgcgacgtgcgcatcctgcgtcagacgctggatacccgcatgaatctggagatggcggtgaccgaagagatgctggcgatcgccgttgagacgaagccacatttttgctgcctggtaccggaaaagcgtcaggaagtaacaaccgaaggcggcctggatgtcgcagggcagcgtgacaaaatgcgcgatgcctgcaaacgtctggcagatgccgggattcaggtttctctgtttattgacgccgatgaagagcagatcaaagctgcggcagaggttggcgcaccgtttatcgagatccacaccggttgctatgctgatgccaaaactgacgccgaacaggcgcaagagctggcgcgtatcgccaaagccgcgaccttgccaacagcctggggaccaggggcatccaatcgtgggcttgagaaatcgacggtccaacggttggctgggcttcgcataagtatccgcttgcatcggcaatctgtgcatccggattccgacgttcactcgcagttatgtgagtcggaaacgcttgcgtcagcaatatacggtagcggcgcgcgcggtattcgtaacggtgatgtggtacgcgtctttaacgctcgcggtcaggtgttgtcagggtcagtggtttctgaccgctatgcacccggcgtggcacgaattcacgaaggggcatggtacgatccagataaaggcggcgagcctggtgcgctgtgcaaatacggtaaccccaacgtgttgaccatcgacatcggtacatcgcagctggcgcaggcgaccagtgcgcacactacgctggtggaaattgagaagtacaacggaacagtggagcaggtgacggcgtttaacggccccgtggagatggtggcgcagtgcgaatatgttcccgcgtcgcagttgttctcccgtgagctggacgatgaacaactgacgcaaatcgccagtgcgcagatggctgaatggttttcgttgctgaaaaacgaaccgccgctcactgcggcggtgaacgagctggaaaaccgtattgtccacgctgacagtatcgtgacgatgcccgtctggaactggtccgcggacttttgcggcctgtttctgatgaccgacaaacaagcggcgctgctgtatgcatcggactacaaacaggatcgagcaagagagtaa

SEQ ID NO: 24195 - DNA, 583 bp, Homo sapiens
  SIMILAR (3)..(173): 921254mologous to Homo sapiens envelope protein,accession number AF072508,Smith-Waterman Score=257.
tcgaagctgtaaaactacaaatggagcccaagatgcagtccaagactaagatctaccgcagacccctggaccggcctgctagcccacgatctgatgttaatgacatcaaaggcacccctcgtgaggaaatctcagctgcacaacccctaccatgccccatttcagcaggaagcaggtagagcggtcgtcagtcaacctccccagcagcacttgggttttcctgttgagagggggtactgagagacaggactagctggatttcctaggccgactaagaatccctaagcctagctgggaaggtgaccgcgtccacctttaaacacggggcttgcaacttagctcacacccgaccaatcagagagctcactaaaatgctaattaagcaaaaacaggaggtaaagaaatagccagtcatctatcgcctgagagcacagcaagagggacaatgatcgggatataaacccaggcattcgagccagcaacggctaccctctttgggtcccctccctttgtatgggagccctgttttcactctattaaatcttgcaactgcaaaaaataattaaaataagtctagatggta

SEQ ID NO: 24196 - DNA, 808 bp, Homo sapiens
  SIMILAR (805)..(659): 911254mologous to Escherichia coli pdxJ,accession number M76470,Smith-Waterman Score=225.
aacatattgaaagacaggaccagctggatgtcctaggctgactaagaatccctaagcctagctgggaaggtgactgcatccacctttaaacacagggcttgcaacttagctcacacccgaccaatcaggtagtaaagagagctcactaaaacgctcattaggcaaaaacaggaggtaaagaaatagccaatcatctattgtctgagagcacagcgggagggacaatgaccgggatttaaacccaggcattcgagctggcaacggctaccctctctgggtcacctccctttgtatgggagctctgttttcactctattaaatcttgcaactgcacactcttctggtccgtgtttgttacagcttgagctgagctttcactcgccgtccaccactgctgtttgtcgccgtcacagacccaccgctgacttccacccctccgaatctggcagggtgtctcatgtgctcctgatccagcgaggtgcccattgctgctctggattaggctaaaggcttgccattgttcctgcacagctaagtgcccgggttcatcccaattgagctgaacactagtcgctgggttccacggctctcttctgtgacccaccgcttctaatagagctctaacactcactgcatggcccaaggttccattctttggaatggcgatcgtcagcatctcttcggtcaccgccatctccagattcatgcgggtatccagcgtctgacgcaggatgcgcacgtcgttgtcagtaatgtgacggcgatcttcacgtaaatgctcggtaatgccgtccgctcccgcctgcat

SEQ ID NO: 24197 - DNA, 404 bp, Homo sapiens
  SIMILAR (32)..(331): 961254mologous to Escherichia coli PUTATIVE PEPTIDASE IN GCVT -SPOIIIAA INTERGENIC REGION (EC 3.4.-.-),accession number D90868,Smith-Waterman Score=501.
gcacagctcgcagcaatctccgcgattcgccccggcgtgcgctgcccagcaggttgacgatgccgcgcgccgggtcattacagaagcaggttatggcgactatttcggtcataacaccggtcacgctatcggcattgaagttcatgaagatccgcgtttttcaccgcgggacaccacgacgctacagccaggcatgttactgaccgtggagccggggatttatttgccagggcaagggggcgtgcgcatcgaagatgttgtgctggttaccccgcaaggcgcagaagtgctctacgccatgccgaaaacagtgttgctcacgggagaggcataatggatttatcgctattaaaagcgttgagcgaggcagatgcgatcgcctcctcggaacaggaagtgcggca

SEQ ID NO: 24198 - DNA, 1306 bp, Homo sapiens
  SIMILAR (249)..(326): 1001254mologous to Escherichia coli PUTATIVE FRV OPERON PROTEIN FRVX,accession number D90868,Smith-Waterman Score=116.
tggaagcgaccggtattcgcaaaattctgcaaattgaactggcggtactgccagacagcgatcgccgtggcatgaccgcttccggcatgattgtgattaaccccccgtggaacctggatcaacagatgaataacgtgttgcctgtggctgcacagcaaactggttccggcaggcaccgggcacgccagcggtatactcggacagtgctctagtcctgcgaacacagtgttgctcacgggagaggcataatggatttatcgctattaaaagcgttgagcgaggcagatgcgatcgcctcctcggaacaggaagtgcggcagatcctgcctggaagaagcggatcgcctgcaaaaagaagtgcgagttgatggtctgggatcggtgctgatccgcctgaatgaatcgacaggtccgaaggtgatgatctgtgcgcatatggacgaagtgggatttatggtgcgcagcatctcccgcgaaggggcgattgatgtgctgccggttggcaacgtacgcatggctgcccgccagctgcagccggtgcgcatcaccacccgtgaagagtgcaaaattccaggcctgcttgacggcgaccggcaggggaatgacgtcagcgccatgcgcgtggacattggtgcgcgctcctatgacgaagtgatgcaggcgggaattcgtcccggcgatcgcgtcacgtttgataccacttttcaggttctccctcaccagcgagtgatggggaaagcctttgatgaccgcctcggttgctatctgctggtgacgcaactgcgcgaactgcacgacgccgaactacctgcggaagtgtggctggtggcaagttccagcgaagaggtgggattacgcggcgggcaaacttcccacccgcgcggtgtcgccggacgtcgccattgtgcttgataccgcctgttgggcgaaaaactttgattatggcgcggctaaccatcgccagattggtaacgggccgatgctggtgttaagcgacaagtcgctgattgcgccgccaaaacttaccgcctgggtcgaaaccgtggcggcagaaattggcgtgccgttgcaggcagatatgttcagcaacggcggcacggacggcggggcggtgcacttaaccggcaccggcgtgcccacagtggtgatggggccagcaacccgccatggacattgcgccgcatcgattgccgattgccgcgacattttgcacatgcagcaacttttatctgcctttattcacaagtcaaatgagttaggcggcgtgctacggttacgcattcagatatgtcgggacggaaatgaa

SEQ ID NO: 24199 - DNA, 1131 bp, Homo sapiens; identical to SEQ ID NO: 6389
  SIMILAR (580)..(1131): 981254mologous to Escherichia coli 2,4-dienoyl-CoA reductase,accession number U93405,Smith-Waterman Score=929.

SEQ ID NO: 24200 - DNA, 1463 bp, Homo sapiens
  SIMILAR (462)..(1040): 841254mologous to Escherichia coli K12 putative receptor protein,accession number AE000325,Smith-Waterman Score=788.
  misc_feature (1)...(1463): n = a,t,c or g
aacaccgtagtccgccggactgccagcccattaagacccacggacaccgccctagtccccaaccggtggcaccgccctccccccgatacgacccgcggtttcattaccctccctcttcccgcacgaacacgcagctccgcatcagcaagaaacggtcgcgccatcgataccatatcggcatcgccgcgcgagagaatatcgtcggcaacctgcggatcgttaatccggttggtggttaccagcggcagcgagacgtggcctttcagtttgcgcgtgacccatctaaatgcgccgcgcggcacgggcgtggcaatggtcggaatacgtgcttcatgccagccaatgccggtgttgataatggtcgcgcccgccgcttcaatggcctgcgccagctctaccgtttcggcaaaagtcccgccgtcttcgaccaagtcngtcaaatagttcaatgtttagatgtgccttcatatacatttatatggtttgcagttctcgatcctatttatggtgattccgtatcaacaggtttagtggtagcaattatttctattattgttaacgcaattactattcctattggtctgtatttgctgaatccttcttcaggagcggatggtaagaagaatagtaatctgagcgcattaatttctgcggcaaaggagccagtagtatgggcacctgttctggcaacgatcctggtgttggttggggtaaaaattccggcagcatgggacccaacctttaatctgattgcgaaggctaactcaggggtagcggtattcgctgcggggttgactctggctgcacataaattcgagttcagtgccgaaattgcttataacaccttcctgaagctgattctgatgccactggcactgcttctcgttggtatggcatgtcatttgaacagcgaacatctgcagatgataagcactggcaagcgcattaccgccggcattctccctgaaattaatttattgcgcagccggcgtttaatgtgctacacccgtactggtacaacgtcattggctattacgttaacggaaaccgttacacagaagctgacaggaagcaggccgcgtattagtagttacggtcgcaatctcatgtggccgttggcctggtacaaggacaacggcaaacctcatctttgcagccaattggagaccacccgtattcactcaacagcggcacaaggcagatcttcagggtcgttgcgacggggcctgggcgccagcccattttaccgtcagcacgaccaggcccgttccgaggggcaaattccaattacccgaattccaatggggctggcgcaaagagcgccaaaagggcgggcacagcccaggggcctgacggcacctttcaccaatggggccctggggcagccccagggacggggcacaagcaagcaagcaagccaaacaaggccgcgggccagcgcttggccacacacaccaacctaa

SEQ ID NO: 24201 - DNA, 461 bp, Homo sapiens
  SIMILAR (288)..(19): 971254mologous to Escherichia coli K12 putative enzyme,accession number AE000410,Smith-Waterman Score=466.
cgtgcttcgattcgaagtcaggactttgaggttcaggttatcaacgatgtcataataatgctgcatcagatcgtctacgttcttacaggaagcagccagcggagcgttgttagcaccaccgatagacagcatcacatcgccgccagcctcacgcagagctttgattttgctgtactgagcgtaattctgcataccgtaagcggtaccccatgtcggcagacaggtgttcgcatctttactcaccacaaacgccagcgtgaagtggttgacgttatgattggtgcataaacgctgtttcggccacgctttcttcggcgtacctacgcgctctttggttccggtccagtcaacaaaaacacgccacgggttgctgtcagaaggagaaactttctgcactttactctgagaaatgtagttcacaccgttaaagcgaatcagcgtatcgctggcataaagcgttt

SEQ ID NO: 24202 - DNA, 3480 bp, Homo sapiens
  SIMILAR (567)..(614): 1001254mologous to Escherichia coli DNA gyrase subunit B,accession number D87842,Smith-Waterman Score=85.
  misc_feature (1)...(3480): n = a,t,c or g
atgcctcgccagaatcaacagaacagcaaaatctggagtggtaatgctaaacttgtcacttggatgaacaaccagcggngtcgatggcgggtagtcaactactactcatatctgtcgacgatatatacgaacagatcacaatacgtacactacactttcatgcaacgctaccgacgactacgcatctaccgcttcgctctccacgaccacaccacgagagacgcctctaacctatgtggcgaagatgacatagctacgcattctcaaccgcgacggcaaagaagaccacttcactatgaaggcggcatcaaggcgttcgttgaatatctgaacaagaacaaacgccgatccacccgaatatcttctacttctccactgaaaaagacggtttggcgtcgaagtggcgttgcagtggaacgatggcttccaggaaaacattactgctttaccaacaacattccgcagcgtgacggcggtactcacctggaggcttcccatcatcatcatgaccgatgcgacgtcgacggctcgcacattcgtacgctgctgttgaccttcttctatcgcagatgccggaaatcgttgaacgcggtcacgtctatatcgctcagccgagctgagcaggaccagcagcagctccatgctgtcagtttcgtcgtttccaaaatgctctgtaaacggaaaaatgtcttcgatttcccccagtggatgccaggagactggtgcttgggcgtgtggaagtcgatggctgagtcacgtggtcactctgtgtggcacgccgggaaatgggggccgaaggaagtggggtactgggaggtgcaccttaaggagggctccaatagtgacaataagctgaatgctgaaaagacgactcagacggagatggttggggcctcattgcctgctggagttggatcatgggacccaagaggagccgcctgcggtgagctgctgacagacagacaggcgcccaatcgggggacccttgactggaagggcccccccaaattggagccaagttcacccggggacccctgtcaaatccggaagaaagaaggggccccggcccacgggtactgtgcttgcaatatcgccttctttcctggcgttcccgtcaccgggttccccgccgttaatctaccaagcctatacgtggaaggggccctaggaagaaggccctctcgtcactgcatgtggaactcgaccattggggcaagacagggagctctcacacgcgggccactgaccaccgtctgcactcccatgctttctgtcgtgagcaccgtgctagggtcccccaattcacagaagcacactgaggctcagaggctgccaggcaacgtgccaagcactccctcaacaggaggggttcaacaccacactggaagaagatcacgtggaatgggggatcttgtggactttcacagtgttatggtaaacacaggcaaagacaagaaggcaagcacaactcccacgtgggaagagggagggtggctggagtcagtgctgacattacctggtgagcacagcgcctcggaggtggactgggatgtcaactttggtccaggtgtcctttctggtattgtagacatagactcgttatacaaaaaagtctacaggaaggaagaagaatgtcagtgtcacaatgatacgcttccaaggaagtggaagttcctctccttccctcctcccccaccgctgctgaatgctgagaaggaagctgacctagcttcagggaactcaccatccaacagtacagaaaaactctactatcagataaatgcccacataaaggggacaagcattcaggcccttcaaaggtcctacacctgtttacatgcaggggacgaacgcagctgtcgtgatgcgagtcgtttctcggcgtacccggttctcagtgcgtgctgcctttcggtgagtgggaagcgctctgctgccctgaggttccctctggcgccctggcccggggaccgcggcccgctgtggaatgtgctgggtaacgccgtctggcgtcgtcttgtgtcccctacagggctggagtaccagaggccgaagcgtcagacctcctgtgacgactcgagagacaaggagagtcggagaagctcaggcccagaggaacctgaggaggcgacaggacgaaacggccagtgggacctcgacgggatccctgggcaggatgagctgcggagcactggggcagtgaagaagtgtgggccacgctcccggaccctggtgacaggagaacagaggctaaggttgtttgcaggaggcaccaccattctgacacattcagcaatgctggtggctgcggctgactccccacagacccccaccctcgcgctgggctccgagggtgcaacagttgcccacatcggccgctccacggtttctacaccaactcgacacagaaagaacgtgcctttagtcaatgacacatcgctatggggccccccttccaacaagctgggcaccagagctgcctccaatgatgtaaacagaagaccacaggagaagagctgcacacaggcagcgagaggctggtggccaacaacaagaggaacctggagaacacaccaggcagctggcaccccccacacccggcccaggcttctgtatgaaggtccagagaaaatgtggtctcccaggacccagcgaggctgggctccagactgtgacccaagttcctctgaaccctggtattctgaggtctgctccgacactcgggctcagcacacaagcacagaagagccatgcccggagctcagctctcatctggcttcttacttgacttgttcccaggtcttggtggccaaatcaggacccagagatccttgtagtggtagaactgctctccgttgggagagcaaactcccctccaaagacccacagctgtccgccaccttgaggcactacaccgcctgtgaaaagaaaggtgacaggttttatggtgctgtttcctgcgtttacaccacagctctttttgcgtctttcctggattccacacagcagccctgtgaggcgctgtcctcctgctgcccggagaggagactgaggccagagatgcggcaaatttcccaaggccacacggccaggcacgacaccagccgcgaacgacgacgcccccaccacaccaacaccaccgagacacgacgcaacaaacacgaacacaacggccgcgccaaccacaaccacaagcgcccccacacggaaccagcagacaaaccagacacaccacaaaaagaaagaaaggaaagcacacaaaaatcaccagacgaaagagaaaaaaacgaaaagatcccgtcccaggctccctcaggagatgcatctgagtaccttgggaggactttaaacaccctccaggctctgcgctgccacgaagaacggcagctttgggaagggagactcattctgcaaggcgccgcagctgtagtccagtgtctgccacaggatgaagtgacgacgagcacggagaacacttga

SEQ ID NO: 24203 - DNA, 1908 bp, Homo sapiens
  SIMILAR (1095)..(304): 761254mologous to Escherichia coli thiH,accession number M88701,Smith-Waterman Score=1019.
tcataaccgttcagggatggaccccataaatcgagtcacacggttttttcttctgtttgtttttgtgtgtcggcttgcccttttccgtacctttttgtccttggtggcccggcacacgtgccttccggcatgttgcacatccgcatggtgatatcggggttccccgaatcgataaaccctggaacccctggctttagttcttaacggaccaaatcgttcaccggttcccagtctgtggattttcttgttcttcaatggataactgaccaaagcacaatcgactgcgaggttagcgcaaccagcgtcacgccagtcctgccatccagcatcgcttggcccagccttttgttgcgcaaactctgccagcaacggccagcgttttaatgccgcggccaactgttcgcgttgggaaatatcggcataatcaatatcaggcagtgaaaatgcctgctttaacgccacaatatcattctggaagatatagccaatatggagcttgtctaacgtcgtccagttgtcggaaaggccaattagcgcgccgaggcctatcttatcaatccccgcacgccccagccgatccggcgtttccagccgccagaagaagtcctgttttttgcctttcagatgatggcgggcataagtcgcctcgtgatatgtctcctgataaaccatcacgccatccagaccaagttgctttaactcggcgtattccgtctccgccagcggttgcacttccatctgtagtgaagagaactgttcacgaagggcagggagatgacgacgaaagtaatccatccccactttcgcctgatgttcaccagtgactaacagcagatgttcaaagcccatctcccgtatagcggcactttccctggcaatatccgcttcatccagcgttttgcgcttgatgcgattactcatggaaaatccacagtacgtgcagtcgttagcgcaaagattggaaagataaagcgggacgtagaaactaactgtgttgccaaatcgctgacgggtcagacgctgcgcccgttgggccagttgttccagatagccactggcggcaggcgataacagcgccatcatgtcgtcgcgggttgagttgcgaaggcccatgtggtcttgtgtgcgcggtgggtccgttgtagtgttcgtgtgcgtgtgtcccggtgttggatttttcgcttgattcgaggttggttttgccgtgtgttgtggatttccgttgtgtatcctcgtgccatcctcggtattctttgacgatgtaccctggtatcctggtcgtgttgatggtgccgctcttgtttgggaccgtgtgacggcattgaagttatcccagtcatgacagtcgacgtccatagtgtcactggtattatcatggtaaccaccagtatgttcagtcaatgggcaggtaatgttgtctatgttcgtatgttcggtaagtgtataagtttgttcaagtctggcttcagtaagcttgtcccatgccattatgcggaatgcgtttacgggtttgcgtcgttcggggttattaagcgtcacgggcacgctacgctgtctcgccctatttctgacgataaatcgaacggttgtctggatttggcatgataacggtgttagatcgagtccggtttcactgtacaatcgggctatcgggtaacaggttatcgaagaagttaaatacggcatcaggagtgtgatattccccctctgcaatggcagcgaaagtgacaacggtctggcataacggcttgctaaccactccggtgcatacttaaaggtgtgcgcgccgttggctaacttcgttaactcgcctacccgctggttgttcatccaagtgacaagtttaggcattaccactccagattttgctgttctgttgattctggcgaggcatttttcgcgtcgcat

SEQ ID NO: 24204 - DNA, 2118 bp, Homo sapiens
  SIMILAR (340)..(960): 961254mologous to Escherichia coli putative hydrogenase-2 small subunit,accession number U09177,Smith-Waterman Score=1123.
atgcgccagttcgtcaacatcacacatatgttcggtaatcgccacgatcgcgtgttttttacctttcgcgatacccgctttgatttcgtttaccaggtcttcacggctgaattcaacttccggaaccacaacgaattcacagccaccggcaatggccgcagccaacgtcagatctccacaataacggcccatcacttccaccacggaaatacgctggtgagaagaagaggtgtcacgcagacggtcgatcgcttctacaacggtgctcagcgcagtgaagaaaggggatcctctagagtcacctgcgataaccgctatggttgctcggcggtgtggttggcctcctgcggggcattgctgacgggcgcgctgccgtctgtcagtcatgcggctgctgaaaaccgcccgccaattccgggatcgctggggatgttgtacgactcgaccttgtgcgtaggctgccaggcttgcgtcaccaagtgtcaggatatcaatttccctgaacgtaacccgcaaggggaacagacctggtcgaacaacgacaaactgtcgccgtataccaataacatcattcaggtgtggaccagcggcacaggggtcaacaaagaccaggaggagaacggctacgcgtacattaagaaacagtgtatgcactgcgtcgatccgaactgtgtctctgtgtgcccggtctctgcactgaaaaaagatccgaaaaccggcattgtccattacgacaaagatgtgtgcaccggctgccgttactgcatggtcgcctgtccgtacaacgtgccgaagtacgactacaacaacccgtttggtgcgctgcataagtgcgagctgtgcaaccagaaaggtgtggaacgtctcgataaaggcggtctacctggctgcgtagaagtgtgcccggcgggcgcggtgaattacgggacgcgtgaaaaactgagggggaagggaaaaaggctgggccgaaaccgggaggaaaacccaatccggttaagcggaacgggaaataccggaggggcaaaatccgagttggggaagacgggccagccgcgtggcagagcgcacaaacactgcgagagaaggaatcagggcgcaaataacccgaggagcggaggggagagggcccccaaggagggcacgacacaacaaagcaagtggctctggaaaaaaatcatcgccctgtacgagcaggccgccgaatgtgacggcgaggtggttcgtcccaaagaaccgaactggacagcctgggcaaacgaaattcgcctgatgtgtgtgcaggatggtcgtactcacaaacaaatctgcgagatgtacagccgcgtcagccgcgatccgttctggtgccgtaacgtgctcagcccgtcgaagctgcgggaaaaatgggatgagctttccctgcgcttatcgccgtccgtcagcacgtacacagaaaaacgcgaagacccgtacttcaaagccagttacgacaatgtggactacagccagatcccggcaggattcaggggacctgtgcgcaatttctatgtcggcactaacgacccgcgggtgattttgtgcctgacccgccaggcggaagaactggagtccaggggcttataccgtcgtgctgcaacggtgtggatggcggcattccgtgaaagccactcccagccagaacgaaacaattttctggcgcgtcgtgaacggtgtttacggaaaagcagacggcgactgagccgagaagcgacgcaaccccaccacgagacgaacgcaacagagagacacagagacaccaagcaagaagccatgacgagcagagacgagaacaacaacgagagcgcagacatcagcacaacagagactgctggcggagtgtcattcatccgtttctcaccgatgaacaggtcgccgctggtgatcgtctcaagcccggcaatcatgcgcagtaaagtcgatttaccgcagccagacggtccgacaaacaccacgaattcaccttcatggatatcgagattgatatctttcgataccacgacctcgccccaggctttcgttacattttgcagctgtacgctcgccatgcccttctccctttgtaacaacctgtcatcgacagcaacattcatgatgggctga

SEQ ID NO: 24205 - DNA, 891 bp, Homo sapiens
  SIMILAR (385)..(888): 1001254mologous to Escherichia coli a proline/betaine transporter,accession number M83089,Smith-Waterman Score=831.
atggtgtggctggcaaacgttgccaatgatactgctgattgcctcgctgggtggcattggttacgccatcgtttcacaacttctgcaacgccggactataaccactatcgcattcggcccgtggcttgcgctcggcagcatgataaacctgggcgtacagctaccgctgcggaattgagtcagtacggtaacccgactacctgtgaaattgataacggcggcgtcattgttgcggatggtttccaggccagcaaagcgtacagcgcggacagcatcgtagattataacgatgcacattataaaacttctgtcgatcaagacgcatggggctttgtcccgggcggcgataacccgtggaagaaatacgaaccggcgaaagcatgtgttgccctgtttgtgttggcgatcccggcgtttattctgattaacagtaacgtcatcggcctgatttttgccgggttactgatgctggcggtgatccttaactgctttacgggcgttatggcttctaccttgccagcgatgttcccgacgcatatccgttacagcgcgctggcggcggcatttaatatttcggtgctggttgccggtctgacgccaacgctggcggcctggctggtcgaaagctcgcagaatctgatgatgcctgcctattacctgatggtagtggcggtggttggtttaatcaccggcgtaaccatgaaagagacggcaaatcgtccgttgaaaggtgcgacaccggcggcgtcagatatacaggaagcgaaggaaattctcgtcgagcattacgataatatcgagcagaaaatcgatgatattgaccacgagattgccgatttgcaggcgaaacgtacccgcctggtgcagcaacatccgcgaattgatgaataa

SEQ ID NO: 24206 - DNA, 1650 bp, Homo sapiens
  SIMILAR (1299)..(625): 721254mologous to Escherichia coli gamma- glutamyltranspeptidase,accession number M28722,Smith-Waterman Score =781.
ctaacggcagcaacgttccagcgcgaagtaatactcaacagtctggttctgcaacgcaatgggatattccagaaggctaaggaaatcgaaacaatcaccagcctgaatggcctcaagaaaagcctccctttcttcctcatccattccttcgctgtcattaaatgaatgccagttcaaacgctctgccagcaaagaagcacaatttaatgaaagatatcgcgcttctatggcgattgcacacagcggccagcgtaattgatcgacatcctccatgttccaggtatttaattgctgaataaatttctgccaggcggaaggctgaaaacgatcactttctgaatccagtaatgtcctgaatgcacgtagtatttcatgttcagcggcagcatctttttcttcatcatctgcttcctcgacaggatttaccgccagtcgcagggcctcttcataggcctggcgtaatgctttaaacccttgcggatcggtttcgggatgacacaacggtaagcgagcaagataagcctggcggataatgtctatttgcgtcgtgctttcaatttcgaggatttgccaacatgttttcataggtcgctcacatcgttttggtctgtctctggttcgtgcactgcaggcgaacaaggcgttgtcgaatgtgcctacgttgaaggcgacggtcagtacgcccgtttcttctctcaaccgctgctgcttttgcttccagcagcttgagcgtatcgggctaaacctttttcgacacgcagctcgtccggcaacactgatggtggaaacgcgggcattggtcgcttcggcgacgtcaccataatcgatgctattcaccaccatggcactgtagatgatccggtccgcggcgtctttcaccacaatggtcggcgacatcgacgacagcgggcgtttgttcggcccgacggcgttggcatcaccgcccaccagcccgtaaacgttcggtacgcccggtttggcggagaaatcatccatctggttattaagcagaataccgctctcgcccgcgacaatgcccgtaccgaaggtggtgttcagcgtataggtcaccgccaccgcgttaccatctttatccaccactgagtaatgggtagtttgattactctcataaggcgcaagcttgccggggcgaatttcgctggatggcttcgctttattgatatcaatttgatcggcaatagatttggcataggctttattggtcagcggctgccacggtactttgacaaaatccgggtcggccagattttccgagcggtccgcgtaggcgtatttctccggttttggccctggattggatcggctctgcgggtcggatgcgccgtacaactcaccgtccggcccaaccataatgctttgtgtactgcccatcgcctctttcagcgccactttctgaccgatgaacaggtcgccgctggtgatcgtctcaagcccggcaatcatgcgcagtaaagtcgatttaccgcagccagacggtccgacaaacaccacgaattcaccttcatggatatcgagattgatatctttcgataccacgacctcgccccaggctttcgttacattttgcagctgtacgctcgccatgcccttctccctttgtaacaacctgtcatcgacagcaacattcat

SEQ ID NO: 24207 - DNA, 1992 bp, Homo sapiens
  SIMILAR (82)..(1143): 671254mologous to Escherichia coli lamB,accession number A31943,Smith-Waterman Score=1207.
  misc_feature (1)...(1992): n = a,t,c or g
atgcatacctccgagttgctgaaacacatttatgacatcaacttgtcatatttactacttgcacagcgtttgattgttcacgacaaagcgttcgctatgcttcgtctcggcataaatgaagaaatggcgacaacgtttagcggcactgactctttccgcaaatggtttaacctgggcagaaaccaatcaacctggctttgccactttccgttttggacaggccccagaacaattactccagttgacgccaggattcccgcgtttgacaacttccaccaaattccttaccgcatcatgccttttataacgcttgcgtcgaagatggtaaacaccctcggtcaaggggagatttctgcctcgcctctattgcaaggatctccgagcaaggtctcggattcaaaggggctcttaagggggattccccaggttcaacgtttagcgcagatggaaatcaacccgggcggcacattagaactgggtgtcgactacggtcgtgccaacttgcgtgataactatcgtctggttgatggcgcatcgaaagacggctggttattcactgctgaacatactcagagtgtcctgaagggctttaacaagtttgttgttcagtacgctactgactcgatgacctcgcagggtaaagggctgtcgcagggttctggcgttgcatttgataacgaaaaatttgcctacaatatcaacaacaacggtcacatgctgcgtatcctcgaccacggtgcgatctccatgggcgacaactgggacatgatgtacgtgggtatgtaccaggatatcaactgggataacgacaacggcaccaagtggtggaccgtcggtattcgcccgatgtacaagtggacgccaatcatgagcaccgtgatggaaatcggctacgacaacgtcgaatcccagcgcaccggcgacaagaacaatcagtacaaaattaccctcgcacaacaatggcaggctggcgacacnatctggtcacgcccggctattcgtgtcttcgcaacctacgccaagtgggatgagaaatggggttacgactacaccggtaacgctgataacaacgcgaacttcggcaaagcgttcctgctgatttcaacggcggcacttcggtcgtggcgacacgacgagtggacttcgcaaaacctgggccggataaggcgttcacgccgcatccggcaatcggtgcacgactgcctgatgcgacgcttgcgcgtcttatcaggcctacagccgttgccgaacgtaggctggataagacgtttacgccgcatccggcatttcgttatggcaaaggatattcagcttcttaacgtttcatatgatccaacgcgcgaattgtacgaacagtacaacaaggcattcagcgcccactggaaacagcaaactggtgataacgtggtgattcgtcagtcacacggtggctcaggtaaacaagcgacgtcggtaatcaacggtattgaagctgatgttgtcacgctggctctggcctatgacgtggacgcaattgcggaacgcgggcggattgataaagagtggatcaaacgtctgccggataactccgcaccgtacacttccaccattgttttcctggtacgtaagggaaatccgaagcagatccatgactggaacgatctgattaaaccgggtgtttcggtgatcacgcctaatccgaaaagctctggtggcgcgcgctggaactacctggcagcctggggctacgcgctgcatcacaacaacaacgatcaggcaaaagcacaggattttgttcgggcactgtataaaaacgtcgaagttctggattctggcgcgcgtggctccactaacacttttgtcgagcgcggaattggcgatgtactgattgcctgggaaaacgaagctctgctggcagcgaatgaactggggaaagataaattcgaaatcgtcacgccgagtgagctgaatgctgtccagggagggggcaagagagatcaagggaccagatag

SEQ ID NO: 24208 - DNA, 1542 bp, Homo sapiens
  SIMILAR (949)..(1089): 801254mologous to Escherichia coli K12 putative enzyme,accession number AE000410,Smith-Waterman Score=190.
tcagcagtattcagaataatcttcctccacgtagttgcagggaaccagccaaccggtgattttcgtgtttcgtaacgggtgcccagtggcgggggtggaaccgcaccggtatgcctcggtccaaagagggtataagatgaacacggggacccgctcgttcatcatgactaaccggcagaccagcggtccgacggtaactaaccaggtgacagtttgcgccgctttaatgcgatctctgctgtttcgccatcgcggatctctccgatcatgatgacgtaggatccaccccgacatggtaagtcgcaatacgaaatgagacggcgtttcctgccagttcgacagtgaattcccgtcctgcggcaggcgatgttccgcaatatccaggtttcccagcactttaatctggcggttaatgcgactccggcatccggtgaaacatccggtaaggatgcaatacgccgtcgatacgcaagcggatgcggtaggcattgtccgtggttcgatatgaatatcagacgcgcgttgttccagcgcagattgtaacttcgagttagcaactctgctttgggctgatgcttctcctgaacagctacggcaatgtctgttgtgtgcgactggcgtgaccttcctttgttggggcgtacgcgggttctccctcgttgggtgtacgaaatgcatcgttccgtaccctggaggtgctcgctccgcgattgccccctttctggctccgcggaccctttgcgccggggtggcggggatctgcggccctggggccacgcggccttcccgcgcagcgccctctatattagcgccccgagcgcaggtagtaggtcggtaaccaatccagtacatgaagcacggcatcaatgccgactgtaaacgatgatgcggcgtctgatatcgcgccagccagtattgccgctgcagaaatgtttctccgtactgatcagcaatccgtggcgtgttttcggtggaactggaggcggtaaccaagagcgcgtaggtacgccgaagaaagcgtggccgaaacacgtttatgcccgtagtgtcgactttacgctgaatacgatcccggatctggctgcgctggtttgtctttgtaatggtatcagcgataaaaaaattcgtggacatgcagctgcctgcctgtttgatcgactctagaggatccctcagcataatattgcgaacagacatgagtttctcctcagactggtaaaatgcccgcgcggtaagcagcacgtggactttatcttttgcttcttcagatggccaggcgcggtagatgccgacggagagttccggagcaaagttaggctggcggttatcgcaccgtcgccgcccagcagcatcgtattcagcaaagatcatcgtaaccgcagaataccgaaaacgacgggcgtaccgacttaacgtgttgatcatcgtacgcaagtgaccaacgctgtcgatggtgtctttaagtttcagtataaacgcatacataggcatagttgtgatcatgggaatgtgttgtaagctcctattaactctaatacccat

SEQ ID NO: 24209 - DNA, 3663 bp, Homo sapiens
  SIMILAR (2618)..(2653): 841254mologous to Escherichia coli GMP synthase (glutamine- hydrolyzing) (EC 6.3.5.2),accession number D90880,Smith-Waterman Score=49.
atgattactctgcgcaaacttcctctggcggttgccgtcgcagcgggcgtaatgtctgctcaggcaatggctgttgatttccacggctatgcacgttccggtattggttggacaggtagcggcggtgaacaacagtgtttccagactaccggtgctcaaagtaaataccgtcttggcaacgaatgtgaaacttatgctgaattaaaattgggtcaggaagtgtggaaagagggcgataagagcttctatttcgacactaacgtggcctattccgtcgcacaacagaatgactgggaagctaccgatccggccttccgtgaagcaaacgtgcagggtaaaaacctgatcgaatggctgccaggctccaccatctgggcaggtaagcgcttctaccaacgtcatgacgttcatatgatcgacttctactactgggatatttctggtcctggtgccggtctggaaaacatcgatgttggcttcggtaaactctctctggcagcaacccgctcctctgaagctggtggttcttcctctttcgccagcaaccatatttatgactattccacgaaaacgcgaacgacgtttcgatgtgcgtttagcgcgatgggattcacccggggggcctttgaccgggttccctccgtcggcacttgcttgtacctcgggggtgagcggccaaaagggggttcccggaccacccgaggcgcaggttacctttgcgaccccaaaaaaacccggaaaggaggcgtgctcgtctatacaagtcctcaaccgggggtaccggccaccgacattttcatacaacacgggcgtcaggagatccgcccgcgactattaccctcgacgccaaaggtcaatctcgacaaactcaccgtcgcggcgctggaagggaaaactgaactcaaggcgttgctcgactggcaacaggccattagttggcgcggtgagctaacgcttaacggcattaacaccgccaaagagttcccggactggccgtcgaaactcaatggcttgattaaaacccgcggtagcctgtacggcggcacctggcagatggacgtgccggagttgaagctgaccggtaacgttaaacagaacaaagtgaacgttgacggcacgctgaaaggcaacagttatatgcagtggatgatcccagggcttcatctggaactcgggccaaacagtgccgaagtgaaaggcgagctgggggtaaaagatctcaatcttgatgccaccatcaacgcgccggggctggataacgcgctgccggggcttggcggtacagcgaaagggctggtgaaagtacgcggcacggtggaagcgccacaactactggcagatatcaccgcgcgcggcctgcgctggcaggaactttccgtggcgcaggttcgcgtggaaggcgatatcaaatccaccgatcagatcgccgggaaactcgacgtacgcgttgagcaaatttcgcagccggatgtaaatatcaacctcgtcaccctgaatgccaaaggcagcgaaaagcagcacgagctacagttgcggattcagggggagcctctggacgatcggatcctggcactgcaatcacaggggatcttcaccgatcctcagtcatatattacttacgcgaccgcgctggcttatcgtggcgaaaaagcacgcctccagcattatctcattgaaaataagccactatttaccacggacgcacaagagaaaagttggctctatctgttatctaaatacagcgctaaccccgttcaggcgttggcgaattatacggtacagtttgccgacaaccgccagtatgttgttggcgcgacgctaccggtgctgttaaaagaaggtcagtacgacgcagcgcaaaaactgctcgccaccctccccgccaatgaaatgcttgaggagcgttatgctgtcagcgtggcgacccgtaacaaggctgaagctctgcgtctggcacgattgctgtatcagcaagaaccggcaaatcttacccgcctggatcaactaacctggcaactgatgcagaacgagcagtcacgcgaagctgccgatttattgctgcaacgctatcctttccagggcgatgcgcgtgtcagccagactttaatggcgcgactggcgtctctgctggaaagtcatccttacctggcaacgccggcgaagttcgcttgctggggcgatatgtcgccttcctacgatgccgccgcctggaaccgtctggcaaagtgttatcgggacacgctacccggtgtggcgttgtatgcatggcttcaggccgaacaacgacaaccgagcgcctggcaacatcgtgcggtagcctatcaggcgtatcaggttgaggactacgccaccgcactggcggcctggcagaaaatcagtcttcacgacatgagcaatgaggatctgcttgctgctgccaataccgcccaggcggcaggaaatggtgcggctcgcgatcgctggctacaacaggcagaaaaacgtggactgggaagcaatgccctctactggtggctgcatgcgcaacgttacattcctggtcagccggaactcgcactgaacgatctcacgcgctcaatcaatattgcgccttctgccaacgcttacgttgcgcgccggtgtacagtcaccggaagtgactcatacccgccaggtatgcgcatgctggagcgttttgtgcgtgatatctgccagtgtgaagccctgtggacgccagcgaaaattatcgacgatgctgtagctcgcatccgcgagcaggtaggcgacgataaagtcatcctcggcctctctggtggtgtggattcctccgtaaccgcaatgctgctgcaccgcgctatcggtaaaaacctgacttgcgtattcgtcgacaacggcctgctgcgcctcaacgaagcagagcaggttctggatatgtttggcgatcactttggtcttaacattgttcacgtaccggcagaagatcgcttcctgtcagcgctggctggcgaaaacgatccggaagcaaaacgtaaaatcatcggtcgcgttttcgttgaagtattcgatgaagaagcgctgaaactggaagacgtgaagtggctggcgcagggcaccatctaccctgacgttatcgaatctgcggcgtctgcaaccggtaaagcacacgtcatcaaatctcaccacaacgtgggcggcctgccgaaagagatgaagatgggcctggttgaaccgctgaaagagctgttcaaagacgaagtgcgtaagattggtctggagctgggcctgccgtacgacatgctgtaccgtcacccgttcccgggaccaggccttggcgttcgtgttctgggtgaagtgaagaaagagtactgtgacctgctgcgccgtgctgacgccatcttcattgaagaactgcgtaaagcggacctgtacgacaaagtcagccaggcgttcactgtgttcctgccggtacgttccgttggcgtaatgggcgatggtcgtaagtatgactgggttgtctctctgcgtgctgtcgaaaccatcgactttatgaccgcacactgggcgcatctgccgtacgatttcctcggtcgcgtttccaaccgcattatcaatgaagtgaacggtatttcccgcgtggtgtatgacatcagcggcaagccgccagctaccattgagtgggaatga

SEQ ID NO: 24210 - DNA, 3402 bp, Homo sapiens
  SIMILAR (3402)..(2287): 971254mologous to Escherichia coli ATP-dependent helicase HrpA homolog,accession number D90780,Smith-Waterman Score=1819.
tcatagtattccgccaagccacaggtctgctttggcgaagaccatctccagcatgccgagacgcgtcgagaagaatggccaatcgcggcacatagcctccagctcgctctgtttgccgtcttcgaccactttttgcagcgccgtacctgcacccagccaggcggggagcatcagacggttttgcgtccaggcgaagatccacggaatggcgcgtagtgactcgacgccgccggttgggcgacgtttcgccggacgtgaacccaacggcagtttgcccagttcttgttccggcgtagcggagcggaagtaaggcacaaaatctttgttttcacgtacgtagccgcggtagacatcgcaggagatgactgacagttcatccataatgcgacgccagctctctttcggctccggcggtggcagcaggttggcttccagaatcgccccggtataaagcgacaggctgctgacggtgatttctggcagaccatatttaaagcggatcatctcgccctgttcggttacgcgcaggcccctttcaggcttcgtgaggtcgatgttgttctggttggtgccccaagaattggtaccagtagtcgagatcttcatgttagttaagatgtaggggatatctagatgaggtccgggatgaatttctggtagccttccatagtttcttcgagtgagaccacacggcatggcatccgcaatctccctccgatcaaactttattacaacactcccttcgcaccggtcgagattagcaattacatgacggatgtaggggaagtgagcaccctggtatgagcctcttttgcgacgactagacccgtcacgaagttggcaatgagagtcgctatcttcgactccgtggtaggtcagaggtattggggtagtgccgcaagtcccgaacactccagatttgctgttctgtggattctggcgagcatttttcgcgtcgcatagcgtcattgagagttcaagcgactgtaaaatcttaaaaaatgtcgtgagcgtggtattgtcagggttgttttcgaaattggaaatcgtcgcctgcttaataccaatttttttcgccagctcgctctgcgtccagccattttgctggcgaaccagtttcattgcattcgccaattgcgttgggctatagatcttctgaaagctcatcatgtcatacgtccacagcaagtttatccgttcaccgagattacgcgcaccttcacggcctacggtttgaccattcatcttcacggcgtagactttgctattgttgatccagttcgcttcaatgtaaggctggaactcacgctgtttaccatcgtcacgctggtgatggctgttcaggtaggttttcaccccaagtcgcgtttgcacatttccgtcgccttccgtttcaatgcgcgttccgtctttccggtattgctgccgtatgacccacaggcgattgattggccgtcgcgcctgctgttcgcccgggaatgggcggccaaggccaagcgttggggtcccttgggggggcccaatcctccggtaggtccaggccctggtaatgggggtttccgggccgaagtagttgtgtcgtcgcggcgtgatggcagcgacccgcgtgtcgctcggttcggtaatggcctgcctgctgctggtgctgacattagggggctttccggtgcgggccatgtgcgggtgtttgtcgatcatctggcaggcgcggtgatcccttcgctgctggtgctggcaacgctggatatcggccatatgatgctgcacgtcgcggggatgtctttccttggcctcggtgtgaccgcgccgaccgccgaatggggcgtgatgattaacgacgcgcgccagtatatctggacccagccgctgcaaatgttctggccggggctggcgctgtttatcagcgtgatggcctttaacctggtgggtgacgcactgcgcgatcatctggaccctcatctggtgacggagcacgcacactaatgccgcaacagattgaactacgtaatatcgcgctacaggccgcgcagccgctggtacacggtgtatcgttaaccctgcaacgcgggcgcgtgctggcgttagtcggcggtagcggcagcgggaaatcattaaccgcgtgcctatagaagcggtggggctggaaaacgccgcgcgcgtgctgaagctgtacccgttcgagatgagcggcggcatgttgcagcgcatgatgattgcgatggcggtgctgtgtgaatcaccgttatcatcgccgatgaaccgaccaccgactaacgtgtaggaccgagctgatgaaaatcggctcaatcggcaaacgctgcatttggtgcgatagctgtagcggctgatacgcgctgtaccggggtcgataacgtatttaatccccggtacggtcagcgacgtttccgcgacgttggtcgccagcacaatgcgccgtccgctgtgcgactggaataccctattttgttcgctgttcgaaagccgcgcataaagcggcaagatttcggtatggcgtaagttcagcttgttcagcgcatcggcggtatcgcggatttcccgctcgccgctcataaagatcagaatgtcgccatggctttcctgactcagttcgtctacggcgtcaaaaatcgcctgcaactgatcgcgctcggtgtcatcggcttcttcaacaatcgggcgatagcgcacttccaccggataggtccgaccggagacttcaataatcggcgcattattaaagtggcgcgaaaagcgttccgggtcgatagtcgcggaagtgataatgatttttaggtcaggacgccgcggcagcaactctttcaaatagccgagcaaaaaatcgatattcaggctgcgttcgtgcgcttcgtcaataatgatagtgtcgtactgcatcagcaggcggtcttgctggatctccgccagcaggataccgtcggtcatcagcttgaccatcgtgttatcacttacgtgatcgctgaaacgcactttgtaaccgatgcaaccgcccggctccgttttcagctcttccgcaatacggttcgccactgttcttgccgccagacgacgcggctgggtatggccgatcagtcctttaatcccgcgccccagctccatacagattttcggtaactgagtcgttttaccagaacccgtttccccggcgacgatcaccacctggtgatcacgaatcgcttcgagaatgtcctgttttttctgactaaccggtaaattgtcaggataagtaatttccggtcgtgccgcttcacgcagcaggactttccctgccgcctggtcaatctctttcgccatctcctggaaaatggcctgttgtgcatcaggatttttaaccttcttcacgccgtgcagacggcgagaaaaacgcagtctgtcacgcagcat

SEQ ID NO: 24211 - DNA, 1431 bp, Homo sapiens
  SIMILAR (945)..(565): 961254mologous to Escherichia coli leader peptidase,accession number L28106,Smith-Waterman Score=640.
tcatgtcggataagccgtaattacgcgcctttgacgtgagctgtatacccgcgttcgcctgcagctcgaacggacacgagcggcaagcgagtccagctgagtcgaggtaagtcgtgaacgagctgctccaagtacgcaaaacgcgcctcgtgcccgcgcggcgtatggaccgatgtcatgtaactgcacgtctgtgcactgagcagcgtgttgccgcgagaccgcagccgaacaccacgctgtaggcatgatcaggtctggtctcagaagctgacaatggcttccaggctcggctgcgcgcgcgttccgacggactgccacggtttcaggtgcgcacgcacttcgggcaggatgcgttttgcatcgcttatcgtcggcaataccgatcgggatgacgtccacggcggccagcgcatcggcgaacgagagttccagcaccacaatccgttgtggcgttttttcgagtgtaaacgtgccgtgttcgtcctgaaccgtggcggcaaaggcgtggctgatcaccagcagcaggcctgcagaaagtaaacggatagatgccgacatgatcacattccagcacagcaccccatagcccgctaccgcgccgtaaaccgcatcatgtaaatcaattaatccatactgcgcattaaataccaagccaagccagagcagcggtaaggtgagtttgtcggccaggagctgagtgcgaaaatcaataacactgagcgtgagtacgaaacagaaatagagaaagagtgcgccagtcacgatgggcgtgaaaggtgccagggcgcaggcgatagcagcagcaacacaaagtatcaggggcactgtatcatgccaggcatattttttttgcctgaaatgaaccaatacctggcgaaacgttaacgccgttttatcctccaacggcgagaggtgataggcgatggcattaacaaaataatctccccttattggatgagagtcaacttgacgctttgctggataagctctctggttatgcccaaccggaagagcgcattctgatcctggcgcgttaccatcacatgaggcctgccagcctggaacaaagcggcaacacgctggccgaagttgcaaatcgactttatgaccattcatgccagcaaagggcaacaggcggattacgtcatcatcgttggcttgcaggagggaagtgatggttttccggttcagacggtccgcgagataacgctgataatcggggatcagaatatcgaccgcgtcgttgaaatgcggcgactggattatgaagtctgccgttgccacgttggtggcgaccgcgaatgttccatacccgtcgccagacgcagcaaggatatttctccgctgctctattgccgtaatcgcctccacgcgttgttgatgacgaccgccttcgtactgtgcgcccagccacgcatccacaatcat

SEQ ID NO: 24212 - DNA, 699 bp, Homo sapiens
  SIMILAR (1)..(312): 961254mologous to Escherichia coli lamB,accession number A31943,Smith-Waterman Score=555.
atgtacaagtggacgccaatcatgagcaccgtgatggaaatcggctacgacaacgtcgaatcccagcgcaccggcgacaagaacaatcagtgcagaattaccctcgcgcaacaatggcaggctggcgacagcatctggtcacgcccggctattcgtgtcttcgcaacctacgccaagtgggatgagaaatggggttacgactacaccggtaacgctgataacaacgcgaacttcggcaaagccgttcctgctgatttcaacggcggcagcttctgtcgtggcgacagcgacgagtggaccttcggcctacaacggctgtcaaatgtaggccggataaggcgtttacgccgcatccggcatgaccaacgatcacgttatcagtcatttcaggctggatggctccagcctcgcattagcaaagatgagattatttcgcctgtggtgcagttttgctggtggattgaacacaaagaaaaacacttcatcgcgcgaggcaatggcggcaatactatcaatatcgcgtccatgctctccttccagggcgggatccgagtgccttcttataccgcatcaaaaagcggcgtgatgggtgtgacgcgattgatggcgaacgaatgggctaaacacaacattaatgttaatgcgatagccccgggttacatggcgaccaacaatactcaacaactacggggcagatga

SEQ ID NO: 24213 - DNA, 738 bp, Homo sapiens
  SIMILAR (100)..(450): 911254mologous to Escherichia coli lamB,accession number A31943,Smith-Waterman Score=547.
atgttcacaccggactatcgcagcgtttcacgcgtacttggctctggaccaggctacgcgagccggatgaaccaaccagatgttatgccagacatacccggtaagcgcttctaccaacgtcatgacgttcatatgatcgacttctactactgggatatttctggtcctggtgccggtctggaaaacatcgatgttggcttcggtaaactctctctggcagcaacccgctcctctgaagctggtggttcttcctctttcgccagcaacaatatttatgactataccaacgaaaccgcgaacgacgttttcgatgtgcgtttagcgcagatggaaatcaacccgggcggcacattagaactgggtgtcgactacggtcgtgccaacttgcgtgataactatcgtctgggtaaagggctgtcgcagggttctggcgttgcatttgataacgaaaaatttgcctacaatatcaacaacaacggtcacatgctgcgtatactcgaccacggtgcgatctccatgggcgacaactgggacatgatgtacgtgggtatgtaccaggatatccactgggataacgaccacgggcaccaagttggtggacccgcgggtattcgccccgatgttcaagtggacgcccatcatgaacaccgggatgaaattcggtacgaaaagttgaatcccagggcccgggacaaaacattcgtacaatttacctcgcaaaaccctgacagatgttga

SEQ ID NO: 24214 - DNA, 3417 bp, Homo sapiens
  SIMILAR (1)..(957): 1001254mologous to Escherichia coli Methyl-accepting chemotaxis protein IV (MCP-IV) (Dipeptide chemoreceptor protein),accession number D90830,Smith-Waterman Score=1519.
atgattgttcaaccactggccattatcggtagccattttgacagcattgctgcgggtaatctggcgcgtccgattgcggtatatggtcgtaatgagatcaccgccatttttgccagtctgaagaccatgcagcaggctttgcgtgggacggtaagtgatgtgcgtaagggaagccaggagatgcacattggtatcgcggagattgtcgcaggcaataacgatctctcaagtcgtaccgaacagcaggcggcatcgctggcacaaacggccgccagtatggagcaattaaccgccacggtagggcaaaacgccgataacgcacgacaggcgtcggaactggcaaaaaatgccgcgacaacggcgcaggcgggcggtgttcaggtcagtaccatgactcacaccatgcaggagatcgccaccagctcgcaaaaaattggcgacattatcagcgttatcgacggaattgctttccagaccaatattctggccctgaatgcggcagtggaagcggctcgcgccggagagcaggggcgtggttttgcggtagtggcaggtgaagtgcgcaatcttgccagccgtagcgcgcaggcagcaaaagagatcaaagggctgatcgaagagtcagtcaatcgtgtccagcagggttcgaaactggtgaataacgccgccgcgaccatgatcgatattgtcagttcggtgacccgcgtgaacgacattatgggagaaattgcctctgcgtcggaagaacaacagcgggggattgagcaggttgcacaggctgtcagccagatggatcaggtgactcagcagaacgcctcgctggtagaagaagcggcggtggcaacggaacaactggcgaatcaggccgaccatctttcgtcgcgtgtggcggtatttacccttgaagaacatgaagtagcacgacatgagtcggtgcagttacaaattgcgccagtggctggcgatgactcatcactgcgaattattaaaacagctgataacctgcctgaaaataaagagtcgctgttctacattaatgttcgtgccattccagcaaagaaaaaatcagatgatgttaatgctaacgagttgacgctggtatttaaaacacggatcaaaatgttttatcgccccgcacacctgaagggacggcgcttctaccaacgtcatgacgttcatatgatcgacttctactactgggatatttctggtcctggtgccggtctggaaaacatcgatgttggcttcggtaaactctctctggcagcaacccgctcctctgaagctggtggttcttcctctttcgccagcaacaatatttatgactataccaacgaaaccgcgaacgacgttttcgattggctggaccgtcggtattcgcccgatgtacaagtggacgccaatcatgagcaccgtgatggaaatcggctacgacaacgtcgaatcccagcgcaccggcgacaagaacaatcagtacaaaattaccctcgcacaacaatggcaggctgcgcgacagcatctaggtcacgcccggctattcgtgtcttcgcaacctacgccaagtgggatgagaaatggggttacgactacaccggtaacgctgataacaacgcgaacttcggcaaagccgttcctgctgatttcaacggcggcagcttcggtcgtggcgacagcgacgagtggaccttcggtgcccatttccagaaatggggcgcgttttgtgtggcgccaacagtattttggcgcccctttgttgaggccacacagggtggagagttctcttcgcgaaaaaacctttcctcccttataaagagcacaagggtagcgcactatttgccagtggctgcggaaaaagaaatgaccattggcgcaatataccttgatactcagggatactacgctggagtgcgtcagggcgttcaggatgcggcaaaagattcctcagtacaagttcagttaatagaaactaacgcccagggtgatatttcgaaagaaagtacctttgttgataccctcgtggcgcgtaatgtcgatgccattattttatcggcagtgtctgaaaatggcagtagccgtaccgttcgtcgcgccagtgaagcgggcattccggtgatttgctacaacacctgtattaatcaaaagggggtcgataaatatgtctcggcgtatctggtcggcgatccgctggaatttggtaaaaaactgggtaacgctgccgctgattattttattgccaataaaattgaccagccgaaaattgccgtcatcaattgcgaagcctttgaagtttgtgtgcagcgacgtaaaggatttgaagaagttttaaaatcccgcgttcccggcgcgcaaattgtcgctaatcaggaagggactgttttagataaagcgatttccgttggtgaaaaactaattatctccacgccggatctcaacgccattatgggggaatcgggcggtgcgacactcggcgcggtaaaagcggtacgtaatcaaaatcaggccggaaaaaattgctgtattcggttcggatattacaccgaaaatgctcagggagctggaaaacaatcagtgctgaaagcggtatggatattccgcaacagaaaaaacgccagcagcaacagagaagacacaaaagagacgaacaataacagaaccgacgaaggagaaggagtaaagaaagaaaaagatatcgaaaatgtgacaaatatcacaggtgttcgtcaaattgagttatggcggcgtgatgatttacaacacccacggttagatgaggtcgcggaagaagttcccgttgcgctggtctacaacggcatttcgcatgtggtgatgatggcgtcgcccaaagaccttgagtactttgcgctcggtttttcgctttccgaggggattatcgaaagtccgcgcgatatcttcggcatggatgtcgttccttcctgtaatggtcttgaagtacaaattgagctttccagccgccgctttatggggttgaaggagcgccgccgggcgctggcgggacgtacgggctgtggcgtatgcggcgtggagcaacttaatgacatcggaaaaccggtgcagccgctaccgttcacccagacgtttgatctcaacaaactggatgatgcattacgtcatctcaacgattttcagccagtggggcaactgactggttgtactcacgccgctgcctggatgttgccatctggcgaactggtcggcgggcatgaagacgtgggtcgccatgtggcgctggacaaactgttaggccgccggtcacaagaaggggaaagctggcagcaaggtgcggtactggtttccagtcgtgccagttatgaaatggtgcaaaagtcggcgatgtgcggcgtagagattttgtttgcggtgtctggcgcgaacaacgcttgctgtaaaagtgggtga

SEQ ID NO: 24215 - DNA, 2496 bp, Homo sapiens
  SIMILAR (1702)..(2136): 991254mologous to Escherichia coli K12 putative enzyme,accession number AE000410,Smith-Waterman Score=762.
atggaccagcctacttgtggactggtcgttctgactggctctgtgttggctgattcgcctatccgcctcaacttgcaggtagaagatgaaacccgcactcaggaacgtctgcgccgcggcgaagtggtcggcgcggtgagtattcaacatcaggcgctgccgagttgtcttgtcgataaacttggtgcgctcgactatctgttcgtcagctcaaaaccctttgccgaaaaatatttccctaacggcgtaacgcgttcggcattactgaaagcgccagtggtcgcgtttgaccatcttgacgatatgcaccaggcctttttgcagcaaaacttcgatctgcctccaggcagcgtgccctgccatatcgttaattcttcagaagcgttcgtacaacttgctcgccagggcaccacctgctgtatgatcccgcacctgcaaatcgagaaagagctggccagcggtgaactgattgacttaacgcctgggctatttcaacgacggatgctctactggcaccgctttgctcctgaaagccgcatgatgcgtaaagtcactgatgcgttactcgattatggtcacaaagaattgagccgtcgggagaaaactgtcgactcgctggttcatcaaaccgcggaagggatcgccatcaagccgctgtataccgaagccgatctcgataatctggaggtgacagcgggcgtcgctatcgacaccgtggaagatatgaaagtcctgttcgaccagatcccgctggataaaatgtcggtttcgatgaccatgaatggcgcagtgctaccagtactggcgttttatatcgtcgccgcagaagagcaaggtgttacacctgataaactgaccggcaccattcaaacgatattctcaaagagtacctctgccgcaacacctatatttacccaccaaactgcctcatttccggtgcgtgtacgtcgtctggaataccgcggatatgactctgccggtctggccgttgttgatgcagaaggtcatatgacccgcctgcgtcgcctcggtaaagtccagatgctggcacaggcagcggaagaacatcctctgcatggcggcactggtattgctcacactcgctgggcgacccacggtgaaccttcagaagtgaatgcgcatccgcatgtttctgaacacattgtggtggtgcataacggcatcatcgaaaaccatgaaccgctgcgtgaagagctaaaagcgcgtggctataccttcgtttctgaaaccgacaccgaagtgattgcccatctggtgaactgggagctgaaacaaggcgggactctgcgtgaggccgttctgcgtgctatcccgcagctgcgtggtgcgtacggtacagtgatcatggactcccgtcacccggataccctgctggcggcacgttctggtagtccgctggtgattggcctggggatgggcgaaaactttatcgcttctgaccagctggcgctgttgccggtgacccgtcgctttatcttccttgaagagggcgatattgcggaaatcactcgccgttcggtaaacatcttcgataaaactggcgcggaagtaaaacgtcaggatatcgaatccaatctgcaatatgacgcgggcgataaagacattaccgtcggtaccgagctatcccatctctctgtgtctggttgctatgtagtagactgcatctattatcacttgtgcgagcgcgtaggtacgccgaagaaagcgtggccgaaacacgtttatgcaccgtatgtcgactttacgctgaatacgatcccggatctggctgcgctggctaagaatcataacgtcaaccacttcacgctggcgtgtgtggtgagtaaagatgcgaacacctgtctgccgacatggggtaccgcttacggtatgcagaattacgctcagtacagcaaaatcaaagctctgcgtgaggctggcggcgatgtgatgctgtctatcggtggtgctaacaacgctccgctggctgcttcctgtaagaacgtagacgatctgatgcagcattattatgacatcgttgataacctgaacctcaaagtcctggacttcgatatcgaaggcacctgggttgcggatcaggcatctattgaacgtcgtaaccttgctgtgaagaaatctgcatataccgaaggccagaacattcacggtaagtgtgcaacgtctgcgattgccaacctgcattcacaattgaaaggcctccatcccaataagagcgatgcagaaattgacgctatgatgggtaccacgccgatggttggcgtgaacgacgttcagggcgaggtgttctatctctctgatgctcgtctggtcatgcaggatgcgcagaagcgtaatctcggtatggttggtatctggtcaatcgcgcgcgacctgccgggcggcactaacctgtctccggaattccacggcctgactaaagaacaggcaccgaagtacgcatttagcgaaatcttcgcgccgtttactaagcaataa

SEQ ID NO: 24216 - DNA, 2298 bp, Homo sapiens
  SIMILAR (981)..(1016): 1001254mologous to Escherichia coli K12 putative oxidoreductase,accession number AE000227,Smith-Waterman Score=73.
  misc_feature (1)...(2298): n = a,t,c or g
atgcagccagccttgctgatagttctcaacaaagtgcgacaggaagcccgccgccgtgctcgcgcctgccggatacgccgcgcttccggtattgttcagttcggcaaagttagacggcagctggctgcggtggaactccgccagcggcagacgccagaacggttcgttctcctgcgcggcactcgccagcaagcgaccggccagcgcatcgtcaaaactgaacagcgcgtgataatcattacccagcgcagttttcgccgccccggtgagggtcgccgcatcaatgatcatttccggtttcctgcgcacttgccatcaatcagaccaatcggcaagcaccagacgcccttcggcatcagtggtcatcacttcaacttttttaccgttgcgataggtgatgatatcgcccagcttgaccgcattggcgctaatcagagtgtcctgaagggctttaacaagtttgttgttcagtacgctactgactcgatgacctcgcagggtaaagggctgtcgcagggttctggcgttgcatttgataacgaaaaatttgcctacaatattttttcaacggtcacatgctgcgtatcctcgaccacggatatcaactgggataacgacaacggcaccaagtggtggaccgtcggtattcgcccgatgtacaagtggacgccaatcatgagcaccgtgatggaaatcggctacgacaacgtcgaatcccagcgcaccggcgacaagaacaatcagtacaaaattaccctcgcacaacaatggcaggctggcgacagcatctggtcacgcccggctattcgtgtcttcgcaacctacgccaagtgggatgagaaatggngttacgactacaccggtaacgctgataacaacgcgaacttcggcaaagccgttcctgctgatttcaacggcggcagcttcgggtcgtggcgacagcgacgagtggaccttcggtgcccagatggaaatctggggcttatctcgggcatccggtacgctggttacccgggcctggagatacaaaactacgccgacgcgtcactgtttgctgatgaatcattacgctggcgaagcagctatgaggtggaaaaactacctgaagagcacacaaaaagttcaactgcagaactttgccaactggccgaaatactctctctccaccctatttcactttcccttctcgaaaagttgttaaacagcacacggggcaatacacagccggataatcagcttgcggcgttgttatgcgcgcgtataaatggcagtcctgcttgttttgccacctgtatggattcatcaaatgaatataaaaaaatcagcacccttatgcgcaagggcgaaaatgaaattaaccaatgggctgaccgtcattctgttgagcgcgctaccgttcaggcgatacaatggctgacccgagcacccgatcgctttagcgccgcccagttcagccctttactcgaacacgaaaaatcatcaacgcagattattaatctgctggtatggagcgggctgtgtggctggataaatcgcttaaaaatcgcgttgggctgccagtcgaccggtattttccagccagtcagaaacctggtcatacaccagctttgctttggattcgatggtggcggcaaagaattcgatattatcttcaatggtgccatcagcggagagcgtcatgcggcatgccacaatccacgcggttgggtcggcaatcgccacaatcagctgaagtctgtcatccggcaacgccttagcgaaaagggcgtcatccatatcttctgtgctggcactgtcgatggtgacaaaatcagcgcggtcagatcttcacgaaccagaccttcatcgagcatttcggtagcgacggcgtctggtgcttctgctgtcagattatggcgtgcaagtctgcatagagagacgatcgctttcagcggattacggcgaattccgcaaccgccagtcggcttcttgaactcgttgttcaggccacgggttcggcgcaggaatggcgtctttaagagtgatgatcgggacgatggcagaccgtcatttttgcctgaccttaccacgaaacgaagtagaaaaaccggaaacgctaaaaatcagagtgcctctcttcctccaaaggaacgcagctcctcaccggcaacggaacaaagctggacagagaatgactttgacgagttgagagaggaaggcttcagaagatcaaattactctgagctaaaggaggaagttcgaaccaatggcaaagaagttaaaaactttgaaaaaaaaattagacgaatggataactag

SEQ ID NO: 24217 - DNA, 795 bp, Homo sapiens
  SIMILAR (786)..(616): 1001254mologous to Escherichia coli bacterioferritin,accession number M27176,Smith-Waterman Score=296.
atgtcattccttcattccgctccttccattccgtattatccattcgttcggttcggtcagttccgtacggcctgttgtttcatacgatccgtccgttggttccctccaattcgtaccggtgggcccgtttattggagtggtgtttctcaccgttgtgattcgacccccggtgtggtgcagtcaataattcattcgttcgttcgatccgtccttcgttccatcggtcctcgatcgtttcttcgtcctatcgacagtcttccactcgtcgtccatctttcttgtcgtcatcgatcgaccgtcctgcgtcggagaaccttcgttgttctaagtggggggctcttgcccgacaaactcactttaccgttgctctggcttggcttggtatttaatgcgcagtatggattaattgatttacatgatgcggtttacggcgcggtagcgggctatggggtgctgtggcgcatggtgtggctggcaaacgttgccaatgatactgctgattgcctcgctgggtggcattggttacgccatcgtttcacaacttctgcaacgccggactataaccactatcgcattcggcccgtggcttgcgctcggcagcatgataaacctgggataattttgcaggcccatcttctgaatcagatcaagttccgtttccagccagtcgatatggccttcttcatcacgcaaaatttctatcatcatatcgcggctgacgtaatcatgaacgctatcggcataaccaattgcctcacgcaaattcttcgcgccatccagctcaagcccaaatag

SEQ ID NO: 24218 - DNA, 3463 bp, Homo sapiens
  SIMILAR (640)..(1284): 1001254mologous to Escherichia coli 2- acylglycerophosphoethanolamine acyl transferase/acyl carrier protein synthetase,accession number U29581,Smith-Waterman Score= 1099.
atggataccctggcgggtatcttcggtatcggtcagcatccgaaaggcgacaaagacccgtttgcgctgcgtcgtgccgcgcttggcgtgctgcgaattatcgttgagaagaacctcaaccttgatctgcaaacgctgaccgaagaagcggtgcgtctgtatggcgataagctgactaatgccaacgtagttgatgatgttatcgactttatgctcggtcgcttccgcgcctggtatcaggacgaaggttataccgttgacaccatccaggcggtactggcgcgtcgtccgactcgtccggctgatttcgatgcccgtatgaaagcggtatcgcatttccgtaccctggatgcagctgctgcactggcggcggcgaacaaacagccggaagaaattaaactggcgatgcaggttgtggtgctacgtgacaagctggagccgtactttacggaaggtcgttaccaggatgcgctggtcgaactggctgagctgcgtgaaggggatcctctagagttcttcgttctcctcttgagtgtctgtgctctgtgggtctttgatctcatcgtgtatgtcggtgtgcatgtttacacggagaaaagagaggagtcagagaagaacgaagaacaaaaacgttctttcgtgtttgccgtttacacctcaataagccaacagtggtatatgcgttggctgaaatcatttatcgactttgttcctctcgacccgacgcaacctatggctattaaacatctggtacgtctggtggaacagggccgaccagtggtgattttccctgaaggacgcatcaccacgacaggctcgctgatgaaaatctacgatggcgcgggttttgtcgcggcgaagtctggtgcaacggttattcctgtgcgtattgaaggggcggaacttacgcacttcagccgcctgaaaggtctggttaaacgtcgcttgttcccgcaaattactctgcatattttgccaccaacgcaggtggcgatgccggatgcgccgcgtgcccgtgaccgtcgcaaaatcgctggcgaaatgctgcatcaaataatgatggaagcgcgaatggcggtgcgcccgcgtgaaacgctgtacgaatctttactgagtgcaatgtaccgcttcggagccgggaagaaatgtgtcgaagacgtcaactttaccccagactcctatcgcaaattgcttacgaaaacgctgtttgttggacgcatccttgaaaaatacagtgttgaaggcgaacgcatcggcttaatgctgcccaatgcaggcatcagctaccgtggcccttcgtttgattccgcgctctgtcaatgcgccgtatggcgggcttcagtggcgccgcttcttcagtgttgtatatcggcgtttgctaaagatatcaatctcgatatccatgaaggtgaattcgtggtgtttgtcggaccgtctggctgcggtaaatcgactttactgcgcatgattgccgggcttgagacgatcaccagcggcgacctgttcatcggtgagaaacggatgaatgacactccgccagcagaacgcggcgttggtatggtgtttcagtcttacgcgctctatccccacctgtcagtagcagaaaacatgtcatttggcctgaaactggctggcgcaaaaaaagaggtgattaaccaacgcgttaaccaggtggcggcaggtgctacaactggcgcatttgctggatcgcaaaccgaaagcgctctccggtggtcagcgtcagcgtgtggcgattggccgtacgctggtggccgagccaagcgtatttttgctcgatgaaccgctctccaacctcgatgctgcactgcgtgtgcaaatgcgtatcgaaatctcccgtctgcataaacgcctgggccgcacaatgatttacgtcacccacgatcaggtcgaagcgatgacgctggccgacaaaatcgtggtgctggacgccggtcgcgtggcgcaggttgggaaaccgctggagctgtaccactatccggcagaccgttttgtcgccggatttatcgatgagattatcgaacgtgctgaaaaaggcgattgcgaggctcaatatattgttgggttttattataatcgcgatagcgcaattgattctccggacgacgaaaaagccttttactggctgaagctggccgctgagcaaggtcattgtgaagcacagtattccttagggcaaaagtataccgaggataaaagccgtcataaagataatgagcaagccatcttctggctgaaaaaagctgccctacaaggccatactttcgcttccaacgcccttggctggacactggatcgtggagaagcccccaattataaagaagcggttgtctggtatcagatagccgcggagagcggaatgtcttatgcgcaaaataatcttgggtggatgtacagaaatggcaacggagtcgcaaaagactatgcgctggcatttttctggtacaaacagctgcattacaaggccatagtgacgcgcaaaacaatctggccgatctttatgaaggggggaccgcatcggtcgaggcgtggcagcgttggtccgtcctccacgatcagcccgttcccgcagccggggcagaacagcagcatggtcgcgaacggcgcagggtccaactcccggcagctcccacgccgggtcagcgccgaggcgccgcccgcctcgagctcacattggtcctggcagccttcccgccacaccaaccaaccaatagacagggcgattctgcgctcccggccctgctgcaggctgtctcgcacttgtcattggtcactgcagccgccccaccccccccggcgcgccagtggctgggcggcctcgctggggcgggccgcagttcctgcgcgtgcgcgcttggcctccctagtgcgggctggcagtgcgggcagagcccggctgagaggggcggccctggaggagacggaggccgcgggtgggaccgaggcgcaagaggaagatgaggacgaagaagaggcgctgccgcactccgaggccatggacgtgttccaggagggtctggctatggtggtgcaggacccgctgctctgcgatctgccgatccagaggaaacaggtggctgcgatttcgacattttgctgtttactgatcggctatccgctggcgtgggcggtggcgcacagtaagccttcgacccgtaatattttattactactggtgatcctgccgtcgtggacctcgtttctgatccgcgtttatgcctggatgggaatattaaaaaacaacggtgtgctgaataattttctgctgtggctgggggttatcgatcaaccgctgaccattctgcataccaatctggccgtttatatcggcattgtttacgcttacgtgccgtttatggtactgccgaatttataccgcgttgaattcgtattgattattcgctggtggaagacagcgctggatctcggtgcacgacccgcctga

SEQ ID NO: 24219 - DNA, 8420 bp, Homo sapiens
  SIMILAR (8420)..(2946): 971254mologous to Homo sapiens proliferation-related protein P80,accession number AF200415,Smith-Waterman Score=9123.
  misc_feature (1)...(8420): n = a,t,c or g
tcagaactcaatcttgcaggcagggaaggactcatcctgcatcaccacggtgctgctgctagccaggaccaggacattcagttgttgctgctgctcatgagtttgttggtaccactcacgagtcacctccgtgtcatgagtagggatcagagtcaccttcacctgaagattctccccccactgggccttgcccctccagcagggcatccagcacagcccggcttggctcgccattggcagggtcattcccactgaccacatagtaggatgcacgcactcgacggaagaagtcaaggtcagcagtcttgccactgcaatgattcgggatgtaggcgagatccacatatacaggggcaccagagctgcccttggaactcaaggccattggtcctgccttgagtccattgactaggcctttggacatggggctgtgtccatccttttcctctgctggggtgacctggcttgtggtgctgcgtggtcgaggtggggcccgggatgctcgatctgcaggccctttaccaggggtgggtgagcgttttccccgaagatccagacgccgtgcaggggacgctggcttggccttgcctggggccctgcgccctactcgcccctgaaccttttccttctcccgtagcctctctactctcccagactctgagctgagcccctcggggtcagccatgcacacatcagggcggggaggggatgggcgggggtctggctgtgggagaggaggtgggtcatggccaggcctggggtggtgagtaccactgacacccccagctttgtccacaggtaggaagtctccatcttcatctgagtcgagggctgcctcagctgtgatggacggccactcctcagtttctggcgggacatcagaatctgactgtgaggagcctgagtcactggctgatgtagggggtgtctcatcagtcacagggcatgggcccccagtggtccctggcccccctacccggcgccgcccccctcttcctactagccgaacttcctcagttgagaggtccctatcatctatggatgggggcagaggtgggttcaggaaggatggggagagctccccacgatggggccgaggctcagtggcacatccctggggcccagcttcgacctcaggagaggcactgctgggtgggcccccggagccccctgcaggacacactggctgctcaggggagagcaatgtgtcaggccgggagctcctctcagctccttcaggccaggccccacgttcccaggcagggcaagccgcagcctcttcattttcagccttggctggggcagggcctggggggttagggctggtttcagttgggccattggctgcacaatcctcagagggaacctggaaggggcttggcttctccgtggctgccctctgagcactccaggtggcacggcaggatgccatcacccatgtctccaggcaggcttggagctggagctagggccaagtccagtgaagctgggggtgctgggctcagaggagtgaggtcccagagsctgtgggcagctggttccattcctgggtccagctctccagactcctgttctgcagcctcaaggcttggagagaagcgctccgccacacttgaaatcacaggcgtggtagcctcagaggaggagccctcagacaaaaaaggtgaggcaggtcgtggcagattggagaggagaggggccccaggagaactgggtgatgggagctggggcagtgaggaatccaggctgggggccttggtcacttccaggtattcatcatgccgggttctggtggggggtcctgccgccagagccagagctcgatccccagagaaggcaagggagccacagggtgccgagcggggttcagctggagagggcagctgtgggggagctggctgcaatgaggagaagccaaaggctgaagcagggaagtccagactgggtcgggcaggccccaggtgtgagtccaagggagggctaacatgtgcctcagtttctggccataatgtgggggaccccataggaatggggtgaggaggacttggggattgggcctctttttctggctgttcccgagcccccttctccagttctgagtcactagtgctgtcatcccagtgactccggcctgattccttgggggatggggacctcctatctgggctgcagctcaggatgttaccattaagaggggggcttgggcctttgctcaggataggagcacgggggggaactgcaggtggggtgaggctgggctccatacttggccctggctctggccttgggggtacagtgggtcctgccagggctgcatagctgaaggttggagtgtcagactggaggctcttgggtgagataggagatgaaagctccttctctgcagatgtgtttcggccggcagctgcctccttggttgagaggcatgggggccaatccccagctgctccaagtggaggctctctagtggggcatgcagggccaagcccagtaagcatcatctgctcatagatgtctgcatactgaaagcttctctcatcaggatagggtgtgggctctctctgctccggctcagtctgctcaggctccgtggtggcatggcttttgctggcctctggtacctttgagctgtgtgagcttttgtcaggagcctcagccctaccttcttcttccctttccccttcagccttgcggtagtccttccccaggggggagtatggcccaccttccaactcagctgccccctcctgcactgcagccaccacactgtcatactcggctgtgccccaagagaagggtgcaggagtatgggattccggggcaggtgtggggggaccaggagctggggagaggggtgcaggggggaggggtctgtccttgggcacccagggtgggatgtcagccagccatgagggagtagtgggttcattcttcatgtgtggcatgagcttagggtctgggataggactctcttgtcctggggctgaaggaaccctttgtccaaccatctcaggtggggaagctggaggggagatgatctcaaagggagagcgggtcagtttgtcctcttcctctggtggcaacccaactggtgattcagcaagccagcgctccacctctagccccttctgtggtgaggattcctggaaatccttgaagtctgaggcccaggggctccgggttgcgtgttcccgcaggggtacttcttgctcatcatctgggccctcatctaggaaagtgctttcccgttcctcagtgtagtgtgggcgggccccctggacatccagctcgtgagggaaccagaccttccgctcacagcttagctccctccagtatgtgtcctgttccaaggacacatcctctctgcccctccaatacctattgtcctgctcaggagatgtgtcctcccatgccggggcaagctctttctgttctccagccggctcctctctggtaggagatgtttcttgacactcctggaccacatcctgccccctccagtacttttcttcctgctctctggccctgccctcctgcactaggctctcttccaggcccagagctttggtcttctccagaagagcttctaacttctcttccatggccttgaccttttctggggatttttcctctagcatcttnggtttcctggttttatcctcctgcactaggctctcctgctcctgagtttggtggttctcttccagagcctgaatgtttngttccagggcttcatccttctgtcccaaagcccagtatttgngttctaaggcctgatccttcttttctgagactttatccttttgttcctgggcctggtgtttctgttcaggggctttgtctgtctgttctaggtctctgtccttcatttcagcgaccgtgtcctccggagccttatgttcaacacttctgactttttgatctaaggctttgtctttctcttctgggatcttctccttctgttctaggaccctgtccttttgttccaagtctttatcttttggttccagggccttgtccttctgttccagggctgtatccttttgttctaaggctttgtctttctctrctggaatcttatccttctgttccagggccttgtcrttttnttctaagtctttgtcttttggttccagggccttgtccttctgttctagggctgtgtcttnttgctctaagtctctgcccttttgttctaaagccttancctgctgtttcacagcctcattctttacatgcagagcctcatctttctgatagatggctgtatccttcggctctaccacctccttgtgctccagagttttgtctttctgctgtaaaacttcatcctttggctcaggttccttcttctgttctgaggttctgtctttcaaccctggaactttatcttcccactttatggcaatgtccnccaaggcagggcctgscaaagactcaggactcttggagaaggagctatcagntgtcagaatgtgttcatcagggcttgtgatcgccccaggtaagtacttcccatttcctgaaggtgtagagtgagagaatgagctggcaggtgacttcctgtcaaggctgtcatctgtgatgtctgtctgtgcagagtatcgagttgtcccatctgtgggaggtgacgctgtggctgcatggggctctggaacagacatgggagctgtgtggtgagaggtatcctcggcctgcatcagatgccccatttcttccttcccaaggtttagttccccaaactggagggtgccaaggctttctggagagagctgcttagaagagacatccagggaggtctccttgctgggactctcttctgacagagaaagtgactgggtgtcttctggagatacctctgmccaccggtctttgtgtaggtnctgttctstcagyccacagggagacttgggggtaggctcttggmtgncagtgtctggggagggcacgctgaggacagagagggattctncatcttcaggagagaggcttcggtcaggatatctgagcacctcatctttctgaggtttgccaggttcttggggtaaagtcctcaaacctccgggaagggcttctgctcccagaattgggcctgtgggctctcctgcctccataatctcaaagactattgctttatcctgtgctggcaacagttgaatggtacagcctgtaagcccctcatcaatgttgacaggtgcttcctgggcctgggggctcctgggaggaggaactttctcttccttctctagtgtgccctcttcaggccctggcttgactgtctcctcagcagcatcttctttgcccacacctggtgtgcgcttagtgtctccccaggagtctgcctccttgaagtcttggggctcagacttttcttccactggggactgatgaaagggtgtgtgggtggcactgggtgggccagatggtggaggagaagccatcttcactgtgctgtcatctgggctaaggcaccgctcctctgcttctccaagggctggttctcctggatgtagggcatncccaggggcactaaacactggagttccanattgactncaaagtttctcagacatctctacgtttgctgtctcctcctcttcctcttccacagctctctctccagacaagcctttccctatgatctctcctctcttctctgactccccagtcacagagaagtcctcacagggtggtgatmtgaagcccttstcttctnccagtgaggaggtgggtgagatggtaccagctgatggcacatagtccaagccctgcgtagcttcagtacgggaggaagggatgcttgtgactgtgtcaagcagcagggagctcttgcctgtctcctctgtctggggagctgtaagtgaggccacagattggtcctcagccactgatgtggcaaaggaagaaagtttgtcacactcagtgattgaagtggccgaggacacatgttcctcttcagccaaaggggcagccactatgttagtggggtaggtgagttcagtctctggcgttccatagactttgccagaggtagcaggaacagcactatcggcaggttggctggcttcgaatgggccagcaccttcaggcccgggcaggtcatatgtacttgtatgaaatctgggtggagctgggcgctcctccggctcatcatggatctcctcatctgagatggtctgctcagtctctgagtagccagggattgtctcatcctggatgtaagagacatgctcagtggctcctgcaggtgtggtcaggctgcttaggaataacgaggtctccttctcaggggccttgccctggagtcccaattcccgacccccaaaagcctcccggctccttggagttacctncaagggttcctgcatatgttnggggtaaaaaccctcagntngggtcgcgtcctcttcctcctcatctgaagggtgtacctcctccatttcttctaactcagccttttctatcacatcctcctttactncaggtncactttcctctctggcttctgttctgtctgggagcctctctgcttccctctgcttcttttcctcccaggtatctttctcttcctctgtttcagccccagagtctaggcctctgtccttgctgccttgttcctcagggacctctgggacaagctctttctccttcatcacatgttcttcttgtcccagccctggaacagagggtggtgttccctggatagctgtacttgggggtccctcctctgcagtgtctagagggaatggcttatctcctagtcctgtgtccctttgttcagccagcaaagccctctcctcacgcttcatctcctcaaagtcctgtgtgaggtcctctggtgaggataggaccagctccctgtgcccactgatggttgggagtggtacagttcccttctgggctgggggtgtctggggctcagaagacagctccttctccccacggatagcacggctcctgtctattnggactcttccagggaccttggctttatagagggtcttacgtacctcaggagtaaagggctttaggtctggcttggaaatcttcttgagctcaggtttggtatctttcctcttctcctccttcttggnatccttcttctcctccttccttccttcatccttcttgagctctttcctctcctntgggatctcttttrtctccttgtcttttttttcttccagcttwgatatcttttctttaaggtgctttttccctaccttgtctttgatcagctttcgcttctctgcctncagtgcctcacttgactctgtcttcaccctctcaggcttggnaggcttctctgggggcttctcagatgactcttgngccttcttctctgtcttggataactccttggacagctctgaacgtgcctccttggctccctcttctaccacctcctcccgtgtggacaacttgctcacggncgtcttggtagtggctttgaggctctccttgctatcagcccgctgtttgattttgctgggcttgaggttggtaggcacagccccagaagccaggtccttctgcgtggccacagggtaacgcaggaagtccagatgccgaagcttttctaggccctccaagatcttgttttggggagcatttcctggaaaaagcacacgcacaatcttctcagtgggattggctggtagccagaccaccagagcagtgatagaggtaaggtagggcacggagatctcagcctccttcccattgggcagcacgatgcctgtcttggctttactattgcctgcccacttmtgcatgaggaactgcatctccttgctgtccttgacagggttgaggacatacatgtccagccggsccacacccattttgtggaagagggtcagtggctcaatggtattgctgaccacacgatatagaggctcagcctggatgcccaggcggtttaagtgctgcagagtgaggcaggcctcctcaatgctacgcttggctttccgggaggcatcaggaagccgcagcttctcaggcacgttgaaaaagacaactccaagctcaggagagataaggttcttcacccagtcgctgtaactgctagagccctgggactgctcctcctctagctctgccactttgcgctgcagtagtccattgatgcctggcaggttgtctgccccaatgtgtgtgagtagcaccgagtcaatgcggtccaagtyccgtaccagcttccacaaacaggacttgcgatcagagccaccatccaccaggatgttgaaaccattgacagcaaagagggcagagtccccncgaccacctgggaagatgtagcaacaaggcttggagagcttgaggaagccccctgaggtggggggctctagtaggtcanatggggatggcacgtccacagtctcagagacatactcggagaactcagccacgccgtccat

SEQ ID NO: 24220 - DNA, 5048 bp, Homo sapiens
  SIMILAR (2711)..(2866): 1001254mologous to Escherichia coli lambda receptor,accession number M26131,Smith-Waterman Score=309.
tatagcccaacgcaattggcgaatgcaatgaaactggttcgccagcaaaatggctggacgcagagcgagctggcgaaaaaaattggtattaagcaggcgacgatttccaatttcgaaaacaaccctgacaataccacgctcacgacattttttaagattttacagtcgcttgaactctcaatgacgctatgcgacgcgaaaaatgcctcgccagaatcaacagaacagcaaaatctggagtggtaatgcctaaacttgtcacttggatgaacaaccagcgggtaggcgagttaacgaagttagccaacggcgcgcacacctttaagtatgcaccggagtggttagcaagccgttatgccagaccgttgtcactttcgctgccattgcagagggggaatatcacctctgatgccgtatttaacttcttcgataacctgttacccgatagaacgattgtacgtgaccggatcgttaaacgttatcatgccaaatccagacaaccgtttgatttattgtcagaaatagggcgagacagcgttggtgccgtgacgttaatacccgaagacgaaacccaacatcattatgagtctttaacaataactgatgaaggtgaattcgtggtgtttgtcggaccgtctggctgcggtaaatcgactttactgcgcatgatcgccgggcttgagacgatcaccaccggcgacctgttcatcggtgagaaacggatgaatgacactccgccagcagaacgcggcgttggtatggtgtttcagtcttacgcgctctatccccacctgtcagtagcagaaaacatgtcatttggccatgcaactggactggcgcaacacaaagaggtggcggaagtgctaccatctcggcgcatttgctggatcgcaaaccgaaagcgctctccggtggtcagcgtcagcgtgtggcgattggccgtacgctggtggccgagcccaagcgtatttttgctcgatgaaccgctctccaacctcgatgctgcactgcgtgtgcaaatgcgtatcgaaatctcccgtctgcataaacgcctgggccgcacaatgatttacgtcacccacgatcaggtcgaagcgatgacgctggccgacaaaatcgtggtgctggacgccggtcgcgtggcgcaggttgggaaaccgctggagctgtaccactatccggcagaccgttttgtcgccggatttatcggttcgccaaagatgaacttcctgccggtaaaagtgaccgccaccgcaatcgatcaagtgcaggtggagctgccgatgccaaatcgtcagcaagtctggctgccagttgaaagccgtgatgtccaggttggagccaatatgtcgctgggtattcgcccggaacatctactgccgagtgatatcgctgacgtcatccttgagggtgaagttcaggtcgtcgagcaactcggcaacgaaactcaaatccatatccagatcccttccattcgtcaaaacctggtgtaccgccagaacgacgtggtgttggtagaagaaggtgccacattcgctatcggcctgccgccagagcgttgccatctgttcccgggcgtaatgtctgctcaggcaatggctgttgatttccacggctatgcacgttccggtattggttggacaggtagcggcggtgaacaacagtgtttccagactaccggtgctcaaagtaaataccgtcttggcaacgaatgtgaaacttatgctgaattaaaattgggtcaggaagtgtggaaagagggcgataagagcttctatttcgacactaacgtggcctattccgtcgcacaacagaatgactgggaagctaccgatccggccttccgtgaagcaaacgtgcagggtaaaaacctgatcgaatggctgccaggctccaccatctgggcaggtaagcgcttctaccaacgtcatgacgttcatatgatcgacttctactactgggatatttctggtcctggtgccggtctggaaaacatcgatgttggcttcggtaaactctctctggcagcaacccgctcctctgaagctggtggttcttcctctttcgccagcaacaatatttatgactataccaacgaaaccgcgaacgacgttttcgatgtgcgtttagcgcagatggaaatcaacccgggcggcacattagaactgggtgtcgactacggtcgtgccaacttgcgtgataactatcgtctggttgatggcgcatcgaaagacggctggttattcactgctgaacatactcagagtgtcctgaagggctttaacaagtttgttgttcagtacgctactgactcgatgacctcgcagggtaaagggctgtcgcagggttctggcgttgcatttgataacgaaaaatttgcctacaatatcaacaacaacggtcacatgctgcgtatcctcgaccacggtgcgatctccatgggcgacaactgggacatgatgtacgtgggtatgtaccaggatatcaactgggataacgacaacggcaccaagtggtggaccgtcggtattcgcccgatgtacaagtggacgccaatcatgagcaccgtgatggaaatcggctacgacaacgtcgaatcccagcgcaccggcgacaaagaacaatcagtacaaaattaccctcgcacaacaatggcaggctggcgacagcatctggtcacgcccggctattcgtgtcttcggaaccttaagccaagtgggatgagaaatggggttacgactacaccggtaacgctgataacaacgcgaacttcggcaaagccgttcctgctgatttcaacggcggcagcttcggtcgtggcgacagcgacgagtggaccttcggtgcccagatggaaatctggtggcaaaaaaaatatgcctggcatgatacagtgcccctgatactttgtgttgctgctgctatcgcctgcgccctggcacctttcacgcccatcgtgactggcgcactctttctctatttctgtttcgtactcacgctcagtgttattgattttcgcactcagctcctgcccgacaaactcaccttaccgctgctctggcttggcttggtatttaatgcgcagtatggattaattgatttacatgatgcggtttacggcgcggtagcgggctatggggtgctgtggcgcatggtgtggctggcaaacgttgccaatgatactgctgattgcctcgctgggtggcattggttacgccatcgtttcacaacttctgcaacgccggactataaccactatcgcattcggcccgtggcttgcgctcggcagcatgataaacctgggataattttgcaggcccatcttcttgatcagatcaagtcacttcgagctcggtacctccgcatccactgtgtacgctttgaagcgctgttctggacgcaaagtgacaaccctgctctggtggcgaaccaaaacgccaccggtagcaatagccgcccgtggaagccgttaggtaaggctcagagctatagcaacgaagagctgaataatgcgccgcagtttaatccagaaacgctttatgccagcgatacgctgattcgctttaacggtgtgaactacatttctcagagtaaagtgcagaaagtttctccttctgacagcaacccgtggcgtgtttttgttgactggaccggaaccaaagagcgcgtaggtacgccgaagaaagcgtggccgaaacagcgtttatgcaccgtatgtcgactttacgctgaatacgatcccggatctggctgcgctggctaagaatcataacgtcaaccacttcacgctggcgtttgtggtgagtaaagatgcgaacacctgtctgccgacatggggtaccgcttacggtatgcagaattacgctcagtacagcaaaatcaaagctctgcgtgaggctggcggcgatgtgatgctgtctatcggtggtgctaacaacgctccgctggctgcttcctgtaagaacgtagacgatctgatgcagcattattatgacatcgttgataacctgaacctcaaagtcctggacttcgatatcgaaggcacctgggttgcggatcaggcatctattgaacgtcgtaaccttgctgtgaagaaagtgcaggataaatggaagtcaagagggcaaagatattgctatctggttttaaacattcgaattcgagctcggtacccccttctctggggatcgagctctggctctggctccaggaccccccaccagaacccgcatgatgaatacctggaagtgaccaaggcccccagcctggattcctcactgccccagctcccatcacccagttctcctggggcccctctcctctccaatctgccacgacctgcctcaccagccctgtctgagggctcctcctctgaggctaccacgcctgtgatttcaagtgtggcggagcgcttctctccaagccttgaggctgcagaacaggagtctggagagctggacccaggaatggaaccagctgcccacagcctctgggacctcactcctctgagcccagcacccccagcttcactggacttggccctagctccagctccaagcctgcctggagacatgggtgatggcatcctgccgtgccacctggagtgctcagaggcagccacggagaagccaagccccttccaggttccctctgaggattgtgcagccaatggcccaactgaaaccagccctaaccccccaggccctgccccagccaaggctgaaaatgaagaggctgcggcttgccctgcctgggaacgtggggcctggcctgaaggagctgagaggagctcccggcctgacacattgctctcccctgagcagccagtgtgtcctgcagggggctccgggggcccacccagcagtgcctctcctgaggtcgaagctgggccccagggatgtgccactgagcctcggccccatcgtggggagctctccccatccttccttgacccacctctgcccccatccatagatgatagggacctctcaactgaggaaagttcgctagtaggaattacgatgtcggtgcctgcaggtcgactctag

SEQ ID NO: 24221 - DNA, 864 bp, Homo sapiens
  SIMILAR (858)..(484): 981254mologous to Escherichia coli membrane protein,accession number Y07802,Smith-Waterman Score=633.
ttaagggaagcggtagatcaatacctgataaatcaatcgcaaacagcaagaaccagtgttcctggcatctggcaagggtgtgaggaagatggtgtcgaatatcagcgtaagcagagcacagtaggtgctctgtaaacgcttacccagcgcacagaaggtgctctgtaaacgcttacccagcgcacagaaggtgctctgtaaacgcttacccagcgcacagtaggtgctcggtttattatggcggatgcgacgaaatgtatcggtgccgtacctgtgaagtggcttgcgcagtgtcgcatcatgagaatcaggatgcgctgcgttgtcaccagacgagtttatttcccgtattcgtgtcattaaagaccactgctggaccacggcagtagcccccggctcaattttctccggttctggtacgtagttcatgcgcatacattgatgcgtatgacagaaggctgggccgggtttgatattcttcgaccctaccgctggcgtcgggtcatcgcctttgtagtcgcgttttacttccgtcacctcatcgcccttctcgttgtgcagatgcacttcaagctggttaaaggcaatgttgatgtcgttttcacggcacagctgatcgatagtacggttcagctcatcgacagtacgactacggtcacgcagttcacgcacatacagacgcagctcatgatccaacgtgctggcaccaaatgccgtaaagaagacttccggcattggttcgtgcatcacccttgggtgctcagtcgccgccttcagtaacactttacgcactttttccagatcggagccataggccacgccgagacggatcaccagacgcgtagtagttttctccagcaccat

SEQ ID NO: 24222 - DNA, 1398 bp, Homo sapiens
  SIMILAR (1398)..(784): 991254mologous to Escherichia coli Flagellar hook protein,accession number D90744,Smith-Waterman Score=1031.
ttacccccgtccaaactccagccgctgcacattcaccatcccaggcttctcagcagcactgacatcaatttgtgtcacccgcagcgcatatttttcatccagtgcgtttaaccatttcagcaggtcattaaacaccacaggttctatccagacctgaatattctccccacgatcggctatccgcctgatgaccaccgagtgcgcggaagcactgtcactgatgacccgcgatacctgcgcaggcgttgttgtggcagattttcgcgctgcaataatatccggcgcggcgttcttcagtcgggtgttcatcgccaccagctgctgcaatattgtctcctgttgctcaatccgttcgctcaacggctgccagatgaggacgtaatatccgacgctaaacaggaacaccaccgctgccagtaacatgcccttttcacgcggagaacgccccgccaggtgttgtgccagccagtgttcgccacggcttaactggcgttcacgccattggccgccggaaaccgcatcaccctctttctgtaacgcgtcctgttgcacaacataatcggttgccagtacactacgcagtttgtttcgaactggcaaagttcgcggcccgtagaggcgtgagagtttcggtcgtggctttgaagaaatctgccacgcgctggcagacatcgccaccacgcaccaggacatccaggttacgcaaaaattacggctgagcatgcagatatgcgttacgccgtgatcagtctgctgctgctccatctcgtataatgctgatccattgagcagcgtgttgaggatctggtcctgggttttgatggtctgggcgttagactgatagttacgctgggcaacgatcatattgaccagttctgtactgagatcgacgttggacgcttccagcgcaccgttggtcagggtgccaaagtttcccgtcccggctgtccccaacagcgccacgccagaagattgcgtcgcagaccagacgttgtcgccttcggatgccagaccttcgttgttggcaaagttcgccagtacaatctgccccagcagttgggtttgttcgttggaatagttgccgacaaccgtaccgtcatcattgatttgataactcaccagatcgcccggtttgtagccgttctgggtggttgccacaatattgttagcgccggtattttgctgcatggagttgaggaagctcagactaaacgtggcgggttctgcaccgttaattgcgccggttgcgatattattcgccatcgcaccatccactaatgtgccattagcattaaattccagtgttgtcgctgtcttcgcaatgctgtttggatcactgctatcctgggtgtagacctgccagttattatccccggtcttcacaaagtagacgctcat

SEQ ID NO: 24223 - DNA, 1185 bp, Homo sapiens
  SIMILAR (283)..(852): 891254mologous to Escherichia coli No definition line found,accession number U00039,Smith-Waterman Score=860.
atggacaaattcgacgctaatcgccgcaaattgctggcgcttggtggcgttgcactcggtgccgccatcctgccgacccctgcgtttgcaacactctctaccccacgcccgcgcattttgacactcaataatcttcataccggagagtcaatcaaagcggagtttttcgatggcagaggctatattcaggaagaattggcaaaacttaaccattttttccgcgattaccgcgcgaacaaaataaagtccatcgacccaggattattcgaccagttgtatcgcctgcaagggttgttaggcacgcgcaaaccgtcctgcggctacgtgaccaccgcgcctgccgcacggagttatcgcctgaccagcaaatttattgccgtcgggcagaaggcgctgtcttcgctgaatatcattcatatcgccgctccgcatcttgaggcactgatcatcggcgagagtgacaccaaaaacttcgctagtcacgatcacgctattttgatttataagctggaacccacaaccgggatgctgcgaacccgtgcctatattggccagcatatgccgctctactgttccgcaatgggcaagatctacatggcgtttggtcacccggactacgtgaagtcatactgggaaagccatcagcatgagatccagccgttaacccgcaataccattaccgagctgcccgcgatgttcgacgaactggcgcacattcgtgaaagcggacgcacgatggacagagaagaaaacgaactcggcgtctcctgtattgctgttccggtgtttgatattcatgggcgggtgccgtacgccgtgtcgatttcgctttcgacatcacgtctgaaacagcgcgtcaacatcgattccggctccgggaaagacagcctgctggcggaactccgcctgcgggaacaaactcagttactggtggcgcatcgctacatcacgcgcgatgccagcgccggaagtgaaaaccatatcgccctgagcgagcaggagttttttacccgcgcggggcaaaatctgttggccttaagctggcacgctaacggtctgtattatggcgtcggcgtcgagattgatctctggctgcacgccggattcgacgtgctggtcaacggctcacgcgcccatctgccgcaggcgcgggcgcgctatcaatcggtgtcactgttcgagtga

SEQ ID NO: 24224 - DNA, 804 bp, Homo sapiens
  SIMILAR (1)..(357): 961254mologous to Escherichia coli o417,accession number U00039,Smith-Waterman Score=629.
atgatgtgtgaaatgattaagcgtaacgatctgctgcgcctgtctgaaacagtcatcaaaccgttttactaccagcgtgttcaggaaactatcgccatcattcgccgctatttaccggaaaatcgctgcctgattcataaaccggaaggagccattttcctctggctatggtttaaggatttgcccattacgaccaagcagctctatcagcgcctgaaagcacgcggcgtgctgatggtgccggggcacaacttcttcccagggctggataaaccgtggccgcatacgcatcaatgtatgcgcatgaactacgtaccagagccggagaaaattgaggcgggggcttcaacacaggccgggtccagatgtcccggtgcaagagcaggtgggagttatacgcgctgggctttatgggcgaagaaaggacctcgatcggaacgtctacatggacgggttggtcacccggactacgtgaagtcatactgggaaagccatcagcatgagatccagccgttaacccgcaataccattaccgagctgcccgcgatgttcgacgaactggcgcacattcgtgaaagcggagcggcgatggacagagaagaaaacgaactcggcgtctcctgtattgctgttccggtgtttgatattcatgggcgggtgccgtacgccgtgtcgatttcgctttcgacatcacgtctgaaacagtgcaaaggagtgatcatgaaccggtttattattgcggatgcgacgaaatgtatcggttgccgtacctgtgaagtgggcttgcgcagtgtcgcatcatga

SEQ ID NO: 24225 - DNA, 1953 bp, Homo sapiens
  SIMILAR (1540)..(1950): 961254mologous to Escherichia coli No definition line found,accession number U00039,Smith-Waterman Score=680.
atgatggatggcatcaacggtctgcaaattatcttccgcatcaccgtgccgttgccgatgtccgggctgatatccgtgttcgtctactgctttatggtggcgtggaacgactatctgtttgcgtcgattttcctctccagcgccagcaatttcaccttaccggtgggcctgaacgcgctgttcagtacgccagattacatctggggacggatgatggcggcctcactggtgaccgcattgccggtggtgattatgtatgcgctttcggaacgttttattaagagtggtttgaccgccggtggcttagtagccacagcaccgcgtgttgctgcgctggttgagtatgaagatcgggcgattttagctaatgaagtgaagatccgcgtgcgtttcggcgcaccgaaacacggaacggaagtggtcgacttccgcgccgccagcccgtttattgatgaagactttaacggcgaatggcagatgttcactccgcgtccggcagatgcgccgcgcggcattgagtttggcaaattccagctagcgacatcaagagcgcattcaaagcagtccgcgctcgcccagctcgtcgagcacgcggccgagcgactgcttggtgatgccgagcagtccgatcagttccgagacgctcatctccggccccccaaaataattaaagccaatatacatacgatagccagcaccctgaaatcagcgtcactttccgacatcgaaatgcgtggttttacctttgatcaaaaacgccagatacttcacctccagctacgggccgcgaactttgccagtttcgacaaactgcgtagtgtactggcaaccgataatgttgtgcaccaggacgcgttacagaaagaggcggtggtgttcctgtttagcgtcggatattacgtcctcatctggcagccgttgagcgaacggattgagcaacaggagacaatattgcagcagctggtggcgatgaacacccgactgaagaacgccgcgccggatattattgcagcgcgaaaatctgccacaacaacgcctgcgcaggtatcgcgggtcatcagtgacagtgcttccgcgcactcggtggtcatcaggcggatagccgatcgtggggagaatattcaggtctggatagaacctgtggtgtttaatgacctgctgaaatgctgcccgcgatgttcgacgaactggcgcacattcgtgaaagcggagcgggcgatggacagagaagaaaacgaactcggcgtctcctgtattgctgttccggtgtttgatattcatgggcgggtgccgtacgccgtgtcgatttcgctttcgacatcacgtctgaaacagtgcaaaggagtgatcatgaaccggtttattattgcggatgcgacgaaatgtatcggttgccgtacctgtcaagtggcttgcgcagtgtcgcatcatgagaatcaggattgcgctgcgttgtcaccagacgagtttatttcccgtattcgtgtcattaatgaccctcacacaccctcacacggcatgattattacctgctggcagaaacgccgcgtcgattttctgcgcgctaccgatttcaacgccctgatgccgggcgttgtcgaaatcgacggcaaaaatatttatacgcaaattatcgatttaaccacacgcgaagcggtggtaaaccgtccggaagtgcatcgtcggtatatcgatattcagtttctggcgtggggcgaagagaaaatcggcattgctattgatacgggaaataataaagtcagcgaatcactattagagcagcgcaatattattttttatcacgacagtgaacatgaatcatttatagaaatgataccgggcagctacgcaattttctttccgcaggatgttcaccgaccaggttgtattatgcaaacagcctctgagatacgaaaaattgtggttaaagtcgcattaacggcgctgaattaa

SEQ ID NO: 24226 - DNA, 998 bp, Homo sapiens
  SIMILAR (588)..(995): 971254mologous to Escherichia coli K12 putative transcriptional regulator,accession number AE000376,Smith-Waterman Score=701.
atgctggcagtcgcgacccgggaagggtttgatgtcagtagatttatttgggtacagcgcctggtagcgagcaacccgctgataagctcgcatgttacgctgataaacgcgctgagtgccgcgattgaggagcaacacagctggcgtgaaggattttgcctgccggatggcgatgtcgccgccagcgtgctgacctgctggcaggataatccttacgatgtgatgtacaccatcgcggatgccagaaggccattaggcggggatatgcaggccgagctgattgacttttgccaggctaaaggggattacacggaaaatcggcagattgcagagcaggaggcgcaagcgttgcaaggcaatgggcgttgacgttaaccgtgtgtactcgctcgatgaactggtgagggggaacgatatcctctttagcgctacgggcgtgacgggcggtgagctggtgaacggtatccaacagacggcgaatggggtgcggacgcagacattactgatcggcggcgcggaccaaacaccaatggcgacgctgacagaagatgatgtgcttgagcaactggatgcacaggacaatttattttacatttatgaaaactgcgcataccattttgctccaggggatacgccagtttctgccgtcgctgtttgtcgataacgatgaagagatcgtggaatatgcagtgaagccgttactcgcccaaagcggccagattgacgatattgatgttgcactgcgtttgatttatgcgttggggaaaatggataaatggttgtacgccgatatcacgcatttttcccagttctggcattacctgaacgaacaggatgaaacgcccggatttgccgatgacatgacctgggattttatcagtaacgtcaatagtataacccgcaatgcgatgctctatgacgcgttaaaagcgatgaagttcgctgatttctccgtctggtcagaggcgcgttttagcggaatggtcaaaacggcgtga

SEQ ID NO: 24227 - DNA, 1413 bp, Homo sapiens
  SIMILAR (913)..(1410): 951254mologous to Escherichia coli GLYCINE BETAINE-BINDING PERIPLASMIC PROTEIN PRECURSOR,accession number D90891,Smith- Waterman Score=832.
atggatggcaaagatccgcgctctgatatcgcgctgatccaaatccagaacccgaaaaacctgaccgcaattaaaatggcggattctgatgcactgagcgtgggtgattacaccgtagcgattggtaacccgtttggtctgggcgagaccgtaacttccgggattgtctctgcgctggggcgtagcggcctgaatgccgaaaactacgaaaacttcatccagaccgatgcagagatcaaccgtggtaacttctgtgggatgagcgatgatttcacgccgccgatttttgcaggctactgccgcgacgatagccacgagctcaggtttcggttatatgcattactcctgaattctgacgcgattgctcttggcatagaacaaaggcccgatttgatattactgggcggcgattacgtattatttgatatgtcgctgaattcttctgcgtatagtgacgtactctccccccttgccgaatgtgcgccgacgtttgcctgcttcggcaaccacgatcgccctgttgggacagaaaaaaatcacttaattggcgagacgttgaaatcagccgtcatcacggggatgcttaaccaggctacggtgatcgcctacgccaacaggccattcgaactggtaggcactggtgacttatggagcggacaatgcaaatcggcttccgccagcgaaaccaatctgtcaagactggtgctggcgcataactcctgcagcaaagaagtcatgcgtgatgaaccctgcgatctgatgctgggcagtcatactcaccgctggcaactgagcgtaccgatggctggagaacctttttgccatgtcgcagatgaacgttacgttctcggattaaatgccttttgcgaaagacacatatacacaatccccagggggggcaagaggatcccccaaacttttgctgccgatctgccgggcaaaggcattactgttaatccagttcagagcaccatcactgaagaaaccttccagacgctgctggtcagtcgtgcgctggagaaattaggttataccgtcaacaaacccagcgaagtagattacaacgttggctacacctcgcttgcttccggcgatgcaaccttcaccgccgtgaactggacgccactgcatgacaacatgtacgaagctgccggtggcgataagaaattttatcgtgaaggggtatttgttaacggggcggcacaaggttacctgatcgataagaaaaccgccgaccagtacaaaatcaccaacattcgacaacttgaagatcccgagatcgccaaacttgtcgataccaacggcgacggaaaagcggatttaaccggttgtaaccctggcttgggcttcgaaggtgcgatcaaccaccaacttggcgcgtatgaactgaccaacaccgtgacgcataattag

SEQ ID NO: 24228 - DNA, 2913 bp, Homo sapiens
  SIMILAR (1653)..(817): 981254mologous to Escherichia coli phnE protein,accession number J05260,Smith-Waterman Score=1401.
atgcgcaccaggaagccgccagtgagttgcaaacagtgggggactacaactgcaccccgcttagcgcggaatgccccaggcccagtgcgctgccacccgcttgcggtgacacacctttacagccttgaaaaggcggagaacggcgccaatgcaggccatgcacgtgatgcgaaacaaaatgggcccatgaacaggtacagcgacggggccaacagacgccgttgggcacggaggggccgcgtgataagcagaatagaagtggaggagggccaggcggggcgagcacctaggcgatgcccaccagataaaacgcgagcgccaggcaccgtgcaaaacgggagaaagcgatatcgccgatttaagcacaaaaagaagaagattatgaaaggcgacgcggactaccgcctgcacgccttaagggaaaaacttaggccatgtgtgctagcaggaccggggcaacccgaacggggatcgctgcaaaggacggaacgaatgcagcctattgaaaagagcgttgtgcacggggaagatagaacgggagtaatgaatttgagaattataagacccaaggaagacgcattaacgagcaataaacgggcccttacgcaggtgcgggccatggaaggagcagatgggaatagcatgcctctcgcagtaatctatagttctcgcattatggtagcgcgcgccagctggtatagcacgggtggacacggttatcgtactcagcgggcgcctgttggtcgccgtaggagttatccattgcgtttcgggtgggacggcagactccatggtcggcaattctttagcgctcgatataaagtgcttacgcaaccgttgagagaggaaatccagcaggctgaccgtgacgatgataagcaccatcagggcgcaggtttgttggaactggaaaccgcgaatcgcttcccacagggtgacgccgatcccgcctgcgccgaccatgccgacgacggtcgccgagcggacgttggattcgaagcgatagagggagtaggagatcagcagtggcatcacctgtggcagcacgccgtagaggatctcttcgagcttgttggcaccggtggcgcgaatgccttccaccgggccgggctcaatcgcttccaccgcttcggaaagcagcttggagagcacgccggtggtgtggataaacagcgccagcaaggccagaacgccagcgaacgggccgaggccgacggcgaccacgaacagcatggcgaagaccatttcgttaatggcgcggcaggcgtccatcaggcggcgaacgggctggtaaacccaccacggcaccaggttttcggcgctcatcaggccaaaggggatggagagaaccaccgccagcgcggtgccccagacggcgatttgcagcgtgacggccatttcggtgaggtaatcctgccactggctgaaatcgggcgggaagaagtcggcggcgaacgtcgccatgttgccgccgtctttgatcagcgtaagcggggccatttccgcgccctgccacgagacgaccaacacggcgagtacaacggcccagctcagaagcgagaaccagctgcgcttgggtggggcgatggtgatggtttgcatgtttggctccggtctgtaggccggataaggtgcttgcaccgcatccggcatcaacgcctgcacattgtcggatgcgacgccggggcgtcttatccgacctacgatttactgcaccgctttactcaccgtaactcatcgcgcttagcgcgttgttcaggcggtccaggtcatccagctgcgcctgaatctcggtggtttttgccagcttgtcctgctcattcacgcgagctggcgaatcggcaccagttgcaggtcgctggaagcgcggaatggcgcccagcccaggcgttccagcaccgctttttcttccggcgttttgccgtagttcataaagaagtcgtagatcttgtcttaggtggtttcggaaagattcttgcgccagacgatcggatcgcctgggatcagcggcgaattccagatcagcttcagttctttcagcttctctggcgcggaagcgcgtaccgtagccgccgaattcagccagcccggcatagacgccaatcatcgcgaacggcaaaccaccagtccgatgctggtcagcgcataccacgccagccagattttcagttgcgtgtcgaaatcattgttgaacgccaccagtccggcgaaacaggttcctggttacaccgcacgagccatagcggagagctaccgtcaggcggcaaatcctttaccgtcaatttcgctaaacctggcaactacaatctgacattacgcgataaagacggcttaattctcgctgggttaagtcatgccgtcagcggtaagggcagcacggcgcatactggtacggtagatatcgtggcggataaaacgctgtaccagccaggcgaaaccgcgaagatgctgattacctttccggagccaattgatgaagcattattgacgctggaacgcgatcgcgtggaacagcagtcgctgctttcgcatccggcaaactggctaacgctacaacgtttaaacgatacccagtatgaagcccgggttccagtgagcaattcctttgcgcctaacatcactttttcggtgctgtatacccgtaacggtcagtacagttttcagaacgccgggatcaaagttgccgttccccagctggatatccgggtgaaaacggacaaaacccattaccagcctggtgaactggtccatgtcgaattaacctcgtcgctgaaaggtaaacctgtttctgcgcagctaacggtaggcgtggtcgatgaaatgatctacgcgctgcaacagaaatcgcgcgaatatcggaaattttctatcggtggggcgtacatgtgctaccaactccaccggtcttattag

SEQ ID NO: 24229 - DNA, 1704 bp, Homo sapiens
  SIMILAR (1)..(651): 1001254mologous to Homo sapiens p53 tumor antigen (aa 1- ?),accession number X02469,Smith-Waterman Score=1167.
atggccatctacaagcagtcacagcacatgacggaggttgtgaggcgctgcccccaccatgagcgctgctcagatagcgatggtctggcccctcctcagcatcttatccgagtggaaggaaatttgcgtgtggagtatttggatgacagaaacacttttcgacatagtgtggtggtgccctatgagccgcctgaggttggctctgactgtaccaccatccactacaactacatgtgtaacagttcctgcatgggcggcatgaaccggaggcccatcctcaccatcatcacactggaagactccagtggtaatctactgggacggaacagctttgaggtgcgtgtttgtgcctgtcctgggagagaccggcgcacagaggaagagaatctccgcaagaaaggggagcctcaccacgagctgcccccagggagcactaagcgagcactgcccaacaacaccagctcctctccccagccaaagaagaaaccactggatggagaatatttcacccttcagatccgtgggcgtgagcgcttcgagatgttccgagagctgaatgaggccttggaactcaaggatgcccaggctgggaaggagccaggggggagcagggctcactccagccacttgaagtccaaaaagggtcagtctaggaggatccccagcgacttcaagcgcaccgtcaacgccgggcatgaaaccaacgcgctggccgtcgccaacaagcaggtggatgttgccaccaacaacaccgaaaacctcgacaagctgaaaacctccgcgccagagaagctgaaagaactgaaggtgatctggaagtcgccgctgatcccaggcgatccgatcgtctggcgcaagaatctttccgaaaccaccaaagacaagatctacgacttctttatgaactacggcaaaacgccggaagaaaaagcggtgctggaacgcctgggctgggcgccattccgcgcttccagcgacctgcaactggtgccgattcgccagctcgcgctgtttaaagagatgcagggcgtgaaaagcaataaaggactgaatgagcaggacaagctggcaaaaaccaccgagattcaagcgcagctggatgacctggaccgcctgaacaacgcgctaagcgcgatgagttcgaccggagccaaacatgcaaatttgaacttctgcctgcagtcagcccaaacaggaaaggatacaaccacatggagagaaaaatggttgtgcatgtcagaggacaactgtgctgaggagacccctaaggcacagatgtgtgaagagggtacccacaaggagtgttggaagtgtggcctgatgggactggatcatggatgcggacttctcatgaacggtttagtaccatacccttggtgctgtccttatgatactatccgcgacattctgcgtagcgccctggcgcaagaggccacccagcagcacggcacgcaaggtttcgcggtgctgtcgtatgtgtatgaacacgaaaaacgcgacttagccagccgcattgtctccacccagcatcatcaccacgacctctccgtcgccacgctgcatgtgcacatcaaccacgacgactgtctggaaatcgccgtgttgaaaggtgacatgggtgacgtgcagcattttgccgatgacgttatcgcccagcgcggcgtgcggcacgggcatttgcagtgcttgccgaaggaagattga

SEQ ID NO: 24230 - DNA, 1470 bp, Homo sapiens
  SIMILAR (1)..(981): 981254mologous to Escherichia coli periplasmic protein,accession number D90227,Smith-Waterman Score=1643.
atgttcagcctcagcaccctgttaagcccggcgcacgccgaagagcaggaaaaggcgttgaatttcggcattatttcaacggaatcacagcaaaacctgaaaccgcaatggacgccgttcttgcaggatatggagaagaagctgggcgtgaaggtcaacgccttctttgccccggactacgcgggcattatccaggggatgcgcttcaataaagtggatatcgcctggtacggcaatctgtcggcgatggaagcggtggatcgcgccaatggccaggtcttcgcccagacggtcgcggcggatggatcgccgggttactggagcgtgttgatcgtcaacaaagacagtccgatcaacaacctgaacgatctgctggcgaagcggaaagatctcacctttggcaatggcgatcctaactccacctctggcttcctcgtccccggctactacgtcttcgccaaaaacaatatctccgccagcgacttcaagcgcaccgtcaacgccgggcatgaaaccaacgcgctggccgtcgccaacaagcaggtggatgttgccaccaacaacaccgaaaacctcgacaagctgaaaacctccgcgccagagaagctgaaagaactgaaggtgatctggaagtcgccgctgatcccaggcgatccgatcgtctggcgcaagaatctttccgaaaccaccaaagacaagatctacgacttctttatgaactacggcaaaacgccggaagaaaaagcggtgctggaacgcctgggctgggcgccattccgcgcttccagcgacctgcaactggtgccgattcgccagctcgcgctgtttaaagagatgcagggcgtgaaaagcaataaaggactgaatgagcaggacaagctggcaaaaaccaccgagattcaggcgcagctggatgacctggaccgcctgaacaacgcgctaagcgcgatgagttcggcgttgatgccggatgcggtgcaagcaccttatccggcctacagaccggagccaaacatgcaaaccatcaccagcgccccacccaagcgcagcgggttctcgcttctgagctgggccgttgtactcgccgtgttggtcgtctcgtggcagggcgcggaaatggccccgcttacgctgatcaaagacggcggcaacatggcgacgttcgccgccgacttcttcccgcccgatttcagccagtggcaggattacctcaccgaaatggccgtcacgctgcaaatcgccgtctggggcaccgcgctggcggtggttctctccatcccctttggcctgatgagcgccgaaaacctggtgccgtggtgggtttaccagcccgttcgccgcctgatggacgcctgccgcgccattaacgaaatggtcttcgccatgctgttcgtggtcgccgtcggcctcggcccgttcgctggcgtgctggcgtgctggcggtaccgagctcgaattcgaaaggagtaa

SEQ ID NO: 24231 - DNA, 2301 bp, Homo sapiens; identical to SEQ ID NO: 8646
  SIMILAR (685)..(2286): 921254mologous to Homo sapiens putative p150,accession number U93563,Smith-Waterman Score=2594.

SEQ ID NO: 24232 - DNA, 900 bp, Homo sapiens
  SIMILAR (103)..(897): 681254mologous to Homo sapiens p40,accession number U93573,Smith-Waterman Score=840.
atggggaaaaaacagagcagaaaaactggaaactctaaaaagcagagcacttctcctcctccaaaggatcgcagttcctcaccagcaatggaacaaagctggatggagaatgactttgacaagttgagagaaggcttcagacgatcaaactacaagctacaggaggaaattcaaaccaaaggcaaagaagttaaaaactttgaaaaaaatttagacgaatgtataactagaataaccaatacagagaagtgcttaaaggagctgatggagctgaaagccaaggctcgagaactatgtgaagaatgcagaagcctcaggagccgatacgatcaactggaagaaagggtatcagcgatggaagatgaaatgaatgaaatgaatgatggggagaatggaaccaagttggaaaacaatctgcaggatattatccaggagaacttccccagtctagcaaggcaggccaacattcagattcaggaaatacagagaacgccacaaagatactcctcgagaagagcaactccaagacacataattgtcagattcaccaaagttgaaatgaaggaaaaaatgttaagggcagccagagagaaaggtcaggttacccacaaagggaagcccatcagactaacagagcatctctcggcagaaactctacaagccagaagagagtgggggccaatattcaacattcttaaagaaaagaattttcaacccagaatttcatatccagccaaactaagcttcataagtgaaggagaaataaaatcctttacagacaagcaaatgctgagagattttgtcaccaccaggcctgccctaaaagagctcctgaaggaagcactaaacatggaaaggaacaaccagtaccagctgctgcaaaatcatgccaaaatgtaa

SEQ ID NO: 24233 - DNA, 856 bp, Homo sapiens
  SIMILAR (146)..(853): 681254mologous to Homo sapiens p40,accession number U93564,Smith-Waterman Score=760.
accaaaagtagatacaaccacaaagatggggaaaaaacagagcagaaaaactggaaattctaaaaagcagagcacctctcctcctccaaaggatcacagttcctcagcagcaatggaaaaaagctgggtggagaatgactttgacgagttgagagaggaaggcttcagacgatcaaactgctccaagctacaggaggaaattcaaaccaaaggcaaagaagttaaaaactttgaaaaaaatttagacgaatgtatatctagaataaccaatacagagaagtgcttaaaggagctgatggagctgaaagccatggctcgagaactacttgaagaatgtggaagcctcaggaaccgatgcaatcaactggaagaaagggatattatccaggagaacttccccaatctagcaaggcaggccaacattcagattcaggaaatacagagaacaacacaaagatactcctcgagaagagtaattccaagacacgtaattgtcagattcaccatagttgaaaggaaggaaaaaatgttaagggcagccagagagaaaggtcgggttacccacaaagggaagcccaacagaccaacagcagatctcttggcagaaactctagaagccagaatagagtgggggccaatattcaacattcttaaagaaaagaattttcaacccagaatttcatatccagccaaactaagcttcataagtgaaggagaaataaaatactttacagacaagcaaatgctgagagattttgtcaccaccaggcctgccctaaaagagctcctgaaggaagcactaaagatggaaaggaacaaccagtaccagccactgcaaaatcatgccaaaatgtaa

SEQ ID NO: 24234 - DNA, 1743 bp, Homo sapiens; identical to SEQ ID NO: 23634
  SIMILAR (115)..(1740): 811254mologous to Homo sapiens putative p150,accession number U93563,Smith-Waterman Score=2198.

SEQ ID NO: 24235 - DNA, 1410 bp, Homo sapiens; identical to SEQ ID NO: 4326
  SIMILAR (64)..(1398): 761254mologous to Homo sapiens putative p150,accession number U93572,Smith-Waterman Score=1655.

SEQ ID NO: 24236 - DNA, 957 bp, Homo sapiens
  SIMILAR (568)..(954): 901254mologous to Homo sapiens p40,accession number U93566,Smith-Waterman Score=610.
atggttatcctggaactggagattatcccagtcctttgttgcactggcaatgggcagggcctcattgtctgtggcccgacagccacagtgtatgcgggcaccgagaggtatgcactggagaccgaggttcccggatgttcagtgtacctggcagcaggggggacacacctgacctcggagcttgtctggcaggctcgaccaatcagaagaggtcttgggcgggcgctgccgtccagcgagccaataggcgggcagtcggagccgggcttgcccgggcatgtgggagctgccggctttccggacgccacgtgcagaccggaagagacacgcggggcttcagaaaagcaggccgggcgccgcctgtctccagccctcgctctgctcgggggtccagggccagagggggcggcgctggtcgttgggactcggcccagctgccgcggccagcaagtgaccaacgcccgagtccttcccgaaggaaaactaacaaacagaaaggacatccacaccaaaaacccatctgtacatcaccatcatcgaagaccaaaagtagataaaaccacaaagatggggaaaaaacagagcagaaaaactggaaactctaaaaagcagagcgcctctcctcctccaaaggaacgcagttcctcaccagcaatggaacaaagctggacagagaatgactttgacgagctgagagaagaaggcttcagacgatcaaattactctgagctatgggaggaaattcaaatcaaaggcaaagaagttgaaaactttgaaaaaagtttagaagaatgtataactagaataaccaatacagagaagtgcttaaaggagctgatggagctgaaaaccaagcctcgagaactacctgaagaatgcagaagcctcaggagccgatgcaatcaactggaagaaagggtatcagcgatggaagatgaagtgaatgaaatgaagtaa

SEQ ID NO: 24237 - DNA, 2742 bp, Homo sapiens
  SIMILAR (946)..(2229): 411254mologous to Xenopus laevis polyprotein,accession number U81290,Smith-Waterman Score=871.
atgctcttctacacaggactgaagtgtggaattcgcatggtcaacatgaaaagtaaggaacctgccgtgggatctagattcttctctagaattagtagttggagaaattcaacagtgactggacatccatggcaggtctccctaaaatcagatgagcaccacttctgtggaggaagcttgattcaagaagatcgggttgttacagcagcacactgcctggacagcctcagtgagaagcagctgaagaatataactgtgacttctggggagtacagcctctttcagaaggataagcaagaacagaatattcctgtctcaaaaattattacccatcctgaatacaacagccgtgaatatatgagtcctgatattgcactgctgtatctaaaacacaaagtcaagtttggaaatgctgttcagccaatctgtcttcctgacagcgatgataaagttgaaccaggaattctttgcttatccagtggatggggcaagatttccaaaacatcagaatattcaaatgtcctacaagaaatggaacttcccatcatggatgacagagcgtgtaatactgtgctcaagagcatgaacctccctcccctgggaaggaccatgctgtgtgctggcttccctgattggggaatggacgcctgccagggggactctggaggaccactggtttgtagaagaggtggtggaatctggattcttgctgggataacttcctgggtagctggttgtgctggaggttcagttcccgtaagaaacaaccatgtgaaggcatcacttggcattttctccaaagtgtctgagttgatggattttatcactcaaaacctgttcacaggtttggatcggggccaacccctctcaaaagtgggctcaaggtatataacaaaggccctgagttctgtccaagaagtgaatggaagccagagaggaaagggtaaggtctgtggaaaaatattgccttcaccattgctggcagagaccagtgaggccatggttccatttgtttctgatacagaagacagtggcagtggctttgagcttaccgttactgctgtacagaagtcagaagcagggtcaggttgtgggagtctggctatattggtagaagaagggacaaatcactctgccaagtatcctgatttgtatcccagtaacacaaggtgtcattggttcatttgtgctccagagaagcacattataaagttgacatttgaggactttgctgtcaaatttagtccaaactgtatttatgatgctgttgtgatttacggtgattctgaagaaaagcacaagttagctaaactttgtggaatgttgaccatcacttcaatattcagttctagtaacatgacggtgatatactttaaaagtgatggtaaaaatcgtttacaaggcttcaaggccagatttaccattttgccctcagagtctttaaacaaatttgaaccaaagttacctccccaaaacaatcctgtatctaccgtaaaagctattctgcatgatgtctgtggcatccctccatttagtccccagtggctttccagaagaatcgcaggaggggaagaagcctgcccccactgttggccatggcaggtgggtctgaggtttctaggcgattaccaatgtggaggtgccatcatcaacccagtgtggattctgaccgcagcccactgtgtgcaattgaagaataatccactctcctggactattattgctggggaccatgacagaaacctgaaggaatcaacagagcagaattctacatcagctcaggccaaactgaatgacttcagctatgttggtacagagctacatctgaacttaaatacatttctaacaacactttctgcttacttcatcatcgagctctctctgaatgtttcttcattagatggtggcctagcaagtcgcctacagcagattcaagtgcatgtgttagaaagagaggtctgtgaacacacttactattctgcccatccaggagggatcacagagaagatgatctgtgctggctttgcagcatctggagagaaagatttctgccagggagactctggtgggccactagtatgtagacatgaaaatggtccctttgtcctctatggcattgtcagctggggagctggctgtgtccagccatggaagccgggtgtatttgccagagtgatgatcttcttggactggatccaatcaaaaatcaatgggataacaatagaaaacaatacaggaagttggccaacccaagacaaacgtagcattccagctgttgaccaatttcgaatggaaaattcggacagaaatacaaatgtgctgccagccatgcttggagagcctagaccaaaagtagataaaaccacaaagatggggaaaaaacagagcagaaaaactggaaactctaaaaagcagagcacctctcctcctccaaaggaacgcagttcctcaccagcaatggaacgaagctggatggagaatgactttgacgagttgagagtagaaggcttcagatgctcaaactacgagctacaggaggaaattcaaaccaaaggcaaagaagttaaaaactttgaaaaaaatttagacgaatgtataactagaataaccaatacagagaattgcttaaaggagctgacggagctgaaaccaaggctcgagaactacgggaagaatgcagaagcctcaggagctgatgcgatcaactggaagaaagggtatcagcgatggaagatgaaatga

SEQ ID NO: 24238 - DNA, 1909 bp, Homo sapiens
  SIMILAR (835)..(909): 921254mologous to Homo sapiens putative p150,accession number U93563,Smith-Waterman Score=124.
atgcatctcccacaaacctttgcaatcctcaggtcaagagatcccctcctgatcccactccaccagagcctttggtctgacacacacagctgtgtggagtctcagcggagcagctgctcaggcatgcacaaagacccaggggctttatgtactctggctctcggttccctggcaaatgggactgtaactcaggcaaggtccttgatttgcgtccacactgggcttccccaactggggcctccagttccttggcccaagagatttgatttctccctgggatggagtccccagagaaaggggcaggctgttttaggtgacttagacgttctacctgcagcctttggagtgcccgagcccaccaaggcagaagcagttccccggcacagcacagaaggaaaactaacaaacagaaaggacatccacaccaaaaacccatctgtacatcaccatcatcaaagaccaaaagtagataaaaccacaaagatggggaaaaaacagagcagaaaaactggaaactctaaaaagcagagcgcctctcctcctccaaaggaatgcagttcctcaccagcaatggaacaaagctggatgcagaatgactttgacgagttgagagaagaaggcttcagacgatcaaactactccaagctagaggaggaaattcaaaccaaaggcaaagaagttaaaaactttgaaaaaaaatttggacgaatgtataactagaataaccaatacagagaagtgcttaaaggaactgatggagctgaaagccaaggctcgagaactacgtgaagaatgcagaagcctcaggagccgatgcgatcaactggaagaaaggcaccacaccacacctattccaaaattgaccacatacttggaagtaaagctctccccagcaaatgtaaaagaacaagttataacaaactgtctctcagaccacagtgcaatcaaactagaactcaggattaagaaacccactcaaaacccctcaactacatggaaactgaacaacctgctcctgaatgactactgggtaaataaagaaatgaagtcagaaataaagatgttctttgaaaccaacgagaacaaaaacacaacataccagaatctctgggacgcattcaaagcagtgtgtagaggcaaatttatagcactaaatgcccacaagggaaagcaggaaagatccaaaattgacaccctaacatcacaattaagagaactagaaaagcaagagcaaacacattcaaaagttagcagaaggcaagaaataactaaaatcagagcagaaccgaaggaaatagagacacaaaaaacccttcaaaaaattaatgaatccaggagctggttttttgaaaggatcaacaaaattgatagacggctagcaagactaataaagaagaaaagagagaagaatcagagagacgcaataaaaaatgatgaaggggatatcaccaccgatcccacagaaatacaaactaccatcagagaatactacaaacacctctatgcaaataaactagaaaatctaaaagaaatggataaattcctcaacacatacaccctcccaagactaaaccaggaagaagctgaatctctgaatagaccaatagcaggctctgaaattgtggcaataattaatagcttaccaaccaaaaagagtccaggaccagatggattcacagccgaattctaccagaggtacaaggagaaactggtatttggtgcaggttattttggaatgtgggccttggctgcacttcccagcaacttgctaaagctgtctcaactctgtcaggaggcagcagaagtgaacgtcctggtacaatttgtctgtatttgtcctgcacaggaacctaccgaaattgacgtgcttttttctgtgttaccccctctttcccttatcttaaactag

SEQ ID NO: 24239 - DNA, 1968 bp, Homo sapiens
  SIMILAR (622)..(1053): 1001254mologous to Escherichia coli No definition line found,accession number U00039,Smith-Waterman Score=714.
atgtcgatggccagacgattactcgagttacgtcaaattcctctgcatactattgcggaaaaatgtggctatagcagtacatcgtactttataaacacatttcgacaatattatggtgtaacgccacatcagtttgcgcaacattcgccagttctctttcgcagtttgccaggcggtatcggtattttcaggaggaaaagactcggcatgtttgggattattaagctgacaattcatacgattacgggaatgtggcgcgccagaaacggcaccatgactgataaccagcggcagcacgccgagaataaagccagagaggtcatcaggattgggcgtaaacgcatcgcgccgttacatgaatggcctatcggggttacctatttttgcatcattcagggcaatcgacatcaggcattatcatttgtcctgttattacccaaaacctggggtatcttgataccttcctcttactcggtaccgagctcgattcgaatcatgtcatacggcgtgcagctacgcgaaattgaagccagcaaagccatcggcgaccagtgggtcgtcacctctggcttgcaggctggcgatcgggtgatcgtttccggtttgcaacgcattcgtccgggtggtctggcgatcatgaacttaccggttgcgcagtatccgcagattgcgccaccgaccattaccgtcagcgctacctatccaggtgccgatgcgcaaacggtagaagactcggtcactcaggtgattgagcaaaatatgaatgggcttgatggcctgatgtacatgtcttcaaccagtgatgcggcgggcaatgcctctatcactctgaccttcgagactgggacatctcctgatatcgcacaggttcaagtgcaaaataaactgcaactcgctatgccttcattacctgaagcagtgcagcagcaggggattagcgtcgataagtcgagcagtaatatcctgatggtagcggcgtttatttctgataacggcagcctcaaccagtacgatatcgcggactatgtagcgtctaatatcaaagacccgctaagacaaggaaaattaacaaacagaaaggacatccacaccaaaaacccatctgtacatcaccatcatcaaagaccaaaagtaaataaaaccacaaagatggggaaaaaacagagcagaaaaactggaaactctaaaaagcagagcacctctcctcctccaaaggatcacagttcctcagcagcaatggaacaaagctggacagagaatgactttgatgagttgagagaagaaggcttcagccgatcaaactacgagatacaggaggaaattcaaacccaaggcaaagaagttaaaaactttgaaaaaaatttagatgaatgtataactagaataaccaatacagagaagtgcttaaaggagctgatggagctgaaagccaaggcacgagaactatgtgaagaatgcagaaggctcaggagccgacgtgatcaactggaagaaaggttcccaggtgtcaggacccagagattcctatacaacacaggggaccctgtgaagaaggctgtgttgagagcaggcagccttagtgggtgttggcatgggcaggatgtggccagaactcaagagacaccactgaggacaccagaggacactccggaggacacttcctggattcaatggtttcatccttctgccaaagcacctggtcctacccccagatataattttagaacaggtcacaggaaagggacaaagtgcctcggtaccgagctcgaactcgtatcaagggcagaggcagagacttctcaatcatacctgtttgcctgggtatcagcagcggtgtctgcagaacagtggtttttcgtgaaccgcgaatgctgctgtctgattgtcctctggaagttttgtctcagaggagtacccggccgtgacatgattacgaatcgtgctcggtaccagtatctgaatgggtga

SEQ ID NO: 24240 - DNA, 6441 bp, Homo sapiens
  SIMILAR (2524)..(5859): 941254mologous to Homo sapiens putative p150,accession number U93563,Smith-Waterman Score=5538.
tcatttcatcttccatcgctgataacctttcttccagttgattgcattggctcctgaggcttctgcattcttcacgtagttctcaagccctggtttcagctccatcagctcctttaagcacttctctgtattggttattctagttatacattcgtctaaatttttttcaacattttgaacttctttgcctttggtttgaatttccttctgtagctcatagtttgatcgtctgaagccttcttctctcaactcgtcaaagtcattctccatccagctttgctccattgcttgtgaggaactgtgttcctttggaggaggagaggtgctctgctttttagagtttccagtttttctgctctgttttttccccatctttgtggttttatctacttttggtctttgatgatagtgatgtacagatgggtttttggtgtggatgtcctttctgtttgttagttttccttctctagacctaagaaacaggatcgacagcaacacagtgatagtggggtactcaatactccatgacagcacagtgtgatcctgatgaaaaagcacaagcaaagcaatgtctaccaagagtggaagtggtcccgtcaaagcacaagtgaaccagtcaagagcaagagacatggcaacagttctttgggaatactcaaggcattttgcttgttgactatctgtctgtgggaaagaggtggtcttcacaatcgatgaatcataatcctcataactgattatcatcatcgataatttactgtcaaaggcccattcctgagatgaagactgctctgctttcttgattctagaaaggcatggagttgaattttcagggcccttggccacgaacagctgctggcatggccactccttggccttagctggtgctataggaacctgtagctcctcaaaatagtaagagccatctatgacaaacccacagccaatgtcatatcgaatggtcaaaagctggaagcattccctttgaaaaatggcacaagacaggaatgccctctctcaccactcctattcaacatagtgttggaagttctggccagggcaattaggcaggaaaaggaaataaagggtattcagttaggaaaagaggaagtcaaattgtccctgtttgcagttgacatgattaaatatctagaaaaccccattgtctcagcccaaaatctctttaagctggtaagcaacttcagcaaagtctcaggatacaaaatcaatgtacaaaaatcacaagcattcttatacacaaataacagacaaacagagagccaaatcatgagtgaactcccattcacaattgattcaaagagaataaaatacctaggaatccaccttacaagggatgtgaaggacctcttcaaggagaactacaaaccactgctcaatgaaataaaagaggatacaaacaaatggaagaacattccatgctcatgggtaggaagaatcaatatcgtgaaaatggccatattgcccaaggtaatttatagatacaatgccatccccatcaagctaccaatgactttcttcacagaattggaaaaaactactttaaagttcatatggaaccaaaaaagagcctacatcaccaagtcaatcctaagccaaaaggacaaagctggaggcatcacgctacctgacttcaaactacactacaaggctacacagggtacttccaacagacctgcagctgagggtcctgtcgtgttagaaggaaaactaacaaccagaaaggacatctacaccgaaaacccatctgtacatcaccatcatcaaagaccaaaagtagataaaaccacaaagatggggaaaaaacagagcagaaaaactggcaactctaaaaagcagagcgcctctcctcctccaaaggaatgcagctcctcaccagcaacagaacaaagctggacggaaaatgactttgacgagttgagagaagaaggcttcagacgatcaaactactccgagctacaggaggaaattcaaaccaaaggcaaagaagttgaaaactttgaaaaaaatttagacgaatatataactagaataaccaatacagagaagtgcttaaaggagctgatggagctgaaagccaaggctcgagaactacgtgaagaatgtagaagcctcaggagccgatgcgatcaactgcaagaaagggaatcagtgatggaagacgaaatgaatgaaatgaagcgagcagtgaagtttacaaaaaaaagaataaaaagaaatgaacaaaccctccaagaaatatgggactatgtgaaaagaccaaatctacgtctgattggtgtacctaaaagtgatggggagaatggaaccaagttggaaaacactctgcaggatattatccaagagaacttccccaatctagcaaggcaggccaacattcagattcaggaaatacagagaacgccacaaagatactcctcgagaagagcaactccaagacacataattgtcagattcaccaaagttaaaatgaaggaaaaaatgttaagagcagccagagagaaagactttaaaccaacaacgatcaaaagagacaaagaaggccattacataatggtaaagggatcaattcaacaagaagaactaactatcctaaatatatatgcacccaatacaggagcacccagattcataaagcaagtcctgagtgacctacaaagagacttagactcccacacattaataatgggagactttaacaccccactgtcaacattagacagatcaacgagacagaaagtcaacaaggatacccaggaattgaactcagctctgcaccaagcagacctaatagacatctacagaactctccaccccaaatcaacagaatatacatttttttcagcaccacaccacacctattccaaaattgaccacatacttggaagtaaagctctcctcagcaaatgtaaaagaacagaaattataacaaactatctctcagaccacagtgcaatcaaaccagaactcaggattaagaaactcactcaaaactgctcaactacatggaaactgaacaacctgctcctgaatgactactgggtacataacgaaatgaaggcagaaataaagatgttctttgaaaccaacgagaacaaagacacaacataccagaatctctgggacacattcaaagcagtgtgtagagggaaatttatagcactaaatgcccacaagagaaagcaggaaagatccaaaattgacaccctaacatcacaattaaaagaactagaaaagcaagagcaaacacattcaaaagctagcagaaggcaagaaataactaaaatcagagcagaactgaaggaaatagagacacaaaaaacccttcaaaaaattaatgattccaggagctggttttttgaaaagatcaacaaaattgatagaccgctagcaagaccaaaaaagaagaaaagagagaagaatcaaatagacgcaataaaaattgataaaggggatatcaccaccaatcccacagaaatacaaactaccatcagagaatactacaaacgcctctatgcaaataaactagcaaatctagaagaaatggataaattcttcgacacctacactctcccaagactaaaccaggaagaagttgaatctctgaatagaccaaaaacaggagctgaaattgtggcaataatcaatagcgtaccaaccaaaaagagtccaggaccagatggattcacagccaaattctaccagagctacaaggaggaactggtaccattccttctgaaactattccaatcaatagaaaaagagagaatcctccctaactcattttatgaggacagcatcatcctgataccaaagccgggcagagacacaaccaaaaaagagaattttagaccaatatccttgatgaacattgatgcaaaaatcctcaataaaatactggcaaaccaaatccagcagcacatcaaaaagcttatccaccatgatcaagtgggcttcatccctgggatgcaaggctggtccactatacacaaatcaataaatgtaatccagcacataaacagaaccaaagataaaaaacacatgattatctcaatagatgcagaaaaggcatttgacaaaattcaacaacccttcatgctaaaaactctcaataaattaggtattgatgggacgtatctcaaaataataagcgctatctatgacaaacccacagccaatatcatactgaatgggcaaaaactggaagcactccctttgaaaactggcacaagacagggatgccctctctcaccactcctattcaacatagtgttggaagttctagccagggcaattcggcaggagaaggaaataaagggtattcaattaggaaaagaggaagtcaaattgtccctgtttgcagacgacatgattgtatatctagaaaaccccattgtctcagtccaaaatctccataagctgataagcaacttcagcaaagtctcaggatacaaaatcaatgtgcaaaaatcacaagcattcttatacaccaataacagagaaacagagaaccaaatcatgagtgaactcccattcacaattgcttcaaagagaataaaatacctaggaatccaccttacaagggacgtgaaggacctcttcaaggagaactacaaaccactgctcaatgaaattaaagaggatacaaacaaatggaagaacattccatgctcatgggtaggaagaatcaatattgtgaaaatggccatactgcccaaggtaatttatagattcaatgccatccccatcaagctaccaatgactttcttcacagaattggaaaaaactactttaaagttcatatggaaccaaaaaagagcccacatcgccaagtcaatcctaagccaaaagaacaaagctggaggcatcatgctacctgacttcaaactataccacaaggctacagtaaccaaaacagcatggtactggtaccaaaacagagatatagatcaatggaacaaaacagagccctcagaaataacgccacatatctacaactatctgatctttgacaaacctgaggaaaacaagcaatggggaaaggattccctatttaataaatggtgctgggaaaactggctagccatatgtagaaagctgaaactggatcccttccttacaccttatacaaaaatcaattcaagatggattaaagacttaaacgttagacctaaaaccataaaaaccctagaagaaaagctaggcattaccattcaggacataggcattggcaaggacttcatgtctaaaacaccaaaagcaatggcaacaaaagacaaaattgacaaatgggatctaattaaactaaagagcttctgcacagcgaaagaaactaccatcagagtgaacaggcaacctacaaaatgggaggaaattttcgcaacctactcatctgacaaagggctaatatccagaatctacaatgggctcaaacaaatttacaagaaaaaaacaaacaaccccatcaaaaagtgggcgaaggacatgaacagacacttctcaaaagaagacatttatgcagctaaaaaacacgtgaaaaaatgctcatcatcactggccatcagagaaatgcaaatcaaaaccacaatgagataccatctcacaccagttagaatggcaatcattaaaaagtcaggaagcaacagatgctggagaggatgtggagaaataggaacacttttacactgttggtgggactgtaaactagttcaaccattgtggaagtcagtgtggcgattcctcagggatctagaactagaaataccatttgacccagccatcccattactgggtatatacccaaacgactataaatcatgctgctataaagacacatgcacattgagtctaccagaaatccgcaactgcccaacgaaaagtgtcccagtccccttctctgttgatgaaactcagtatcatgttgaagatactagtcctgtaagctggcaagtaaaagttctaggcaagcatatacatcagggaagcagctatgaagatgtttggctgcctcagcgcatgcaaggaaaactaacaaacagaaaggacatccacaccaaaaacccatctgtacatcaccatcatcaaagaccaaaagtagataaaaccacaaagatggggaaaaaacagaacagaaaaactggaaactctaaaaagcagagcgcctctcctcctccaaaggaacgcagttcctcaccagcaatgcaacaaagctggacggagaatgactttgacgagctgagagaagaaggcttcagacgatcaaattactctgagctacgggaggacattcaaaccaaaggcaaagaagttgaaaactttgaaaaaaatttagaagaatgtataactagaataaccaatacagagaagtgcttaaaggagctgatggagctgaaaaccaaggggggtgctttagagtcgcactga

SEQ ID NO: 24241 - DNA, 3345 bp, Homo sapiens
  SIMILAR (2398)..(3093): 991254mologous to Escherichia coli K12 putative dehydratase,accession number AE000370,Smith-Waterman Score=1207.
atgacctggacacatgaggctgttaataggagagaacctttgaggggatgcgagccgaactgggatgtcgatgtcaagcctgcggggtgtatgatctcccgtcgtaacgagctgccgtacaccttaggtttacgcatcgatatgctggtcgatcttggtacgcccgcttctctgatgggccaatcctcagtatataatacgacggaccgacacagcacacaccggatggacgggctggaacagctcatgcagcaggcagattttgcggctgatattgctgttgtggcgccgtgggacaactggtcccccaccgctggtaggttcggccttatccgactgctggatgaacaaacagcaccttatgcctggtatacctctccaatgcacctgatggatgaaaaatgttcatgccaccgtcagcgcccggtcatcggccttaatcagccacagtaccagagtggcaccatcgaagtcgataacgtgtcatttgcttatcgcgatgactatctggtgttaaagaacattaatctctctgtgccttcgcgcaattttgtggcgctggtcgggcataccggcagtggcaaaagcaccctcgccagtttattgatgggctattacccgctaacggaaggtgagattcgccttgatggtcgtccattaagttcgctaagtcacagcgcgctgcgccagggcgtggcaatggtgcagcaagatccggtggtgctggcggataccttcctcgccaacgtgacgctgggtcgggatatctccgaagaacgcgtctggcaggcgctggaaaccgtgcaactggcggagctggcgcgtagcatgagcgacggtatttacacgccgctgggcgagcaggggaataatctctcagttgggcaaaagcaactgctggcactggcgcgcgtgctggtcgagacgccgcaaatcctgatccttgatgaggcaaccgccagcattgactccggtactgaacaggcgattcaacatgctctgcggcgtgattgctcaccgcttatcgaccattgtgatgccgacaccattctggtgcttcatcgtgggcaagccgtggagcagggcactcaccagcaactgctggcggcccagggacgctactggcagatgtatcaactgcaacttgcgggcgaagagctggcagccagcgtgcaaccattaccgaattctgaccggaggggatctatgaagctggtgaccgtgataatcaaaccattcaagctggaagacgttcgtgaagcgttatcttccattggtattcagggcctgaccgtcaccgaagtgaaaggtttcgggcgtcagaaagggcatgccgagctgtaccggggggcggaatacagcgtcaatttcctgccaaaagcggcttacaccggaaaaattggcgacggcaaatcttcgtcgctgaattgcaacgcgtcattcgtattcgtaccggcgaagccgacgaagcggcgctgtatctctggcacacagcaacagaacgagatggtccgttccggaattttacggccggggcatttcgggcctccctaccccatcctgcccgtcatggtcggagaccaattttggctgcaccctttatgcccgtcaatccttcaaggcttcctccacgccgacggcatttggcgtccggtagatcgcttcgatttaattgctgtacagcaggcgacgaaacctgttctgcgcgcagcggggagcgtcgtagcctggtattttgactttggttttgcgggttttgttattgcctggtacgtgtcgaatctggttggcggcaccatgtactggtggtttgccgcgcgcgaattacgccgccgaaatatccataacgccttcaaattgaatctgtttgagtctgcccgatacattaaaggcgcgtggagttttgtctggtcaaccaacattgcccactccatctggtcggcgcgtaactcgtgcagcacagtgttggtggggatcgtgttaggacccgctgccgccgggttatttaaaatcgccatgacattcttcgacgccgccggaacgccagcgggtttgctgggtaaaagtttttacccagaggtgatgcgtttagatccgcgcaccaccagaccgtggttgttaggtgtgaagtccggtttactggcgggcggaatcggtattctggtggcgctcgcggtgttgatcgtcggcaagccgctcatttcgctggtgtttggcgttaagtatctcgaagcgttggccagcgtgaataacatcgccagttggttatcgtttttcagcaaccccttgtatctggctttcacgaagccgaactgtcgcttgatgatgcgaaatgggtgctccaacctggcccggatgctggctttcatgattcatgtatggccgggccaggtattaccgctttatgcgctggacgatctcgcaaacctttttggtgtgaagaaaattctcgtcaaagacgaatcaaaacgattcggtctgaacgccttcaaaatgcttggcggtgcgtacgccatcgctcaattattgtgtgaaaaatatcatcttgatatcgaaacgctgtcatttgagcacctgaaaaatgccatcggcgaaaaaatgactttcgcgaccaccaccgacggcaaccacgggcgcggtgtggcgtgggcagcacagcaactcggacagaatgcggtgatttacatgccgaaaggttctgctcaggaacgcgttgacgccattctgaacctcggtgccgagtgcatcgtcacggatatgaactatgacgataccgttcgcctgaccatgcaacacgcgcagcagcacggctgggaagtggtacaggacacggcatgggaaggttacaccaaaatcccaacctggatcatgcaaggctacgcaaccctggcagatgaagccgtcgagcaaatgcgtgaaatgggcgtaaccccgacgcacgttctgctgcaagccggtgtcggagcaatggccggtggtgtgctgggttatctggtcgacgtctatagcccgcaaaatctgcacagcattattgttgaacctgacaaagctgactgtatttatcgctccggcgtcaaaggcgacatcgtcaaccgttggcgcgttgccgcattaggtatgcgcgtgctgggtaatccgtacggcaacgacccgcgcatcatctccggtgaatccggcgctgtcggtttgggcgttctcgcagcggttcattatcacccgcaacgtcaaagcctgatggaaaaactggcgctgaacaaagatgccgtggtgctggttatcagcactgaaggcgacaccgacgtgaagcactaccgcgaagttgtctgggaaggcaacacgctgtag

SEQ ID NO: 24242 - DNA, 684 bp, Homo sapiens
  SIMILAR (5)..(37): 901254mologous to Escherichia coli K12 putative ATP-binding component of a transport system,accession number AE000151,Smith- Waterman Score=46.
gggggtgctggcggataccttcctcgccaacgaaacacacattgttgtataatagggaagaacgcgtctggcaggcgctggaaaccgtgcaactggcggcgtggcgcgtagatgagcgacggtatttacacgccgctggcgagcaggggaataatctctcagttgggcaaaagcaactgctggcactggcgcgcgtgctggtcgagaccccgcaattcctgaccctgaatgggcacaccccagccagttgcttccggtactgaacaggcgattcaacatgctctggcgccggtgcgtgaccataccacgctggtagtgattgctccccgcttatcgaccattgttgatgccgacaccattctggtgcttcatcgtgggcaagccgtggagcagggcactcaccagcaactgctggcggcccagggacgctactggcagatgtatcaactgcaacttgcgggcgaagagctggcagccagcgtgcgtgaagaggaatcattgagcgcctgaatagcgcaatatttcatcgttggtgcaaaaatgtaacgcactgtgcactgtcatagtgcgttttcattttcaaacttcttaacttcctgctctctttctcgtttttcatttctggcacaccgcttgcaataccttcttcgtgtagcagaaccattaccgaattctgaccggagg

SEQ ID NO: 24243 - DNA, 2208 bp, Homo sapiens
  SIMILAR (1168)..(1785): 1001254mologous to Escherichia coli recC protein (aa 1- 1122),accession number X03966,Smith-Waterman Score=1095.
atgctgttggtttctgcatcggtcaatgcaatgagcatcagcggtcaggcgggtaaagaatacaccaatattggtgtcggttttgggactgaaacgacgggcctggcgttaagcggtaactggacacataacgacgacgacggtgatgtcgctggcgtggggctggggttgaatctgcctctcgggccgttaatggcgaccgttggcggaaaaggcgtttacaccaacccgaattacggcgatgaaggttatgccgcagcggtaggaggtggtttgcagtggaaaattggcaacagcttccgtttgtttggcgagtattactactctccggattcgctctccagcggtattcaaagttatgaagaagcgaatgctggcgcgcgttacaccatatgcgtccaggtgtttgtggtggtgatgttaattcgcaaccagctgttcaccccagtgaacacagcgatagacggcttcgccacgaactacgcgattatgccggcgtacgcggtaggggaaggtgttgcgacgcacggattgcagttcgaactgatgcgtacgacgggcgggaacacccagcacgttttccatcatccacttccactctttgccatgtggcgctacgcggccgaaatgtttccataccagcaaatgtgccagttcgtgcggtaccacttcttcaataaaagcttcactgttttccaacagcaaaacgggattgaggcgaatttcatagctttccagccaggccgttccggcggaggttccgcgctgggtcgaaacgtgtttggtttccggtaccagccacaatgtcagcaggataaacagtacgttcagagccgcatacacccagaaggtgttggcgttacccagcgtgttgagcatggtcaggaacgttgcgccaacgatcatgtgcaatccagtgggaccgagctgatgcaagagggcgttatgtcagcttccctgaagaatcaacaaggctttagcctgccggaggtaatgttggcgatggtgttgatggtgatgattgtcactgcgttatcgggtttccagcgaacattaatgaacagtcttgccagcagaaaccagtaccaacagctctggcggcatggctggcagcaaacgcaactgcgcgcgatttcgccacctgccaactggcagtcaggagccgctatgttaagggtctaccattccaatcgtctggacgtgctggaagcgttgatggagtttattgtcgaacgcgaacggctggacgatcctttcgaaccagagatgattctggtgcaaagtaccggtatggcacagtggctgcaaatgaccctgtcgcaaaagtttggtattgcggcaaacattgattttccgctgccagcgagctttatctgggatatgttcgtccgggtgttaccggaaatccccaaagagagcgcctttaacaaacagagcatgagctggaaactgatgactctgctgccgcaattgctggagcgcgaagactttaccctgttgcggcattatctgactgacgatagcgacaagcgaaaactgttccagctttcctcaaaagcggcggacctgtttgaccagtatctggtctatcgtccggactggctggcacagtgggaaacaggacatttggttgaagggctgggagaagcacaggcctggcaagccccgttgtggaaggcgctggtggaatatacccatcaactcgggcaaccgcgctggcaccgcgccaatctctatcagcgctttatcgaaacgctggagtccgcgacgacctgcccgccggggtaccttcgcgcgtctttatatgcggcgattcaacatgctctggcgtcggtgcgtgaacataccacgctggtagtgattgctcaccgcttatcgaccattgttgatgccgacaccattctggtgcttcatcgtgggcaagccgtggagcagggcactcaccagcaactgctggcggcccagggacgctactggcagatgtatcaactgcaacttgcgggcgaagagctggcagccagcaaagggcatgccgagctgtaccggggggcggaatacagcgtcaatttcctgccaaaagtaaaaatcgatgtggcgattgctgatgaccaactcgatgaagtgatcgatatcgtcagtaaggcggctacaccggaaaaattggcgacggcaaatcttcgtcgcatgaatgcaacggtaccgagctga

SEQ ID NO: 24244 - DNA, 2094 bp, Homo sapiens
  SIMILAR (1391)..(2086): 991254mologous to Escherichia coli K12 putative dehydratase,accession number AE000370,Smith-Waterman Score=1207.
tgattgctcaccgcttatcgaccattgtgatgccgacaccattctggtgcttcatcgtgggcaagccgtggagcagggcactcaccagcaactgctggcggcccagggacgctactggcagatgtatcaactgcaacttgcgggcgaagagctggcagccagcgtgcaaccattaccgaattctgaccggaggggatctatgaagctggtgaccgtgataatcaaaccattcaagctggaagacgttcgtgaagcgttatcttccattggtattcagggcctgaccgtcaccgaagtgaaaggtttcgggcgtcagaaagggcatgccgagctgtaccggggggcggaatacagcgtcaatttcctgccaaaagcggcttacaccggaaaaattggcgacggcaaatcttcgtcgctgaattgcaacgcgtcattcgtattcgtaccggcgaagccgacgaagcggcgctgtatctctggcacacagcaacagaacgagatggtccgttccggaattttacggccggggcatttcgggcctccctaccccatcctgcccgtcatggtcggagaccaattttggctgcaccctttatgcccgtcaatccttcaaggcttcctccacgccgacggcatttggcgtccggtagatcgcttcgatttaattgctgtacagcaggcgacgaaacctgttctgcgcgcagcggggagcgtcgtagcctggtattttgactttggttttgcgggttttgttattgcctggtacgtgtcgaatctggttggcggcaccatgtactggtggtttgccgcgcgcgaattacgccgccgaaatatccataacgccttcaaattgaatctgtttgagtctgcccgatacattaaaggcgcgtggagttttgtctggtcaaccaacattgcccactccatctggtcggcgcgtaactcgtgcagcacagtgttggtggggatcgtgttaggacccgctgccgccgggttatttaaaatcgccatgacattcttcgacgccgccggaacgccagcgggtttgctgggtaaaagtttttacccagaggtgatgcgtttagatccgcgcaccaccagaccgtggttgttaggtgtgaagtccggtttactggcgggcggaatcggtattctggtggcgctcgcggtgttgatcgtcggcaagccgctcatttcgctggtgtttggcgttaagtatctcgaagcgttggccagcgtgaataacatcgccagttggttatcgtttttcagcaaccccttgtatctggctttcacgaagccgaactgtcgcttgatgatgcgaaatgggtgctccaacctggcccggatgctggctttcatgattcatgtatggccgggccaggtattaccgctttatgcgctggacgatctcgcaaacctttttggtgtgaagaaaattctcgtcaaagacgaatcaaaacgattcggtctgaacgccttcaaaatgcttggcggtgcgtacgccatcgctcaattattgtgtgaaaaatatcatcttgatatcgaaacgctgtcatttgagcacctgaaaaatgccatcggcgaaaaaatgactttcgcgaccaccaccgacggcaaccacgggcgcggtgtggcgtgggcagcacagcaactcggacagaatgcggtgatttacatgccgaaaggttctgctcaggaacgcgttgacgccattctgaacctcggtgccgagtgcatcgtcacggatatgaactatgacgataccgttcgcctgaccatgcaacacgcgcagcagcacggctgggaagtggtacaggacacggcatgggaaggttacaccaaaatcccaacctggatcatgcaaggctacgcaaccctggcagatgaagccgtcgagcaaatgcgtgaaatgggcgtaaccccgacgcacgttctgctgcaagccggtgtcggagcaatggccggtggtgtgctgggttatctggtcgacgtctatagcccgcaaaatctgcacagcattattgttgaacctgacaaagctgactgtatttatcgctccggcgtcaaaggcgacatcgtcaaccgttggcg

SEQ ID NO: 24245 - DNA, 1164 bp, Homo sapiens
  SIMILAR (703)..(1161): 981254mologous to Escherichia coli glutamine synthetase activity regulation protein,accession number U82664,Smith-Waterman Score=743.
atgccgccttctttcggccacaccacgtcaattggcgtacccgcctggcgtgcaacgaaagcagaaccgttccagatcatgccgaggttaacttcgccttccatgtacgggttcgccgggttatcggagttaaaggctgccacgtttggcatcagttttttcagctcgttatatgcagcttcaatctctttcgggatcgttggtgttacccggagtagccccagcttacgcagcgcccatctggaacacttcacgggcatcgtcggtcaacagcaggctgcctttgtactctggcttccacagatcggcccagctggtgacagatttcggatccaccgcatcaccgttaacaccaatcgccgtcgcaccccagatatacggaatggagtagtcgttattcgggtcaaaaggcttgttgagcatgtctggatcgagattgctgaaggagggagggagagagggcaaacagtggtttacactgtggcccttgcgttaaggttattcgggggtaatccgtttgttcccttacccttgagcccattggttactggcagccggacagactcacacacgtggcgccaggacgttgcagatgacaaggcactgcgggaagactggaaccagcggcgtaagagaatcatgggccctgatagcgcaaatttcatcgtgggccaaaatgtaacgcactgggcactgtcatatgcgttttcattttcaactgtcttaacttcctgctctctttctcgtttttcatttctggcacaccgcttgcaataccttcttcgtgtagcagaaccattaccgaattctgaccggaggggatctatgaagctggtgaccgtgataatcaaaccattcaagctggaagacgttcgtgaagcgttatcttccattggtattcagggcctgaccgtcaccgaagtgaaaggtttcgggcgtcagaaagggcatgccgagctgtaccggggggcggaatacagcgtcaatttcctgccaaaagtaaaaattgatgtggcgattgctgatgaccaactcgatgaagtgatcgatatcgtcagtaaggcggcttacaccggaaaaattggcgacggcaaaatcttcgtcgctgaattgcaacgcgtcattcgtattcgtaccggcgaagccgacgaagcggcgctgtaa

SEQ ID NO: 24246 - DNA, 2661 bp, Homo sapiens
  SIMILAR (2661)..(1591): 981254mologous to Escherichia coli inosine-guanosine kinase,accession number D00798,Smith-Waterman Score=1835.
ctaaagctctctgcgtgtcagcgcacccatggttttcagttcatcacccgcccaggttgccacttcttcactgtgtgtgatttccggtttgtacagcacgtaggaaagccacggcgcaatgataagcaagataaccccaaccggcaggaagcagaggaaccactgcaaccagctaatctggataccggcaattttgctgacgaactccagacccagcacgtttggtgccgcaccggtgacaaacatggacgaactcagactggtactaatgaccatcatccacatcaaatagccgccaatacgacgcgcggacggatcgttcgggaatgatttaaacaacggcggcaggtttttaatgaccggaaaaaccgtacccccggtacgcgcggtgttggaaggtgtaaacggtgccagcagaatgtcgataatgacaatcgcataacccaacgtcagcgtgcgtttgcccatgaatttcaccaggaaaagggcaatgcgacgacctaacccggaaacttcataccctaatgcaaaaataaatgcgccaaataccagccataccgtggtgctggaaaaaccagccaggccccatttcagcgcctgtttttgcgcattaaacgctgggtcagctaattctttggcatcaaagagcaggtaattactgccaataacgcaaatagtaaccgcaataaaactgatcgctgttgccggaattggctcgaggatcatgccgacaatcattgccacaaacacagcgaagtaatgccatgcctgcggcggcataccgtcggggacagggataagaaacatgacacccatcaccaccagtggggccaatagtttccatatattatcttttggttggtatcgccgttgatcgccatcagtaggagcaaggtatcgacccacggtctgcgccagcgggatttcatactcctgcgcgaggcgagtcagagttttcgctttgtactgcgcgtttacgatgtcgccgatcacattgccggtaaatttaccgtccatgatctccagttcattggctaccacggcggtcaggcgcagcttgtcgcgcaggtattcagcaaagaaagtaaagccgccggaggcaatcgccactttccagcccagcgtttccagcttgagcaccagttgcgttaagcctggcatcagcggcagattttcacgcacctgttgcagaatattggcgtcagcgcctttcagcgtcgccacacggctgcgcaggctggcggtaaaatcgagttcgccgcgcatcgcccgttcggttacttccgccaccatctcgcccgttccggccagtttggcaatttcatcaatacattcaatctggatggcggtggagtccatatccatcaccagcaaacccggcgtgcgcaggtgcgggattttccccagcggggcgacatccagctgcgcttcgtgggccaggcgtgtagcccgtgcggtgagtgaacctgccagacgaatcacctgataatcttccacgcaccaggcggcaacaatcaccatcgccgcacccagtttgctctggtattgggtcagacgttgtttatccagcccacgaccatacagcagccagccgctacgacccagtatgttgcatttttccggcccgcccatgtacggcgcaatgtgcgaatatacacgcagcggattctggcaatccttgtggcgcatggcgcggctaaactcatactggttgaattccgctatagcgcccggcagcagcggatgctgggttttacgtttcgcttcgtcttcggtaaagcccgccatatacaagccgattggcccggcggtgcacagcaccagatctacccagtccagcgccttgtcagatgccaacaacggatcgctttctccggtcaacgcttcggcttcatcttcgttcatcgcaaggatagagacgtgatctttgaggaattgctgccaccactgcggattctcggcaatgacaaacttggtgcccagcgtcagcaccaccggtacgttatatttcttcgcgtactcaatggctttcatggttgcttccggcatgggttcacccggcttgcaacgcaccagatatgaggtgagaaccagtgccgaggctccggcaatcacatcttccggaatgctttcagcccgcagctggttcatgtggcctggactgatagcaaaggtacgttccccggactcgccaatcagcgtaaagcaacgaccaatcgggccatccacgccttgtagatagttaagatcggtacggctggaagtgttacacaggtaacgataggcataactgccaatttcaatattgctgcacatgacgcccagcagcaccgaacggtcgtccgcgagcaccgagtagttgtgcatggtgttaccaatggtgccacccgcaaactgatgggtaatcaggtttttctgttttagttcctgataaagcgcttcggctacatcatcctcaatcaccagtgaatgcccggcgcttaatccataacgctcaataaattcatcatccactttcgcttcaatatcgaccagcgtttgatcgatacccactacccaggcagcgctggtttcgttttctggctggaattgctgaagcagcggatcgcgtgcgtttacggggaagtaatgtttggatttacgtttaccgggaaatttcat

SEQ ID NO: 24247 - DNA, 1264 bp, Homo sapiens
  SIMILAR (660)..(4): 1001254mologous to Escherichia coli gut R protein (AA 1- 257),accession number X13463,Smith-Waterman Score=1106.
tcactcattgctctctccggttatgatcacatcgatccctttctcttccagcgcctgacgaaacgccggatcgatacctgcgtcggtaatcagcttatcgacgctttcaagactgcaaactacgttggggcttttacggccaaactttgatgagtccgccatcaaaatcacttcgcgcgcggcattgcacattgccttactgacggtataaacctcgttaaaggtggttacgcccgcattgagatcgatgccgtcggtgcccataaacaatttatcgaaggtgaaatgctcgaaggcattctctgccagttgcccgtgaaatgaggccgattttttgcgaaacgttccgcctggcatcaggatagtttgttcgttatccagttcggatagcgcattgacgatatgcaggctgttggtcatcaccgtgatgttattaaagcgcgagagcaggggaaccatctgcaaaacggtactgccagcatcaagaatgatcgaatcgccatcatggataaaactaacggcagcttctgcaatcagctctttcttgtgggtgttgatgagtgttttatgatcgataggcggatcggattcctctttattcaacaccactccgccataagtacgaatgacggttccggcatgttccagaatgaccagatcgaagcaggggtagttgacaaaaacccgtagcggtgtcgccacgataggcgcgacacgccttatagcccaatggtctcctcctcgaggagatgctggatctttcgtaatgtatggggactccacaccaatgttggatttttctgtttgaagcagagataaaataaggacataaatccctgacggccaagcccacagttgtttattttcaatagtgacccgtaaaacaggcgaagccttcgccgccgggctggcacctgactgtgcaataaccgtacatacccaggcagatacgtccagtcccgatccgttatttaatcctctaaaaactggcgtttgccaactggataacgcgaacgtgactgacgcgatcctcagcagggcaggagggtcaattgctgactttaccgggcatcggcaaacggcgtttcgcgaactggaacgggtgcttaattttccgcaatcaaacttgtgccttaaacgtgagaaacaggacgaaagctgttcattaacgcaggcattaccatcggaactcaaggtgagcgccgacaatgtctcattaaccggtgcggtaagcctcgcatcaatgctgacggagatatttctc

SEQ ID NO: 24248 - DNA, 1635 bp, Homo sapiens
  SIMILAR (1024)..(1632): 961254mologous to Escherichia coli K12 putative permease,accession number AE000443,Smith-Waterman Score=1012.
atggtttcaacctttcttagatcttgtgggggatcctatagagtcgacttgcaggacagcaagctcgacggcttgttcgacttaagtaccatgaatgatgctgttaggctggaatgcgccaagcataaaggtggggcatggcatcaaaaggaacccaagagggagccgatcactgtgggggaaggactactgggactgcgacaagttccaggaaccacgctctggcaggacaaagcagtctttacctgcagcatagcaccttctcgggggtgccggcccggctgcatccagacagacccactgcgtgcctgtctccacactaggaccatcggggaccagcaactgacatgtggtggaaaccctacggccctggagcccaaggagagcaacggctgtaacaagtgcacaggtgaccctgggcaaatcgcacaggctcctggaacttcagaaaggggaagaattattcctgcctctggcgacatcagcgaatgtgccttgagttacgggagtgttttgaaggctgaaagctttgtgtacatggaaggggtcaaagacagccacaagcctgtccctttggtcttggtcatcatgttaaccccaggtttcgatttaatcctacatgctcctttcttatgtgtgaggctgagccagggtggcatcctcgtcagcagtcgcacctgccaggccatgccacagcttgtgccacttggcctgtctgttattcacacacgtctgttgcactgggcaacaacccctgtgctgtataccccacacttcaatcagcccttgccagcgaccatccacccatttctgcccagctgggctgtcaatcagctgcaagcaggcccagcaaccagcatctgccacattccaccaaccagattgctgccagacctagcacatggctgcacatggccgcccttgcatgctggctgcctggagaaactcaaaatttctgtgacacaggcctcttgtacattgcaagtgggagtacacaatggttacaacctccatgagggaggaattttggcaacgccggaaatgtttgtcgcttttctcaccacttattgcgtgggtaccctgattggtcccgcactggcaaaacctctgaccgactggaaatgtaaagtcactatcttttggtggacgaacgccctgctgccagtgattagcctcgcgatgttctttgttcccatgcaggccagcatcactatgtttgtcttcatcttcgtgattggtgtgttgcatcaactggtgacacgtatccagtgggtaatgatgtccgataccgtcgactacggcgagtggtgcaatggtaaacgcctgaccgggatcagttttgctggcacgctgtttgtgctcaaactggggttggccttcggcggcgctcttatcggctggatgctggcttatggcggatatgatgcggcagaaaaagcgcagaacagcgccacgattagcatcattattgcgctattcacgattgttccggcgatctgttatttgctgagcgcgattatcgctaaacgctactactcactcacgacgcacaatctgaaacccgttatggaacagctggctcagggtaaacgccgttgccagcaacaattcacctctcaagaagtgcagaactaa

SEQ ID NO: 24249 - DNA, 3024 bp, Homo sapiens
  SIMILAR (2949)..(2305): 1001254mologous to Escherichia coli Adhesin AIDA-I precursor,accession number D90809,Smith-Waterman Score=1097.
tcaaagccttcccgggtctgcgactgccagcatctcctgtttcacttcgtcagaaatggttggcgtgcgggagagtatccacaggtagtcgcggtccgggccggaaaccagcgcatggcggtattcccgatcgagtgcaataacgttataaccgccatagaaaggaccaaagaatgacactttcagcgcagcgcgagttggtgcgccggtaaagtacgctttcccttcactctgctgccacattcctctgtcagggttatagcctttattaatgacattcaggccgccgtcatcacgcaggctgtatgttgcggtgactttttccagtccacgttcaaagcggtgatcaaaacgggcaatctcataccaggtaccgagataacgtttggcgtcgaaattatttactacggtcacgccacgcggcggcgtaggagaactgcaggcaacgaccagaaatgcagctgtcgctggaataaagcggaaaagatcaaaccgagggcgaccagcagaagaaccagagctgaccgcagacagaggacaaggagaaaacgagataacggaagctgccacggcagcgaaggcccggcgcacgatgcggccgaaaaccggcaaccaaaatccagacaaacaccgcacgcgtggcttgcagatttgccacaccttcaatgcgaatggcaaccgcgcccgctgttctgccgctaatgccatggcggcgacgatttcgggtttatcgagcgggctgtccggaaccggctggcaggagacaatcaggccaccgttagcagcgattttttgatccagttgtgcaagtaacgacatacatcttcctaaatcgtttttggcgctgccaaacggcacggcaccgctgaatggtttaccgtcgatagcgtcatgagtacgcaacgcttccgggcgcgaccaacgctgaacgcgagaaggcatatccagcccaatcagcaggatcaccacgaacgtcagactgaacgagagcgatgccagcgcagtacccagatccagacgttgagcgatcaacgcgccgatgattggggccagtgcaccgcccaatgcgccaacgttgtaggtgaagcccaggcccgctgtcacgccggtttctgattgcgtccatgacattttgctgttttcgccttcgcacaaagcacgcttggtgacgaagttgagaataccgccggtgttgttatcgccaggaaaccagttttgtaccgtggaatatttcacctcggcgtttttatggatgatgacttccaccactgccgcgtgtaactgatagctgtcacgcaccggagcggaacagccttcaatgtagctgacgtagctgtcttcgtcggccaccagaatggtgcgctcaaactgcccggttttttctgcgttaatgcgaaaataggtggaaagttccatcgggcagcgcacgctggtcatgcgtacgacgtcatcaaaccatttgtcggtggcggttttggtaataaacagtgatgtactggaatgagccaatggcggcattcctgaccagacaagcttgggggcattccggtgaaagtttcccttagccgtgaagagtgtttcctcgcaacccgtacccggcacgcttttaccattgacgggcaaatgggcgtgaaccgtgacggaacattgaaaggttatagtctggatgttctgtctaacaccggcgcttatgcatctcacgggcactccatcgcttcgcgttgcggatcgtagccgctgaccatcgccccttcctggcgggatgatgtcgctgccgtataacgcatcgtacagtgagccccagcgagcgttcgccgcgttcagcgcgtagcgggcgttcattgccggaaccaccagctgcggccccgcctggctggtgatttcgctgtcaatgcccgtggtttccaccgtcacgcgctccggttgcggcaccaggtagcccagttcacgcaggaaagatttataggccgctttatcttttaccggccccggattgctgcgatgccactcatcaagcgctgcctgaatgcgatcgcgttctgccagcaactgacgattttctggtgccagatcatgaacgatctcatcaaaattgcgccagaacgccgcagcgtccagccctgttcccggtaaaacttcttcatccacaaaacgtttaaaattggcgtcaatgcgtaaacggctcgctttgcacgtgggaatgactctagaggatcccccttcgtctggctgtaatttcagagcgttacacagagtttgccgactggcatctgttatctcaacgtgtatatccccggtaacttccccggcatgcacttcagcccgaccacccacattcacggacaggttttgcgtcttaccggaactgtagagctgaaggccatccgtccccagacgataaatggatccattctcaacaatagtgtcagagtcttcaccaccgagattattcatggtgccaccagcaagcaacgtatcactggctttcccggccagcataaaaacgccgccctgattaatctcacaattgctggcttccccacctggatacaccaacaattcaccaccttcatctaccacgaccgctgaggttgtcccattaaccaacaggccgccctcttgatcgagaatgattttttccgcgcgatgtccttccagtacacgcaggttaccgccattttccagcaacaaaccgcaggcataacctttatcaacgctgaattcaccttcgggatggcggccattaaccgtagcgagcgtagagagactaattgcgcctccctcggactgaacaatatctgtggcaatggcaccatcgctgaccgatagcgtgccattgttaccgtactgtgtgcatttggcgatcccaccggttgccactttcaaccagccagcccccgtgaccacggtattttcggctcttccgccagcttcaacaatcaactcgcctcgccgtctaacactgtagcggtgcgtttccctgggactctcttcctcatctacagtagcaggcttttgcatcat

SEQ ID NO: 24250 - DNA, 1008 bp, Homo sapiens
  SIMILAR (531)..(4): 371254mologous to Escherichia coli O157:H7 putative outer membrane protein,accession number AE005365,Smith-Waterman Score= 332.
ttatataaacgacccatttccgccccacatattacaggctccgtgtgggaaagaattattgatgttcatgtgaccggtattataaagcgtaccggactggttgatgtgcacagcattcttgtcgttatcaagaataaactcgccgcggttattgaaagctgaattattattaacttccagcatcccggtgttgttaccctcactactacttccgaggttccaggttccttcgttatttgccactgcagtacctgtcagcgcagcacctctcataatcgccccgtcagtttgattattaaagaccccgccagccgacatcatccgccctgttacactgccactattattgaatacccccgcgttctgcacgattttattgatggttccggtgttgttcactaacgaactatcagcaccagcattcatggtaatttgcgcagtcatttctccggcattattgaggattccaccgctaacatcgacgttattcgtcatcaccccggcatttttaatgacggcacccttgtcaagttttactaagttattgatgatgccaccgctggtattttccagaagaccgcttgataccgtaatttgatcaccggaaagcgttccgctattaacggggatcctatctacaacgaactggtgtggaacgtgctcaaggacaccgctggtgaggaagaagctgtcttgtttgcccgctcgggctccgccgttgcgcagaaaatccagtgaccagaactcacctttgctgacacgcgcgcttaagatgacatttcgttcccccatatggaaagatagcgtctttacgtcatcacgtatgtagtttttgacattacttgtatggtgccatttacttttacctatggattgtacgctcattgaagttatgttgttgatcccatccccctcgtcatacaagttgcgccgcgttaagtcaggcatgctctggtaactccttttcatgtgccatcgatatatgatgcagccattttccaaagccat

SEQ ID NO: 24251 - DNA, 1065 bp, Homo sapiens
  SIMILAR (388)..(1062): 961254mologous to Escherichia coli f772,accession number L10328,Smith-Waterman Score=1192.
atgtgggggatcggtaatatcaactacggcctgaccatgcgttatctcggcatgtcgatgggaattggcatcgccattggcattacgttgattgtcggtacgctgatgacgccaattatcaacggcaatttcgatgtgttgattagcaccgaaggcggacgcatgacgttgctcggcgttctggtggcgctgattggcgtagggattgtaactcgcgccgggcagttgaaagagcgcaagatgggcattaaagccgaagagttcaatctgaaaaaagggctggtgctggcggtgatgtgcggcattttctctgccgggatgtcctttgcgatgaacgccgcaaaaccgatgcatgaagccgctgccgcacttggcgtcgatccacttcaggtgaaaaataatggctacgtgcaggacacgaataatcaacgcaattatatgtttgagcggcttgatcttggcgttggcgaaacagtttacggtctgggagagcgctttactgccctggtgcgcaatggccagacggtagagacctggaaccgggacggcggcacaagtactgaacaggcgtataaaaatatcccgttctacatgactaaccgtggttatggggtactggtcaatcatccccagtgtgtctcttttgaagtgggatcggagaaagtctccaaagtgcagttcagcgttgagagtgaatatctcgaatactttgttatcgacggcccgacgccgaaagcggtacttgatcgttatacccgctttactggtcgtccggcgctgccgcccgcgtggtccttcggcctgtggctaaccacttcatttaccaccaactacgacgaagcgacggtaaacagctttatcgatggtatggcggaacgcaatctgccgctgcatgttttccactttgactgtttctggatgaaagccttccagtggtgcgattttgagtgggacccgctgactttccctgaacccgaaaggatgatccgccgcctgaaagcgaaaggactgaaaatctgcgtctggattaacccctttattggtcaaaaatcccccgtcttttaa

SEQ ID NO: 24252 - DNA, 3222 bp, Homo sapiens
  SIMILAR (362)..(276): 371254mologous to Escherichia coli No definition line found,accession number U00039,Smith-Waterman Score=42.
ttaatcccgatgcttaaagagatgatccgccacgctggcaacagcggcacccgcgaagtggttctcgggatggcgcaccgtggtcgtctgaacgtgctggtgaacgtgctgggtaaaaaaccgcaagacttgttcgacgagttcgccggtaaacataaagaacacctcggcacgggtgacgtgaaataccacatgggcttctcgtctgacttccagaccgatggcggcctggtgcacctggcgctggcgtttaacccgtctcaccttgagattgtaagcccggtagttatcggttctgttcgtgcccgtctggacagacttgatgagccgagcagcaacaaagtgctgccaatcaccatccacggtgacgccgcagtgaccgggcagggcgtggttcaggaaaccctgaacatgtcgaaagcgcgtggttatgaagttggcggtacggtacgtatcgttatcaacaaccaggttggtttcaccacctctaatccgctggatgcccgttctacgccgtactgtactgatatcggtaagatggttcaggccccgattttccacgttaacgcggacgatccggaagccgttgcctttgtgacccgtctgtatccacaatgccatcagcgggatgttccgtgcagcgcaaatcactacgcgctcaccgttaacctgcgcttcaatgccagacccgaccagcgcccgctgtgattcggcggtgggaatggcgagttcagcaacctgtgcttcgcgtacgatggcttgcgccagtggatgcgtcgcgccttgctcgaccgccgccgccagtgtcagcagttcagattcactaatacccgttgccggatgaatcgcggtaacgcgcggtttaccgacggtcagcgtaccggttttatcaaacgccacctgagtaacacgacccagctgttccagcgccgctccgcctttaatcaacgccccacgacgcgctgccgccgccagcccggaggtaatcgccgcaggcgttgagataactaacgcacacgggcagccaatcagcagcagcgtcagccctttataaatccactcctgccagctggcggcaaacagcagcggtggcaccagcgtcaccagcagagcgacggccataatcgcgggcgtatagatacggctgaaacggtcgataaaccgctcaatgggagcgcgacgctcttcggcttcttcgatcagtttcagaatccggtcaatggcgctggctcccggttctgacagcacttccaacgtcaccagacggtctacgctggtggcaccagcagggactttatcgcccgttgcgcgctccaccggaatggattcgccggtcagggcgctttcatcaaaactggcaaacggtgagagcagtttaccgtcggcaggcaaacgcccacctgcggcgacttcaatcacatcgccagggcgcaggctgttaatcgccacctcttcccgctcacccttacgcaggcgcgtggcggtttctggtttcagcgccattaacgcgctaacgccctgacgcgcgcggctggcggcccagccttccagtcgttcaccaatcaaaaacagcagcaacaccatcgcagcttcagccgttgcgccaataaacagtgcaccaatagcggctacgctcattaaggtttcaatggcgaagtagctgccggatttgatcaaccgtaatgcctgatcgagcaatcgggtacagcccaaccagcgtggtcgcgataaacgccagttgcccgaacggatgattgaatttttcgtgggatgagctaaggctttcagcttttttagatacataagccgcgtttcaagaaatcgaacttgcctttcaagatcctcaatgcgtcggtcttttgacagctccaatgctgatgccgctttttctggatcaactgatattgcaatgtttcttttggtgccaatcttgagcgcgcgtaaaccagcttctccgcgctcttcatagaccttcagccacctggctacagaaccactaccagcaagcataaagtgagcagcagcctgattaagggacatgtgctgctcgatcacagctttcacgaccttaatacgcaactctggatcagcactaacgcctttaggtttgggaattaaacctttttctccatgtttttcatagagggcaacccatgtcctgacctgggttcgggggacaccaaaacgtgccgagatgatcttaaagcagcgattaaggtcaagcgataccgctcttacagaggagaggtagggcaaaccgcccctaatgttctccaaagagatttcaaggctacgcggccaaacgagaagtgggttaccgatgttactgaatttgcagtcaatgggcgcaagctgtatttgtctccagtaatagatctcttcaacaacgaagttatttcttacagcctttcggaaagaccagtgatgaacatggttgagaatatgctcgatcaggcattcaaaaagcttaatcctcacgagcatcctgttctgcactctgaccagggatggcagtatcgtatgagaagatatcaaaatatcctcagctacagccggttcacggcgcgcggctgaaacaggtccgaccctggcgctgggcacttgtccggcgagggcttcacgcaccggaacatctttgccatgcagctctgaaaactcatcaatgtaagtcatgctggtgaagtgcgtccattcgcgttcgaacggatacaccgggatctgaatcagatctttacgctcgaccagatagttgaacagacgcaattccatcggtgaaatcacatcttcggcgtcatgcagaataaaaccagcaaaagcgaaattggcgctacgctcaaattgggtgatggcgtccagcacgttgttcagacagtcggctttgctggtggggccaggacgcgcgcagactaccttatgcacattcgggaagcgagcgcacacttcgtcaacatcacgctgagtatcggggtcgttggggtaggtgccaacaaagatatgatagttttcgtagtcgagcgtggtcgccgccagctcggccatattgccgatgacgcccgtttcattccacgccggaaccataatcgctaacggtttttcatctggtttatacagttcgcggtaactcattcgcgggtagcggcgataaacactcaacttgcgtttaatgcggcgtacccagtagacgacatcaataaaaaaatcgtccagcccgctgatgaacat

SEQ ID NO: 24253 - DNA, 2050 bp, Homo sapiens
  SIMILAR (1197)..(4): 1001254mologous to Escherichia coli yejF,accession number U00008,Smith-Waterman Score=1991.
tcagctcaacgccagtagctgacgcgtatactcctgctgcggtgtggcaaacacgcgcgcgcacggtccttgttccactacttccccttgtcgcagtatgataacctgatgacataacgcgcggacaacgtgcaaatcgtggctgataaacaaataggccagttgatgcttttgttgcaatgatttcaatagcgtcaatatttgcgcctgtaccgttttgtcgagtgatgatgtcggttcatcaagtatgatcagcgagggcttaagaattaatgccctggcaatcgcaatacgttgtcgctgaccaccagagaactccgccggataacggtggcgtgtttcaggatctaatcccacttcatgcatcacggctatcacttgttgttcgcgttgtgcggcagaaagcgtcggctggtgaacccgtaagccttcctcaataatctgcaaaacgttgagtcgtgggttgagcgaggagtttggatcctgaaataccacctgaatgcgatgacgaataggtaacagctggcggcgatttaaattttgcagtggctgaccgtcaaagatgatgctgccctgagaattaatcagtcgcagcagcgccagtcccgtcgtacttttcccggaaccggactcgcccactaaacccagtgtttcacccgctcgtagcgtaaaactgatgtttttcaccaccacattatgatccacaatgcgcttcaaaatccctttgcgaatggggaaggcaacctgaagctgttcaacatccagcaacgttgaggcaggttctggcaacggcactggatcgcctgacggttcactgttgagtagcttttgtgtgtaaggatgagtgggtgatgcaaatagcgtagcggcgtaattttgctcgacacagcgaccgttttgcattaccgccacgcggtgggccagttttctgacaatgctgaggttatgagtaataaacagcatgcccatattcagctcgccttgcagttcgcgcaacagctgtaaaatctgcgcctggacagagacgtccagtgcggtggtcggttcatcggcaattaataattccggtcgcgttaacagcgccatcgcaatcatcacccgctgccgttcgccgccggagagctgatgcggataatctgtcagccgttttgccgcctggcggataccaacgcgatcaaggcagttaagaatttcgccaggtaccgagatcgagtcgtatcaaaccaaccatatacgactcgagctcggtaccccacctgggacctacttcagccccaggatgtgatgagccgacatcgaggtgccaaacaccgccgtcgatatgaactctgggcggtatcagcctgttatccccggagtaccttttatccgttgagcgatggccttcgcttaaacgttgcggatgaacggcgacgatttcacgcccttcctgatacgccagcgcaataatgtcggtgatgtagtattcgccctgagcattattgttggtcagcttcgccagccagcgtttcatatctgcgccgttggcaatcagaatgccggtgttgatctcctgaatctgacgctgctcgtcggtggcatctttgtgctcaacaatgccggtaactttgccgttttcacgggtgatacgtccataaccggtcggatcatccagtttcaccgtcagcagaccaatgccaccctgcggtttagcatcacgcagacgctggagtgtttcgacagagatcagcggcacgtcgccgtagagcattaaaatgtcttcatcatcggcaaagaaaggtgcggcctgctgcattgcatgacccgtacccagctgctctgcctgaagcacccagttaaggttgtcgtctttcagcgcctgttttagcagatcgccgccgtgaccgtacaccaggtgaacgtgcgctgcgcctaattcattcgcagcatcaatgacatgctgaaccatcgctttcccggcaagggtatgcagcactttcggaagatcggaatacatgcgcgtgcctttgcctgcggcaaggatcactacgctcatagcattattcaacat

SEQ ID NO: 24254 - DNA, 5976 bp, Homo sapiens
  SIMILAR (2197)..(2847): 841254mologous to Escherichia coli K12 putative permease,accession number AE000443,Smith-Waterman Score=939.
  misc_feature (1)...(5976): n = a,t,c or g
atgaacgaagataaagccaaagcgttgaccgaagaaaacgatgcgttgttggcatctgacaaggcgctggactgggtagatctggtgctgtgcaccgccgggccaatcggcttgtatatggcgggctttaccgaagacgaagcgaaacgtaaaacccagcatccgctgctgccgggcgctatagcggaattcaaccagtatgagtttagccgcgccatgcgccacaaggattgccagaatccgctgcgtgtatattcgcacattgcgccgtacatgggcgggccggaaaaaatcatgaacactaatggagcgggggatggcgcattggcagcgttgctgcatgacattaccgccaacagctaccatcgtagcaacgtaccaaactccagcaaacataaattaacccgggttaacctattcatcgtttgcgcagggggtgtaaatatgctaaccgtgtgagctatcagctttggggtataggcggtactatgtctcgtaatactgaagcaactgacgatgtcaaaacctggaccggcggcccgctgaattataaaggaggattcttcacccagttagccaccgatgagctggcaaaggggataancgaagaggtggtgcgcgcaatttcggcgaagcgtaatgagccggagtggatgctggagtttcgtctaaacgcctatcgcgcatggctggagatggaagaaccgcactggttgaaagcgcactacgacaagctgaattatcaggattacagctactactcagcaccatcgtgcggtaattgtgacgacacttgcgcgtctgaacctggcgcggtgcagcaaactggcgcgaacgcctttttaagtaaagaggtggaggcggcgtttgagcagttgggcgttcccgtgcgggaaggcaaagaggtggcggtggatgccattttcgactcagtttcggttgccactacttatcgcgaaaaactggcggagcagggaattattttctgttcctttggtgaggcgatccacgatcacccggaactggtgcgtaaatatctcggcaccgtggtgccggggaatgacaacttctttgccgcgcttaatgcggcggtagcctctgatggtacgtttatttatgtgcctaaaggcgtgcgctgcccgatggaactttccacctattttcgcattaacgcagaaaaaaccgggcagtttgagcgcaccattctggtggccgacgaagacagctacgcggcaaaacggctgacagattatccgcatcagctctccggcggcgaacggcagcgggtgatgattgcgatggcgctgttaacgcgaccggaattattaattgccgatgaaccgaccaccgcactggacgtctctgtccaggcgcagattttacagctgttgcgcgaactgcaaggcgagctgaatatgggcatgctgtttattactcataacctcagcattgtcagaaaactggcccaccgcgtggcggtaatgcaaaacggtcgctgtgtcgagcaaaattacgccgctacgctatttgcatcacccactcatccttacacacaaaagctactcaacagtgaaccgtcaggcgatccagtgccgttgccagaacctgcctcaacgttgctggatgttgaacagcttcaggttgccttccccattcgcaaagggattttgaagcgcattgtggatcataatgtggtggtgaaaaacatcagttttacgctacgagcgggtgaaacactgggtttagtgggcgagtccggttccgggaaaagtacgacgggactggcgctgctgcgactgattaattctcagggcagcatcatctttgacggtcagccactgcaaaatttaaatcgcccggtaaagtcagcaattgaccctcctgccctgctgaggatcgcgtcagtcacgttcgcgttatccagttggcaaacgccagtttttagaggattaaataacggatcgggactggacgtatctgcctgggtatgtacggttattgcacagtcagggatggtttacaaaatgcgttatcggtctcagcacccctatagcatcaaggaaaagcagatgaagagtgaagtgttgtccgttaaagagaaaattggttatggcatgggagacgccgccagccacattattttcgataacgtaatgttatatatgatgttcttttataccgatatttttggcattcctgccggttttgtcggaaccatgtttttggtcgctcgtgcactggatgcgatttccgatccttgcatggggttgttggccgatcgaacgcgctctcgctggggtaaatttcgtccgtggcacgccagatctcagtatgaacggcaaaatgatctatgcagcaattacttacaccctacttaccttactttataccgtcgtcaatatcccttactgcgcattgggtggtgtaatcaccaatgacccgactcagcgtatctcgctgcaatcctggcgttttgtgctggcgaccgcgggaggcatgctttctactgttctgatgatgccactggttaatttaattggcggtgataataaaccactcggtttccagggcggtatcgcggtcctttccgtggtggcattcatgatgctggcattttgtttcttcaccactaaagaacgcgttgaagcaccacctacaacaacgtctatgcgggaagatttacgtgatatctggcaaaacgaccagtggcggattgtcggtttactaaccattttcaatatcctggcggtgtgcgtacgcggtggggcgatgatgtattacgtcacatggattttgggcacgccggaagtgtttgtcgcttttctcaccacttattgcgtgggtaaccctgattggttccgcactggcaaaacctctgaccgactggaaatgtaaagtcactatcttctggtggacgaacgccctgctggcagtgattagcctcgcgatgttctttgttcccatgcaggccagcatcactatgtttgtcttcatcttcgtgattggtgtgttgcatcaactggtgacacctatccagtgggtaatgatgtccgataccgtcgactacggcgantgttttgctggcacgctgtttgtgctcaaactggggttggccttcggcggcgctcttatcggctggatgctggcttatggcggatatgatgcggcagaaaaagcgcagaacagcgccacgattagcatcattattgcgctattcacgattgttccggcgatctgttatttgctgagcgcgattatcgctaaacgctactactcactcacgacgcacaatctgaaaaccgttatggaacagctggctcagggtaaacgccgttgccagcaacaattcacctctcaagaagtgttcgaggttgaacagcaggataatgaaatggtggtctatgctgccccccgtgatgtgcgtgaacgtacctggcagcttgatacgcctttatttacgttgcgctttttctccccacaggaaggtattgtcggtgtgcggattgagcattttcagggggcgctgaataacggtcctcattatccgctcaatattttgcaggacgtgaaggtcacaatcgaaaacacagaacgttatgctgagtttaaaagtggcaacttaagcgcgcgtgtcagcaaaggtgagttctggtcactggattttctgcgcaactgcgaacgtattaccggtagtcaggtgaaaaataatggctacgtgcaggacacgaataatcaacgcaattatatgtttgagcggcttgatcttggcgttggcgaaacagtttacggtctgggagagcgctttactgccctggtgcgcaatggccagacggtagagacctggaaccgggacggcggcacaagtactgaacaggcgtataaaaatatcccgttctacatgactaaccgtggttatggggtactggtcaatcatccccagtgtgtctcttttgaagtgggatcggagaaagtctccaaagtgcagttcagcgttgagagtgaatatctcgaatactttgttatcgacggcccgacgccgaaagcggtacttgatcgttatacccgctttactgcgacggtaaacagctttatcgatggtatggcggaacgcaatctgccgctgcatgttttccactttgactgtttctggatgaaagccttccagtggtgcgattttgagtgggacccgctgactttccctgacccggaagggatgatccgccgcctgaaagcgaaaggactgaaaatctgcgtctggattaacccctatattgtttgcgcttccgctttcacttcctgccagatagcttcatcatgctgcgcccagccgctaaagccccaacgcccacggtgcaagcctggtgcgcgatcggtcgccagcatcgctgcttcaatcagcaacgtaccggaaccacacatcggatcgagcagcggtgttcctggctgccagccggatcgcatcacaatagcggctgccagggtttctttgatcggcgcaataccagcacgatcgcgatagccacgcagatgtaaaccatcaccactcagatcaagagcgatactggcggtttctccgggctggcggcggcagcgcgtcgtggggcgttgattaaaggcggagcggcgctggaacagctgggtcgtgttactcaggtggcgtttgataaaaccggtacgctgaccgtcggtaaaccgcgcgttaccgcgattcatccggcaacgggtattagtgaatctgaactgctgacactggcggcggcggtcgagcaaggcgcgacgcatccagagaacatttcgcgatttataaagattaagtaaacacgcaaacacaacaataacggagccgttatcaaactccagccaggtgaacggaacatccggatattgttccataagatgtaccatgctgttgccgacttcacaaatcaacacgccatcatcagcaaggtaatctgccgcgttaccgagaatgcgacgcgtcagtttcaggccgtcagtgccagatgccaggcccagttccggctcgtggcggtattcgtttggcaggtcggacatatcttccgcatcgacatacggcgggttagtgacaatcaggtcgtactgcactttcggcaagtcgcggaacagatcggaacgaatcggaatgacgttgtggatcagaccgtgttcttcgatgttctgttcagcaaccgccagcgcgtctggagagatatccaccgcgtcgacttctgcatccgggaaggcataagcacaggcaatggcgatgcagccgctaccagtacacatatctaaaatatgctgcggttgcttgcaataaatttgccggagtttggtttttggatttacacggtctgacgcagctgcaggccaagcaggaactgggggcgttgattgccgcctgccgccgtgaacatgtgttttgcgcctgcgtgatgcatgggcacgggaagcatattttgaagcaacaaacaccgctgtggctggcacaacatccgcatgtgatggcctttcatcaggcaccaaaagagtatggcggtgatgcggcgttgttggtgttgattgaagtcgaagagtggctgccgccggagttgccctgaggagttgagcgcgttgcgccaggtacgggtaatggcaggggcgaatgcacctgcgaagctcgaggtgtattctgtcagcggtcgagtgcatcatcaactcaacccagcggatgccgcgaagttgggtgtgaacgcaggtacacgcgtctcctttagttacgatggcaacacggtcacgctgccggttgaaatcgccgaacggatgtaggtgacatgtgggccccacactcgtatgtgtcaagagcaggaaaatcggttgagcacgggaataaagctgcctggggcaattgccgtcccgcgctcgagcaacgcatacaaggtgccaatcgagttcaagaaggccaataatgatggcgtacattaggaccctcggatgcat

SEQ ID NO: 24255 - DNA, 494 bp, Homo sapiens
  SIMILAR (255)..(1): 971254mologous to Escherichia coli K12 putative heat shock protein,accession number AE000226,Smith-Waterman Score=417.
aacttcgccacgcgtacggaacaggtttccgagcgtaaggggggcttcaacggtgcctgtatcctctttaagcatatcgagaaacaggtctaccgctttatcctgttgattactaagcaggaagttaacccccgctacgtaatcacgcgacaagcggttggcttcatcttgcttgttttgttgcgcacttctgcggcccatataccagccataggcagcggctacaggcaaaagcagaaacaacaactccagcatagaaagttattccttcgccgctgacgagtgcggcactacagccacgtcagtcgcgggtgaaagctggttttccagtcgctttattttacgttcagcgcgcgccagggaaacacgaactcgcagccagaacaggccacaaatcaaccaaccgatagcaaaccccgcagcaaacaataccgccagcaatgtggaaatacggtactccccttgcgctaacagataattaaacgtcacctgtt

SEQ ID NO: 24256 - DNA, 1509 bp, Homo sapiens
  SIMILAR (1)..(594): 951254mologous to Escherichia coli K12 orf, hypothetical protein,accession number AE000491,Smith-Waterman Score=1029.
atggcgatgagtaaagtgaaaagtatcacccgtgaatcctggatcctgagcactttcccggagtggggtagctggttgaatgaagaaattgaacaagaacaggtcgctcctggcacatttgcgatgtggtggcttggctgcaccgggatctggttgaaatcggaaggtggcaccaacgtttgcgttgatttctggtgcggcactggcaaacaaagtcacggtaacccgttaatgaaacagggtcaccagatgcagcgcatggctggcgtgaaaaaactgcagccaaacctgcgtaccaccccgtttgttcttgatccgtttgcgattcgccagatcgacgcggtactggcgactcacgatcacaacgatcatatcgacgttaacgtcgctgctgccgtgatgcagaattgtgcagatgacgtaccgtttatcggaccgaaaacctgtgtggattcgtggattggctggggcgtaccgaaagagcgttgcatcgtggtcaaaccgggcgatgtagtacaagtgacagcacttgaaattcatgcgcctgatgctttcgaccgtacggcaccgatcacctggctggccgatcaaaagcggcggcgtaccgtcaaagggaggacgacgcgcccttgtaacaggtcagttaccgtccgtccacgccgccgcgatgctgttattggtcgcttttatcgtcatcagtctattactcaaaaaggccttttgctcatggttatgcccggttgtgcattccctttatggattgactcagaacttaatttaacgttcattgatgctctgtttgaaggggtttctggaataacaacaacaggagcaactgtaattgatgatgttagttcattacctcgggcatatttgtactatcggtcacagttaaattttataggtggtttaggagttattgttctggcggttgctgtattgccattattgggtattggtggtgcaaagctttatcagtcagaaatgccggggccatttaaggatgacaaactcactccccgcctggccgatacgtcacggacactgtggataacttattctttattaggtgcaggacttaaaaacagagtctttgaaagttacagatttgaacttgacccctatgaatctgcccacacacagaaaaatcctattcatccaggcgtgtgccccaaggtccaagaagttcccacttttagaatgaaggatgcgctacagaagctggtggaaaacggcaagctgaaaaccaatccgatgaaagggatggtagccgcagtttctgtcggaattgtgaacggcgaagcggtttgcgatctggaatacgttgaagactctgccgcagagaccgacatgaacgtagtgatgaccgaagacgggcgcatcattgaagtgcaggggacggcagaaggcgagccgttcacccatgaagagctactcatcttgttggctctggcccgagggggaatcgaatccattgtagcgacgcagaaggcggcgctggcaaactga

SEQ ID NO: 24257 - DNA, 420 bp, Homo sapiens
  SIMILAR (379)..(2): 891254mologous to Escherichia coli yjjJ,accession number U14003,Smith-Waterman Score=569.
gcggagaatagataaactctctctgtaccgcctttagcgacacaataggcaagcgaccatcgttacctttgcagtcaaagcgttccgcttcgaggaatacctgcctgttacttgttacaagcaccgttgactcgatggcgtggatcccaccgtcacgcaggatttgcgcggcaatagattcagcaattagcaggtcaccccaacgttggctgaccgcggtttgctgtggtacggtgaatttcaccaacacatgtttattgcctgacggcgtttgtgcatagtaggtaaattttggctgctcgccgtacgcacaacaacccacaatttttctggccagtgcttctatggccagctgtttgtaatgggtaagtctttgttcctctagactcagctagcaggcatgctagctgtgcactggcc

SEQ ID NO: 24258 - DNA, 1419 bp, Homo sapiens
  SIMILAR (199)..(1041): 971254mologous to Escherichia coli sms,accession number X63155,Smith-Waterman Score=1393.
  misc_feature (1)...(1419): n = a,t,c or g
atgagtgaactcccattaacaagtgctacaaacagaatagaatatctaggaatccaacttacaagggattttgaagatcctcttcaaggagaactacaaaccactacgcagcaaaataaaagaggacgcaaacaaatggaagaatattccatgctcatggataggaagaatcaatttcatgaaaatggccatactgtccaagctacaaaacgcgccttgtttgataatgaatgcggggccgattatccgcgctggcagggccagtgcagtgcctgtcatgcctggaacaccatcaccgaggtgcgtcttgttgcgtcgccaatggtggcgcgtaacgagcgtctcagcggctatgccggtagcgccggggtggcaaaagtccagaaactctccgatatcagccttgaagagctgccgcgtttttccaccggatttaaagagttcgaccgcgtactaggcggcggcgtggtgccagnaagtgccattctgattggcggtaaccctggtgcggggaaatccacgctgctactgcaaacgctgtgcaaactggcccagcagatgaaaacgctgtatgtcaccggcgaagagtcgctgcaacaggtggcaatgcgcgctcatcgccttggcctgccgactgacaatctcaatatgttgtcggaaaccagcatcgaacagatctgcctgattgccgaagaagagcaaccgaagctgatggtaattgactcgatccaggtgatgcatatggcggatgtacagtcatcgcctggtagcgtggcgcaggtgcgtgaaacggcggcttatttgacacgcttcgccaaaacgcgcggtgtggcgattgtcatggtggggcacgtaaccaaagatggttcgctggctggcccgaaagtgctggaacactgtatcgactgttcggtgcttttggatggcgatgccgactcccgttttcgcaccttgcgcagccataaaaaccgcttcggcgcggtgaatgagctgggcgtcttcgcgatgaccgaacaggggctgcgtgaagtcagcaaccctcgggggcgtgggaaacggaaattcatttccccgaaaaaaacgccagcccttgccaaatttcgccgaaaccttttgccccccaaggtacccgggaatggaacttcggtcaggttccggcattctcgaatttgttggatgaaccctttacctggggcggcgtggaactgcattttaacgttaaaaaagccaatatcacccggggtccaggtttttcccgaaagcttcaccccggcgcggttggaagccttcgccggccgctcgcaagcctgccttgtcccggcgcagaatatcctccaccagaagtcccaggcctggttgtttgacttcccggaacaggaaaaagagctacgggagttatcggcatggatggcgggggct

SEQ ID NO: 24259 - DNA, 7005 bp, Homo sapiens
  SIMILAR (4375)..(4953): 1001254mologous to Escherichia coli yjjJ,accession number U14003,Smith-Waterman Score=989.
tgaaagagagttccggtaaagcgcgccacgatctcggctatatggcgcaaaaattttcgctctacggtaacctgacggtcgaacagaatttacgctttttctctggaggtatggcttacgctggtcgggcgcagaacgaaaaaatctcccgcatgagcgaggcgttcggcctgaaaagtatcgcctcccacgccaccgatgaactgccattaggttttaaacagcggctggcgctggcctgttcgctgatgcatgaaccggacattctgtttctcgacgaaccgacttccggcgttgaccccctcacccgccgtgaattttggctgcacatcaacagcatggtagagaaaggcgtcacggtgatggtcaccacccactttatggatgaagcggaatattgcgaccgcatcggcctggagtaccgcgggaaattaatcgccagcggcacgccggacgatttgaaagcacagtcggctaacgatgagcaacccgatcccaccatggagcaagcctttattcagttgatccacgactgggataaggagcatagcaatgagtaacccgatcctgtcctggcgtcgcgtacgggcgactgtgcgttaaagagacgcggcagatcgttcgcgatccgagtagctggctgattgcggtagtgatcccgctgctactgctgtttatttttggttacggcattaacctcgactccagcaagctgcgggtcgggattttcctggaacagcgtagcgaagcggcgctggatttcaacccacaccatgaccggttcgccctacatcgacgccaccatcagcgataaccgtcaggaactgatcgccaaaatgcaggcggggaaaattcgcggtctggtggttattccggtggattttgcggaacagatggagcgcgccaacgccaccgcaccgattcaggtgatcaccgacggcagtgagccgaataccgctaactttgtacaggggtatgtcgaagggatctggcagatctggcaaatgcagcgagcggaggacaacgggcagacttttgaaccgcttattgatgtacaaacccgctactggtttaacccggcggcgattagccagcacttcattatccccggtgcggtgaccattatcatgacggtcatcggcgcgattctcacctcgctggtggtggcgcgagaatgggaacgcggcaccatggaggctctgctctctacggagattacccgcacgggaactgctgctgtgtaagctgatcccwtaattactttactagggatgctggcgatgtttgctgtgtatggctggtgtcagtgtttattctcggcgtgccgtatcgcgggtccgtgctgattctgttttttatctccagcctgtttttactcagtaccctggggatggggctgctgatttccacgattacccgcaaccagttcaatgccgctcaggtcgccctgaacgccgcttttctgccgtcgattatgctttccggctttatttttcagatcgacagtatgcccgcggtgatccgcgcggtgacgtacattattcccgctcgttatttcgtcagcaccctgcaaagcctgttcctcgccgggaatattccagtggtgctggtggtaaacgtgctgtttttgatcgcttcggcggtgatgtttatcggcctgacgtggctgaaaaccaaacgtcggctggattagggagaagagcatgtttcatcgcttatggacgttaatccgcaaagagttgcagtcgttgctgcgcgaaccgcaaacccgcgcgattctgattttacccgtgctaattcaggtgatcctgttcccgttcgccgccacgctggaagtgactaacgccaccatcgccatgtacgatgaagataccggcgagcattcggtggagctgacccaacgttttgcccgcgccagcgcctttactgcatgtgctgctgctgaaaagcccacaggagatccgcccaaccatcgacacacaaaaggcgttactactggtgcgtttcccggctgacttctcgcgcaaactggataccttccagaccgcgcctttgcagttgatcctcgacgggcgtaactccaacagtgcgcaaattgccgccaactacctgcaacagatcgtcaaaaattatcagcaggagctgctggaaggaaaaccgaaacctaacaacagcgagctggtggtacgcaactggtataacccgaatctcgactacaaatggtttgtggtgccgtcactgatcgccatgatcaccactatcggcgtaatgatcgtcacttcactttccgtcgcccgcgaacgtgaacaaggtacgctcgatcagctactggtttcgccgctcaccagctggcagatcttcatcggcaaagccgtaccggcgttaattgtcgccaccttccaggccaacattgtgctggcgattggtatctgggcgtatcaaatccccttcgccggatcgctggcgctgttctactttacgatgatggggaaacggtttagaaaggaccccggaaagagcaggcggagaaagctagctcggtaccatctctatcagttatcggcgtggcccatcgccaggatgcggtacaacacgcccagcaattgctgaagatgatggggtacggcgtgtagcgtttcacctctttcaccaactgtgccgcaaccacctcggcactgacgcgcttttcaccgacgacaaaaaagcgttcggtgatattttcactttcgacttcaagcgagacggtattacccggcccctggtcgcgcggcagggttatgtcagtaccgaagagctggtagagcatttctccgtcagcccgcagactattcgccgcgacctcaatgagctggcggagcaaaacctgatcctgcgccatcatggcggtgcggcgctgccttccagttcggttaacacgccgtggcacgatcgcaaggccacccagaccgaagaaaaagagcgcatcgcccgcaaagtggcggacgaaattccccaatggctcgacgctgtttatcgatatcggcaccacgccggaagcggtagcgcacgcattgcctcaatcacagcaatttgcgcattgtcaccaacaatttcaacgttgctaacacgttgatggtaaaagaagattttcgcatcattctcgccggtggcaaattacgcagccgcgatggcgggatcattggcgaagcgacgctcgattttatctcccagttccgccttgatttcggcattctggggataagcggcatcgatagcgacggctcgcttttggagttcgagccccacgaagttcgcaccaaacgcgccattattgagaactcgcgccacgttatgctggttgtcgatcactcgaaatttggccgtaacgcgatggtcaatatgggcagcatcagcatgaacgatcaacaggtgacgtttaattatctgttagcgcaaggggagtaccgtatttccacattgctggcggtattgtttgctgcggggtttgctatcggttggttgatttgtggcctgttctggctgcgagttcgtgtttccctggcgcgcgctgaacccgctgcctatggctggtatatgggccgcagaagtgcgcaacaaaacaagcaagatgaagccaaccgcttgtcgcgtgattacgtagcgggggttaacttcctgcttagtaatcaacaggataaagcggtagacctgtttctcgatatgcttaaagaggatacaggcaccgttgaagcccaccttacgctcggaaacctgttccgttcgcgtggcgaagttgatcgcgctattcgcatccatcagaccctaatggaaagcgcctcgctgacctatgaacagcgtctgttggcgattcaacaactggggcgtgattacatggccgccgggttatatgaccgcgcggaagacatgttcaatcagctgaccgatgaaactgacttccgcattggcgcgctgcaacagttgctacaaatctaccaggctaccagtgagtggcagaaagcaattgatgcttgccgaacgcctggtgaagctggagaagatcgggtgattcgctttggtaaagcacgggcaacgcgatatgcactgctgcgtccttatcgcggaattgagcgtattcccgtctggcgggtggacgataccggaaaggcgcataaattcgccgacatccggttgtgctggccgcagggaagttgtctggaagaagatgtgctctacgccctgaccgtatttaacggtgaatatactggcggttggttggtcggggaggggaattatcagcgatggattactgcacaacaccctgcggaaattcctctggatcaaaaactcacccattacgaacagctggcaagtgatgcactggcaggagaaatcctaaccgcggtcagccaacgttggggtgacctgctaattgctgaatctattgccgcgcaaatcctgcgtgacggtgggatccacgccatcgagtcaacggtgcttgtaacaagtaacaggcaggtattcctcgaagcggaacgctttgactgcaaaggtaacgatggtcgcttgcctattgtgtcgctggaggcggtgcagagtgagtttatctcttctccgggatcgtggccgcaggcaatgcgccgtttgtgtgagcaacaacttgtcactcaccagagcgtggcgcaaacagaagtgatctgggcatttgggcgacttatcgccaacagcgatatgcacgcaggtaatttatcgttttatttatctgaaccgccatttgcgctgacgcccgtctacgacatgctgccgatggtctatgcaccaaacagcgctggaatgctgcgtgatgctgccattgaggtgaagtttgatcttaacgtcagtaaaagcgcttggttaacggcgatcccgctggcgcagcagttctggcaaacggtcgccagagatccgcgtatcagcgaggcgtttcgccacattgctgtcgactctagaggtcccccacaccgtgtggttgtactactaggtgcacactctggaagtccattctcgattggcggtaaccactggtggcggggaaatccacgctgcgactgcaaacgctgtcgcaaactggcccagcagatgtccacgctgtatgtcaccggcgaagagtcgctgcaacacggtcggcaaatgcgcgctcatcgccttggcctgccgactgacaatctcaatatgttgtcggaaaccagcatcgaacagatctgcctgattgccgaagaagagcaaccgaagctgatggtaattgactcgatccaggtgatgcatatggcggatgtacagtcatcgcctggtagcgtggcgcaggtgcgtgaaacggcggcttatttgacacgcttcgccaaaacgcgcggtgtggcgattgtcatggtggggcacgtaaccaaagatggttcgctggctggcccgaaagtgctggaacactgtatcgactgttcggtgcttttggatggcgatgccgactcccgttttcgcaccttgcgcagccataaaaaccgcttcggcgcggtgaatgagctgggcgtcttcgcgatgaccgaacaggggctgcgtgaagtcagcaacccttcggcaattttcttaagtcgcggcgatgaagtgacctccggtagctcagtgatggtggtatgggaaggaacgcgtccactgctggtggagattcaggcgctggtcgatcactcgatgatggcgaacccacgccgtgtggcatggggctggaacaaaagcgtcatgggaatcctgctggctgtgttgcaccgtcaaggtggtcttgaaatgggcgatcaagatgtgtttgtgaacgtggtcggcggcgtgaaggtgaccgaaaccagtggcgacttagagttactgctggcgatggtttccacaccgggcgaaagaacgctggcgcaggaacctgggacaaaaaaaaggcgactcatcagtcgccttaaaaatcagtttgccagcgccgccttctgcgtcgctacaatggattcgattccccctcgggccagagccaacaagatgagtagctcttcatgggtgaacggctcgccttctgccgtcccctgcacttcaatgatgcgcccgtcttcggtcatcactacgttcatgtcggtctctgcggccgagtcttcgacgtattccagatcgggggaaatatttctccagcgcgaggggcatatccaacaacaaatggggggaataaatgcccgcgcaaaagttgctggcttgatgatgcgccaggacgatagcgacacgctgaattctctgggcgtttttgtctgggcatggccggatggaccgcagttaatgtctgatcgtttaaaagagctggctaccgcaggttttactctaacgcagacgtatacccgtgcggtgaaaaatgctgatgaagttgcgcgcgtacgcaatgagtggtggaaagcggaattacccttcgtcaccgatggcgtagttgtacgagcggcgaaagagccagaatcccgccattggctaccgggccaggcagagtggctggtggcctggaaatatcaacctgtagctcaggttgccgaagtgaaggcaattcagtttgcggtgggtaagagcggtaaaatatcggtggttgcgtcactcgcacctgtcatgctggatgataaaaaagtccagcgggtgaatattggttccgtcaggcgctggcaggagtgggatattgcgcctggtgatcagattctcgtcagccttgccggtcagggtattcctcgcattgatgatgtggtgtggcgcggtgcagaacgtcaaaaccgacacgcagaaaaccgctttaactcgttgacctgctactttgcttctgatgtccgtcaggaacagtgcattccacgcttagtctggctgcggccaaaacaggtacttgggctggctgacatcggtgacgccgaacgccgcgcgctgcatcacagtcatcgctcagaacatatatcccactggctcacatcaaagcaaccctgcgcagtgtgtcagttttag

SEQ ID NO: 24260 - DNA, 2916 bp, Homo sapiens
  SIMILAR (2085)..(655): 921254mologous to Escherichia coli enterobactin,accession number M60177,Smith-Waterman Score=2307.
tcaacactgtgccgtacggcctttcggcagcggattggtcagttgcgcgacatctttcacctcaaaggtgatcagttcaccaatccccgcaagacgggcgttagtgcgtgcacgttgaatcacccgtgcgtcgctgtccgaaccgtaaaaatgagagctatactcagccaggcctttacgggcgcgagtttgcgcttccgctttcacttcctgccagatagcttcatcatgctgcgcccagccgctaaagccccaacgcccacggtgcaagcctggtgcgcgatcggtcgccagcatcgctgcttcaatcagcaacgtaccggaaccacacatcggatcgagcagcggtgttcctggcagcacgatcgcgataccacgcagatgtaaaccatcaccactcagatcaagagcgatactggcggtttctttatgcagccagacgttaacgcggatatccggcgcatcgcgatcaacatttggacgcggcagatttttccgcgtgaaagcatcgacgatcgcgtctttcactttcatcgcgccgtactgactgttgcggatggtgtcattcaaaccactgaaagtgacagcgaaggtcgcgccaggattaaacatctctgtccagttgattcgctgaacaccgagatagaggtctaaatcgctgtaaacgttacactcgctttcaatggtggtaaacaactccgttgaagtacttccctgctgtgctgccaggaaggcctcgcgttcgcggttaatctccgccagcacttccgggtccagaccattagcttctttttcctgccagttttgcgtttctggcggccaggtatccagcaagccaagaaatgccaccctgcgccacgtaccgccaagggaataccccagcaggtaataagggccatgcggttgttgttcaagtaacgttgccagatgcgcttcgcagacttcatccaggtttgccgccgtctgcatggggccattggggcgcggtgactgaatgccgataatcgaccattgtggatcgagataacgcgagagcacgctgaactgccaggcaaaaccggacgcaggatggaaacaaaacagcgtcgggccattaccttcacgcaacggcagaatggtttcgaatcccatacgccgggtgctgtcttcttcagcatcaataatcgttgccagtttggcgacagttgacgcgaccatcacttgccccggcgtcacctggcgggcaacctgccgacttaactgcgctgccagtttcattgccagtagcgaatgaccgccaagcgcgaagaaatcagcatcggcatcctgcacgtcacaccccagcaacgacgagaatgccgcggcgataatcgtttcactgcccgctttcggcgcacgccctggcgcttgtgccttcagttcaggcaacggtaaggctttgcgatccagcttgccgttggcgctaagtggtaactgtggaagttgcagcagaaccaccggtaccatatgtggtggcaatgtttcacgaagctgcgcctgcaatgcgctggtatccaacggcaggcccgattgcgacaccagatagcccaccaattgacgcgcatcaccaccggtggcagccgcctggttaatcacacaggcgtgggtaacggcttgttcgacatccggcagcgcctgcatcacgcgatcgatttcgcccagttcgatacgctgcccgcgaatttttagctgatcatcactgcgcccgaggtactccaccgcgccgttatccagccagcgggcaacgtctggggcaaaaggatcggcaataaagcggctggcggtcagatcggggcgtccgagatagccctgcgccagttgaatgccagtgagatagagatcacccgccacacccggcggcaccggatgcatcatcgcatcaagaatacgcagacccgtattccataccggataaccaatcggcacactgctgccgcgcacctgtgccagttcctcgccaaaagccggataccagctgacatctaccgccgcttccgtcgggccatatagattatgcaacggcgcgccagttaagaggcaacaatgctgcacatcgacgcacaagtcgtggtcgtacgcatattcgcataatgctgcatacgacggtccggtccttccgtcagcatacagtttgcctcgataacgcagaaaatcacacggaatcaactgaggttttgggccattttttatagcaaagattgaataaggcgcatttttcttcaaagctttattgtacgatctgactaagttatcttttaataattggtattcctgtttattgattatgaagagcagcatattacagccgtatgggtctacttgacagtaaaatttgaagagcattggaagcctgttgaagtcacaatgaccgccgtcgctaccacgaagttgctgccggagcatcggtttaaacgcaggcaccatttctgcaatcagcacaggtgtcgctaccgcggcccctgcggaactggaagcggcaattccggcagtgccatcgccaccgccaatcaatttatcggcgataatcaacggaataccggtcacgataattactgccacacccaacaggatccccagcaaaccagtctgggcaatcacagtcaaatcaatggtattgcccagcgcgaaggcaaagaatggaatcagcgtttgcaccgctttgctgaaaaattctcgcaattcagggtcaaggttccccagggcaaagcccaccaggaacggtaatactgcgccgacgaaaacatgcggttcaaacgaggcaatcccggcagtgcccagaataatcatcgtcatgagcggcccggactccaacgacatcaacacaaatgccccagcttcttcttttgtgccgtactgctgcatgatggaagcgtaaagtccgccattggtcatatccat

SEQ ID NO: 24261 - DNA, 827 bp, Homo sapiens
  SIMILAR (31)..(297): 981254mologous to Escherichia coli gcvHP,accession number L20872,Smith-Waterman Score=473.
aactgattttagtcaagctcggcacccggggatcgctttatcgacgcgatgctggctatttgcgcagaaattgaccaggtgaaagccggggtctggccgctggaagataacccgctggtgaacgcgccgcacattcagagcgaactggtcgccgagtgggcgcatccgtacagccgtgaagttgcggtattcccggcaggtgtggcagacaaatactggccgacagtgaaacgtctggatgatgtttacggcgaccgtaacctgttctgctcctgcgtaccgattagcgaataccagtaattcactgattcgactattttctaaaggcgcttcggcgcctttttagtcagatgacaaagtacaaaagtgctcagacagtcccctcgcccctttggggagagggttagggtgaggggaacaggccggcactggcgcgaatatttacccttgccccggccctctccctgaaagggcgagggggaaaagcgtgccaacattgaagattgagccagtttgttagcaatctcaaagatacgtcaacgaattaatttttctcggaaaaacaaatggctatagcacttgtgactggtggcagtcgcggcatcgggcgggcaactgcattactgttggcgcaagaagggtatacggtggcggttaattatcagcaaaacctccacgcggcgcaggaagtgatgaacttaataacgcaagccggtggcaaagcattcgtgctccaggcggatatcagcgacgaaaaccaggtcgttgcgatgtttacagcaatcgatcagcacgatgaaccgctagcagcgctggtcaataacgcc

SEQ ID NO: 24262 - DNA, 626 bp, Homo sapiens
  SIMILAR (624)..(229): 991254mologous to Escherichia coli GLUTATHIONE S-TRANSFERASE 1 (EC 2.5.1.18) (SR8) (CLASS-THETA),accession number D90861,Smith- Waterman Score=681.
tcagcgactttggctggcgcgtaaccctccggtaaagcattacgcgggccgtgattcaacacgtcgccaaggatcaccagccactgggcaccgctttgggcaaacaactccagaacacgttccgtcgccggtaacgacccatgaatgtccgatgcaaacatcagtttcatcactcactcctcgtcgaaaaaacgtaagctatgatactggattctgtcgttgctatcagccagattgcttcgccgaaagtgcaataaaacgctggacagacgctcgctgccactggaatgttgcataatccaccaggcggtctggcacctcatcgccatgtagtaccaggcggttaatcattagcgccagatcagtatcagcaatgcaccattcaccaaataaattcggctgacccagtactaacaaatgttctgccatcgcgaacagtttctctgcactggcttttccctcggccgttagtggcgcttttttcgcccccgcaaagacaacatccgtcggacgctcttcgcggatgggcatcagatcgctgcgcagccaggcctgaatctgtcgtgcacgcgcacgattttctaaatcaagcggataaatacgttcccaggtcggtggcgcaaatc

SEQ ID NO: 24263 - DNA, 774 bp, Homo sapiens
  SIMILAR (774)..(709): 951254mologous to Escherichia coli K12 orf, hypothetical protein,accession number AE000497,Smith-Waterman Score=100.
tggtccagtacgtagaagacaaaatcgaaactgataccggtgaccacacgcacgcggatcggtacgctacgcagtggtccaaagatgaacgacagcgccatcagcatcatcaccgccacagatagcggctggaagattttgctccacatgttgagctgataacgtccggcatcctgaccgctcgacttcagatacttcacatagttgtgcaaaccgctgatagagagtgcatccgggtccagcgccaccacgcccagtttgtccggcgtgaggttggttttccaggtgccgctcaccgtctgcgaaccggtaatctgtttcggattggtcagatcagattcatcaacctgcgacagacgccagactttatgttccggctcaaacttcgcagtagcggcatagcgtacggattgcagacgacgattctcgttaaaggcataaatgctgatgccacctaactcttcgtcacctttaacccgctcaatgtagacgaagttgttgccatctttcgcccataagccttgctgggtagagagcaacgagccgccgtacatcgcctgcgcacggtagttacgcgccatctgctcgccctgcggcgcgacccattcgccaatcgccatcgtcagcaagaccagcggaatggcggttttcatcaccgacagcgccacctgcatacgggtaaaaccagaagcctgcgtcaccaccaggttcgctgcgctgcgccagcatcccaagaccaagcgacgccccgagcagagccgccatcgggaagaa

SEQ ID NO: 24264 - DNA, 594 bp, Homo sapiens
  SIMILAR (237)..(28): 841254mologous to Rattus norvegicus olfactory receptor,accession number AF091561,Smith-Waterman Score=302.
tcattgtgttttctgcttcagtgtaaccatagggtagtgcagtgggtggcagatagctacatagcggtcataggccatgaccaccaggatgaaggcttctgagcaggagaagctgtggaacaggtacatctgtaggaagcaggcagggaagctgaggaagtggtccccaagcaagaacaggggcagcgtcttggggacggtgactgtagtggagaggatgtctagggctgagaggtttatcaggaagaagtacacaggcttgtgaaggctggcctctgccatcacaaccaccaggatttcgctgtcgttgttgccgcgcacatcgataaccttatgtgccacttcattaagacgttcagcgactttggctggcgcgtaaccctgcggtgaagcattacgcgggccgtgattcaacacgttgccaaggatcaccagccactgggcaccgtcctcgtcgaaaaaacgtaagctatgatactggattctgtcgttgctatcagccagattgcttcgccgaaagtgcaataaaacgctggacagacgctcgctgccactggaatgttgcataatccaccaggcgttctggcacctcat

SEQ ID NO: 24265 - DNA, 1008 bp, Homo sapiens
  SIMILAR (142)..(651): 981254mologous to Escherichia coli f270,accession number L10328,Smith-Waterman Score=855.
atgctggcattgatgattaagttgctgccgtggttactactggcgattgcggtggtgtgggttattaaggcgattaaagcaccaaaagtgccgaaatatcagcgttatgaccgctggcaattggcggttagacgatcccctctgctgcccgatcacaccatttcacccgccgttaaaaatgcgattgccgcagctcgcgcccgtggcgtgaatgtcgtgctaacgacgggtcgcccgtatgcaggtgtgcacaactacctgaaagagctgcatatggaacagccgggcgactactgcattacttataacggcgcgctggtacagaaggccgctgatggtagcaccgtggcgcaaactgctctcagctatgacgactatcgtttcctggaaaaactctctcgcgaagtcggttctcatttccacgccctggaccgcaccacgctgtacaccgccaaccgtgatatcagctactacacggtgcatgaatccttcgttgccaccattccgctggtgttctgcgaagcggagaaaatggaccccaatacccagttcctgaaagtgatgatgattgatgaacccgccatcctcgaccaggctatcgcgcgtattccgcaggaagtgaaagagaaatataccgtgctgaaagcaccgaatctccaacaaccacatggaagttcaggctccagcttccaccgagaaatctttttctcctccagatctgaagacaaaaggagaggaggcctggtggtgagcgggatatctctgttagttgtcagcgcaggtccatgggttaggaatgctaatgagcctcttggccagctgaagacttggttctctctctcgcacaccctgacgctcacatacactcgggctcctgcatgccgactgacaagcacacagacagagcctcgtgcacgaccctgtctctctcctctttcctctgagcccagagatcgatcgctgaccccacggttgggccaacgctttatttatctggctgtgcaatga

SEQ ID NO: 24266 - DNA, 2659 bp, Homo sapiens
  SIMILAR (919)..(1719): 1001254mologous to Escherichia coli K12 putative oxidoreductase,accession number AE000355,Smith-Waterman Score=1343.
atggtggattgcccttcccccaccaagcctggagcattccagggtggaccttcagtactgctggtgcctggcaacgaagaattttcaaagcccttactgcgggcgtacgtggagatccagcggcgttttgctgggttcgccgccaatttctcgcgccagtttcggcaccagatatcccgacaccagtgtcagcaactcacgcataatctgccgtgcttcgtcatcactcaccataaaatgcgccgcgccctgtactttatcgagcacatgcaagtaatacgagcatacacgggcatcgaacaacgcattactcaagtttaccaacgaagtcggcttttggcgtacgcagatgttttcaacgacgtccggcgtgtagcgggaaacgtgctctttcagcaggttccacacacagcgcggatgagtcagtgtttcatcgcgtttcgcatagccgttttcatcgagctgatagttccaggacgatttatcgtattgacgtttttcagcgtcgtagccgctgaacagaccgtcttcgaaagcaaaatcatcacgcaccagcaggctggcgttggtgtaatgcttaacgtattcggcgttgattttgttgttttcgatcaggtagcgcaaaacgccagacaggaacgtaatgtccgtaccggaacgaataggcgcgtaaatatccgccacagaagcggtacgcgtaaaacggggatcgacaacgatcaaggttgcgtcgttgttgtttttcgcttccatcgcccagcggaaaccgacgggatgcgcttcagcagcgttaccgcccatcaccatcacgactggttggtcatcgcaccgcgaccaaatgttggagcaagacttgctaccgttggtccgtgtcagacgcgcgcctggttgtctaccgccagcatcccgagggagcgcagccatgttatcagtcaggggcaacgtgccgatgaccttacccgccagacggcgggtgaatttgccgagcagtttaatctgcacctgtttccacaaacctgggtgacggatatcgatgccgaagcccgtgtggtgaaaagccagaataatcagtggcaatacgacaagctagtactggcaaccggtgccagtgcctttgtcccgcctgtgcctgggcgtgagttaatgctgacgttaaatagtcagcaagagtatcgcgcctgtgaaacgcaactgcgggatgcccgacgcgtgttgattgttggcggtggtttgattggtagcgaactggcgatggatttttgtcgtgcaggcaaagcggtcacgctaatcgacaacgctgccagtattctggcgtcgttaatgccaccggaagtaagcagccgcttgcagcatcggttgacggagatgggcgttcatctgctgttgaaatctcagttacaggggctggaaaaaacggattctggcattcaggcaacgctggaccgccagcgcaatatcgaagtggatgcggtaattgccgccaccggactgcgcccggaaaccgccctggcacgacgcgccgggctgacgattaatcgcggcgtttgcgtcgatagttatctgcaaaccagtaataccgatatttacgcgctgggcgattgcgcggaaattaacggtcaggtattgccgttcctccagccgattcaacttagcgcgatggtgctggcaaaaaatcttctcggcaataacacgccgctgaaactcccggcgatgctggtgatctgcattccgcacggcggtggtggtccgggcgcggtttctgcggcaccgttcggtagcgcctctatcctgccaatcagctggatgtacatccgcatgatgggcgcagaagggctgaaaaaagcaagccaggtggcaatcctcaacgccaactatattgccagccgcctgcaggatgccttcccggtgctgtataccggtcgcgacggtcgcgtggcgcacgaatgtattctcgatattcgcccgctgaaagaagaaaccggcatcagcgagctggatattgccaagcgcctgatcgactacggtttccacgcgccgacgatgtcgttcccggtggcgggtacgctgatggttgaaccgactgaatctgaaagcaaagtggaactggatcgctttatcgacgcgatggctggctatccgggcagaaattgaccaggtgaaagccggtgtctggccgctggaagataacccgctggtgaacgcgccgcacattcagagcgaactggtcgccgagtgggcgcatccgtacagccgcgctggtaaaaggcgaacactcgcacatctgattgaagatatccctaccggtatttacaccatcccggaaatcaactctatgggcaaaaccgaacagcagctgaccgcaatgaaagtgccatatgaagtgggccacgcccaatttaaacatctgacacgcgcacaaatcgtcggcatgaacgtgggcacgctgaaaattttattccatcgggaaacaaaagagattctagatattcactactttagcgaacgcgctaccgaaattattcatatccggcaagcgattattgaaccagaaaggtgccgccacacttttgaatacttcgtcaacaccaactttaacgaccccacgattgccgaaacctatccgggaactacctttaaccggtgtaaacccctattttaa

SEQ ID NO: 24267 - DNA, 2295 bp, Homo sapiens
  SIMILAR (424)..(951): 971254mologous to Escherichia coli K12 regulator of kdp operon (transcriptional effector),accession number AE000173,Smith- Waterman Score=848.
atgaaacatgaccattttgttgttcaaagcccggataaacctgcgcaacagttgttactgcttttccacggtgtcggggataacccggtggcaatgggggaaataggcaactggtttgcaccgctgtttcctgatgcgctggtggaattacttacgaagcataacttcgataaagtctttccagttccccagttcacgttcaatcataacaacctctcttataattatgggtattctacggaaacaatataccgtggattcattatggttacactttacggtatcaaaaattgtgacaccattaaaaaggctcgccgttggctggaagccaataacatcgactatcgttttcatgattaccgcgtcgatgggctggacagcgaattattgaacgattttatcaacgaattaggctgggaagcgttactcaacacccgtgatgaacaggctattcgtcgctttctgcgcacggcgctggaaggcgacgggatgcgcgtctttgaggccgaaacgctgcaacgcggcttgctggaagcggcaacccgtaagccagatttgattattctcgatctcggcctgcccgatggtgatgggattgagtttatccgcgacctgcgccagtggagcgcggtgccggtgattgtgctttccgcacgcagcgaagagagcgacaaaatcgccgcgctggatgccggagcggatgattatctgagtaagccgtttggcattggcgaattgcaggcccgtctgcgcgtcgcattacgccgccactctgccaccaccgcgcccgatccgctggtaaaattttccgatgttaccgtcgatttagccgcccgcgtgattcaccggggtgaggaagaggtgcatctcacaccaattgagttccgcctgctggcggtgctgctcaacaatgccggaaaagtactcacccagcgccagctccttaaccagggcaccgttgaaaaccttaccgcagagcgaatcaaccgagtactttccaccaacgtgacgggatattttctctgctgccgcgaggcggtaaaacgcatggcgcttaaaaatggtggcagtggcggcgctatcgtcaatgtctcttcggtggcctcacggttgggttcgccaggggaatatgttgattacgcggcatcgaaaggggcgattgatacgttaaccaccggactatcgctggaagtcgccgcgcaggggatccgcgttaactgcgtgcgggcagggtttatttataccgaaatgcacgccagcggcggcgagcctggacgcgtcgatcgcgttaaatggaacatccccatgcaacgtggtggacaggcaaaagaagtcgcgccagccattatcttgcttctaaataataaacccttttcccgtcacggaaaactttatgcaattgcacgaaggagaaataaaaacaagtgcacccaagatcccaaggtagggcagtttctctcagaactattgaccaaccgaaaggagaacattcctttcaagctttctgaagactgtctttacctcaatatttacactcctgctgacttgaccaagaaaaacaggctgctgacttacatggagaccccagagagaataaggagaaaggaagaagaagaaaaagaggaaggagaagaagaaaaagaggaagaagaaaaagaggaagaagaggaggagaaggaggaagaaacgaagaagaagaggaaagaaagaaagacggaagaacacgaagaagaaagaaggaagaagaagactaagaaggaggaggaggaagaggaggaagaggagaaagggaaagaaagaaaaagaaagaaagaaaagaaaagaaaagaaagaaaaagagaggaagatgagagccaggatgccctgctgaccagcagcatcaactgtatggccagcttcgtctctgggttcgccatcttctccatccttggttacatggcccatgaacacaaggtcaacattgaggatgtggccacagaaggtgccttcttgatcccgtacacactgttccttatcatcgcggggatgcccctgttctacatggagctggctctgggacagtacaaccgggagggggctgccaccgtttggaaaatctgcccattcttcaaagaggccccaactatggtgaaagtgggtgaatttggtagtggagtccagtgcagagcagtgatggtgggagcagagacaatcacagagagactggtctatggcatcacgccagagaacgagcaccacctggtggctcagagggacatcagacagttccagttgcaacactggctggccatctga

SEQ ID NO: 24268 - DNA, 2499 bp, Homo sapiens
  SIMILAR (1753)..(1911): 491254mologous to Escherichia coli K12 putative oxidoreductase,accession number AE000373,Smith-Waterman Score=109.
atgaggtgccagaacgcctggtggattatgcaacattccagtggcagcgagcgtctgtccagcgttttattgcactttcggcgaacgaatctggctgatagcaacgacagaatccagtatcatagcttacgttttttcgacgaggacggtgcccagtggctggtgatccttggcgacgtgttgaatcacggcccgcgtaatgctttaccggacggttacgcgccacgcaaagtcgctgaacggcttaatgaagtggcacataaggttatcgctgtgcgcggcaatctgcgacagcgagtggatcaaatgctgctgatttcccgggcaatcaatcggttagtggcgagcaactggaatcggcgctcggcacaaatgcggtgtccgatctcgggcaaaaacttggcgtggataccagtacagcttccagtttactggcagaacaattgccgaagattattgatgcgctctcaccgcaagcatgggtcaggaaccaatctacctggggaactcatggctattaaactcattgctatcgatatggatggcacccttctgctgcccgatcacaccatttcacccgccgttaaaaatgcgattgccgcagctcgcgcccgtggcgtgaatgtcgtgctaacgacgggtcgcccgtatgcaggtgtgcacaactacctgaaagagctgcatatggaacagccgggcgactactgcattacttataacggcgcgctgggtacagaaaggccgctgatgctatgacgactatcgttcctgaaaaactctctcgcgaagtcggttctcatttccacgccctggaccgcaccactgctgtacaccgccaacccgtgatatcagctactactacggtgcatgaattccttcgttgccaccaattcccgctggtggtctgcgacggaggaagaatgaccccaagagccatgttcttattcagtagtgctcacatactgatgcctctgaactatcacaactctcatattaatacattgttcccggtggcgggtacgctgatggttgaaccgactgaatctgaaagcaaagtggaactggatcgctttatcgacgcgatgctggctatccgcgcagaaattgaccaggtgaaagccggtgtctggccgctggaagataacccgctggtgaacgcgccgcacattcagagcgaactggtcgccgagtgggcgcatccgtacagccgtgaagttgcggtattcccggcagcacttgtgactggtggcagtcgcggcatcgggcgggcaactgcattactgttggcgcaagaagggtatacggtggcggttaattatcagcaaaacctccacgcggcgcaggaagtgatgaacttaataacgcaagccggtggcaaagcattcgtgctccaggcggatatcagcgacgaaaaccaggtcgttgcgatgtttacagcaatcgatcagcacgatgaaccgctagcagcgctggtcaataacgccgggatcttgtttacccagtgcaccgttgaaaaccttaccgcagagcgaatcaaccgagtactttccaccaacgtgacgggatattttctctgctgccgcgaggcggtaaaacgcatggcgcttaaaaatggtggcagtggcggcgctatcgtcaatgtctcttcggtggcctcacggttgggttcgccaggggaatatgttgattacgcggcatcgaaaggggcgattgatacgttaaccaccggactatcgctggaagtcgccgcgcaggggattcgcgttaactgcgtgcggccagggtttatttataccgaaatgcacgccagcggcggcgaggcttggacgcgtcgatcgcgttaagtcgaacatccccatgcagcgtggtggacaggcagaagagttcgctgtccagacgttccccgtatggcgggttgctcaacactgtgccgtacggccctttcggcagcggattggtcagttgcgcgacatctttcacctcaaaggtgatcagttcaccaatccccgcaagacgggcgttaccccacagcctccctgctcaacctatccagacccttcccctcctcctgtgccagctgcaggtcacattgatcgccctgctttggcaccgacctttacccctcctatcatgtgctctaaggccacagtcaaacccctaagtccttctccccctgggacacctgacccagcatcagtccttccttttagagagcaacgagccgccgtacatcgcctgcgcacggtagttacgcgccatctgctcgccctgcggcgcgacccattcgccaatcgccatcgtcagcaagaccagcggaatggcggttttcatcaccgacagcgccacctgcatacgggtaaaaccagaagcctgcatcaccaccagttcgctgcgctgcgccagcatcccaagaccaagcaacgccgcaagcagagccgccatcgggaagaagatctgcacatctttcggcacgctcagcaagctgatcgacaaacttga

SEQ ID NO: 24269 - DNA, 187 bp, Homo sapiens
  SIMILAR (98)..(30): 471254mologous to Amycolatopsis orientalis putative phosphoenolpyruvate phosphomutase,accession number AL078635,Smith- Waterman Score=44.
cgaaatccgcgcattagctgcttcattcagaccgatgacgacctggcgatgagggcctcaatcgcgctcgatgcaccaattttttccagcaatcgcagggtatcttccgttagcggtcgacgatctccagtgtgcggtacggtgatgacgccttcaagccatagcgacaggcctggaacgtgttaat

SEQ ID NO: 24270 - DNA, 1449 bp, Homo sapiens
atgtatttaggtacatgcttttttgacctttcttcctcatggggaattgatgaccgtgatgacctgctgcgcacaattcaccgaatgatcgataacggtcatgccgctcggttggcagggttttatcaccgctggtttcgttattcgccatgtgaatggcgtgactatcttgctgaactaaatgagcaaggtcaggcttatgcgctatttgtcgccagcaccgccgaatgctgtggcgaagggggaatcaaagcctgggattatgtccggatgggttttttaagccgaatgggcgtacttaataactggttgagcgaagaagaaagtctatggatccagtcgcgcattcatctacgggctctacgttattatagtaactggcggcaatactttgccggttatacctttggtcggcaatattggcagtctcccgaagatgatcatctgcctttattacgcgaattcttagcgcaggaaacgactgacgtcgatattatccgccgcgcttatctggcgctgttaccgtcctttcatacagaaaccgatccgcagggttttaaacaacttcgtcatgcgtatgatgatgcgctaccgattgcgcagtcgcctgctaaatctgttttgcaaccagaagaatatgagtgggaagcgttgctggtggaaatgctcggcctgttgcatcgtattgcgatggtacaactttcgcctgctgcacttggcaacgacatggccgccatcgagctgcggatgcgtgaactggcgcgcaccataccgccgacggatattcagctttactatcagacgctgttgattggtcgcaaagaattaccgtatcgaacctgccaacttcatgcctgcacgtctgcagacacacctcttcgtaaaatcccgcgcttcagtggcaaactccatttttatgcgttttgccctaatatttattcttcttatcactctgccgcaaaatatggcggcagttgccagcccggcagcactgctcatcggctggggtattactggcgctggcatttattgctggcctttgccatgctgatcctcacgcgcattcgtcccgaacttgacggcggtatctttacctatgcccgcgaagggtttggcgagctaatcggcttttgttccgcattcagctcggaaaaagattacctgctgtataaattcaaccgtttccaggcctgtcgctatgggcttgaaggcgtcatcaccgatccgcacactggagatcgtcgaccgctaacggaagataccttgcgattgctggaaaaaatcgccccttccgcacataaaattggtgcatcgagcgcgattgaggccctgcatcgccaggtcgtcagcggtctgaatgaagcgcagctaatgcgcgatttcgtcgccgatggcggctcgctgattgggctggtgaaaaagcattgtgagatctgggccggtgactaa

SEQ ID NO: 24271 - DNA, 1006 bp, Homo sapiens
atgaggactggggcgaatatcccagtgcagatctttaatgctgtcgatcatcgtggtgtaactcagacagcgaaacagggcttcaaattgttgccagttactgacccacggcatcgggccattatcaggaaaggcggaaaaaatattcggtcgcgatcgtttgccatcgcgttcccgcggtgcggcctgggtgtgcggttacgaccacgaaaaatcaatggtggtcctcacacctaccgcgttgtgttcattttctggcggcaaagactctggtttaatgctgcatctgacagccgaactgcccgacaaatgggcaaaaaaatctgcgtttggtttatcgactgggaggcgcaattctcttgcaccattaactatgttcagtccctgcgcgagttgtacaccgatgtcatcgaagagttttactgggttgcgctcccgcttacgacgcaaaattccctttcacaataccaacccgaatggcagtgctgggaacctgatgtcgaatgggtacgtcaacctccccaagatgcgataaccgaccctgactttttctgcttttaccagccaggcatgaccttcgaacaatttgtacgtgagtttgccgaatggttttcacaaaaacgtccggcggcgatgatgatcggcatccgtgcggatgagtcctacaaccgttttgtcgccatcgccagtttaaataaacaacgttttgccgacgataaaccctggactacggccgcaccaggcggtcatagctggtacatttaccccatttacgactggaaagtggctgatatctggacctggtatgcaaatcatcaaagtctctgcaacccactgtataacctaatgtatcaggcaggcgttcctctgcgtcatatgcgaatttgcgaaccttttggcccggagcaacgacaaggattatggctctatcacgttatcgaaccggatcgctgggctgctatgtgcgcacgagtcagcggggtaaaaagtggcggcatttacgtac

SEQ ID NO: 24272 - DNA, 2793 bp, Homo sapiens
  SIMILAR (1012)..(2064): 961254mologous to Escherichia coli glutamate synthase, large subunit,accession number U18997,Smith-Waterman Score=1723.
atgattgatgtcttagggccggagaaacgcagacggcgtaccacacaggaaaagatcgcaattgttcagcagagctttgaaccggggatgacggtctccctcgttgcccggcaacatggtgtagcagccagccagttatttctctggcgtaagcaataccaggaaggaagtcttactgctgtcgccgccggagaacaggttgttcctgcctctgaacttgctgccgccatgaagcagattaaagaactccagcgcctgctcggcaagaaaacgatggaaaatgaactcctcaaagaagccgttgaatatggacgggcaaaaaagtggatagcgcacgcgcccttattgcccggggatggggaacgaaccgatgactggatggatggccgccgcagtcgtcacactgatgatacggatgtgcttctccgtatacaccatgttatcggagagctgccaacgtatggttatcgtcgggtatgggcgctgcttcgcagacaggcagaacttgatggtatgcctgcgatcaatgccaaacgtgtttaccggatcatgcgccagaatgcgctgttgcttgagcgaaaacctgctgtaccgccatcgaaacgggcacatacaggcagagtggccgtgaaagaaagcaatcagcgatggccattgttatatcgcctattcgttcgccctcggacattacgttcctgtgtgcgcgttttgcgctacctgatcgaaaacaacaaaatcaacgccgaatacgttaagcattacaccaacgccagcctgctggtgcgtgatgattttgctttcgaagacggtctgttcagcggctacgacgctgaaaaacgtcaacacgtttcccgctacacgccagatgtggttgaaaacatctgtggtacgccaaaagacgcgttcctgaaagtctgcgaatacatcgcagaaaccagtgctcacgataaaactgcctcgttcctgtatgccctcgctggacgcaacactccgttggtgcccattagattgctcatcacctgcgcctctgaagtcggtatctgggattaccagcctgacgaagtggtcgaaaaaggccgcgtcgggccaggcgaactgatggttatcgacacccgcagtgggcgtattctgcactcggcagaaaccgatgacgatctgaaaagccgccatccatataaagagtggatggagaaaaacgtccgccgactggtaccgtttgaagatctgcccgatgaagaagtgggtagccgcgaactggacgacgacacgcttgccagctaccagaaacagtttaactacagcgcggaagagctggactccgtaattcgcgtactgggcgaaaacggtcaggaagcggtcggttcgatgggcgatgataccccattcgccgtgctctccagtcagccgcgcattatttacgactacttccgccagcagtttgcccaggtgactaacccgccaatcgacccgctgcgtgaagcgcatgttatgtcgctcgccaccagtatcggtcgtgaaatgaacgtcttttgcgaagcagagggccaggcgcaccgtttaagctttaaatcgccgattctgctctactccgatttcaaacagctcacgacgatgaaagaggagcactaccgcgcagatacgctggatatcacctttgacgtcactaaaaccacgctcgaagcgacagtcaaagagctgtgcgtcaaagccgaaaaaatggtacgtagcggcaccgtgctgctggtgctctccgaccggaatatcgctaaagatcgcctgccggttccagccccgatggcggttggcgcgatccagacccgtctggtcgatcaaagcctgcgttgcgatgccaacatcatcgtcgaaaccgccagcgcccgcgatccgcaccacttcgccgtgttgctgggcttcggcgcgacggctatttatccataccttgcctatgaaacgctgggccgcctggtagacacctatgccgatgccaaagattatcgtaccgtgatgctcaactaccgtaacgcatcacaaaggctgtacaaatcatgtcacaatggcatctcacatggctttacggctgtcgatcgctatgggcttgaaggcgtcatcaccgatccgcacactggagatcgtcgaccgctaacggaagataccttgcgattgctggaaaaaatcgccccttccgcacataaaattggtgcatcgagcgcgattgaggccctgcatcgccaggtcgtcagcggtctgaatgaagcgcagctaatgcgcgatttcgtcgccgatggcggctcgctgattgggctggtgaaaaagcattatttttatgctgtcgtcggagctacggggcgtcccctttatcaatctgaagtccgatccacaaaaatccctgttaaatcagcaaatatgtacttttacacgcaagctggctcatggccagatgatgctgttgaagttgatgagcaagtgtatattgagttttccggattaccgccgaaaggaaaaatccgtatcgctggagaaaatggttttcctgcatggtctgaaattccaccaccaacacatgaggaacagattgctgcagccgaactgaaaaagcagcaattgattaatcaggccaacgattatatgaacagtaaacaatgggctggtaaagcggctattggtcgtctgaaaggtgaggaactggcgcaatataatttgtggctggattatctggacgcactggagctggtcgatacttccagtgcgccagatattgaatggcctactcctccggcagttcaggccagatga

SEQ ID NO: 24273 - DNA, 1670 bp, Homo sapiens
  SIMILAR (548)..(772): 961254mologous to Escherichia coli histidine-tRNA synthetase,accession number M11843,Smith-Waterman Score=402.
ttagtcaccggcccagatctcactgagctttatcaccaggccaatcacttatgtcgccctcggtgacgaaaacgcgcattagctgcgcttcattcagaccgctgacgacctggcgatgcagggcctcaatcgcgctcgatgcaccaattttatgtgcggaaggggcgattttttccagcaatcgcaaggtatcttccgttagcggtcgacgatctccagtgtgcggatcggtgatgacgccttcaagcccatagcgacaggcctggaaacggttgaatttatacagcaggtaatctttttcctgatgtttaaacgggcgttccgtcagtaaccagtgggcggtagcctgaattaatcccgccatatttactgcgtggctaagggttaacggggtatccatcacccgaacctccaccgtgccaaaatgaggactggggcgaatatcccagtgcagatctttaatgctgtcgatcatcgtggtgtaactcagacagcgaaacagggcttcaaattgttgccagttactttgaggatcgcaatggcgacagctgtagctctgcgccctgaagggacggcgggctgtgtacgcgccggcatcgagcatggtcttctgtacaatcaggaacagcgtctgtggtatatcgggccgatgttccgtcacgagcgtccgcagaaagggcgttatcgtcagttccatcagttgggctgcgaagttttcggtctgcaaggtccggatatcgacgctgaactgattatgctcactgcccgctgggtggcgcgcgctgggtatttccgagcacgtaactcttgagctgaactctatcggttcgctggaagcacgcgccaattaccgcgatgcgctggtggcattccttgagcagcataaagaaaagctggacgaagactgcaaacgccgcatgtacactaacccgctgcgcgtgctggattcaaaaaatccggaagtgcaggcgcttctcaacgacgctccggcattaggtgactatctggacgaggaatctcgtgagcattttgccggtctgtgcaaactgctggagagcgcggggatcgcttacaccgtaaaccagcgtctgctaaattaccgcctttcagccaatttgatcgagaacaatttatctctttttgatggagaaggtatctatcggttttatcaccccaagccaacaaaaaacgccgagcgagagaaccgccagtgccgcaacgatctgtttttccgatgtggatttttctgcccaccatgatttaatcatttccctgagttccttactgtccatacaccactgaccggatctttttctgttttttccatcggaagccaggactgtgttaactcacagaaacgatcgatattagcttcactcttagcactcatttttaaggtcagcgacttttgcttctggctatagttcgcctccattaactgcagttcagggtgttccagcagaagtgtttgtaaatgatagagcaacggcacagcttcaggatattgctgagcgagttgctgcttaaagtaaaaacgaaaattgtgggtgcgtttgatctgcgggaaataacgttgccaggtttcttgctgttgttgctgaagttgatcttcaatcttaagcgtatgccagagcgcgatgctccggctgccaacaaaagaaagaatggcg

SEQ ID NO: 24274 - DNA, 832 bp, Homo sapiens
  SIMILAR (224)..(535): 941254mologous to Escherichia coli close match to PS00043: HTH_GNTR_FAMILY; similar to E. coli hypoth. 30 kDa protein adjacent to suc operon,accession number L19201,Smith-Waterman Score=492.
ggataattcgctttttaatccataaaaacctgcccaccaatgccaggtttttttttgccctgtcgtgagcgcacaccaatgcgagtatctcccttataagtctgtggttacgtcaatagagagctttgtcacaattatctgcaaagtcatacgccgttaattgctttcttttttggcgtaagcgtaagatgcttcatctggtttaaaccaaaaggattaaacaatggcggagaatcaatccaccgtagaaaatgcaaaagagaaactggatcggtggttgaaagatggcatcaccacgccgggtggaaaactcccttcagaaagagagctgggagaactgctgggcattaaacgtatgacgctgcgccaggcgttgttgaacctcgaggcagaatccaaaatcttccgtaaggatcgtaaggggtggttcgtgacccacccgcgatttaattacagtccggagctgtcggcgagctttcagcgggccgcaattgagcaagggcgagagccttttctgggggtttaccgagaaaaaccgtaccagcgatattcccgagacgctcgcgccactgattgcagtgacgccatcaactgaactctatcgcatcaccggctggggggcgctggaaggacataaagttttctatcacgaaacatatattaatcctgaagttgctccgggctttattgaacaacttgaaaaccactcattttctgcagtctgggaaaagtgctaccaaaaagagccggtagtaaaaaaattgattttcaaacccgtcagaatgccgggcgatatcagcaagtatcttggcggttctgcgggtatgccagc

SEQ ID NO: 24275 - DNA, 837 bp, Homo sapiens
  SIMILAR (831)..(334): 931254mologous to Escherichia coli pantothenate synthetase,accession number L17086,Smith-Waterman Score=774.
cccgagcgtgcgttcggcatattcacgtgccaccgtgttgtgtttgggcagcaggagcgcctgacggatccccgccaccagcgcctcgaccgattccggttcaacgcaaaccgcaatgcccggaaaggtttcgcaaagctgccccagttctgtgtaggcttcagcagtaatcaccgcgttaccgcctactgccagaatattggtcagtttcgacggcaatacggcatctgccgcgccgcgtttttgcaccaccagatggcaatcgcccatcttcagcagtgcgggtaaagcgtcatacgattgcagcgggaaaaattgcatgttgcgcagtccacgctgctgcgcccattttttccagccgcgcttttcgcacacgggacttagcgccagaccgtctttggcgcgcataattggcacaccgacaatctcaatatcgaagcccatatcggcaaccattttgcggatcagcgccagttgctgaaaatctttttcaccgaagcaggcgatgtccggctggaccaggttgaacagcttgctgacaatagtcgaaacgccgcgaaaatgtcccggacggctggcaccttccagcatggtcgaaaggccaggaacgtcaacgtaagtgtgggtttcagtaccgttcgggtagatctcttttaccgaaggggcgaaaactaaatccactttacgtttgtttagcttctcgcagtcctcctgcaaggtccgtggataacgagccagatcttccgggcggtcgaactgcatcgggttaacgaaaatactgacgacgaccacatcggcgcgggctttggcttcgtcgaccagcttcatatgggccat

SEQ ID NO: 24276 - DNA, 3657 bp, Homo sapiens
  SIMILAR (31)..(612): 961254mologous to Escherichia coli K12 putative membrane / transport protein,accession number AE000448,Smith-Waterman Score= 923.
atgtctggcaggtgtaatcgatgccggcatgatgtgcactacaatggcatcgtttctgcgccgccgagcgtaatgacagttgtgggtcatgtagatttagccgggtcgtttaacctcgggctggcaggggtgattttctctttcatgttggtcaacttgtttgactcctccggtacgctgattggcgtgaccgataaagcaggtctggcggatgagaaggggaaattcccgcgcatgaagcaggcgctgtatgtcgacagtatctcttccgtgaccggttcgtttatcggtacttcttccgttacggcttatattgagtcctcttccggcgtatcggttggcggtcgtaccggtctgacggcagtggttgttggtctgctgttcctgctggttatctttctgtcgccgctggcggggatggtgccaggctacgctgcagctggtgcgctgatttacgttggcgtgctgatgacttccagtctggcacgcgtgaactggcaggatcttactgaatctggttcggcgtttattaccgccgtgatgatgccggtcgccttctcgattaccgaaggtatcgcgctgggctttatctactactgcgtgatgagtatactcatccggttccggggatctctagagtcgtggtatcccggtcggcggctattggcattgggtttgatcacaatattcggtttggtaaatggcatgacgttattgccggaagaaaaggtgctcgacgtcccgaccgatccaacttatggcgtgctgtcgcgtcaggatctcgaccagctgcaggcaggcgcgcgcgttgacgtggtcgacgacaaacgcaacccaatggacttcgttctgtggaagatgtcgaaagagggcgaaccgagctggccgtctccccggacgctcgataacgatacgagatacggacgctttagccagttccttagtcaggtactgacctgtacgtccgcaagacagattctacaacgtgtcgacactcttcctctttatttacatgcttatgcctttcatttaaatatgcggctggaaagagtgttgcctgctgatttacttgatatcgcaagtgaaaataatctacgtggcgtcaaaatccatgttctcgatggcgagcgtttttctcttggtaatatggacgataaagaactctctgcctttggggataaagcccgccgtctgaaccttgatattcatattgaaaccagcgcctcagataaggcatctattgacgaagccgtcgccatcgcgttgaaaactggggcatcgtccgtacgtttttatccacgttatgaaggtaatttgcgcgacgtattatcgattatcgctaacgacattgcctatgtacgggaaacgtatcaggacagcggcctgacttttacgatcgagcagcatgaagatttaaaaagtcatgagctggtgtcgctggtttcccccagccccgaccttggaaaacgaggccaggcgccaagctgccatgcctgcagctcccccgtgcgcccgaacagctgcgccgtggcggcgcaggtttatatcggcagcgaatatgaacatcagtcgatcaaaaatattattcagctggttgatgccggaatgaaagtgggaatgccgaccatggccgtgactggcatatggtgcgcgatcagcgttactttctcgctcgcgactcgaatcgccgctgaaatgggggcgcaaattatcaaaacctattatgtcgaaaaaggttttgaacggattgttgccggatgtccggtacccattgttattgctggcggtaaaaaattaccggagcgcgaggcgctggaaatgtgctggcaggctatcgatcagggcgcttctggtgtggatatggggcgtaatattttccagtctgaccatccggtggcgatgatgaaagccgtattggcagtcgtgaatatgacaccttttgtggggctatcgataaactcgaggcagaactcaaaaattccgcttcctgacagagttaatagcgggtcatgcgcgcgtacccgtgggatcctctatgagtcagcggcagatcttccagcggtttgcctgacgaatggcttccaccaccgcttcaccaacaatatggtgcgcctcgcggaacgagtccttgagatcctgctgaccatcctcaaagcggtggtgatcctgctggtggttgtcacctgcggggcattcatgagctccgctaaatcccacttgttgccagcgccaccgccaaagcgccgtgaaaaacatcaaccggccttcaaagttgatgttaagctttccggcatcacaaagcggttcatgtcggctaagcggccgtgcgtcaggaatacgccgattctaaccagctgtccctcctgttcagctactgacgccttattggaaggccaggaggtttttgcaaatcttcaggaaggaatgagccaaaggtggctgttctttcccagcggtaacaggcacaagattgatcagcagcatctctttacttttgaacacgcgttcggtgagggttccggcttcatcgacttcgctctgttcgtgggcgggatgctgtttatcaagatagtgtaccagagagaacgccagccaatcagcagcctagaggttcgagacgatattgagcgccgtgcttatgaaatcgcactcgtatctctggaagtagagccagatgaacgcgaagcctatgaattattcatggaaaagcgtttcggtgacttagtagatcgtcggagagcaaaaaacggcgataacgaatacatggcatgggatatgactctcggttggatcatctggcagcaacgagctggtatccatttttcaacaatgtcacaacaagaggtccttccggtcatcattatgaccgcacattccgatctggatgctgccgtcagcgcctatcaacaaggggcgtttgattatctgcccaaaccgtttgatatcgacgaagcagtggcgctggttgagcgcgctatcagtcattaccaggaacagcagcagccgcgtaatgttcagcttaacggcccaacgaccgatatcatcggcgaagcgccagccatgcaggacgtgttccgtattatcggtcggctttcgcgttcttctattagcgtgctgattaacggcgaatccggcaccggtaaagaactggtcgctcatgccctgcatcgcccagttcgcgcgcggcaacctgtaaaaaatggcgcgccagacggggaatatcttcccgacgttccgcagcggcggcagatgaacgcggataacgttcaggcggtggaacagatcctcacggaacttaccttcctgcactcgctgttcgagattcaggttttccacggcgacattccgcgttatatggcgggtgacccgactgcgggtaaactgtctggtggcttcctgttcaaaatgtacggtctgccagctgccgcaattgctatctggcactctgctaaaccagaaaaccgcgcgaaagtgggcggtattatgatctccgcggcgctgacctcgttcctggaccggtatcaccgagccgatcgagttctccttcatgttcgttcggcggatcagttacaggctttcgatgaaacgatcctcgccagtgggatcgtgccgcgcactggctcccagggcttgaggaaatggcgattctctgcgtaa

SEQ ID NO: 24277 - DNA, 1833 bp, Homo sapiens
  SIMILAR (655)..(1275): 901254mologous to Escherichia coli close match to PS00043: HTH_GNTR_FAMILY; similar to E. coli hypoth. 30 kDa protein adjacent to suc operon,accession number L19201,Smith-Waterman Score=970.
atgggtaacctgcacgatggccatatgaagctggtcgacgaagccaaagcccgcgccgatgtggtcgtcgtcagtattttcgttaacccgatgcagttcgaccgcccggaagatctggctcgttatccacggaccttgcaggaggactgcgagaagctaaacaaacgtaaagtggatttagttttcgccccttcggtaaaagagatctacccgaacggtactgaaacccacacttacgttgacgttcctggcctttcgacatgctggaaggtgccagccgtccgggacattttcgcggcgtttcgactattgtcagcaagctgttcaacctggtccagccggacattcgcctgcttcggtgaaaaagattttcagcaactggcgctgatccgcaaaatggttgcgatatgggcttcgatattagaatgtcgtctgtatggctacattctggatttaaatccggggattattggctacaaaatcgtgtttggcattatggcctgcttcgcattcagtggtgcggtggtttccgtaatgctggttaagcgtattagccaacacctgagtgttctcacctgtgaaatggacacagcgctgggcatgggcagggggttccctgagcaggatggaaacgtgggggtgctggagaaccggaccaaggactccaagctggagatggaggtgctggagaacctccaggagctgaaagacctgaaccagcggcaggcgcacgcagaatccaaaatcttccgtaaggatcgtaaggggtggttcgtgacccagccgcgatttaattacagtccggagctgtcggcgagctttcagcgggccgcaattgagcaagggcgagagccttcctgggggtttaccgagaaaaaccgtaccagcgatattcccgagacgctcgcgccactgattgcagtgacgccatcaactgaactctatcgcatcaccggctggggggcgctggaaggacataaagttttctatcacgaaacatatattaatcctgaagttgctccgggctttattgaacaacttgaaaaccactcattttctgcagtctgggaaaagtgctaccaaaaagagacggtagtaaaaaaattgattttcaaacccgtcagaatgccgggcgatatcagcaagtatcttggcggttctgcgggtatgccagcgatcttaattgaaaagcatcgcgccgaccagcaaggcaatattgtccaaatagatattgaatattggcgatttgaggccgtagacctcatcattaatctgtgttttatggtgacaataaataacgcaagaaagattctacaacgtgtcgacactcttcctctttatttacatgcttatgcctttcatttaaatatgcggctggaaagagtgttgcctgctgatttacttgatatcgcaagtgaaaataatctacgtggcgtcaaaatccatgttctcgatggcgagcgtttttctcttggtaatatggacgataaagaactctctgcctttggggataaagcccgccgtctgaaccttgatattcatattgaaaccagcgcctcagataaggcatctattgacgaagccgtcgccatcgcgttgaaaactggggcatcgtccgtacgtttttatccacgttatgaaagtaatttgcgcgacgtattatcgattatcgctaacgacattgcctatgtacgggaaacgtatcaggacagccgcctgacttttaacatcgagtggggcaaatcatcatgctgcagtccctatgtccacccctgggctaaactggctgctatctattatcggctgcaaccgcatatcaacgatgccttttag

SEQ ID NO: 24278 - DNA, 502 bp, Homo sapiens
  SIMILAR (500)..(324): 1001254mologous to Escherichia coli K12 orf, hypothetical protein,accession number AE000111,Smith-Waterman Score=404.
atcagcttctacgctaagaaagcacgcggtctgatgagtcgtttcattattgaaaatcggctgaccaaaccagagcaactgactggttttaatagcgaaggttacttctttgatgaagattcctccagcaatggcgaactggtgtttaaacgctacgagcagcgttaagtttgcagtcaatgccggatgcggcgtgaacgccttatcctgcctacaaaagcatgcagattcaatatattgcagaattaacgtaggcctgataagacgcgccagcgtcgcatcaggcgctgaatgccggattgttacccggcatttgtcatttagcggtgatgtttgcctggaccatgaccgccgtgatgatcatgaggagctttcttatggtggcgcggcggtggcggcggtccgtgtaggtgccagcgattgcctcgccattcataatgttgtttccaccagccgtggtcgcgccagtgacctccatcccagtaatagccacgattatcac

SEQ ID NO: 24279 - DNA, 2061 bp, Homo sapiens
  SIMILAR (25)..(375): 961254mologous to Escherichia coli Hypothetical protein 126: PIR:Q3ECTC,accession number D10483,Smith-Waterman Score=581.
atggacttcgctgaaacggagctcgagttcatcaaattctggggagatatcatcaccaacaagctgaacgaggcgctcgcagcacaaggcgataatgtggtgattaatctggcgtcagatgagtattttaaatcggtgaagccgaagaaattgaatgccgagattatcaagccggtgttcctcgatgagaagaacggcaaatttaagatcatcagcttctacgctaagaaagcacgcggtctgatgagtcgtttcattattgaaaatcggctgaccaaaccagagcaactgactggttttaatagcgaaggttacttctttgatgaagattcctccagcaatggcgaactggtgtttaaacgctacgagcagcgcgctgaatgccggattgttacccggcatttgtcatttagcggtgatgtttgcctggaccatgaccgccgtgatgatcatgaggagctttcttatggtggcgcggcggtggcggcggtccttgttatcgaaccgaacaaactggcctttgacggcagcggttatctggcctgggaaggtctgatctgcatgcaggaaatcggcaaatgcaccgaagaacatcaggcgattgtgcgtaagtggctggaagagcgcaaactggatgagtttccggttgggccctttcccggggaaaaaaccaaccgggggttggttgcgaagcaggcgcccgtcgacacgcccgagaagcgcgcatcggtgatgagcgacaccgtcttgccccacgagatatgctttagcgcggagcgcgacaaaacggtgcgcctgacctttgccgacagtgcgccaggtgtcagtgacgatcagctacaaaaattgtttgaacgtttttatcgcaccgaaggttcccgcaaccgtgccagcggcggttccgggctggggctggcgatttgcctgaacattgttgaagcacataatggtcgcattattgctgcccattcgccttttggcgggcgtggtgataagccccagcacatcgtgaccgtccaccgggccgatgtagttaaagcccagctcttcaaacaacgtgccaggcactaccatgcctttaatatgttcttcggcataccagccgccatattttttatcacgcagtgcgccgttcatggctttgataccgtgatcaaccaacgagtaagcgccaggtcgacccatcgccgcagcaacggaataaaccggcgtttagccatcatttcgtcgacgatatcgccaagttgttgtaatttcggtgcgcaaacgtcacgcagcatcagctcgttgtctggtaaaccgacgaccgatgcccagactgcacggcctgccaggaatcccgatgcgcccgccgtcattgccacgcgtacggcacgcgggaacagtttttcgtcgacaccggaagagaggatcacccatggcatattgatatggtcattcagaccttgtgaagcacagagaagctctttgttgcggacctttgccataaaacggcatttcaacttttgtgaggcgctagtttcatctgcacaagaagcgggtaactatcagcgcaaactggttgctgaagatcagcaaaaaatcatcgacggcatgaaagaagcgggcgtggaagtcatcaccgatctcgaccgcaaagcctttagcgacgcactggggaatcaggttcgcgacatgtttgttaaagatgtgccgcagggagctgatctgctgaaagccgtggatgagccaggctgggcagagcgcgatatggcagaactgtggcaatgctgcatggctgtcattcgcgccctgcttactcattctggtgttagcggggaacaaattgtcggtatcggcatctccgcacagggaaagggcttgtttttgctggataaaaacgacaaaccgctcgggaatgctattttgtcctcggaccgccgggcgatggaaatcgttcgtcgctggcaggaagatggcatcccggaaaaactctacccgctgaccccgacaaaccttgtgggacccgggcatccgggggttgctgttacacctggcctgaaaagaggcacgaacccataa

SEQ ID NO: 24280 - DNA, 786 bp, Homo sapiens
  SIMILAR (268)..(438): 441254mologous to Escherichia coli O157:H7 partial putative fimbrial protein,accession number AE005543,Smith-Waterman Score= 101.
atgcctgtaagcctttgcgtatgttccgtaatcccgggcgcccggccggcccggggcaataccatcacaagttacaagaagtcggcgtatgtaagtctcccaggtgatggcaaagcccacgactactgggacaacagccaagcaacaaatgtcggagacacactggcgctggcaatacccccgggtgaacaatctcccgcgccagagcatagacttatagctcgcatgtattgtaccgccgcccagccgcgagaagtttaccagccgcatgccatgccagacggttttactccagtagactttgatatcacttatgacgtggtgatacttcgaagattaaaaactcgttgcaaatgcgcatcgacggacaactggggtagtagaccagtacaacctggtcgccaggcgaagaagttagacaatgtgcccgatgtcggaaaatttcagggcacagccaccattaccgtcatcgtgggtaaaagaagacgttgcgttttgattaacgcaacgcttcggcactgttcccctgctgctccagcgcatacttatacagcgcatttttcttcacgccggaatttctgcggccagcgccgccgcttttttcagcggcagttctgcctgagcagcgccagcgtgcgcagggcatcggcgggctggttattcgaccaacggttgaacttcaccaagctctacaacttttcttcgggcaccaacccaaaattcaatctctccacgcgctactacgaggtagcacaggattccaggcgtctttcagacttccactag

SEQ ID NO: 24281 - DNA, 2915 bp, Homo sapiens
  SIMILAR (1081)..(1110): 801254mologous to Escherichia coli Cof,accession number Z54355,Smith-Waterman Score=40.
atgtattactcgcatgcgtcttgtgttgcagatcagtatgcatgtggtatgcaccgcacgccgtcccgcacgggcaggccccggatacacgcacccaggcaggcccgactcaagccgcaggtcaaggtggcaagcaagaagcgaaacgcaagggacaagatgcagccacctaatgaacagcagaagacacgagcccatgcctgcactccaagcagcagattccgcgccgtagttcgcactctgacatgcccagtcgtggccaacgtcacaaggatattcccacgttacttcagcaataccagggtcttacgtcgtagacggaaacaagccagaggcacatggtggaggttaagacatctacatctatatgtgcaacctcacaagcacacttcttactacatttatcgcctctaccgcgtcacatatgttatgtctgcgcaagttgttgatactggtatatacgagttcacaacacggaaacacgacataggaaccatagagttaccgaattcagagatcaggtatcacgggaatccagctatgagtcgacctcgtaaaacgcctacgccgcccaactcgcccgccagcgaacgcgccacaggcccaaccaccctccttcctcccatccgacaacgtcgctacgccgcccgacacacctctactatagcatacacaaattctacgagtgatatttttgaggccccatataataaggcggccccaatcatgcgctatacatccgtgtattgttccctcttttccccgtgtaaacccgtttgcccccggcagccccctttttctctcagtcccgctgttagtaaagtattaaaagtttcagaaattacaatcaaccggtaccgtccacgggcgcgtcccgtacacatacgccgcaaggccgtggcccgcgcgacagcaatagccggcagcgcggttgtcgtatgcggttaccgcctatgcccaatgcgccatgcctgtgctacatcccagctcggagacacactggcgctggcaatacccccgggtgaacaatctccgccgccagagcatagacttatagctcgcatgtattgtaccgccgcccaccggcgaggtgagaaaaccctctctacttggcgcgactgcgtgaacgcgacattaccctcacttttgccacggggcgcatgcgctggagatgcagcatattctcggggcgctatcgctggatgcgtatttgattaccggcaacggaacgcgcgtgcattctctggaaggtgaacttttacatcgtgatgatttacctgcggatgtcgcggagctggtgctgtatcagcaatgggatacccgagccagcatgcatatcttcaatgacgacggttggtttaccgggaaagagatccctgcgacggtgaaagcattggcgtataccggctttcgctatcatgataatcaatgtcaaaaaaatgccactcggcagcgtcaccaagatctgcttctgtggcgatcacgacgatcttacacgcttgcagatccagctatacgaagcattaggcgagcgtgcacatttgtgtttttccgccacggattgcctcgaagtgctgccggtgggctgcaataaaggcgctgcattgacggtgctgacccaacatttaggtttatcgttgcgcgattgcatggcctttggtgatgcgatgaacgatcgcgaaatgttagtcagcgtcggtagcggatttattatgggcaatgcgatgccgcaactgcgcgcggagctcccgcatttaccggtgattggacattgccgacatcaggctgtctctcactatttgacgcactggctggactatccacatctaccttataccccgaatacgagatccttccagcacgggcacggccgcacagtagccgccgagaaccggcagactgcgctggggcgcccggaacaaaaagacttgtccgtccagaccggagcccagttagttcagctggtcgtggctgcgcggcatacgaggcaggcctcgtcgggcgaaccaagcgctgcagagcacgtcgaagactcagttgcgggttgggtcaggcagcataagggcgttgagccggggctgcttagcggcggcagctatcgcaagtaccggcatccagccctaacgtcctccttgcgtttctacgctacgtgcgtgctcgatcacggttgccggacaagacgtactggtagtacaggtcgttgtgctactggggcacgcgcctgccgttcagaacgcctggcacttggcgcgctagcccgtcggcgtggtacacgacgagtccctaggcgtagccagcaagccgttatactaggaggtcttaggccgcaaaacaggctactcgtgaaccgaacctcggcggcacatagttggagcgcacgttacgaaccggtcgcggagtatgacaccgggggacccacaggaaaaggccccgggagaccagtgaggcgagagcatgagctccccggacacgggcatgcagattcaatatatagcagaattaacgtaggcctgataagacgcgccagcgtcgcatcaggcgctgaatgccggattgttacccggcatttgtcatttagcggtgatgtttgcctggaccatgaccgccgtgatgatcatgaggagctttcttatggtggcgcggcggtggcggcggtccgtgtaggtgccagcgattgcctcgccattcataatgttgtttccaccagccgtggtcgcgccagtgacctccatcccagtaatagccacgattatcacgatcgcctatctgtaattttactgacgggactaaccctgtgctgccatgggagcgaccagaaccagggaaagtgcgagtacgatagattgcatctttttcacaggttactccttttatcattgcccgttatgggtcgatatccggagattactcgatga

SEQ ID NO: 24282 - DNA, 420 bp, Homo sapiens
  SIMILAR (418)..(56): 911254mologous to Escherichia coli secA protein,accession number M20791,Smith-Waterman Score=551.
atgtccgtacccggagaacaggtggagaggaaaaatattggcgcgaccactactttttcgagctgccttatgccgggccggaaatgatcagcggtgtacgcgcttcatcgatcaggatggagtccacttcgtccaccagcgcatagtgcagtttacgctgtacacgttcttcagggctgaacgccatgttgtcgcgcaggtagtcaaagccgtattcgttgttcgtaccgtaagtgatgtcagctgcgtaagcttcgcgctttgccggtgctggcatgcccggcaggttgataccgacagtcaggccaaggaattcaaacagcggacggttggtttcggcgtcacgttgcgccaaggagtcgttgacggtaactacctgcacgcctttaccgggtagtgccgtcagggaagcaagcaacg

SEQ ID NO: 24283 - DNA, 808 bp, Homo sapiens
  SIMILAR (799)..(2): 991254mologous to Escherichia coli Glutathione-dependent formaldehyde dehydrogenase (EC 1.2.1.1) (FDH) (FALDH),accession number D90701,Smith-Waterman Score=1363.
atattgttccccccggcatcgcattcaccagacctgaaaccgccttatgcgccgcctttgcgctttgtgcaccgggtaccagaatcaccttacggcactcctcttcacgtttttcgaaaatctcatatccccgggcggcctcttcaaacggcatatagtgggtaacaatttcttctggtttcagtaatcctttctcaattaacggtaataattctcccagccatgcgtgaacgtgggtctgtcccattttaaacgacaaccctttatcaaaggcgtcgccaaacaggaaaccgtgaataaatccagcgtagacgcccggtacgctaacaatgccgccacgcctgaccgccgcaatacactgacgcaacgctttaccgctgctgccctccagtttcaggttagtcagcaccgtttccgtggtgctgcctttcgcttcaaaaccgacggcgtctattactgcatccacgccccggtgacctgccgtttgttcaataattgactgtgccggatcgctgtcttcatcaaaattaatcgggatcgcgccgtagcggtcggcggcgaaatgcaagcggtagggatgatgatcaacaacaaaaatctgttccgcaccgagcaaccgtgcacaggcgattgtcaacaatcccacaggaccagcaccatagactgcaacgcttgaaccttgttggatctgcgcattttttgctgcctgccatgccgttggcagaatatcagaaaggaaaagcgctttatcatctgaaagcaaaggcggtactttaaacggccccacattccctttaggacgcggaca

SEQ ID NO: 24284 - DNA, 1152 bp, Homo sapiens
  SIMILAR (334)..(1101): 801254mologous to Escherichia coli K12 putative glycoprotein,accession number AE000239,Smith-Waterman Score=1030.
atgatcgagccgctacgggaattgttggttaacccgccgctggaaaactcgcgtaatgaagatcagaactggcgcgataacctggtgcgccaggtgcagcattcacagctggagctggtcgccaactttgccgatatctcgctacgcctgtcgcagattttaaaactgaaccccggcgacgtcctgccgatagaaaaacccgatcgcatcatcgcccatgttgacggcgtcccggtgctgaccagtcagtatggcaccctcaacggaacagcccaaatgagtgacatgaataatccggccgatgacaacaacggcgcaatggacgatctgtgggctgaagcgttgagcgaacaaaaatcaaccagcagcaaaagcgctgccgagacggtgttccagcaatttggcggtggtgatgtcagcggaatgcgattttactgccccgctgcgcgcaccaccggcttcggtgatccccagatgcaacggctgatcgatctgttttgccagcaaacgataagcgcttataccagtattcaatacgacgccgaaaaatcgctctggcataacgttgagaaccgtcaactggacgctcagttcttccatatgggaatgggattccgtcgccgcgttcgtatgttttctgtagatccagcaacacatctggcgcgtgaaattcactttcgcccggagttgttcaaatacaacgatgcaggtgttgatacaaaacaattagaagggcaaagcgatctcggctttgccggttttcgcgtgtttaaagcccccgaactggcgcgccgtgatgtagtatcatttctcggcgcgagttatttccgcgccgttgatgatacatatcaatacggtttgtcggcccgcggcctggcgatcgacacttacaccgacagtaaagaagagttccccgactttaccgccttctggtttgatacggtaaaaccgggggcaactacctttaccgtttatgcgttgctcgatagcgccagcattactggtgcctataagttcactatccattgtgagaaaagtcaggtgattatggatgtggaaaatcacctgtatgcgcgcaaagacattaaacagctgggggtacgagcacgattcacagttcactgcagcattgacctccctgagctcaggtga

SEQ ID NO: 24285 - DNA, 901 bp, Homo sapiens
  SIMILAR (464)..(898): 921254mologous to Escherichia coli ribosomal protein L12 (AA 1-179),accession number X15860,Smith-Waterman Score=685.
ccgtctggtcaacgcagtgtacgctcaagtattcgttaatagactggttactcagcagccgctgggtggtaaggcacagttcggtggtcagcgtttcggggagatggaagtgtgggcgctggaagcatacggcgcagcatacaccctgcaggaaatgctcaccgttaagtctgatgacgtgaacggtcgtaccaagatcctgatcacctggaaatttgttagaaataacaaaacggccatcaacatcgaatacatgaaagccagcatccgggccagggtggagcacccatttcgcatcatcaagcgacagttcggcttcgtgaaagccagatacaaggggttgctgaaaaacgataaccaactggcgatgttattcacgctggccaacctgtttcgggcggaccaaatgatacagtcaaagttcagccaggaatctgcagctgtcctgatgagggtgatgatgttggtgaagggtttggaggaggctggcttctcagaaagtaaagagcccacgcgaaaaacggtgcagggtaatgtgatgttgcatcaacgcggttatgccaaaatgttcatgattttcaaagaagatgaacttatcggcgttatctcgtttaatcgtattgaaccactgaataaaaccgctgaaataggctactggctggacgaatctcatcagggacaggggatcatttctcaggcgctgcaggcattgattcatcattacgcccagtctggtgaacttagacgcttcgtgatcaaatgtcgggtggacaatccgcaaagcaaccaggtcgctttgcgcaatggttttatccttgaaggttgcctgaaacaggctgagttcctgaatgatgcctatgatgatgtgaacttatacgcgcgtattatcgattcacaataa

SEQ ID NO: 24286 - DNA, 1461 bp, Homo sapiens
  SIMILAR (786)..(869): 571254mologous to Escherichia coli K12 putative glycoprotein,accession number AE000239,Smith-Waterman Score=79.
atgttcgatccagaaaccttgcggactttcattgcggttgctgaaacaggaagtttttcaaaagcggcagaacgattatgtaaaaccacggcgacgatcagttatcgcattaaacttctggaagagaataccggagtagcgctgtttttccgtacgactcgcagcgtgacgttgacagcggttggcgagcatctactttcccaggccagagactggctgagctggctggaaagtatgccagagcgagctgcaacagtttggatgtttgtcccaacgccgctttctgttgccagtgggttacaacgcattggtcgcgccggacatcaggttggcggtgtatctaaagggctgtttttcccccgtacccggcgtgatttagtcgattccgcagtcattgtagagtgtatgttcgcaggcaggctggaaaacctgacaccaccgcataatcctctcgacgtccttgcgcagcaaaccgttgccgccgcggcgatggatgcattacaggtagacgaatggtactcccgcgtacgccgtgccgcaccgtggaaagatctgccaagacgtgtttttgacgccacgctggatatgctttccgggcgctatccctctggcgatttttctgcttttcgccccaaactggtctggaacagggagaccgggatattgaccgcccgacctgcggcattcgcggcagattctgatattgccgacgggcaaacccagcgttttgacttctccattctacagtcaatggcgcacgacttatcgcaaacagcgtggcgtgtattcaatacgacgccgaaaaatcgctctggcataacgttgaagaaccgtcaactggacgctcagttcttccatatgggaatgggatttcgtcgccgcgttcgtatgttttctgtagatccagcaacacatctggcgcgtgaaattcactttcgcccggagttgttcaaatacaacgatgcaggtgttgatacaaaacaattagaagggcaaagcgatctcggctttgccggttttcgcgtgtttaaagcccccgaactggcgcgccgtgatgtagtatcatttctcggcgcgagttatttccgcgccgttgatgatacatatcaatacggtttgtcggcccgtggcctggcgatcgacacttacaccgacagtaaagaagagttccccgactttaccgccttctggtttgatacggtaaaaccgggggcaactacctttaccgtttatgcgttgctcgatagcgccagcattactggtgcctataagttcactatccattgtgagaaaagtcaggtgattatggatgtggaaaatcacctgtatgcgcgcaaagacattaaacagctgggcattgcgccgatgaccagtatgttcatgccgcgaaaaaacgcatcccggttatcgaagcgctgttacgacataagggaaagagatggacgggaagaaagaaagtag

SEQ ID NO: 24287 - DNA, 1097 bp, Homo sapiens
  SIMILAR (585)..(175): 761254mologous to Pectobacterium chrysanthemi SufD protein,accession number AJ301654,Smith-Waterman Score=551.
tcacgagaaacgatacgcacaccggaggcggcgcgcactggcggcgctgtcgagataagccagcggcaaaccgtttacctcacgcgaaagcaccggaaagtcggcccgcactttgtcgacggaaaaaatcatcttgcacctcctggcagccgttgaccgattcgggccagcacctgcttgtttaagcccctcatcacgcagtgcttccgtcagttcggcagcgaaggcgtaaatgatcatctgctgggcatcctgctgattgatcccgcgcgagcgcagatagaatatctgttcatcatcaatacgccccaccgtcgcgccgtggctgcatttcacatcatctgcatagatttccagctgcggtttcgtatccacttccgccagtttgcccatcagcagattgttgttggtcatctgaccatccgttttgatggcgtgctgcgcgacgttgatcaaaccgttaaataccgcgcggcctttgtcgctgacgatagttttgtgcaactgtcggctgttacaaaaacctttattgtgttccagccaggtacgggtatcacacacctcgtttttcaccggcatcgccaggcgcaatagccctttaaagtaccattttcgcgccgtctgcgaaatggcatccacacgcattgttgatgatttaagggctaaattcggaaaatcaaccagcgttaactttcttgttctcgttgcgctatttcgcgattttcttccgcaggtggtgttaatggcccacaaattcgttgcgcaagccacgttgccaccgccaccagcgcccacgaaatcaacgtagctactaccagatcgcgtggccaatgcatcccgagcagcaggcggcttcccatgactcccgttgcccagaccagcaagatagcaatggttaacgttcgccgacgcggccacagcaaaccaacggccagcagtgcccaactggcagcaaacatcgtgtgaccggaaggaaaggcaaaccccgtctctttctgccgtttcggcaatagcgtaagcagatgacacagctgatatgtgataagctgagatttgaatcctggttaatactctgaagatcttgttgtctccatttc

SEQ ID NO: 24288 - DNA, 2026 bp, Homo sapiens
  SIMILAR (917)..(1567): 991254mologous to Escherichia coli K12 putative general secretion pathway for protein export (GSP) (TYPE II TRAFFIC WARDEN ATPASE),accession number AE000409,Smith-Waterman Score=1045.
ccatttgagcaggcgttgggttgtccggttttggatgagttccagctttaccaggaagcggaagaacgcagtaaacgtcgctgtggtttgctttaaaatctgaccatccgcctttgcaaaaatttgcctgattttacaaacgaatcaggctcatcccatcgacataaaaaaatgccgatttatgcatattctctcagttcaacaattggattattaataaatattgtctagagtgagcggtcataaataagcactttcttgccgctgaaaacgaccagcgcgggaccattcacaacaccagaaggactcactttcaggtatggatcgtagacgatttattaaaggttcaatggctatggccgccgtgtgcggtaccagcggcattgcttctcttttttctcaggcggcattcgcggcagattctgatattgccgacgggcaaacccagcgttttgacttctccattctacagtcaatggcgcacgacttagcgcaaacagcgtggcgtgatgtgcacaacacaacatataactacaagcgattgatgagccagcgggatgccctgaatcagagcctggcagaagtccaggggcagattaacgtttcgttcgagtttttcccgccgcgtaccagtgaaatggagcagaccctgtggaactccatcgatcgccttagcagcctgaaaccgaagtttgtatcggtgacctatggcgcgaactccggcgagcgcgaccgtacgcacagcattattaaaggcattaaagatcgcactggtctggaagcggcaccgcatcttacttgcattgatgcgacgcccgacgagctgcgcaccattgcacgcgactactggaataacggtattcgtcatatcggggcgctgcgtggcgatctgccgccgggaagtgagatgcgctctaagattgcgcaggatatcgatcaatccgtcgatcttctctcgctttcggaagagatgcccgcaaatgaagatctcctgaatgaagattcagcggcaccggttatccgcttgatcaatgcgattttgagtgaggccatcaaagaaaccgcctctgatatccacattgaaacctatgaaaaaacaatgtcgatccgttttcgcatcgacggcgttttgcggacaattttacagccaaacaaaaaactggcggcactgcttatctcccgaattaaggtcatggctcgtcttgatatcgccgaaaaacgtattccacaggatggaagaattagtttgcgtatcgggcgacgtaacatagatgtccgcgtatccacactgccgtccatctatggtgaacgcgccgtactccgcctgctggataaaaacagcctccagctttcattgaacaacctggggatgacggcagcggataagcaggatttagaaaatctcattcagcttccgcacggtattatcctggtgacagggccgacaggctccggtaaaagcaccacgctctacgccatcctttccgcgctgaatactcccggccgcaatattctgacggtagaagatcccgtggaatatgagctggaacgcattgggcaaacgcagccttctgattccggtaaatcgttcatctttaatatgagcgtcggttacaacctcgaaggtattaagcaaccgccgatgcaacagttcatcgacaatatgatggacgcatctgaccatccgaaattcgctcaatatcgcgatacgctgaataaattactccaggatgacgcatttttagctcgccacggattgcaggaaaaacgcgaaagcttgcaagccttacccgctcgcatccccaccagtatggtgcatggcgtcaccctctccaccatgcacggctgtcctccgcatgaaatcgaagccatttgccgctacatgctggaagaaaaagggctcaacacctttgtgaaacttaacccgaccttactggggtacgcgcgtgttcgtgagatcctcgatgtctgcggtttcggttacatatgctttaaagaagagcatttgatcacgacctcaagctga

SEQ ID NO: 24289 - DNA, 3550 bp, Homo sapiens
  SIMILAR (2371)..(2901): 941254mologous to Escherichia coli K12 putative glycoprotein,accession number AE000239,Smith-Waterman Score=922.
atgcctcgctccaactattttagtgaacgttgcaaaggtgaaatattcctgaagtttgaaaatatgcagcgtacgggttcatttaaaattcgtggcgcatttaataaattaagttcactgaccgatgcggaaaaacgcaaaggcgtggtggcctgttctgcgggcaaccatgcgcaaggggtttccctctcctgcgcgatgctgggtatcgacggtaaagtggtgatgccaaaaggtgcgccaaaatccaaagtagcggcaacgtgcgactactccgcagaagtcgttctgcatggtgataacttcaacgacactatcgctaaagtgagcgaaattgtcgaaatggaagcccgtatttttatcccaccttacgatgatccgaaagtgattgctggccagggaacgattggtctggaaattatggaagatctctatgatgtcgataacgtgattgtgccaattggtggtggcggtttaattgctggtattgcggtggcaattaaatctattaacccgaccattcgtgttattggcgtacagtctgaaaacgttcacggcatggcggcttctttccactccggagaaataaccacgcaccgaactaccggcaccctggcggatggttgtgatgtctcccgcccgggtaatttaacttacgaaatcgttcgtgaattagtcgatgacatcgtgctggtcagcgaagacgaaatcagaaacagtatgattgccttaattcagcgcaataaagtcgtcaccgaaggcgcaggcgctctggcatgtgctgcattattaagcgaggccgcccggggatatgagattttcgaaaaacgtgaagaggagtgccgtaaggtgattctggtacccggtgcacaaagcgcagaggcggcgcagaaggcggtttcagatgggattaaagcaggtagtcgccagcagcttctggctggtattcgagttccagcacttcaagcgcgttgcacgaaaaagtgggagatcgccagcgggcggctacgcaagttgcgacctattgcaggtgaagaatcttcggttcgcgaatcaaatgcgttcataagcatgccagcaccggcaaagcgcgaagcttacgcagctgacatcacttacggtacgaacaacgaatacggctttgactacctgcgcgacaacatggcgttcagccctgaagaacgtgtacagcgtaaactgcactatgcgctggtggacgaagtggactccatcctgatcgatgaagcgccgcgggaccattcacaacaccagaaggactcactttcaggtatggatcgtagacgatttattaaaggttcaatggctatggccgccgtgtgcggtaccagcggcattgcttctcttttttctcaggcggcattcgcggcagattctgatattgccgacgggcaaacccagcgttttgacttctccattctacagtcaatggcgcacgacttagcgcaaacagcgtggcgtggtgcgcctcgtccgttacctgacacgctggcgacaatgacgccgcaggcttataacagtattcaatacgacgccgaaaaatcgctctggcataacgttgagaaccgtcaactggacgctcagttcttcccatatgggaatgggattccgtcgccgcgttcgtatgttttctgtagatccagcaacacatctggcgcgtgaaattcactttcgcccggagttgttcaaatacaacgatgcaggtgttgatacaaaacaattagaagggcaaagcgatctcggctttgccggttttcgcgtgtttaaagcccccgaactggcgcgccgtgatgtagtatcatttctcggcgcgagttatttccgcgccgttgatgatacatatcaatacggtttgtcggcccgcggcctggcgatcgacacttacaccgacagtaaagaagagttccccgactttaccgccttctggtttgatacggtaaaaccgggggcaactacctttaccgtttatgcgttgctcgatagcgccagcattactggtgcctataagttcactatccattgtgaaaaaaagtcaagtgattatggatgtggaaaatcacctgtatgcgcgcaaagacattaaacagctgggcattgcgccgatgaccagtatgttcagctgcggtactaatgaacgtcggatgtgcgatacaattcatccgcaaattcatgactctgatcgtctgtccatgtggcggggcaacggcgagtggatttgccgtccgctgaataatccgcaaaaattgcagttcaatgcttacaccgacaacaacccgaaagggtttggtttattgcaactggatcgtgacttctcccattatcaggacattatgggctggtataacaaacgccccaagtctgtgggtggaaccgcgtaacaagtggggtaagggcaccatcggcctgatggaaatcccaacaacgggcgaaacgctggataacattgtctgcttctggcagccagaaaaagctgtaaaagcaggtgatgagtttgcattccagtatcgtctgtactggagtgcgcaaccgcctgttcattgcccattagcgcgcgttatggcgacgcgtaccggcatgggcggtttctcggaaggttgggcgccaggtgaacactatcccgaaaaatgggcgcgtcgttttgccgtcgatttcgttggtggtgatctgaaagctgccgcgccaaaaggcattgagccggtgattacgctttccagtggggaagcgaagcaaatcgaaattctctatattgaacccatcgatggttatcgtattcagtttgactggtatccgacttcggactccactgatccggtcgatatgcggatgtatctacgttgtcaggggaacgctatccagtgaaacatggctgtatcagtatttcccgccagcgccggataaacaataccgagatttaatatcccgtctgaaaaacgaaaatcctcgctttatgtccttgttcgataaacacaataaacttgatcatgaaattgccagaaaggaaggttccgacggtcgagggtacaatgcggaagtggtccgcatgaaaaaacaaaagctacagttaaaagatgagatgctcaaaatcctgcagcaggagagcgtcaaagagcagtcgctaaactggccgcagtttgttcaaagtgaagaggacacgcgaaaaacggtgcagggtaatgtgatgttgcatcaacgcggctatgccaaaatgttcatgattttcaaagaagatgaacttatcggcgttatctcgtttaatcgtattgaaccactgaataaaaccgctgaaatatcaacttcgtgtggtgttaatggcccacaaattcgttgcgcaagccacgttgccaccgccaccagcgcccacgaaatcaacgtagctactaccagatcgcgtggccaatgcatcccgagcagcaggcggcttcccatgactcccgttgcccagaccagcaagatagcaatggttaacgttcgccgacgcggccacagcaaaccaacggccagcagtgcccaactggcagcaaacatcgtgtga

SEQ ID NO: 24290 - DNA, 2691 bp, Homo sapiens
  SIMILAR (700)..(1479): 901254mologous to Escherichia coli K12 putative EC 2.1 enzymes,accession number AE000230,Smith-Waterman Score=1255.
atggaagtggtggtacgtccggtgatccgcaacagcggcgcggttctgaatgtacgggctgacaaagccgaagccaataaatgcgacctgtgcaaccatcgtgaagacggcccggcgtgtatggcggcttgcccgactcatgcgctgatttgtgtcgatcgtaataaacttgaacaactgagcgcagaaaaacgccgccgaattcccggaaatattcgtagaatacggagcgggcggtatcgccgacctgtgactgccggatgcgacgctgtcgtgtccggcagggcgggttacgcaattcatgatggcgggaataactcaatggcaaaaaacacatcttgcggtgtccaactgcgtattcgtggcaaagtgcagggcgtcggttttcgtccgtttgtctggcagctggcacagcaattaaatcttcacggcgatgtctgtaatgacggcgatggcgtagaagtccggctgcgggaagacccggaaacgtttcttgttcaattgtatcagcactgcccgccgctggcgcgtattgatagcgtcgagcgtgagccgtttatctggtcacaactgcccaccgagttcactatacgccagagcacaggcggcaccatgaatacgcaaattgttcccgatgccgctacttgcctgctgcctgccgaaatgataccccagcgaacggtaccactttttgccgctgttaatgcggtgcgtgaagagcgcctgctgggcgtgaaacgcattccccagcgtgactttggcattccgcgcttcacctatgacgaagggctggcgcagttatatggcgatccacccgcctggccaacgccaacgcgcggcgtcagtgaaatccgcctggcgctacgttttaaatcgaatgattcgctgctacgccactttaaggatacctccacgctgtatctggaaattgtggattatcccggcgaatggttgctcgacctgccgatgctggcgcaggactatttaagctggtcgcgccagatgacgggcttactcaatggtcagcgcggagaatggtcggcgaaatggcgaatgatgagcgaagggctggacccgctagcgcctgccgacgaaaaccggctggcggacattgccgccgcgtggaccgattatctccaccactgtaaagagcaggggctgcactttattcagcctgggcgctttgtcttgccgggagatatggcaggtgcgcccgcgctgcaattcttcccgtggccggatgtcgatacctggggcgagtccaaactggcgcaggccgataagcataccaatgccggaatgctgcgcgagcgctttaattattactgcgagaaggtggtgaaggggttctataagaatcattttctgcgctttgaccgccagattgtgctggtgattgcctgcaacctctcaacagtggcacaggcattaatgatatcgtctggcatgacccacttattcaagtttcccacggggcagtatttcaccggagtagggagatcgccggtgagcacttctgaggcatcgtggtacatcgccagtaaagcgatacgttcggcgttgacattaccgccaaattttcgatttttgatagctgccagcgcatgggcgaccatcgctacctgcaaactgtgttcggacacattttccgtccgcacgttgcgcatgagcggccagcggttaatgagtttcaggcgggagagatgggcaaaaaaatggctctgtttcatagtgaccttacgtatgatgacatcatcaggtcattgtggcgggataacgctgccggatgcaatctccggcagtgaaattaagattacagctgatgataaccagaaaggaaacgcgcgaacttgctcaaagacagctcgatatcatcgacacgcgaactttttcctgcaacaggaaatccaacaccattttctgatcgtcgtgaatgttaaagcgtttggcgtcgattttcgggaacatatacagcgcaccacgaggtttcacgcaggaaacgcccggaatatcgttgatcagttcccacgcgcggttacgctgctcataaagacgaccgccagggcctttggcgtgttttttcggcccgttcaacaccatccacccctgacggaagcctgcaacgcggtacgttttcgacagtccgttaaaggtaatggtcagcagacaatcacgggtttgcgctttgatttccgccagacgtgggccaaaatccgggaactgtttcggattagcttccaggctcttaacgaagttttccaggtgatcgcggcgcgacagcatattattcaggcgcgcttcaaacagggcgtcggtcaaatcgctggtatcaaaaacgaagatatccatcatcagcttcaggttttcgatagtcggctgacgataaagctgattcagtcgcttaataccttcggttggcatcggcgtaaacaaactcatgccgcccgtaccgccgcccatcagcaccagtttgccgacgcgctccggccatttaagggtgaacgccacagaactatggccccccatcgagttgcccagcaggtggattttggcgatatccagttgatccaccacgcttttcaggattcgtgcattaagatccgatcgcgaaccactattaacgaccgaatcgctcttgccccaacccggacaatccagcaggatcacccgatagtatttatagacacatga

SEQ ID NO: 24291 - DNA, 3318 bp, Homo sapiens
  SIMILAR (1585)..(2160): 941254mologous to Escherichia coli ribonuclease D (AA 1-375) (start codon uug),accession number X07055,Smith-Waterman Score=933.
atggacgaactcagactggtactaatgaccatcatccacatcaaattaccgccaatacgacgcgcggacggatcgttcgggaatgatttaaccacgggggcaggttttaatgaccggaaaaccgtaccccggtacgcccgtgtgcacgtgtaccggtgccgaaaagtgatatgcatctttaccaagcgtatccccttctgcctggatgtacccgcgcatagagctctggtggtgatgaaaggcactctgtatggaatgccggttgtcgctgcggcattcgagttcgcctttatgggcggttcaatggggtctgttgtgggtgcacgtttcgtgcgtgccgttgagcaggcgctggaagataactgcccgctgatctgcttctccgcctctggtggcgcacgtatgcaggaagcactgatgtcgctgatgcagatggcgaaaacctctgcggcactggcaaaaatgcaggagcgcggcttgccgtacatctccgtgctgaccgacccgacgatgggcggtgtttctgcaagtttcgccatgctgggcgatctcaacatcgctgaaccgaaagcgttaatcggctttgccggtccgcgtgttatcgaacagaccgttcgcgaaaaactgccgcctggattccagcgcagtgaattcctgatcgagaaaggcgcgatcgacatgatcgtccgtcgtccggaaatgcgcctgaaactggcgagcattctggcgaagttgatgaatctgccagcgccgaatcctgaagcgccgcgtgaaggcgtagtggcctgggatttgcagttcaccatcggacgcgtctggcgtatcagtcagttgaatgccgccgctgtcaggatagctgtgagccaatggcaattatctttcgcccgacgctctccgggatctaccagccgcaacttaatagccaactttgcaacggatgtggagcatgtgcagccagctgtccgcctggtcgtgcaggccaaaagcgaacgaatttcagacatcagcacccaactgaacgcctttcccggctgtgaagttgctgtcagcgacgcgccgagcggtcagttgattgtggtggtggaagcagaagacagcgaaacgctgatccaaaccattgagtcagtacgcaacgtagagggcgtgctggcggtgtcgctggtttatcaccagcaggaagagcaagctaacgccgttgcggccgctgcggcggctgccggtctcagcgtgccgggcgttgcccgcgccgttgttggtcagcaggaagccatcaaatgggataaagcgccgtgccgtttctgcggtactggttgcggcgttctggtcggaacgcagcagggacgtgtggtggcctgtcagggcgacccggacgcaccggttaaccgtggcctgaactgcattaagggctatttcctgcccaaaatcatgtacggtaaagaccgtttgacgcagccgctgctgcgtatgaaaaacggtaaatatgacaaagaaggcgaatttaccccaatcacctgggatcaggccttcgatgtgatggaagagaaattcaaaaccggcctgaaagaaaaaggccggaatcgatcgcttatggtagaaacggaggcctccggctggctacctgcggcgctggatgaatgccgcctgatgcaaatgcgtcgtcaggaagtcgttgcgccggaagatgcctggcgtgatatcaccaatgcctggcaattacgcacacgccaactggcctgtctgcaactgttagccgactggcgactgcgcaaggcgcgagagcgcgatctggcggtgaactttgtcgtgcgtgaagagcatttgtggtcggtagcgcgttatatgccgggaagtttaggcgaactggacagcctgggtttatccgcgaaatccgctttccacggtaaaacgctgctagcgctggtggaaaaagcgcagacattgccggaagatgccttaccgcagccgatgcttaacctgatggacatgccgggttatcgtaaagcgtttaaagcgattaagtcgctgattactgacgtgagcgaaacgcataagatcagcgccgaatgctggctcgcgtcggcaaataaccaactgctgaactggcactggaaactgaaaccgcagaacaatttgccggagctgatttccggctggcgtggaatatccgcagtaaaatcttccgaagccggactgggcgcgctcagcgccacatccggcttcggcaaactacaaatccaacaccaggcgtttacccttcgcacgcgaacaacagatcaacatactttgctggctggcacgctcttcatcgctaaaatattgatcccgatgcaaattgctcaaagtgcagcgtatcggcggcgatgtccagacgcgcagcttcacttcttaccgcttcaattagcgcctcggggccacaggtataaacgtgtgtgccaggttcgatatccgccaataatcgcgctaattccagtcgtgttccggttgatgaatgatgcaaatggactttctcagcctgcggatgctggactagctcatcacgaaatgcgcaactttctggatttcgcgagcagtaatgtagctgccagtcgacgtcgctgtgttgcagctctgccatgtgcgacaggaaagggacgacaagccaacgagcaagccgaaaacaaatgcagcaaagatccacaaacacaccggacagacaacaaagaaaccaagacaccgccagcgaggccgacaaccaccacacaaccacacaccaaggaagaggagccactaagcacgccaacccaaaccaagcatccaccaacacacgtcactgggacgggcccacacccgacacccgccagcggccaaacggaaaaacacgaacgcaaacggccaactcaacagaaaagcaacgcgcgccaaaatagcaaagacaaacgcacacccaacaagagcaagaccacgaaaccaaacagaggatacaaccaacacccagccggagagccgactatgagcacacacgagaaggtcaaaccccaccagcagaacagaaaaatacaagcaccccccaagcgacagaagaccgaccacagacacacccacaacacacacccccaccccccacaccgagccgcctcaaccaccacgcaagccgccccaccaccgcgacgcgcgacccgctcaggcaccagcgccacagcacacaacaacaccgagccccacgggacaagacacacccaaccgggagaccacaagagagcagaagaacacgaccgcacagccgacgaaccgaccccacccgaacacactctaccctcccatacgcagctcggaccttaa

SEQ ID NO: 24292 - DNA, 2928 bp, Homo sapiens
  SIMILAR (2377)..(2895): 991254mologous to Escherichia coli Probable nitrate reductase (EC 1.7.99.4),accession number D90850,Smith-Waterman Score=926.
atgtgggctgcgcagcacatcgcccacactcgcccggaaaatttcatcacctccagcggtttaggtaccatgggttttggtttaccggcggcggttggcgcacaagtcgcgcgaccgaacgataccgttgtctgtatctccggtgacggctctttcatgatgaatgtgcaagagctgggcaccgtaaaacgcaagcagttaccgttgaaaatcgtcttactcgataaccaacggttagggatggttcgacaatggcagcaactgttttttcaggaacgatacagcgaaaccacccttactgataaccccgatttcctcatgttagccagcgccttcggcatccatggccaacacatcacccggaaagaccaggttgaagcggcactcgacaccatgctgaacagtgatgggccatacctgcttcatgtctcaatcgacgaacttgagaacgtctggccgctggtgccgcctggcgccaaaaccttagaacgtgttttacgcgtggtgcgtcatcgtggtttccacgtctgctcaatgaatatggccgccgccagcgatgcacaaaatataaatatcgaattgaccgttgccagcccacgagcacaaccacatcacaacaaatccgcgcctgagcgcaaaaggaatatcagaatgaccacgaagaaagctgattacattgggttcaatggggagatggttcgctgggaagacgcgaaggtgcatgtgatgtcgcacgcgctggactatggcacttcggttttagaaggcatccgtagctacgactcgcacaaaggaccggtatttcacgccgtacatcaacccgaaaaacggccgccgaacaccgacaacgggcgctccgtgaatacggccctatattgtcatagggttacatgtccctgtaatcacttcacctgggttctctctaagaacgctccccgttggcaccttttccttgtcaaccataaccggaccgtcaaagcatggttatccaccagtaatatggctgccataacactgatgccatttgattccatcttgtcaaaatatgctttcataactagcccgaaatcaccgcaggcagcacgcacgcccctcaggacggctggaaaccacgccaagtctgttttgcatttatgtgaggtggtccaggtaacggttgttgttggaatgcttctggttaggtcaccagaacgctgtgacgtacagagtgacatcaaggggcacaagggtcacgcacggcccacagggacgcctggagttcgcgaaacgttccgagacctaaagccgacggacgaaccaatacggcacactgccgacacacagggggcccgcaaaacaggcgagacacacaacacattccgtcttggcaaagaaacaattctgttacgtaccggctggaccgcgttcgatgaagaaaagaccgaactgatcaaccagacggtgacctgtcatatcgacctgattttgcaaggcattatcgcaaaggagtttgtcagtcgatcgcacaacaaacccgtgggcatccgtctcagcagctctgcacccctcgccagcgccattgccaagccttggccactggcccgtcgttttcacacaccgtccgacaacaatccacgcacatattatccggacgctaagaccttgcggctggttacagtcaggctgcaacgacggccccgacaccagatacgaccctatacacccaaatcaagatattggcagccaggcaccttgaaaattgaattttatgatctaaatctaacctctcaggggatgtgtctctcttctggcgtcttcctcggtgtgtctcccgaggcgcttttacgacattgggcccgggttatgcccttccctatggtccgccgaggtggtaggcggttgcgccagcttcacatcctggataggcaggaacgtttccctatcatactcctgtcccgggtctcatgtgtctcagttcaaacagacactgccgtctatcttcaagctgcaatgaagctgagagccacagaaaacacctgtaccatggtttcagggaggagtctcttccctcagccgaaaacagacagctttgctggtcatctgttctccactgcgaggacgctgccactcagtgtggagagaggaaggggttctgcctatggtgcaagaaggtcggactcggcagctggtgttcagccaaaagcgaccgatttcagacatcagcacccaactgacgcgtttccgggctgtgaagttgctgtcagcgacgcgccgagcggtcagttgattgtggtggtggaagcagaagacagcgaaacgctgatccaaaccattgagtcagtacgcaacgtagagggcgtgctggcggtgtcgctggtttatcaccagcaggaagagcaagctaacgccgttgcggccgctgcggcggctgccggtctcagcgtgccgggcgttgcccgcgccgttgttggtcagcaggaagccatcaaatgggataaagcgccgtgccgtttctgcggtactggttgcggcgttctggtcggaacgcagcagggacgtgtggtggcctgtcagggcgacccggacgcaccggttaaccgtggcctgaactgcattaagggctatttcctgcccaaaatcatgtacggtaaagaccgtttgacgcagccgctgctgcgtatgaaaaacggtaaatatgacaaagaaggcgaatttaccccaatcacctgggatcaggccttcgatgtgatggaagagaaattcaaaaccgccctgaaagaaaaagggccggaatcgatcggtatgttcggttctggtcagtggactatctgggaaggttatgccgcgtccaagctgtttaaagcgggcttccgttcgaacaacatcgacccgaacgcgcgtcactgtatggcgtcgttccagcgaattgacggttccatcatttgttga

SEQ ID NO: 24293 - DNA, 3393 bp, Homo sapiens
  SIMILAR (2038)..(2781): 991254mologous to Escherichia coli K12 6-phospho-beta- glucosidase A; cryptic,accession number AE000373,Smith-Waterman Score=1350.
atgggcggtgttctctttggtctgtcgatcggttcgatgagcggtattctctgctcggcgtggttagtgaaacgctttgggacacgtaatgtcatcctggtcacgatgtcctgcgcattgatcgggatgatgatattaagtctggcactctggctgacatcgcccctgctctttgccgttggtctcggcgtctttggggcaagttttggttctgcggaagtggcgataaacgttgaaggtgctgccgttgagcgagaaatgaataagacggttttgccgatgatgcacggtttttatagcctgggcacgctggcaggcgcaggtgtcgggatggcactgacggcctttggcgttccggcaacggtgcacattttattggcggcgctggtagcgcaaattgccgcctggtataaggcgcttcaggaacagatccccgactttattccccgtgcgccgcagcggcagatgattgcggacgtcgccaaaacgctggccggagaagaagggcgacatctggcgattgaagcccccaccggcgttgggaaaacgctctcttatttgattcccggcatcgccattgcccgcgaagagcaaaaaacgctggtggtgagtaccgccaacgtggcattgcaggatcagatttacagcaaagatttaccgctgctgaaaaagatcattcccgatcttaaattcactgccgcttttgggcgtgggcgctacgtttgtccgcgtaatctgacggcgctcgccagtactgaacccacgcaacaggatctgctggcgtttcttgacgacgaactgacgccgaacaatcaggaagagcaaaaacgttgtgcgaagctgaagggcgatctcgatacttataaatgggatggtctgcgcgatcatactgatatcgctatagatgacgatctctggcgtcgtttaagtaccgacaaagccagctgcctcaaccgcaattgttactactatcgtgaatgcccgttttttgtcgctcgtcgggagattcaggaagcggaagtggtggtggcaaaccatgcgctggtgatggcggcgatggaaagcgaagcggccaaaagcgaacgaatttcagacatcagcacccaactgaacgcctttcccggctgtgaagttgctgtcagcgacgcgccgacgttgattgtggtggtggaagcagaagacagcgaaacgctgatccaaaccattgagtcagtacgcaacgtagagggcgtgctggcggtgtcgctggtttatcaccagcaggaagagcaagctaacgccgttgcggccgctgcggcggctgccggtctcagcgtgccgggcgttgccgcgccgttgttggtcagcaggaagccatcaaatgggataaacgccgtccgtttctcggtactggttcggcgtctggtcgacgcacaggactgtgtgctgcaggcaccgacgacggaagaagataaatccaccaaccgcccttatacctcacgttatatcggttcactgggggcggatttccatggtaacctgctgaaaggcggtatttatctctacccaagcaccgccagccacccggacggcaaactgcgtttgctgtatgagtgcacccgatggcattcctggcggaacaagcgggcggtaaagcgagcgatggcaaagagcgtattctggatatcatcccggaaaccctgcaccagcgccgttcattctttgtcggcaacgaccatatggttgaagatgtcgaacgctttatccgtgagttcccggacgccgtccctaataccgttccaacgccaccgctcaaaagcgtaccgccaattaccactgaggcgatacatccagttccacacctacgcccgccagcgcatatccggcctgggtataaatcgagaagacaatccccgccagcgttgccagtccggtggagagcatatagatgcgaatagtggtgctgcgagtggatatccccatcagattcgccgacgtttcgttgccgctaatggcgtataccttgataccaaaccggaattgactcatctggagcctatgatagtgaaaaaactcaccttaccgaaagatttcttatggggcggcgcagttgccgctcatcaggtcgaaggcggctggaacaaaggcggaaaagggccgagcatttgtgacgttctgaccggtggcgcacacggcgtgccgcgcgaaatcaccaaagaagtcttgccaggaaaatactatccaaaccatgaagccgttgatttttatggtcactataaggaagacatcaagctatttgccgaaatgggcttcaaatgttttcgtacatccattgcctggacgcgcatttttccaaaaggcgatgaagctcagccaaacgaagaagggctgaagttctacgatgatatgttcgatgaactgctgaaatacaacatcgaaccggtgatcaccctctcccactttgaaatgccgctgcatctggtgcagcaatacggtagctggaccaaccgtaaagtggttgatttctttgtacgtttcgcggaagtggtatttgaacgctataagcacaaagtcaaatactggatgaccttcaacgaaattaacaaccagcgtaactggcgtgcaccgctgttcggttactgctgctccggcgtggtgtataccgagcatgaaaacccggaagagacgatgtatcaggtgctgcatcaccagtttgtcgccagcgccctggcggtgaaagctgcgcgtcgcattaacccggagatgaaagtcggctgtatgctggcgatgctacgtctttaccgatgtgcactaagcggctattaccggtcctatgtgttgacgattgggaccttccgggatttacatcaaaatggagtgatgcaccatatcactgctaccagccgcgttgtggtaattggtattggcgggctggggcatatcgctataaaacttctgcacgcaatgggatgcgaggtgacagcctttagttctaatccggcgaaagagcaggaagtgctggcgatgggtgccgataaagtggtgaatagccgcgatccgcaggcactgaaagcactggcggggcagtttgatctcattatcaacaccgtcaacgtcagcctcgactggcagccctattttgaggcgctgacctatggcggtaatttccatacggtcggtgcggttctcacgccgctgtctgttccggcctttacgttaattgcgggcgatcgcagcgtctctggttctgctaccggcacgccttatgagctgcgtaagctgatgcgttttgccgcccgcagcaaggttgcgccgaccaccgaactgttcccgatgtcgaaaattaacgacgccatccagcatgtgcgcgacggtaaggcgcgttaccgcgtggtgttgaaagccgatttttga

SEQ ID NO: 24294 - DNA, 2448 bp, Homo sapiens
  SIMILAR (1789)..(2334): 1001254mologous to Escherichia coli capsule synthesis regulator component C,accession number M28242,Smith-Waterman Score= 925.
atgggaactctcctcggtacccttacggtgctgacgctggtcgcggaggaactccccgccgaaaccgacgttgctgccgaccctgccgcttcgcccacctgtacagcggttaatcagaccattggtcgagctatcgtggctgctgatttctttatcatctttcagctctggcagaatacggttcgccagcttgttacccatttcaagccccatggccaaagtgagatgtcagatacgcccgagttgataaatcgagctcggtacctaacttacctgtattgtcggcagccggcgaaagcgattcgtgaactcagtgagcaggagttggcatggaaaaagcaggctacgcatgagtaccaggtgctggtgacacgctgtaagcagacgttacatcaagtcgagccattgcgggaaattgaacctggcaggaaacgcctggtatttgatgagaatctgcgaccgaaacaaaatccgatcccacacttattggatacttgttggcccctcaccgttgatgagcacgccaatcgatccagtatcggaaacaacaatatctcctttgttgttaaccgtgccgttgtcaccaatgttctcaacaccatgcgcaccgcctgtaacagtcaggctaccatccagatttacaatgccgatattgcccgcgattttggtacccgtggaatcttttccatcaacagtggtttttccactgttattcgcggtggcgtcgttaccgttgatctgagtgccggtgccgccattggtgatagtgctctcgccttcgttattgacgatggcctggtcgccgtcaatctggataccgatggactccggatcggtgacggtcatggtgcccttgttatccaccgttgcgctgtcgccggtgatatcaataccgtgaccgccgccgctgacatggatctagaggatcccaggatcatctcggcacgttttggtgtcccccgaacccaggtcaggacatgggttgccctctatgaaaaacatggagaaaaaggtttaattcccaaacctaaaggcgttagtgctgatccagagtgcgtattaggtcgtgaaagctgtgatcgagcagcacatgtcccttatcaggctgctgctcactttatgcttgctggtagtggttctgtagccaggtggctgaaggtctatgaagagcgcggagaagctggtttacgcgcgctcaagattggcaccaaaagaaacattgcaatatcagttgatccagaaaaagcggcatcagcattggagctgtcaaaagaccgacgcattgaggatcttgaaaggcaagttcgatttcttgaaacgcggcttatgtatctaaaaaagctgaaagccttagctcatcccacgaaaaaggctgcggagataccgcgcagtacgttttattatcatctaaaggctctcagcaagcctgacaagtatgcggacgttaaaaagcgtattagtgagatttatcacgagaatagagcccgatacggataccgtagggtaacgctgtctcttcatcgagaagggaaacagattaaccataaagctgttcagcgcctgatgggaccctctcacttaaagcagcgattaaggtcaagcgataccgctcttacagaggagagagatttcaaggctacgcggccaaacgagaagtgggttaccgatgttactgaatttgcagtcaatgggcgcaagctgtatttgtctccagtaatagatctcttcaacaacgaagttatttcttacagcctttcggaaagaccagtgatgaacatgcgaaggtcgcgccctggcgtcgggtatttttacgcgttgacgccagtttatctggcgaaccggttgcaggcgcttttgggtgtcgagcagaccatccggatggagaactttttcttaccgggtacgttgccgatgggggttaccattcttgatgaaaatggtcataccctgatttcgcttaccggaccagaaagtaaaattaagggcgatcctcgctggatgcaggaacgctcctggtttggctatacggaagggttccgggagctggtgctgaagaaaaatctgccaccctcatcgctaagcatcgtgtattcggtgccggttgataaggtgctggaacgcattcgcatgttgatccttaacgcaattttgctgaatgtgcttgccggagctgcattgtttactctcgcacggatgtacgagcgacgtattttcattccggcggaaagcgacgccctgcgactggaagaacatgagcagttcaatcgcaagattgtcgcctccgcgccagtgggtatctgcattttgcgtaccgctgatggcgtcaatattttaaaacctcaatatatagctttctctataaaatgtgggcatatttctgaaggaaagaaaaatgccaggtttcgttttaacatcctgttacgtttagttaaattcaaaggaacatga

SEQ ID NO: 24295 - DNA, 669 bp, Homo sapiens
  SIMILAR (454)..(14): 951254mologous to Escherichia coli 100 pct identical to sp:YI5B_ECOLI,accession number AP002527,Smith-Waterman Score=725.
agctcggtacccggagatctattactgtagacaaatactggttgcgcccattgactgctaattttgtaacatcggtaacccacttctcgtttggccgcgtagccttgaaatctctttggagaacattaggggcggtttgccctacctctcctctgtaagagcggtatcgcttgaccttaatcgctgctttaagtgagagggttcccatcaggcgctgaacagctttatggttaatctgtttcccttctcgatgaagagacagcgttaccctacggtatccgtatcggcctctattctcgtgataaatctcactaatacgctttttaacgtccgcatacttgtcaggcttgctgagagcctttaaatgataataaaacgtactgcgcggtatctccgcagccctgagaagctcatcaagaggataaaactgccttaactcgttgagtactttcacttttttcggggaaggagctaaggctttcagcttttttagatacataagcccgcgttcaagaaatcgaacttgcctttcaagatcctcaatggcgcggtctttggacagctccaatgctgatgccgtttttttttgatcaactgatattgcattgtttcttttggtgccattcttgagcgcgcgtaaaccagcttctccgcgctcttcatagacct

SEQ ID NO: 24296 - DNA, 3435 bp, Homo sapiens
  SIMILAR (1)..(993): 991254mologous to Escherichia coli K12 IS5 transposase,accession number AE000291,Smith-Waterman Score=1727.
atgtttgtcatctggagccatggaacagggttcatcatgagtcatcaacttaccttcgccgacagtgaattcagcagtaagcgccgtcagaccagaaaagagattttcttgtcccgcatggagcagattctgccatggcaaaacatggtggaagtcatcgagccgttttaccccaaggctggtaatggccggcgaccttatccgctggaaaccatgctacgcattcactgcatgcagcattggtacaacctgagcgatggcgcgatggaagatgctctgtacgaaatcgcctccatgcgtctgtttgcccggttatccctggatagcgccttgccggaccgcaccaccatcatgaatttccgccacctgctggagcagcatcaactggcccgccaattgttcaagaccatcaatcgctggctggccgaagcaggcgtcatgatgactcaaggcaccttggtcgatgccaccatcattgaggcacccagctcgaccaagaacaaagagcagcaacgcgatccggagatgcatcagaccaagaaaggcaatcagtggcactttggcatgaaggcccacattggtgtcgatgccaagagtggcctgacccacagcctggtcaccaccgcggccaacgagcatgacctcaatcagctgggtaatctgctgcatggagaggagcaatttgtctcagccgatgccggctaccaaggggcgccacagcgcgaggagctggccgaggtggatgtggactggctgatcgccgagcgccccggcaaggtaagaaccttgaaacagcatccacgcaagaacaaaacggccatcaacatcgaatacatgaaagccagcatccgggccagggtggagcacccatttcgcatcatcaagcgacagttcggcttcgtgaaagccagatacaaggggttgctgaaaaacgataaccaactggcgatgttattcacgctggccaacctgtttcgggcggaccaaatgataccccctaatatgtcaaagccaaaatacccttttgaaaagcgccttgaagtcgtgaatcactacttcacaactgatgatggttacaggatcatctcggcacgttttggtgtcccccgaacccaggtcaggacatgggttgccctctatgaaaaacatggagaaaaaggtttaattcccaaacctaaaggcgttagtgctgatccagagttgcgtattaaggtcgtgaaagctgtgatcgagcagcacatgtcccttaatcaggctgctgctcactttatgcttgctggtagtggttctgtagccaggtggctgaaggtctatgaagagcgcggagaagctggtttacgcgcgctcaagattggcaccaaaagaaacattgcaatatcagttgatccagaaaaagcggcatcagcattggagctgtcaaaagaccgacgcattgaggatcttgaaaggcaagttcgatttcttgaaacgcggcttatgtatctaaaaaagctgaaagccttagctcatcccacgaaaaaggctgcggagataccgcgcagtacgttttattatcatctaaaggctctcagcaagcctgacaagtatgcggacgttaaaaagcgtattagtgagatttatcacgagaatagaggccgatacggataccgtagggtaacgctgtctcttcatcgagaagggaaacagattaaccataaagctgttcagcgcctgatgggaaccctctcacttaaagcagcgattaaggtcaagcgataccgctcttacagaggagaggtagggcaaaccgcccctaatgttctccaaagagatttcaaggctacgcggccaaacgagaagtgggttaccgatgttactgaatttgcagtcaatgggcgcaagctgtatttgtctccagtaatagatctctttcaacaacgaagttatttcttacaggctttcgggaaagaaccagtgattgaacctgggttgagaaatatggctcgaatcaggggctttcaaaaaggctttatccccacagaaacatccgggtctggaaccctctgtgtgtacgcccacgcctacattggtgccggatcggtagaccggataaggcgttcacgccgcatccggcaagtggttaaacccgctcaaacaccgtcgcaataccctgacccagaccgatacacatcgtcgccagaccaaactgaacgtctttgcgttccatcagattcagcagcgtgtgcagagcgctacatgcacacagtgctgagcaatcgacatgacagcaggtcccgcagaaaggccccgggcgagcaaagaggcacttgcatgctgcaggatggcactggcaccagcgggataggtgcccagaagaaaaaaatgtacgccaataacggcgctatagaccgaaagctgctttttgaagcgacgttcgtcacgattgaaaaatgttgtgataccaatcagaaaggcgatgacacccacgccctgggccagccaatacgcggtcatgataaatccttagcaggggggaaggcccatccccccgggggggagtcacagacccgcaaaaagggggagggagtttcttttttccccaaaaagaccccgtttgtgggggcctacaactgttgccgacccgtaggccggataaggcgctcgcgccgcatccggcagtgtttacccgcggcgactcaaaatttctttctcataagcccgcacgctctccagccattcgctacctgctggcgtatcgtgacgttggcaatacatttcccagaccgcctgccacggcaacgatttctgctcttccagcagtgccagacgcgcagtgtaatcgcccgccgcttccagcttgcgcagctcagcggtaggttccagcaacgcacgcagcagggcttttttcatattgcgtgtaccaatgacccacgcggcaatgcggttgatagaggcatcgaagaagtcaaggccgatatgcacccggtcaaacagatcgtgacgcacaatctcactggcaattgcctgggtttcatcatccagcagcactacgtgatcgctgtcccagcgaaccggacggctgacgtgcagcagcaactgcggcacatacagcatggcggcggaaatctggtcggaatcaactcgtcgggtgaaatgccgggtccagcaaggcagctggggtccattggcacagtccagcagtccatcatcaaccacccttactggcagtgcacaggcaacaactccccatattaccgtagccgtagcaacattgtccatagggccatatgcagcaccccagccacatcgtcacaatccccacaccgcaggccagtgcacaaaaaaacagcacaacagcaacaacacacaacaactactttcgtgtacaactggtattaccaagggtggtatcatacggaaacagcctgcatttttccaccttgggacgcttcttaa

SEQ ID NO: 24297 - DNA, 2649 bp, Homo sapiens
  SIMILAR (409)..(963): 981254mologous to Cloning vector pBIOTRX-BirA Eschericia coli biotin-holoenzyme synthetase,accession number AF044308,Smith- Waterman Score=920.
atgcgccagaatgcgctgttgcttgagcgaaaacctgctgtaccgccatcgaaacgggcacatacaggcagagtggccgtgaaagaaagcaatcagcgatggtgctctgacgggttcgagttctgctgtgataacggagagagactgcgtgtcacgttcgcgctggactgctgtgatcgtgaggcactgcactgggcggtcactaccggcggcttcaacagtgaaacagtacaggacgtcatgctgggagcggtggaacgccgcttcggcaacgatcttccgtcgtctccagtggagtggctgacggataatggttcatgctaccgggctaatgaaacacgccagttcgcccggatgttgggacttgaaccgaagaagcacggcgacggcctgaggacgcagcggactgagcctatccagttacttaatgctaaacagatattgggtcagctggatggcggtagtgtagccgtgctgccagtgattgactccacgaatcagtaccttcttgatcgtatcggagagcttaaatcgggcgatgcttgcatggcagaataccagcaggctggccgtggtcgccggggtcggaaatggttttcgccttttggcgcaaacttatatttgtcgatgttctggcgtctggaacaaggcccggcggcggcgattggtttaagtctggttatcggtatcgtgatggcggaagtattacgcaagctgggtgcagataaagttcgtgttaaatggcctaatgacctctatctgcaggatcgcaagctggcaggcattctggtggagctgactggcaaaactggcgatgcggcgcaaatagtcattggagccgggatcaacatggcaatgcgccgtgttgaagagagtgtcgttaatcaggggtggatcacgctgcaggaagcggggatcaatctcgatcgtaatacgttggcggccatgctaatacctgagatggaaaaagagcagctgattgaaatagccaatacgataatgccgtttggcaaatacaaagggcgtcgcttaatcgacctgccggaggagtatctgctgtggtttgcccgcaaagatgagttcccggcagggaagctcgataccattaacgacggcttcgctgaacgctgtataaaccaccaacagaatggacgtctggtcagttttcgcaatccattttttattgcgcgacacccagtcaccaatccacggccgggaaagatgccccaacacaaacggcagcagcagttgcagcataattttaccgacctgctcaaggctgccccctgcaccgtgaacattcatcaccagaccaaccagcaatggaacatcgatattcaagcttatgaatcgacgtcgcctcgaggggggcaacgtagctacactccgccattaactattggcatgattttccaggatcaccatctactgatggaccgtactgtctacgataacgtggcgatcccgctgattatcgccggtgccagcggtgacgatattcgtcgccgggtgtcggcggcgctggataaagtcgggctactggacaaagcgaagaacttccctattcagctttcgggcggtgaacaacagcgtgttggcattgcccgcgcggtggtgaacaagcccgcggtactgctggcggacgaaccgactggtaacctggacgacgcgctgtcggaaggcattttacgtctgtttgaagagtttaaccgcgttggggtaaccgtattgatggcaacgcacgacatcaacctgatctcgcggcgttcctatcgcatgctcaccctgagcgatggtcacttgcatggaggctttggcgggcgtcttgatcgcttccgtaaatcggtcggcggctcaggcgacggcggtcgtaacgcaccaaaacgcgcgaaatcctcgccaaaaccggtaaatcgcaaaaccaacgttttcaacgaacaggtgcgctatgccttccacggcgcattgcaggatctgaaaagcaaaccgttcgccacgtttttaacggtgatggttatcgccatttctctgacgctgcccagcgtctgttatatggtgtacaaaaacgttaaccaggcggcgacgcagtattatccgtcaccgcaaatcactgtttatctgcaaaaaacgctggacgatgacgctgctgcgggcgacccggaccgaccttcgcttcaattaagatggcgggttataccaggattctctatcgcggttgccatttacttcctcaacgaatccctgggccgtccgctaatgatcaccggctattctgctgaatgttctttactggcttggcctgttcgttccggcttaaggaaggcacctatgaagacgtttcctctgcaaagcctgacgattattgaggcgcagcaaaagcagtttgcgctggtggatagcatttgtcgccatttccccggcagcgagtttcttactggcggtgatttaggcttaacgccagcgactgaactcaaaccgcggcgcttacccagcggtgtggaacaggtgctggctgatgcatttcacgcacaggctgcggcgctggtgcagggcgcggggactggcgcgattcgcgccgggctggcggctttgctcaaaccggggcagcgtcttctggtgcatgacgcgcctgtttacccgacgacacgg

SEQ ID NO: 24298 - DNA, 2277 bp, Homo sapiens
  SIMILAR (1818)..(1006): 981254mologous to Escherichia coli nitrogen regulator I homolog,accession number D90885,Smith-Waterman Score=1332.
ttaaccagcgcttactccgacaacgtcattcggcttctccggatggcgttgtcggcagataacaccatagctatggtttattctacacagacggtatttcaagtcctggcgggaagtattgcgcaaatgttttgccatacgtggttgccgaagatagcgtccatttctgaccagcacgggtgatagcgccgctgagaagttgttgaggatcagagaacgctgcatccgctcaacccgatttgggataaccagttcatgactttgctggagcagggacgcatacaggaactggatgccgtcagtaacgaagagctttccgccattgccggaaagtcgacacatgaaatcaaaacctgggtcgccgcttttgccgctatttcgcccaatcccggagtggattgccggatttggctcgttaagcgccagaacagagaactgaatatgcaggagaagatgatgagttatcagccacaaaccgaagccgccaccagccgttttctgaatgtagaagaagcgggtaaaacgctgcgcatccattttaatgactgcggacaaggcgacgaaaccgttgtcctgctgcatggttccggcccgggtgctactggctgggcgaacttcagccgcaatatcgatccgctggtagaggcgggctatcgggtgatcctgctggattgtccgggttggggcaagagcgattcggtcgttaatagtggttcgcgatcggatcttaatgcacgaatcctgaaaagcgtggtggatcaactggatatcgccaaaatccacctgctgggcaactcgatggggggccatagttctgtggcgttcacccttaaatggccggagcgcgtcggcaaactggtgctgatgggcggcggtacgggcggcatgagttcgtgtacgccgatgccaaccgaacgtgattagcgactgaatcacggttatcgtgagccgaatatcggaaaacctgaagctggaaatcgcggtacctcctgaaattgtttgcatcagctcgtgtcgggaaagcagtttataaaattctgtccggttgcgccccgccattctcgccgcgtgggtgacgttgcctttggtgatttgcagcagcttacgcaaatagttgagttcaaactgattacgtgcctcaacaaaggttggcagcgccgtattttcaccctccagcgcctgctccaccagcgcatcactaatcaccggagatgaggtcagcgccacgcactgttcaatcacgttgaccaactggcgcacattacccggccagctcgcggtcatcaggcgtttcatcgcatcggtagagaacgcgcggacaaacggtttatgtcgctctgccgcctggcgcaacaggtgatttgccagtagcggaatgtcttctgtgcgctccgccagtgccggaattttcaggctgacaacgttgaggcggtaatagagatcttcgcggaattccccgcgcgccatcgcttttggcagatcacggtgagtggcagaaataatccgcacattgatatcaatatcgcggttactgcccagcgggcgcactttacgctcctgcaacacgcgcagcagtttgacctgtaacggcgcaggcatatcgccaatttcatcgagaaatagcgttccgccttccgccgcctggaataaaccttcgcgattgctgacagcgccagtaaacgcgccacgcgcatgaacaaacagctccgactccagcaattgctcgggccatgcgccacagttaatagcaataactggtttgctgttgcgcgggctggcgttgtggatagcctgtgcgaaaatctctttccggtgccctcggtaatcaaagctgacgctgattggccctggatccttcttgttgttggttacaatttcgatgtcgtaaacaccggtttgcttgccctgatgacgtacctgcgcagtagcagttaaggtgtctccggcaaagcctggacgcaaaaaatcaatcgtgcaggcagaagcgacggctgccagcccctggctattgcaggcgtaggcaaaggcagtatcagccagtgaaaatagctgcccgccgtggcaactttgatgaccgttaagcatttgtgcagtgacggtcatggtcactacagcaaagccttcatccattgagataatgtcgatgccaagcgctttggcgcaggcatcgttctcatacattgcatgggcattttgccaggccttatgactcataaccgctctccagaagcgcccgttggcgcagcaatgaacatgggcgatagcgttcttcgccat

SEQ ID NO: 24299 - DNA, 1467 bp, Homo sapiens
  SIMILAR (541)..(993): 811254mologous to Escherichia coli CG Site No. 736,accession number U00039,Smith-Waterman Score=604.
atgaagttcgcccagccagtagcacccgggccggaaccatgcagcaggacaacgggtttcgtcgccttgtccgcagtcattaaaatggatgcgcagcgttttacccgcttcttctacattcagaaaacggctggtggcggcttcgccaaatccggcaatccactccgggattgggcggtaataacgcccttcgctacgccagttgccaaacgcagaaatagcggcaaaagcggcgacccaggttttgatttcatgtgtcgactttccggcaatggcggaaagctcttcgttactgacggcatccagttcctgtatgcgtccctgctccagcaaagtcatgaactggttatcccaaatcgggttgagcggatgcagcgttctctgatcctcaacaaacttctcagcggcgctaatcacccgttgctgacgcaattcgcgctcactggcggagatttcaaggctacgcggccaaacgagaagtgggttaccgatgttactgaatttgcagtcaatgggcgcaagctgtatttgtctccagtaatagatctcttcaacaacgaagttatttcttacagcctttcggaaagaccagtgatgaacatggatcaccatctactgatggaccgtactgtctacgataacgtggcgatcccgctgattatcgccggtgccagcggtgacgatattcgtcgccgggtttcggcggcgctggataaagtcgggctactggacaaagcgaagaacttccctattcagctttcgggcgcgtgttggcattgccgcgcggtggtgaacaagcccgcggtactgctggcggacgaaccgactggtaacctggacgacgcgctgtcggaaggcattttacgtctgtttgaagagtttaaccgcgttggggtaaccgtattgatggcaacgcacgacatcaacctgatctcgcggcgttcctatcgcatgctcaccctgagcgatggtcacttgcatggaggctttggcgggcgtcttgatcgcttccgtaaatcggtcggcggctcaggcgacggcggtcgtaacgcaccaaaacgcgcgaaatcctcgccaaaaccggtaaatcgcaaaaccaacgttttcaacgaacaggtgcgctatgccttccacggcgcattgcaggatctgaaaagcaaaccgttcgccacgtttttaacggtgatggttatcgccatttctctgacgctgcccacgtcgtgttatatggtgtacaatatcgccaaaagcgaacgaatttcagacatcagcacccaactgaacgcctttcccggctgtgaagttgctgtcagcgacgcgccgagcggtcagttgattgtggtggtggaagcagaagacagcgaaacgctgatccaaaccattgagtcagtacgcaacgtagagggcgtgctggcggtgtcgctggtttatcaccagcaggaagagcaaggtgaggaaacaccatga

SEQ ID NO: 24300 - DNA, 432 bp, Homo sapiens
  SIMILAR (28)..(261): 931254mologous to Escherichia coli ORF_o179,accession number U18997,Smith-Waterman Score=364.
atggttaacatcagtcggtaccagcccctcggtcaatatactcaggatctgaaaaatcagtttctgcgtaatgccccgccgatcaataaagtgatgtatgacaataagatccatgtgctaaaaaacgcgctcgggttacataccgctgtttctcgtgtgcagggcggcaagctgaaagcaaaggtggagatccgcgtcgctaccgtgtttcgcaacgcgccggaaccgtttttgcgcatgatcgtggataacgaccatgctgcgcgcatttgcccgccttcttctccgtatttgtttttctcgccggactctaaagattgcctgcttactgttacttgtggcaggagcgaccatccttatcgccgatcgcgtaatggtcaacgccagcaaacagctgacctggagcgatgtcaacgccgttccggcgcgtaa

SEQ ID NO: 24301 - DNA, 964 bp, Homo sapiens
  SIMILAR (676)..(882): 791254mologous to Escherichia coli CSIE PROTEIN,accession number D90883,Smith-Waterman Score=252.
agtcatgtggcggacgcagcaacatattgaggagcttaatggagcatccttatttttccctgatgcttaccggcaatggctggatagcatttacgatgatgcggaaatggatgagccagaatgggtcggcaatggcatggataaatttgaaagcgccgagtgtgaaaaaaggttcaaggctcgcaaggtcctgcagtgggctgaagaatatagcttgcaggataacgatgaaaccattctttgcgtagcgcaggaaattggacgccactggcagcgtcgggcgctccagcctgtaccacctgatgagccactgtttatggcactacttttttccatgttgcgggttcccgatccattgcgggatgcgcatcagcgggacagacaattgcgtcagtctatcaaacgtctggtaaaccattttcgtgagctgggaaatgttcgtttttatgatgaacaggggttatgtgatcagctttatacccacctcgcccaggcgttaaatcgcagtttgtttgccatcggtattgataataccctgccggaagagttcgccagactgtaccccacgcctggtgcgcaccacccgcgcggcgctggccggatttgaaagtgaatacggcgtccatctttctgatgaggaaagtggtctggtcgcggtgattttcggagcccggcctaatgcaggaaaacgatctgcatgaaaaacagattattcttcttaccgggaatgatagcgagcgagaagcgcagattgagcagcagttacgcgaactaacgttactgccgctcaacattaagcatatgtcggtaaaggcatttttgcagacacggcgctccgcgtggcgcggcactgattattgcgccttataccatgccattcccgctctttccgcctccgctgatctatacggacctgacgatgccaacacatcaacaggagcagatcctctagagtcgccggcag

SEQ ID NO: 24302 - DNA, 2398 bp, Homo sapiens
  SIMILAR (397)..(969): 991254mologous to Escherichia coli RhsD protein,accession number X60999,Smith-Waterman Score=1000.
atgcggaatgtgccagaactgatgagcgatatccgccaggatggtcgcttctgctctgccagtggtgcggatagtgttgtagtgcggatgctgtgcgatggcgctatacaaaaaagttgtcgagtgaccgataccaccactaatcagaatttgctgatcgcgggcaatcttacatgccgcatcgatagtcggcataaccgcattgcctgcaaggatcacgcaatcggcctgatacggcacctcaccggagaaatcatcctgcgccagccactgtccgataacatttatggcatctatagttgccggcgaaagcgtcggaaacggggtcacgcgcagcgggatacccggcagaaggctcacgggcaaacgacgcggcgggacgagaacagagtccgtctgaatgtggtgtccgccgatatcacggacatcaccacaccggacgggcgggagacgaaattttactataacgacgggaaccagctgacggcggtggtgtccccggacgggctggagagccgccgggaatatgatgaaccgggcaggctggtatcggagacatcgcgcagcggggagacagtacgctaccgctacgatgacgcgcacagtgagttaccggcgacgacaacggatgcgacgggcagcacccggcagatgacctggagccgctacgggcagttgctggcgttcaccgactgctcgggctaccagacccgttatgaatacgaccgcttcggccagatgacggcggtccaccgcgaggaaggcatcagcctttaccgccgctatgacaaccgtggccggttaacctcggtgaaagacgcacagggccgtgaaacgcggtatgaatacaacgccgcaggcgacctgactgccgttatcaccccggacggcaaccggagcgagacacagtacgatgcgtggggaaaggcggtcagcaccacgcagggcgggctgacgcgcagtatggagtcgatgctggcggaccttagaggaacagattggctgcggaagaaagcagctatgaaccactccttaaaaccctggaacacatttggcattgatcataatgctcagcacattgtatgtgccgaagacgaacaacaattactcaatgcctggcagtatgcaaccgcagaaggacaacccgttcttattctgggtgaaggaagtaatgtactttttctggaggactatcgcggcacggtgatcatcaaccggatcaaaggtatcgaaattcatgatgaacctgatgcgtggtatttacatgtaggagccggagaaaactggcatcgtctgggggcacatgcggcctattacggttttagcgccatttactggcaggcagctggctactcggcctcggcggtggggtatttgtggtcgttgggcgtgggtggcggaagtcattatctttgcgctgagtaataaacttttccgccgttgtagtgcacgcgatatgctgttgatctcggcgatttgcggcgtagtgcgctggggcattatgggagcaactacggcgttgccgtggttgatagtggtgcaaattctgcattgcggcaccttcacggtctgccacctggccgccatgcgttatattgctgctcgccagggtagcgaagtcatccgtttacaggcggtttactctgccgtcgcgatgggcggcagtatcgctatcatgaccgttttcgccggtttcctgtatcaatatatgggccacggcgtgttctgggtaatggcgctggtggcgcttccggcaatgtttttgcgcccgaaagttgttccctcatgctgattcgagcattttgcggatctgctcctgttgatgtgttgtcagcgtcaggtccgtatgatcacggtggtcttaacgtcacgacacgccaatctgcgcccgccgcctggcgggtcatacaatattttccccacgcttcaagggtaaacgggcgtgccaacatcccgcggtgggattcgcgcggccctgatcaagttgaagtgtgggcgttttgtattactgacaaagccgcctccgatgaagttaaagccgcttttgaaaacagcgccactcgtgcttttggtcctgctggttttctcgagcagatgactcggagaactggaggtgatgaaatgagtgcgcaagtttcactagagttacatcaccgcattagccagtttctctttcacgaagccagcttactggacgactggaaatttcgtgactggctggcgcagctcgacgaagagattcgttacaccatgcgcaccacagttaacgcgcaaacacgcgaccgccgcaaaggcgtccagccaccgacaacctggatttttaatgacaccaaagaccagctggagcggcgaatcgcccgctttagagctcaggagagacacaaaaacgtacccaaag

SEQ ID NO: 24303 - DNA, 3780 bp, Homo sapiens
  SIMILAR (2547)..(3074): 901254mologous to Escherichia coli tolB,accession number M28232,Smith-Waterman Score=824.
tcatgctgattcgagcattttgcggatctgctcctgttgatgtgttgtcagcgtcaggtccgtatagatcagcggtggtgaaaagagcggtaatggcatggtataaggcgcaataatcagtgccgcgccagcggcagcgcctgtctgcaaaaatgcctttaccgacatatgcttaatgttgagcggcagtaacgttagttcgcgtaactgctgctcaatctgcgcttctcgctcgctatcattcccggtaagaagaataatctgtttttcatgcagatcgttttcctgcattagccaggcaccgaaaatcaccgcgaccagaccactttcctcatcagaaagatggacgccgtattcactttcaaatccggccagcgccgcgcgggtggtgcgcaccaggcgtgggtacagtctggcgaactcttccggcagggtattatcaataccgatggcaaacaaactgcgatttaacgccgaaaccggataccctgcccgacgatacaacgctttatcgactaacttctgatctacagccttattgtctttaaattgcgtaaagcctgctggcagtgtgtatggcattgtctgaacgttctgctgttcttctgccgatagtggtcgatgtacttcaacataacgcatcccgttaggctccacggaatatttcaccggttcgttgatcactttcccccgcgtcaccgaacacacgaccaaacgacgagcacacgacggccagtgaccaaaggcatcattcaggatcaacaccgggccgcggatttctgtgtcgtccaactgttgcagcaaatattcatccgccgcttcccacgcctgtagcgggttaacgtcatccgtcgccggaaaacgttgtagtgtcagtgaacggaaaccgttgtctaagtggctcatcggccctcctgaatgataaaatttcgacattgcccctgaaaagggtgcgtgagtataccctttttctctttttcgtgggcggttatgagcaatcttacttatcttcagggttatcccgagcagctactttcccaggtgcgaacactgattaacgaacagcgtctgggcgatgtgctggcaaaacgctatccgggaacacacgactacgccaccgataaagccctctggcaatatactcaggatctgaaaaatcagtttctgcgtaatgccccgccgatcaataaagtgatgtatgacaataagatccatgtgctaaaaaacgcgctcgggttacataccgctgtttctcgtgtgcagggcggcaagctgaaagcaaaggtggagactccgcgtcgctaccgtgtttcgcaacgcgccggaaccgtttttgcgcatgatcgtggtgcacgagctggcgcacctgaaggagaaagagcataacaaagcgttttaccagttgtgttgtcatatggaaccccagtaccaccagcttgagttcgacacccgactgtgtaaccggatccgcttgaacggtcatgatcacttccgccgccgatacgccctcttccgggtgaataccggtcggactgcctcgcccgtgatacagccctgagactttagttatcggcgtgaatggtgacgataatttctttacagagacccgcgagcgcttcgtctatagcgttatctaccacctcgaataccatgtggtgcataccggtgccgccatccgtgtcgccgatatacatacccgggcgcttacgcaccgcatccagccctttcaggactttgatactggaggagtcataagaattcgacatcaacgtttctcgctcatttatacttgggttaatccgttattttacccttttccacgcggctggcaagcagcccgcgacgctcatcatcaagctcagaggcaaaatcatctatcaggtagagacaccgccgcccgctttctggaactggccgcggacttttgcggcctgtttctgatgaccgacaaacaagcggcgctgccgtatgcatcggcctacaaacaggacgagcaagagattaaacgcttgttagttgaggcagggatggaaaccagcggcaatttcaacgaaccggcagatcatctggcgatctatctcgaattgctcagccatctgcatttttcgctgggagaggggaccgttcctgcgcgaagaatcgacagtttgcggcaaaaaacactgacggcgctgtggcaacctgtactaacgtatggtgacttaactcgtctggatcctacaacagtaacgccacagcaagtatttaatgcggtgtgtcatatgcgcaccaccaaactccctgatccaaaagtgaatggcaatgccgagtctgacggtgccgatcgtattgagtttcgggtaaccaccaacccaggtcagccaatgcagcctattgccaaagtcgcatccggtggtgaattgtcccgcatcgcactggcaatccaggtcatcacggcgcgtaaaatggaaaccccggcactgatttttgatgaagtggatgtagggattagcggtccaacagcggcagttgtcggcaaactgctgcgtcaactcggcgaatcaactcagcagccgggtagtgcgcaggaagtacaaccagctgcatggtccgcactgggcattgacgctgtagttgtcggtcaggtcactccgaatccggatggttcttacaatgttgcttatcaacttgttgacactggcggcgcaccgggtactgtacttgctcagaactcgtacaaagtgaacaagcagtggctgcgttatgctggtcataccgccagtgatgaagtgtttgaaaaactgaccggcattaaaggtgcgttccgtactcgtattgcctacgttgttcagaccaacggcggtcagttcccgtatgaactgcgcgtatctgactatgacggttacaaccagtttgtcgttcaccgttcaccgcagccgctgatgtctccggcgtggtcaccagacggttctaaactggcttatgtgaccttcgaaagcggtcgttccgcgctggttattcagacgctggcaagcgaacgcatctgttctttgccgctgttcccggatatgactaccgccgatgccgaccatcccttcagcaactcgcaggacaatgcagccatgtttgaacaacgctggactgcactggcgcttgcctcagtaatcactgtgacgttcctggatcctgcgccgtcgtcgccatcatccgcaccattttggttacagcctgctggcgctcttactggcgctgggttcggtggacgccagcccggcatttcgtcagataacggaactggtgaaatcccagtcacgcgacggcgacccggactttgcggcttattataaagagccgtcgaaaactatccctgacccgaaactcaacctggtttatatctacggcgaaagtctcgagcggacctattttgataacgaggctttcccggatctcacgcctgaactgggcgcgttgaaaaatgaaggcctggatttcagccacacgcagcagctgccgggaacagattacacgattgcgggcatggtggcttctcagtgcggcataccgctgtttgccccctttgaagaatgggcccgattcaccaccattaaaggcttcgagattgctgccagtaacgccgcacttagcggagaatttaacgatgtgttactggcgctaaaccttagtccgttggtgcattccgaccgcgatgctgagctgctggcacgcgagatgattctggcgcacgagaaatggctgccaaactttgccgactgcatcgcagagcttaaaaaagcacattaa

SEQ ID NO: 24304 - DNA, 777 bp, Homo sapiens; identical to SEQ ID NO: 21791
  SIMILAR (109)..(561): 951254mologous to Escherichia coli O157:H7 putative oxidoreductase,accession number AE005537,Smith-Waterman Score=719.

SEQ ID NO: 24305 - DNA, 813 bp, Homo sapiens
  SIMILAR (1)..(594): 951254mologous to Escherichia coli K12 putative DNA ligase,accession number AE000174,Smith-Waterman Score=986.
atggaacttaaaaaattgatggaacatatttctattatccccgattacagacaagcctggaaagtggaacataaattatcggatattctactgttgactatttgtgccgttatttctggtgcagaaggctgggaagatatagaggattttggggaaacacatcccgattttttgaagcaatatggtgattttgaaaatggtattcctgttcacgataccattgccagagttgtatcctgtatctgtcctgcgaaatttcatgagagctttattaactggatgcttgactaccattcttcagatgataaagacgtcatcgcaattgatggaaaaatacaccggcattcttatgacaagagtcgccgtaagggagcgattcatgtcattagtgcgttctcaacaatgcacagtctggtcatcggacagatcaagacggataagaaatccaatgagatcacagctatccctgaacttcttaacatgctggatattaaaggaaaaatcatcaaaaccgatgcgatgggaagccagaaagatattgcagagaagatacaaaaacagggagaggatgagaagaatatcgtcgaacgcaatgtgtccacttcaggcgtgagcatttactttgaggcttatctttataatgctaccaactgtagcagcactccatggcacctgccacccatgcacatgacctcttcccagcgccggccatccactgctgttgacgaggaagatgaagactcgccctctgagtgccacacccctgagaaggtgaagaaaccgaagaaggtgtactgctatgtgtcaccaaag

SEQ ID NO: 24306 - DNA, 1161 bp, Homo sapiens
  SIMILAR (508)..(1155): 991254mologous to Escherichia coli alternate gene name yhhI,accession number U00039,Smith-Waterman Score=1149.
atgaaaaacaaattaccgccatttatcgagatttaccgcgctctgattgccacaccttcaataagcgccacggaagaggcactcgatcaaagcaatgcagatttaatcactctgctggcggactggtttaaagatttgggcttcaatgtggaagtgcagcctgttccaggaactcgcaacaaattcaatatgctggcaacacgccgacatgaaggtcgctatattacatgcatgcagccgctgccaataatagcagaacaagagcaagagccagaaatgacggtcagatattatatcagttctgctgatttaaccgcagaaaagttcgccacagcaatccgaaaccactggcacgtggagaataagctgcactggcgtctggacgtggtaatgaatgaagacgactgcaaaataagaagaggaaacgccgcagaattattttcagggatacggcacatcgctattaatattttaacgaatgataaggtattcaaggcagggttaagacaaggttgggaagatatagaggattttggggaaacacatctcgattttttgaagcaatatggtgattttgaaaatggtattcctgttcacgataccattgccagagttgtatcctgtatcagtcctgcaaaatttcacgagtgctttattaactggatgcgtgactgccattcttcagatgataaagacgtcattgcaattgatggaaaaacgctccggcactcttatgacaagagtcgccgcaggggagcgattcatgtcattagtgcgttctcaacaatgcacagtctggtcatcggacagatcaagacggatgagaaatctaatgagattacagctatcccagaacttcttaacatgctggatattaaaggaaaaatcatcacaactgatgcgatgggttgccagaaagatattgcagagaagatacaaaaacagggaggtgattatttattcgcggtaaaaggaacccaggggcggctaaataaagcctttgaggaaaaatttccgctgaaagaattaaataatccagagcatgacagttacgcaatcagtgaaaagagtcacggcagagaagaaatccgtcttcatattgtttgcgatgtccctgatgaacttattgatttcacgtttgaatggaaagggctgatgtaa

SEQ ID NO: 24307 - DNA, 1095 bp, Homo sapiens
  SIMILAR (302)..(346): 861254mologous to Escherichia coli unidentified protein ORF169,accession number K01299,Smith-Waterman Score=69.
atgcacagtctggtcatcggacagatcaagacggataagaaatccaatgagatcacagctatccctgaacttcttaacatgctggatattaaaggaaaaatcatcaaaaccgatgcgatgggttgccagaaagatattgcagagaagatacaaaaacagggaggagcagtaatgaatctacaacgatttgatgacagcaccctaatccgtatctttgcccttcatgagttacatcgactgaaagaacatggcttaacgcgcggggcgcttctcgattatcacagccgctataaactcgtctttcttggcgcatcctcagccggagtcccgcaaacttggcccgtttcgtggctgatattcaccagtggcaaaatctggatgactattcaccccagtaccgccaacgcgtagttgttttgctttctcaccccgccaacgcgcgcgatcacaccaatgttttgatgcacgttcagggttattttcgcccgcatattgattccacagaacgccagcagctgcgtgcgcttatcgacagttatcgccgtggcgagcaaccacttcttgcgccgctgatgcgtatcaaacactatatggcgctttatcctgacgcctggctttcagggcagcgttatttcgaactttggccgcgtgtgattaacttgcgccattcaggagttttatgactacccatctggtctggtttcgccaggatttacgtctgcacgataatctcgcacttgtgcgcctgccgcaattcgtctgcacgcgtgctggcgttgtatatcgctacaccacgccagtgggcgacgcataacatgtcgccgcgtcaggctgaacttatcaatgctcaactgaatgggctacaaatagcgcttgcggaaaaaggtattcctttattgttccgtgaagtggatgactttgtcgccagtgtcgaaatagttaaacaggtgtgcgcggaaaacagcgttacccacctgttttataactatcagtatgaagtgaatgagcgggcgcgggatgtggaagttgaaagacgctgcgtaacgtggtgtgtgaaggatttgatgacaggcgtgatcctctagagtcgcctgc

SEQ ID NO: 24308 - DNA, 1452 bp, Homo sapiens
  SIMILAR (496)..(1419): 961254mologous to Escherichia coli K12 putative transport system permease,accession number AE000500,Smith-Waterman Score= 1481.
  misc_feature (1)...(1452): n = a,t,c or g
atgacggcctcagaacgtcacgccagcacagagaatgatattcgcatacggagaacattctccgctgcgaattaccgcctgactttctgcggtttgttgtttgaattgttcatgcgtggtgtaacgaatttcaatggtatttccctggcgattttgcagctgaccggtaacccgatgctgacagtggcgctgaccaaagccgatcgcgtggacgaagcgcgtgttgatgaggttgaacgccaggtaaaggaggttctgcgggaatacggttttgctgaggcaaaactgtttatcaccgcagcaaccgaaggtcggggaatggatgccctgcgcgagcatctgcttcagttgccggaacgcgagcacgccagccaacatagtttccgcctcgcgattgaccgcgcatttaccgtaaaaggtgccgggctggtcgtcaccggaccgcaggaagcagatcgactgttcaatatgaaattcgtcggcttcgcgcagtccggtatcgcactttttttcgaagtcggtttaattcttctggtacctattttattcgctattgcccgtgaagcaaaaatatcaccgatgtttatgtgtgtgccgatgctttctggtttgctggtcgcacacggttttttgccgccgcaccccggcccgactgttatcgccagggaatatggcgctgatgtaggattggtactgatatacggtatcattgtcggcattccaacctttattctttgcggcccggtattgaataaattctgccagcgcattattccggacgcctttaaaaaagaggggaatatagcctgtctcggcgcgacccgccgattcagcgaaagcgaaatgccaggctttgggatcagttttctcacggcaatgctgccggtgatcctgatggcggttgtcaccatcatccagatgactcatgccaaaagtgccgcggattcaggcttattttacaacgtgatactgttcttaggtaattcaacgatcgccatgctgatttcactgctattcgcgatctataccatgggcctggggcgcgggaaaacaatccctgacctgatggattcttgcggaaaagctatcgcgggtattgccggtctgctgctgatnatcggtggtggtggtgcattcaagcaagttctcatcgactctggcgttggtcagtatatttcccacccctggtttcgggtatggatatttaacccgatcctgatggcctggggcgtggccgcattcctgcgtatttgtctgggttcagccaccgtcgcggcgatctctaccgccggtctggtcatcccattgttggcagtacatcccaataccaacctggccttgattacgctggctaccggtgccggatcctgtatttgttctcacgttaacgatgccagtttctggatgattaaagattacacgcaggtcgtagcggctggctgctgtatggtc

SEQ ID NO: 24309 - DNA, 3660 bp, Homo sapiens
  SIMILAR (232)..(951): 991254mologous to Escherichia coli selenocysteine synthase,accession number M64177,Smith-Waterman Score=1201.
atggcccaatggaagtctgtatctgggagctggcacgctggcctcacctgcaacacactcacctgcgtgtactgggtgcatgtggcgttgcgagcacactctcctgccgcgtggctgtaccgctgcccctctgcaaaccacaggctgaccacttcaacaaaggacgccaagcccgcgggcagcagctgcatgttccagcccacttgcaggggatggaacctgacctgcgttctgattcgcggcagccagacgctgcctgcgtggtgtgaaaactgggcgcaagaagtcgatgcccggttgacgaaagaagcgcagagcgcgctgcgtccggtgatcaacctgacgggaaccgtgctgcataccaaccttgggcgagctttacaggcggaagccgcggtggaagccgttgcgcaggctatgcgttcgccagtgaccctcgagtatgatctggacgacgccggacgcggacatcgcgatcgggcgctggcgcagctgctgtgccgtattacgggggcggaagatgcctgtatcgtcaataacaatgcggcggcggtgttattgatgttggcggccactgccagcggaaaagaggtggtggtatctcgcggcgaactggtggagattggcggcgcgtttcgtattcccgatgttatgcgtcaggcaggctgcaccctacacgaagtagggaccaccaaccgcacgcacgcgaatgattatcgtcaggcggtgaatgaaaataccgcactgttgatgaaagtacataccagtaactacagcattcaggggttcaccaaagcgatagatgaagcggaactggtggcgctcggcaaagagctggatgttcccgtagtgactgatttaggcagtggctcgctggtcgatcttagccagtacggtttgccgaaagagccaatgccgcaggagttgattgcggcgggcgtcagtctgataattgaaaataggaaaacgactatgttggcacaactgaccatcagcaactttgctatcgttcgtgagcttgagattgattttcatagcggcatgaccgtaataactggcgagaccggcgcgggtaaatctattgcaatagatgccctcggtctttgtctcggtggtcgcgctgaagccgacatggtgcgtaccggcgctgctcgcgctgacctgtgcgcccgtttttctctgaaagatacgccagcggctctgcgctggctggaagaaaaccagcttgaagacgggcatgaatgtttgcttcgtcgcgtgatcagcagcgatggtcgctcccgtggtttcatcaacggtacagctgttcctctgtcacaactgcgcgaaacatctacgactaccggtgccaggcgagtcatacgtgcgatacgacgcataaacagcagcgatgccagcacgatccccacgctgatggcaataaccatatcaaacaacacggtcagcgacatgcacagcagcatgacgatgatgtcatctttcggcgcatacttgcttagtggtctaatgtccacgagaatcagaacgctcatcaccacgatctacaacggagatttgcggatgattcgccagaggaagttgtgcaaaacggctatcgccaggacttatggcaatgacgacacactgggcgcgcttcgacgcgtcaggcaccagacgataaaaagtttcgcccggcctgggcatgctgaattcattacgcgcacgctcttcgagcgcctcctggccgccattgagaacgtcaatttcggcaaaaagttgaacgggtcgcgctttaaaattcgcaaggatgaaaatcctgtgattgaatttaaaaacgtctccaagcactttggcccaacccaggtgctgcacaatatcgatttgaacattgcccagggcgaagtcgtggtgattatcgggccgtccggttccggtaaatcgaccctgctgcgctgcatcaacaaactggaagaaatcacctccggcgatctgattgtcgatggcctgaaggttaacgatccgaaagttgacgagcgcctgattcgccaggaagcaggtatggtgttccagcagttttacctcttcccgcatctgacagcgctggaaaacgtcatgtttggcccgctacgcgtgcgtggcgcgaacaaagaagaggcggaaaaactggcacgtgagctgctggcgaaagtcggtctggcagaacgtgcacatcactacccttccgaactttctggtggtcaacagcagcgtgtggcgattgcccgcacgctggcggtgaaacacaaaatgatgctgtttgatgaaacgactttcgattttgacccggaacttgtccatgaagtgctgaaggttatacacgaatttgctgaaaaagggattaccaatgctcaacgctttgccaagttccagcgtacaggccagcgcgccaaaatcttatgcaagttactcaatctctctgccttcatttcttccgctgtaaactgggacagtgataaccccttgtgggtgatgtctgaggagctggtgaggtgcagcctgcagtgtgtgcacagccggttccgggaggaggagtgctcgtgcgtctgtgacatctggtacggtggagcccagagtgccagccattttaaacttgtaagaaaaccgaaaatccttcatctgcacctgaaaggtaaagagaaagaaagtcagaagttttgtggcaacttgtgggtggggttacagaggaaaggcggggtgctggcccaaatcaagagccagaaagtgcaggacatcctcgccttctatctgggccgcctggagaccaccaacgaggtgattgacagtgacttcgagaccaggaacttctggatcggtagggagcacatgggggctgccagcgctgggaagaggggccagaaaggcagctggcagcagactccagggtctgagtgggccaaccttgactaccccggcccagggctcacctacaagaccgccaaggactccttccgctgggccacaggggagcaccaggccttcaccagttttgcctttgggcagcctgacaaccacgggtgccagagagttgtgggcacagctggtgtgggccggtggtgggatgtagggcaccatggacttttacagactgagggacatactctggatgagaatagtttaccctatcaaagaaaactactttattttgagcagattaaagaatgtgctgatgaaccggttggaaaaggttacatggtttcctgcttggtggatcaccgaggcaacatcactgagtatcagtgtcaccagtacattaccaagatgacggccatcatttttagtgattaccgtttaatctgtggcttcatggatgactgcaaaaatgacatcaacattctgaaatgtggcagtattcggcttggagaaaagacacaagctggtgagggcagagtgtataagtgcctctttaaccataaatttgaagaatccatgagtgaaaaggatgcacattcacaaggtgaggtggtatcatgcttggagaaaggcctggtgaaagaagcagaagaaagagaacccaagattcaagtttctgaactctgcaagaaagccattctccgggtggctgagctgtcatcggatgactttcacttagaccggcatttatattttgcttgccgagatgatcgggagcgtttttgtgaaaat

SEQ ID NO: 24310 - DNA, 1533 bp, Homo sapiens
  SIMILAR (1)..(615): 961254mologous to Escherichia coli porphobilinogen synthase,accession number D85613,Smith-Waterman Score=1008.
atgacagacttaatccaacgccctcgtcgcctgcgcaaatctcctgcgctgcgcgctatgtttgaagagacaacacttagccttaacgacctggtgttgccgatctttgttgaagaagaaattgacgactacaaagccgttgaagccatgccaggcgtgatgcgcattccagagatacatctggcacgcgagattgaacgcatcgccaacgccggtattcgttccgtgatgacttttggcatctctcaccataccgatgaaaccggcagcgatgcctggcgggaagatggactggtggcgcgtatgtcgcgcatctgcaagcagaccgtgccagagatgatcgttatgtcagacacctgcttctgtgaatacacttctcacggtcactgcggtgtgctgtgcgagcatggcgtcgacaacgacgcgactctggaaaatttaggcaagcaagccgtggttgcagctgctgcaggtgcagacttcatcgctccttccgccgcgatggacgggcaggtacaggcgattcgtcaggcgctggacgctgcgggatttaacgatacggcgattatgtcgtattcgaccaggttcgctcctcttttatggccgtttcgtgaagtgccggagcgcttacaggcgacgcaaatgtatagatgcccaatgaacgtcgtaagcgattgtgattatgctctcttaatttgcaagggcgtcgtcaagagaactttggacgtcgcgtccgccacggttaatctgctctttttccgcatcacccgcgatgttaagcgcgatacgctgcccggcattggcggtttctgttggctggttttgcgcatgagcgcacgtacacgcatcggtttatttacaccagtcagccagagtgaatcgcctaccttcacttccccgcttaacgccgtaccggtgacgaccagcccggcaccttttacgaacctcctttacctggcgttcaacctcatcaacacgcgcttcgtgcatatcttgcatgcggcgtcgtccagtagtcagattgcccttattgcgacggtggcgtttggtgcgttgggcgtgccgattctggtcgccggtcaggtaacgggaatcgatccgttccacattggcgcaatggcgggacgtcagttaccgttcctgtcggttcttgtgccgttctggctggtagcaatgatggacggctggaaaggggtgaaagagacgtggccagcggcgctggttgctgggggaagcttcgctgtcactcagttctttacctctaactatattggtccggaactgccggatattacttcggcgctggtgagtatcgtctcactcgctttattccttaaagtctggcggccgaaaaataccgaaacggcaatcagcatgggacaatccgcaggtgcgatggtggtaaataagccatcttctggcggtcccgtgccttcagaatatagtctggcggccgcgggagcaaatataattaccctaaagccctgcgcttccagcgggcgaccgcaaatcgccatcccgaagcttgggtga

SEQ ID NO: 24311 - DNA, 1893 bp, Homo sapiens
  SIMILAR (1)..(537): 1001254mologous to Escherichia coli purine nucleoside phosphorylase,accession number M60917,Smith-Waterman Score=916.
atgggtcacggtatgggtatcccgtcctgctccatctacaccaaagaactgatcaccgatttcggcgtgaagaaaattatccgcgtgggttcctgtggcgcagttctgccgcacgtaaaactgcgcgacgtcgttatcggtatgggtgcctgcaccgattccaaagttaaccgcatccgttttaaagaccatgactttgccgctatcgctgacttcgacatggtgcgtaacgcagtagatgcagctaaagcactgggtattgatgctcgcgtgggtaacctgttctccgctgacctgttctactctccggacggcgaaatgttcgacgtgatggaaaaatacggcattctcggcgtggaaatggaagcggctggtatctacggcgtcgctgcagaatttggcgcgaaagccctgaccatctgcaccgtatctgaccacatccgcactcacgagcagaccactgccgctgagcgtcagactaccttcaacgacatgatcaaaatcgcactggaatccgttctgctgggcgataaagaagaagatcgggtgattcgctttggtaaagcacgggcaacgcgatatgcactgctgcgtccttatcgcggaattgagcgtattcccgtctggcgggtggacgataccggaaaggcgcataaattcgccgacatccggttgtgctggccgcagggaagttgtctggatgttgcgaaagcgcgagaagtgattcgtggcagccaaccgctgcctgcgtggtgtgaaaactgggcgcaagaagtcgatgcccggttgacgaaagaagcgcagagcgcgctgcgtccggtgatcaacctgacgggaaccgtgctgcataccaaccttgggcgagctttacaggcggaagccgcggtggaagccgttgcgcaggctatgcgttcgccagtgaccctcgagtatgatctggacgacgccggacgcggacatcgcgatcgggcgctggcgcagctgctgtgccgtattacgggggcggaagatgcctgtatcgtcaataacaatgcggcggcggtgttattgatgttggcggccactgccagcggaaaagaggtggtggtatctcgcggcgaactggtggagattggcggcgcgtttcgtattcccgatgttatgcgtcaggcaggctgcaccctacacgaagtagggaccaccaaccgcacgcacgcgaatgattatcgtcaggcggatttccagtttgacgatttcgtcatggcgttcacgcagaatatcaacggcccgacgcagaatacgcgagcgctccatggcggtcataaacgcccagattttttgcccctgctgggcgcttttcacggcgcgatcgacatcctagcgcccggcggcctgcacggatacagtcttccatccagtttctttcacgcactagcattgagtgcggcttttccaggcaaacggtgcaagctgtctgtgcatctaccattctggggtctgaaggatggtggccctcttctcacagctccgctaggcggtgccctagtagggattgtgggaggggtggggggctccaacctcacatttcccttccacacaaacttcctcaatgtacgcttcgttattaggcggatatcccatcggcaccaccacttttaccgtatcgccaaattgctgatgaacggcgcgcaaggcagcaatatgctcattgctgcggtcgccggagttccccaccagaatggtcattttcccttcacgttgccgatcgttcgccatcgtattgagcgaagggtccatccgcgtcgggaagaacagcagttcgccccgcacctttgggtgcgttttggcaaaaaagctcaaatcgccgcgggtggcaaatacacagccgactcgcttttgcgccaggcgacgtag

SEQ ID NO: 24312 - DNA, 3364 bp, Homo sapiens
  SIMILAR (1299)..(1868): 951254mologous to Escherichia coli selenocysteine synthase,accession number M64177,Smith-Waterman Score=907.
atgattatccccattttacagatgaggaaagtgagatgcagagaatttaaggatcttggccaagtggtgaagataaaaagctatgccgcaaaagaagcgggcggcgaactggaagtttatgagtacgatcccggtgagctgaggccacaagatgttgaagtgcaggtggattactgcgggatctgccattccgatctgtcgatgatcgataacgaatggggattttcacaatatccgctggttgccgggcatgaggtgattgggcgcgtggtggcactcgggagcgccgcgcaggataaaggtttgcaggtcggtcagcgtgtcgggattggctggacggcgcgtagctgtggtcactgcgacgcctgtattagcggtaatcagatcaactgcgagcaaggtgcggtgccgacgattatgaatcgcggtggctttgccgagaagttgcgtgcggactggcaatgggtgattccactgccagaaaatattgatattcgagtccgccgggccgctgttgtgcggcggcattacggtcttttaaccactgttggtgccggcctatcaatgctaccctacccgattctggttaattgctgttcggcggcctttaccgtaatgcccttaacacttctgcacgcaatgggatgcgaggtgacagcctttagttctaatccggcgaaagagcaggaagtgctggcgatgggtgccgataaagtggtgaatagccgcgatccgcaggcactgaaagcactggcggggcagtttgatctcattatcaacaccggcacgcttcaatgggggccctttttggggggcgaaccaagggggggatcccaaagggcggggggggtctcaacgggcgttgttccggcgtaaaaataatagggggggagagacggtctcgggggcggaagatgcctgtatcgtcaataacaatgcggcggcggtgttattgatgttggcggccactgccagcggaaaagaggtggtggtatctcgcggcgaactggtggagattggcggcgcgtttcgtattcccgatgttatgcgtcaggcaggctgcaccctacacgaagtagggaccaccaaccgcacgcacgcgaatgattatcgtcaggcggtgaatgaaaataccgcactgttgatgaaagtacataccagtaactacagcattcaggggttcaccaaagcgatagatgaagcggaactggtggcgctcggcaaagagctggatgttcccgtagtgactgatttaggcagtggctcgctggtcgatcttagccagtacggtttgccgaaagagccacatgccgcatgagttgattgcggcgggcgtcagtctggtgagtttctccggcgacaagttgttaggcgggccgcaggcaggaattattgttggtaaaaaagagatgatcgcccgcctgcaaagccacccgctgaagcgtgcattacgcgcggataaaatgaccctcgcggcgctggaagccacgttgcgtctttatttacaccctgaagctctgagtgaaaaattaccgaccctgcgcctgcttacccgcagcgcagaggtcattcaaatccaggcacaacgtttacaggacccccttgccgcacattacggcgcggagtttgcggtacaggttatgccatgtctttcgcagattggcagtggttcgctgccggttgatcgcctgccgagcgcggcattaacgtatacaccccatgatggacgcggtagccaacttgagtcattagccgaccgctggcgtgaattgccagtgccggtgattggtcgtatttatgacgaacgattgtggctggatttacgctgccttgaagatgagcaacggtttttggagatgttgttgaaatgattattgcgactgccggacacgttgaccacggcaaaacacccttattgcaggcgattactggcgtaaatgctgaccgtctgccggaagaaaaaaagcgcggcatgaccatcgatctcggctatgcctactggccgcagccggatggtcgcgtgcctggttttatcgacgttcccggtcatgaaaagtttctttccaacatgctggcgggcgttggtggtatcgatcacgcgctgttggtggtggcgtgcgatgacggcgtgatggcacagacccgtgagcatctggcgattttgcagctgaccggtaacccgatgctgacagtggcgctgaccaaagccgatcgcgtggacgaagcgcgtgttgatgaggttgaacgccagcacgccagccaacatagtttccgcctcgcgattgaccgcgcatttaccggtaaaaggtgccgggctggtcgtcaccggtacggcgttaagcggggaagtgaaggtaggcgattcactctggctgactggtgtaaaaaaccatgcggtatggtggtggagaggatgatgatgatgatggtggtggtgatgaagattatggtagtgaagacagtgatagtgatgatagtggtgatgaaaatgttgaattcagccaactggtcaaacgctgttagcgccgcactggagctttatgccagaccaccgcgacaacaaggagtaaagatgagaaccgttaaggtattcgaggaagcctggcccttacataccccgtttgtgattgcccggggaagtcgcagtgaagcgcgcgtggtggtggttgaactggaagaagagggtattaaaggcaccggcgaatgcacgccgtatccgcgttatggggaaagtgatgcctcggtaatggcgcaaattatgagcgtcgtgccgcaactagagaaagggctgacacgggaggagttgcaaaaaattctccctgccggcgcagcacgtaatgcgctggattgtgcattgtgggatctggccgcgcgaagacagcagcaatcgctggctgatttgatcggcataacgcttcccgagacagttatcactgcacagacggttgtcatcggtacgcctgatcagatggccaatagtgcatcaacactctggcaggcaggcgcgaaattactgaaagtgaagctggataaccatcttatcagtgagcggatggtggcaattcgcacagctgtgcccgatgcgacgctgatcgttgatgcaaatgaatcctggcgtgcagaagggttggcggcgcgttgccagctattggcggatttaggcgttgcgatgcttgaacaaccgcttcctgcgcaggacgatgcggcgctggagaattttattcatccgttgccgatttgtgctgatgaaagttgtcatactcgtagcaatttgaaggcgctgaaagggcgctatgagatggttaatattaagcctcgcccttttttgtgcgcctattttcgctcccccggatctctggggtga

SEQ ID NO: 24313 - DNA, 1419 bp, Homo sapiens
  SIMILAR (699)..(13): 971254mologous to Escherichia coli UNKNOWN PROTEIN FROM 2D- PAGE (SPOT M92) (FRAGMENT),accession number D90883,Smith-Waterman Score=1146.
tcaggaaactgtcttcgatattctttgaatgccgttccacagacggttacgcaggccgcgcagacgttccatctcggtcgccatctcttcttttgcgatgcgataggcctcgcccattccgacgatctggtgaacaggcagagtgccggaacgcataccgcgctcgtgaccgccgccgtgcatttgcgcttcgatgcgtacgcgcggtttacgacgtacatacagcgcaccgatacctttcgggccatagattttgtgaccggagaaagacatcaggtcaactttcaactggctcaggtcgataggcagtttacccacgctctgggttgcatcaacgtgatagataatgccacgagcacggcacatttcgccgatagccgcgatatcctgcaccacgccgatttcgttatttacgtgcatgatggacacgaggatggtgtcgtcacgcatcgctgcttcaagttctttcaggtcgataatgccgttacgctgcggtgccaggtaggtgacttcaaaaccttcgcgctccagctgacggcaggtatccagtaccgctttgtgttcggttttgctggtgatgatgtgcttgccttttttctgataaaagttggctgcacctttgatcgccaggttgtcagattcggttgcaccagaggtaaagacgatttcacgcggatcagcaccgaccagatcgacaatcggaaatatctgccggtaccagctcagtctacccctaggccagtaagcagaagtcggatcccgaccttcggctgtggatcggtgtttggctattccggtcaatttggcttgcgctggtaaaggccttaagggttgcccacagttttgatggtttacccgttttcgggccaatccatggtccttgttcccgcgcatgatccgcctgattgttgaggccttgctgcccatctccgacggtgcaagaaagttcttccagaaatatttcaaaggacgtgaagtgtatatcggtctggatactgctgtgacgctggggcatccaaccaccattgctgtcggtctgctactgatacccattatgttaattctggccagcattttaccgggcaacaaagtgttacccctcgcagacctgccggtagcaccgttctttatctgtatggctacggttatccaccgcggagacttcactgaaatggcgctcaaaggcggtttcagttttgccggtgaaagtgcgcaaatctcagcgttgtccgtgggcaatatgttcggttggtcgatttctgaattgatgtcgcttgggattattggcgttgtcgtggcggtcggtattgtcgccagcgtcgtgctgttcttacgtaaacgtgaattatcggaataaggagtactttcaatgagttggctgaaagaggttattgggacggaaaaagcggtcatcgccat

SEQ ID NO: 24314 - DNA, 1570 bp, Homo sapiens
  SIMILAR (1343)..(1471): 1001254mologous to Escherichia coli K12 putative nucleoside triphosphatase,accession number AE000501,Smith-Waterman Score=218.
atgaagggacgcaatatcgatgctcaggagatccagaaacgctacggcatggtcggcgatccggtgattatcggcgtagtgctcggtctgatttttggcctggcggctggtgaaggctttaaaggttgcgccagtctgatgattaccgttgcggcaatcatggtgttgttcccgcgcatgatccgcctgattgttgagggcctgctgcccatctccgacggtgcaagaaagttcttccagaaatatttcaaaggacgtgaagtgtatatcggtctggatactgctgtgacgctggggcatccaaccaccattgctgtcggtctgctactgatacccattatgttaattctggccagcattttaccgggcaacaaagtgttacccctcgcagacctgccggtagcaccgttctttatctgtatggctacggttatccaccgcggagacctggtcaggacgttgataagcggggtcatcgtgatgattaccgtcctgctgatcgccacccagttcgcgccttacttcactgaaatggcgctcaaaggcggtttcagttttgccggtgaaagtgcgcaaatctcagcgttgtccgtgggcaatatgttcggttggtcgatttctgaattgatgtcgcttgggattattgggcgtgtcgtggcggtcggtattgtcgccagcgtcgtgctgttcttacgagtactttcaatgagttggctgaaagaggttattgggacggaaaaagcggtcatcgccatgtgccatctacgtgcattgcccggcgacccgagttttgatgcgcagttggggatgaactgggttatcgacaaagcctgggacgatctgatggcgctccaaaatggtggggtggatgcagtcatgttctccaacgagtttagtcttccctatctcacgaaggtgcgtccggaaaccactgcggcaatggcacgaatcatcgggcaattaatgagcgatatccgcatcccgtttggcgtgaatgttctgtgggatccggtcgcctcattcgacctggcgatggctaccggcgctaagtttatccgcgagatatttaccggtgcctatgccagcgactttggcgtctgggacactaacgtcggtgagaccatccgtcatcaacaccggattggtgcaggcgaagtgaaaaccttgttcaatatcgtcccagaggccgccgtgtatctgggcaatcgcgatatctgttctattgctaaatcgacagtatttaacaaccatcctgatgcgctctgtgtttctggcctgaccgccgggacgcgtaccgacagcgcgctgttaaaacgggtcaaagaaacggtgcctgacacctgtcgtgttggccaacacgggcgtctgcctggaaaacgtggaggaacaactcagtatcgccgatggctgtgtgaccgcaaccacctttaaaaaggacggcgtttttgccaatttcgttgaccaggcgcgaagcaataacccttctgcgatccctgccgccttcgtcaaaagtatcgacggggatcgctaccagattaacccgaatcggcatggagtcaacgacggatga

SEQ ID NO: 24315 - DNA, 3372 bp, Homo sapiens; identical to SEQ ID NO: 9201
  SIMILAR (811)..(1989): 981254mologous to Escherichia coli 46 KD MEMBRANE PROTEIN,accession number D90860,Smith-Waterman Score=1911.

SEQ ID NO: 24316 - DNA, 2367 bp, Homo sapiens
  SIMILAR (34)..(765): 971254mologous to Escherichia coli DNA polymerase III alpha chain,accession number U70214,Smith-Waterman Score=1231.
atgttaaccttctgccgcgacccctggccacttcggagccttcttttgtctgttaccaggccgctggtagatgagtgtgtcgcgttttatgaagaacacttcccggatcgctattttctcgagctgatccgcaccggcaggccggatgaagaaagctatctgcacgcggcggtggaactggcggaagcgcgcggtttgcccgtcgtggcgaccaacgacgtgcgctttatcgacagcagcgactttgacgcacacgaaatccgcgtcgcgatccacgacggctttaccctcgacgatcctaaacgcccgcgtaactattcgccgcagcaatatatgcgtagcgaagaggagatgtgtgagctgtttgccgacatccccgaagcccttgccaacaccgttgagatcgccaaacgctgtaacgtaaccgtgcgtcttggtgaatacttcctgccgcagttcccgaccggggacatgagcaccgaagattatctggtcaagcgtgcaaaagagggcctggaagagcgtctggcctttttattccctgatgaggaagaacgtcttaagcgccgcccggaatatgacgaacgtctggagactgaacttcaggttatcaaccagatgggcttcccgggctacttcctcatcgttatggaatttatccagtggtcgaaagataacggcgtaccggtagggccaggccgtggctccggtgcgggttcactggtggcctacgcgctgaaaatcaccgacctcgatccgctggaattgacctgctgttcgaacggggatcctgtagattgcgcggcggccgggctgtggggtgcccgtgcgtgtagggagagaggcagggtgttggccccggtgttgccgcaggtgttaggggtgggcctgggtgcgccacagatctgcgcccgcggggtggtacggtttcccccttgcgggcggcctggtccgcaagggggtgccgctttcggtggtgcgacaggttaccggacgcatgtcaaacgtgccctgttggacgtactacgtaaaactctacgatggagacttcccatgatcgctattactggtgccactggccaacttggtcactatgttagtgaatccttgatgaaaacggttcctgccagccaaatagtggctatcgttcgtaatccggcaaaagcccaagccctggcagcacaaggcattaccgtgcgtcaggctgactacggcgatgaagccgcactgacatctgcacttcagggagtggaaaaactactgctgatctcttccagcgaagtgggtcaacgtgccccgcagcatcgtaatgttattaatgccgcaaaggcggctggcgtgaaatttatcgcttataccagcctgctacatgcagatacctccccgctcggcctcgccgatgagcacatcgagacggagaaaatgctggctgattctggcatcgtttacaccctgctgcgcaacggctggtacagcgaaaactacctcgccagcgccccggcagcactggaacacggcgtatttatcggtgcggcgggcgatggcaaaatcgcctcagcaacgcgggcagattatgcggcagctgcggcacgcgtgattagcgaagccggtcacgaaggcaaggtttacgaactggcgggcgatagtgcctggacgttgacacagttagcggcagagctgaccaaacagagcggcaaacagcaaggaattgccatgtctctgtttcacttaattgccccatcgggttactgcattaaacagcacgccgcgctgcgtggtatccagcgccttaccgacgcggggcatcaagtcaataacgtcgaggttattgcccgtcgttgtgagcgttttgcgggtacggaaacagagcgtctggaagatctcaattcccttgccagactgactacccccaacaccatcgtgctggctgtacgcggcggttacggtgccagtcgtttactggcagatattgactggcaggcactggtggctcgccaacaacatgacccgttgctcatttgcggacatagcgattttaccgccattcagtgcggtcttctggcgcatggcaatgtcatcacctttagcggccccatgctggtagcaaactttggcgcggatgaactgaacgcctttaccgagcaccatttctggctggcgttacgcaatgaaaccttcaccattgaatggcaaggggaaggcccgacatgtcgggccgaagcacgttgtggggagcaatcttgcgatggtgtgtttctaagaccctcccggatttgcctatgtggtaagttttgcggaattagtcgcggtatgtcgctgtccaattggggcatcgcttccctatattggttattaatcaaccggtaa

SEQ ID NO: 24317 - DNA, 2475 bp, Homo sapiens; identical to SEQ ID NO: 9232
  SIMILAR (2431)..(2327): 971254mologous to Escherichia coli Initiation factor IF2- alpha,accession number AJ002540,Smith-Waterman Score=174.

SEQ ID NO: 24318 - DNA, 3039 bp, Homo sapiens; identical to SEQ ID NO: 9204
  SIMILAR (1041)..(1958): 771254mologous to Escherichia coli Initiation factor IF2- alpha,accession number AJ002542,Smith-Waterman Score=1124.

SEQ ID NO: 24319 - DNA, 1623 bp, Homo sapiens
  SIMILAR (13)..(1344): 991254mologous to Escherichia coli similar to phosphotransferase system enzyme I,accession number U00006,Smith- Waterman Score=2252.
atgtctggaaatatagtggaagctcaccgatccctggctggcgatacttccctgcgcgaacatttactggcaggcgtcagcgccggattaagctgcgccgaagcaattgttgccagcgcgaatcacttttgcgaagagttttcccgttccagcagcagctacctgcaagaacgtgccctggacgtacgcgacgtctgcttccagttactccagcaaatctacggtgagcaacgcttcccggcaccgggcaaactgacgcagcccgccatttgtatggctgatgaactgacccccagccagttcctcgaactggataaaaatcacctcaaaggattgttgctcaaaagcggcggcaccacctcacatacggtgatccttgcccgttcgttcaacattccaacgctggttggtgtggatattgatgcccttactccgtggcagcaacaaacgatttatatcgacggcaacgccggggcgattgtggttgagccagtggaagccgtagctcgttattatcagcaagaagcccgcgtacaggacgccctgcgtgagcaacagcgtgtctggctgacccaacaagcccgtaccgctgacggtatccgcattgaaattgccgctaacatcgctcactccgtggaagcgcaggccgcattcggcaatggtgcggaaggcgttggtttgttccgcactgaaatgctctatatggatcgcaccagcgcaccgggcgaaagcgagttgtacaacattttttgtcaggcgctggaatccgccaacggacgcagcattattgtgcgcactatggacattggcggcgacaaacccgttgattatctgaacattcccgcagaggcaaacccgttcctcggttatcgcgccgtgcgtatttatgaagagtacgcgtcgttgtttaccacgcagctacggtcgatcctccgcgcctccgctcacggcagcctgaaaatcatgatcccgatgatctcctcaatggaagagatcttatgggtgaaagaaaaactggcggaagccaaacagcaactacgtaacgaacacattccgtttgatgagaaaatccagctcggcatcatgctggaagtgccgtcggtgatgttcatcatcgatcaatgctgcgaagagattgatttctttagtattggtagtaatgacctgacgcagtatctgctggcggtggatcgcgataacgctaaggttactcgtcactacaacagcctgaatccggcattcttgcgggcgctcgattacgccgtgcaagcggtgcatcgccagggcaaatggattggtctgtgcggtgagctgggagcgaaaggttccgtgctgccgttgctgcatgagcgcaccatcacggactcccctgataacttccacgactacctacaggacgtgactgacgtgcacggacgacactctgctatgacacccacggagacgtgcggacgggttgtagacatgacgactgacgactatgtgggtgtacccgacgactacgacacttctgatcacatccattggctccatcagcatagtattcccttgatggttgcacacatttgtatcatcgctgcatccaccacatatcccaccaccacaccatcacagcagacctga

SEQ ID NO: 24320 - DNA, 772 bp, Homo sapiens
  SIMILAR (416)..(661): 951254mologous to Escherichia coli similar to phosphotransferase system enzyme I,accession number U00006,Smith- Waterman Score=402.
cttcaggtttgatatccagtaacataccatcgggtgccagttttatgcgcacgtagcaggttttgcctgcataggacgatgcgtcatagaacttactttcgatagcagatttaatctgcccggcatagttattgatatcggcccggtgatccttgcccgttcgttcaacattccaacgctggttggtgtggatattgatgcccttactccgtggcagcaacaaacgatttatatcgacggcaacgccggggcgattgtggttgagccaggggaagccgtagctcgttattatcagcaagaagccccgcgtacaggacgccctgcgtgagcaacagcgtgtctggctgacccaacaagcccgtaccgctgacggtatccgcattgaaattgccgctaacatacgctcactccgtggaaggcgcaggccgcattcggcaatggtgcggaaggcgttggtttgttccgcactgaaatgctctatatggatcgcaccagcgcaccgtgcgaaagcgagttgtacaacattttttgtcaggcgctggaatccgccaacggacgcagcattattgtgcgcactatggacattggcggcgacaaacccgttgattatctgaacattcccgcagaggcaaacccgttcctcggttatcggactgcccgagctcagatcgtgattctttatcccctctcggggacagtaggcgaccactttgagggaggcgctctctggtgacgcgggggatcctctccgagtcttaaaggcatgagccat

SEQ ID NO: 24321 - DNA, 3533 bp, Homo sapiens
  SIMILAR (2337)..(1615): 951254mologous to Escherichia coli GALACTOSIDE TRANSPORT ATP- BINDING PROTEIN MGLA,accession number D90884,Smith-Waterman Score= 1126.
ctaattgatggtaaagagccccagggctcccagcttcacattgcgcttcatttcatcttgtagaagctggcgcgagcgcagatagcggcgataccagaagaatgacaatacgcttgccagcaagaccgtcgccagggcgaagaggataatcagggtattgcgcttttccccactctgggttgcaaccagatcactggcatcaacggcgataaaaatagcctgttgtgcatctacttgtggcacagctttgccgttacagcgcggcatattgtgcattccatgccgccagggcgctgacattggctggaacaaacgatagacctcaagtgcaggcgtagtttccgttttcccaagcagccgccagcgggagttttcctctggctttaatttctgcatttcatccggcgaatagagcgcacgcccgaccttatcggggtcgctatgaagaataatgatgccctgcgcatcggtgactgcgaaccacaacactcccggctgtcccgccatctcttccagaagcgcctgttgctgtacatggtgcattcgcatccccatccctacgcggcttcccgactccagagcgcggataagcacattacctttttccagtaatgcctggcggtctgcctcgcttgcccgcccataatcacgaatcacagttaccgcaaacaatcccaccagcccaacaatgaccacggggaggatcgcgcttaaccatttagctaaggagtctttagaacgttgcataaaacgcatcttcttctttgcctgctcatccctttggcggacacggtatgtggcagcaaaatgccgcgcctttgaccagcgaacaacagacagcgtggcagaaaatccataatgacttttacgctcaaagcagcgcactgctacagcaactgtcagggccgaaacaggcagcagtctgcggtgacgtccaccggtgatgctacgctcatatgcggcaccacgagaaccataaagctctttcagcccgtcaattgccattcgaccagagccaatccagttggcattcccccaggctgttctcgcctcctggaaactgaaccgggctttcgaaggaagcgtgaccacgcggcggacaatcgcctcttcaagccagcaaagaaacatctgacaggcctgtcgggatgccacaaacttgcgacgccccataaagtacgcccaggactcgttagcacttgcgcgtgcggtcgagtagctcatctgcgaatagtttcgcgaaagctgctcatacgacacaccaagcccagcggcaatataacgcagcagggactgttcaaaagtcgagtagccgttatcggtatcctgcgccgactgaaggttgagagaatcacccggcaacaggtgtggaacccttgccccacccaggcgaacaggcgcagtctgcaggtcatagcccatgcctcgtttcagcatgtcgccgtaatgggggcgcgtgattttctcgccgttgataacaatttcgccctgttcatactcctccagcccaacaatcgccttcagcaattcactgcgccctgcccccagcagaccagcaatgccgagcacttcgccacgacgtagcgtaaaactgatatcctccagcttgggcttatggcgtaacgcacggacttccagcacggcctgatccacaatttcctgaccatcgcgcataacggtggcacaggaggcaatgcggcgaatttcttccatccggtggctgacataaatcaccgccacgcccagtgccgacatctttttcaccgcgctgatcaccagttcaacttccgcactcgcaagcgaactggtaggttcatcaagaatgaccacgcgcggctcgcccttcatcacccgcgcaatttccaccagctgcttttgcgccgggcttagcgttgaaacaagttgttcaggactaacgtcaacgcccagcgcctgtaagcaacgttgggcatcctgcgccatttgcaggtaatcaatcatgccgttgcggcggggccactgaccgaggcagaggttttccgccactgtcagcccttccaccagacttaactcctgataaaccgcgcgcacccccagttcagcggcacggcgagtcagcgtagcttcgtcaccttccagtcgcgtctcgccaatccagatatcaccgctatccgggcgttcgctgccggtaagcattcgaatgagagtcgatttgcccgcgccgtttttacctaacagcgcacgaacttcgcctttattgagcgtgaagttaacgttatccagcgcaacgacgccgggataacgcttatttcctgccaccacttttgctaccgggactgcctctgttgccgtgaacatagggaccttctgtggatcaattcccagcttttcataatgtgcaatggctttttcaccccattcaaccgggtcgccagagtcatgacgcaggccctgataccgactagcgaactcgacaccgaaatcacgcaggaaagcatccatagtgatgcagtcggttaatgcaatgccaagttggtcgggatactcttccagccaggcagcaagtgcagctcgctggctgttggctagatccgggctgatttgctgatgtgcctggaaccattcgtgtgcctgtgttcccatcggcgtgagggaaagccgacgcgccagatcgtagttgctggtgcccacaaaccaggattcctgttgcagacgcttaacgatggtttcttgtactaacgcccccagcgccgccgcaatcggcagccccaccattcccgtgccgggaacggtgacgcccagaccgttcttcatcagatttggcgaaacccaggcttctacacgttcaaccggaccttccagttctgccgcagcaaccgccgccgccagcgccagtgaaatcggttcagtacatcccagcgccggttttacttcctcctgaacggcgaggatgtaacgctgccataacggatttaaagtcgaatcaaacatattaaaaaccatgccgaaaatcgggctacagatagaggtgaagctcaacaccggtgcgttcagtacgatggcgctccaggccagcaaaatggcgaaaatcatgatgccgcgctgaacgagattttcgttaatcttctcggcaggcatcttgcgacgcaggatgttcattacgatcccttgcgttgcttcgcgaaagcctaaatagacgccaaagaatgcagtcatgacagcaaagatattgagaatgacgctgaccactttcacccacgctgcgccgtcaccgctaataaactgtgcggcaatcgccagcgcggaaatattctgctcataggcttttaccgcttcgtcatgtcccatcgccagcgtgaacgacacggcgtagaaaaagacggtgacaaacaaaatgccaaacgcgatattcattgcccgcaatgctttatgccgcgccacttcaattgatttttcccgcgagcgataagagatcaccatcggacttaacgtctggataaacagaatcgacgtcagggtaaacggcagcgtaataatggcgtttttcaccagca

SEQ ID NO: 24322 - DNA, 835 bp, Homo sapiens
  SIMILAR (67)..(660): 1001254mologous to Escherichia coli similar to phosphotransferase system enzyme I,accession number U00006,Smith- Waterman Score=1007.
atgacccaccccaactggacacacgtgaccccggtaacaataataccaactggaaaacggcctgacgctggcgtcagcgccggattaagctgcgccgaagcaattgttgccagcgcgaatcacttttgcgaagagttttcccgttccagcagcagctacctgcaagaacgtgccctggacgtacgcgacgtctgcttccagttactccagcaaatctacggtgagcaacgcttcccggcaccgggcaaactgacgcagcccgccatttgtatggctgatgaactgacccccagccagttcctcgaactggataaaaatcacctcaaaggattgttgctcaaaagcggcggcaccacctcacatacggtgatccttgcccgttcgttcaacattccaacgctggttggtgtggatattgatgcccttactccgtggcagcaacaaacgatttatatcgacggcaacgccggggcgattgtggttgagccaggggaagccgtagctcgttattatcagcaagaagcccgcgtacaggacgccctgcgtgagcaacagcgtgtctggctgacccaacaagcccgtaccgctgacggtatccgcattgaaattgccgctaacatcgctcactccgtggaagcgcaggccgcattcggcaatggcttccacgacctagtacgggtattctaccacgtttccggctggtcagcgctcagtatcagcttccccaagtctgggggtcttgttgtggccacggataccacccccggtttccaggccccggaacctgcgtggccgccctttatatccgggttaaactctagaagcgccgtcccgg

SEQ ID NO: 24323 - DNA, 910 bp, Homo sapiens
  SIMILAR (154)..(675): 881254mologous to Escherichia coli K12 putative transcriptional regulator LYSR-type,accession number AE000305,Smith -Waterman Score=782.
tatcgggatctagcaggtcacggcctgacggtctatgaccactcaacacacattagtgcgggcaccagtctgtacaaggaggtcacctccctaagccgaaacgacgtggtagaatccagatgccccttcattgatggccctgaggcgctctttgccctagggataacaaagtttaaggcggttgaaatcgaacaactgtttcgcgaagacaacggcgcgattcgtatctatgccagtagtaccatcggtaactacattctgcctgcagttatcgcccgttatcgccatgattatccgcagttgccgattgaacttagcgttgggaatagccaggacgtgatgcaagcggtgctggatttccgcgttgatattggctttattgaaggaccgtgccacagcactgaaatcatttctgaaccgtggctggaagacgagctggtggttttcgccgcgccgacttcgccgttggcccgtggtccggtcaccttagaacagctggccgctgcgccgtggatcctgcgtgaacgcggttccggcacgcgggagattgtcgattatctgttgctgtcacatttaccgaagtttgagatggcgatggaattaggtaactccgaggcaatcaaacatgcggtctgcccggtcaatgccatctctcagagggatgatgcgatccaactcaacgaaagcctctgtattggctgcaagctttgcgccgtggtctgcccatttggcgcaatcagcgcttcaggaagccgtccggtgaatgcccatgcgcaatatgtttttcaggctgaaggctcactcaaagacggcgaagaaaacgcgccaacacaacatgctttgctgcgctgggaacctggtgtccagaccgtcgcggtgaaatgcgacctgtgtgatttcttgccagaag

SEQ ID NO: 24324 - DNA, 1518 bp, Homo sapiens
  SIMILAR (912)..(971): 751254mologous to Vibrio cholerae permease, putative,accession number AE004144,Smith-Waterman Score=73.
atgaaccaccgggtccacatacgcaagccgctgaatgcgtctgactaccgctctctgacgggttgccagtacagccatataattgacaataaaagagaataccagataactggaggagtttatggtcagctgcgtgtaatcctacaaatgcagcaaatctttttctacgccgtgtcgttcacgctggcgatgggacatgacgaagcggtaaaagcctatgagcagaatatttccgcgctggcgattgccgcacagtttattagctttgacgactcaatcggtatgattttgtggttcgacgggcaaaccagcctcgccaaccagtatcacatcgacagcgaacaggcccgacgggtgctggataccactatgcaaatgtacgaacagtggcgggaacagcaaccgaagctggcgcatccgcaactggaggcgctactgcagtgggccgccatgctcaggatttatcgtacaacatatcgtgaagccgacaacgatgaaccattgatactgaaaatacttcttccaaaatttatcccccgttatcgccatgattatccgcagttgccgattgaacttagcgttgggaatagccaggacgtgatgcaagcggtgctggatttccgcgttgatattggctttattgatttaaatcgtgcaattatcagcggcgtacgcgaggcaggggcaattttttctctgctcaatgtgattcagaccgtgccttcggtggcgctctttggcctgttgattgcgccgcttgtccgcgctggttacggcctttccgtggctggggacgctcggcatagcaggaaccggaatgacacccgcactgattgcgctggtgctctatgccttgctgccgctggagtaaggatagagcggcaccatcgccagcatacagccgactttcatctcacgtcattattgccggatatgtcggcggtggcgtggcgcgtggtgcattcgtgggtattcgttgccttaacgctggtgctcacggcggtgttgttctcccttgcgggtttgctgaacggtgtgtttgccaaaacgttcgatgacatcagcctggtgccaacctttgtgttaacgccactcacgtatttgggcggggtcttttactcactgactttgttgccgccgttctggcaagggctgtcgcacctgaacccaatcgtttatatgatcagtggtttccgctacggcttcccctggctcaaccacaatcgccccggcgttgctgtcgatataaatcgtttgttgctgccacggaaacaagaaaaactgggcatcaaactggataaagatcagctgatcgctggtgttcaggatgcatttgctgataagagcaaactctccgaccaagagatcgaacagactctacaagcattcgaagctcgcgtgaagtcttctgctcaggcgaagatggaaaaagacgcggctgataacgaagcaaaaggtaaagagtaccgcgagaaattccggcagataccttccgtgagcagctgccaaaagcagtaa

SEQ ID NO: 24325 - DNA, 557 bp, Homo sapiens
  SIMILAR (12)..(440): 961254mologous to Escherichia coli unidentified reading frame,accession number X01714,Smith-Waterman Score=676.
aggtatccccccaacgtatcacgacggctaaactggccgcctctgtcggcgtttccgaagcggcactgtttcgccacttccccagtaagacccgcatgttcgatagcctgattgagtttatcgaagatagcctgattactcgcatcaacctgattctgaaagatgagaaagacaccacagcgcgcctgcgtctgattgagttgctgcttctcggttttggtgagcgtaatcctggcctgacccgcatcctcactggtcatgcgctaatgtttgaacaggatcgcctgcaagggcgcatcaaccagctgttcgagcgtattgaagcgcatctgcgccaggtattgcgtgaaaagagaatgcgtgagggtgaaggttacaccaccgatgaaaccctgctggcaagccagatcctggccttctgtgaaggtaagcaatcaaggctttcgggtgatgatagagatcactttgcagccgtaatcacgctcaacttcctgaatcggcggaatttgccccgcccgcgtcctgacgatcgatcgaaatcaacaacgccgcaatgc

SEQ ID NO: 24326 - DNA, 693 bp, Homo sapiens
  SIMILAR (300)..(692): 961254mologous to Escherichia coli 23 kD protein,accession number L10328,Smith-Waterman Score=621.
agacatagcccggtatcgtgctgggtacctggtaggattgatcgattctgactatcagggccagttgatgatttccgtgtggaaccgtggtcaggacagcttcaccattcaacctggcgaacgcatcgcccagatgatttttgttccggtagtacaggctgaatttaatctggtggaagatttcgacgccaccgaccgcggtgaaggcggctttggtcactctggtcgtcagtaacacatacgcatccgaataacgtcataacatagccgcaaacatttcgtttgcggtcatagcgtgggtgccgcctggcaagtgcttattttcaggggtattttgtaacatggcagaaaaacaaactgcgaaaaggatccgtcgcgaggaaatacttcagtctctggcgctgatgctggaatccagcgatggaagccaacgtatcacgacggcaaaactggccgcctctgtcggcgtttccgaagcggcactgtatcgccacttccccagtaagccccgcatgttcgatagcctgattgagtttatcgaagatagcctgattactcgcatcaacctgattctgaaagatgagaaagacaccacagcgcgcctgcgtctgattgtgttgctgcttctcggttttggtgagcgtaatcctggcctgacccgcatcctcacagaacatgcgataatgtttgaac

SEQ ID NO: 24327 - DNA, 422 bp, Homo sapiens
  SIMILAR (374)..(3): 801254mologous to Escherichia coli similar to,accession number D90883,Smith-Waterman Score=498.
gccagaaagcgccagttctggcgaaccagcgccaaccacgcagaccaaccggtgctctcctgctggagacttgccccttgtggctgaatcgtcggacggatgagaaagccgagcagcatggatgccacgcccaacgtcaacagcgcgaggatcacccgataatcaaacatagtgaccagtttgcccgtcagcgccgagccaatgacaaacgccaccgagccccacagtcgccctttgccgtaatcaagcgggaactgcttttgccacgtattcgccagtgcatcggtcaacggtaccagtgttttatcggcataaaagtcatatgcataaagcgttggggcaacgaagattgcattgtgcatcgcaccaaaagctttcatcaaagcggcatcatcaaactcgccgaggatttctacgtttaa

SEQ ID NO: 24328 - DNA, 4356 bp, Homo sapiens
  SIMILAR (3487)..(4158): 961254mologous to Escherichia coli f445,accession number L10328,Smith-Waterman Score=1151.
atgaaaaacattatccgtactcccgaaacgcatccgctgacctggcgtctgcgcgatgacaaacagccagtgtggctggacgaataccgcagcaaaaacggttacgaaggcgcgcgtaaggcgctgaccgggctgtctccggacgaaatcgttaatcaggtaaaagacgctggtctgaaagggcgcggcggcgcgggcttctcgactggccgtaaatggatcttgatgccgaaagacgaatccatgaacatccgttacctgctgtgtaatgccgatgaaatggagccgggcacctataaagaccgcctgttgatggagcaactgccgcacctgctggtggaaggtatgctcatctccgcgtttgccctgaaagcttaccgtggctacatcttcctgcgtggcgaatatatcgaagcggcagttaatctgcgccgtgccattgccgaaaccaccgaagcgggtctgcttggcaaaaacattatgggaacaggtttcgatttcgaactgttcgtccataccggggcagggcgctacatctgcggggaagaaacaccgccattactcaagccgcagactggcgtttggcaacggcacagttgctggaaattgcaggagttggcgatgaatgaccgtgactttatgcgttatagccgccaaatcctgctcgacgatatcgctctggacgggcagcaaaaactgctcgacagccaggtgctgattatcggtctgggcgggctgggtacacctgctgcgctgtacctggcgggcgctggcgtcgggacgctggtactggcagatgacgacgatgtgcatttaagcaatctgcaacgacaaatcctctttaccactgaagatatcgatcgcccgaaatcgcaggtcagccaacagcgactgacacagttgaatcccgacattcaactgacagcattacaacaacggttaacgggtgaggcgttaaaagatgcggttgcacgggccgatgtggtgctcgactgtaccgacaatatggcgactcgccaggagattaatgccgcctgcgtggcactcaacacgccgcttatcaccgccagcgcggtcggatttggcggtcagttgatggtactgacgccgccctgggagcacgggtgttaccgctgcctcgacagttatgctgacactctggtcatcgccgaccacaacaaggcgctggcgatgggcggcatcttcggtggcgaacactctggcgtgaatgacgaaacacaaaacgtgctgctggaatgcgcgttctttagcccgctgtctatcaccggtcgtgctcgtcgtcatggcctgcataccgatgcgtctcaccgttatgagcgtggcgttgatccggcactgcagcacaaagcgatggaacgtgcgacccgtctgctgatcgacatctgcggtggtgaggctggcccggtaattgatatcaccaacgaagcaacgctgccgaagcgtgcaaccatcactctacgtcgtagcaaactggatcgcctgatcggccatcatattgcggatgagcaggtaactgacattctgcgtcgtctcggctgcgaagtgaccgaagcaaagacgaatggcaggcagttgcgccgagctggcgtttcgatatggagattgaagaagatctggttgaagaagtcgcgcgtgtatacggctacaacaacatcccggatgagccgacaagacaaacaaagagcacagcaggacaacctcaccacgacaccaccgcaagaaaaccacgctaaagacaccacccaccaggagaggacccagaccgaaggcaacagagaaaacacgaatacgaaacacatcgagaaggcacaccggcgacataacccaaagaaacctacgccaaaaaccacgaagagccaaagaagaagcatcttgcctcttctcgtcttttttgtgtcttctttgtgtctttccgtcggacagctgccagaacgaatgagcccagctctcctgcccgcagccagccgcgtgtgggtgcaactggcgaccagccactggaatgggaagatgcgcggttttggttttgttcagttcaaaaacctcctagaagcaggtaaagctctcaaaggcatgaacatgaaagagataaaagaccatcgaccctacgtcgttggatttgccgccgatacaaataatgtggaagaatacgcccggcaaaaacgtatccgcaaaaaccttgatctgatctgcgcgaacgatgtttcccagccaactcaaggatttaacagcgacaacaacgcattacaccttttctggcaggacggagataaagtcttaccgcttgagcgcaaagagctccttggccaattattactcgacgagatcgtgacccgttatgatgaaaaaaatcgacaactggctccgggtgacactacgctggttccgaccgggctggcgattcatattgccgatccttcactggcggcaatgatgctgccgcgctccggattgggacataagcacggtatcgtgcttggtaacctggtaggattgatcgattctgactatcagggccagttgatgatttccgtgtggaaccgtggtcaggacagcttcaccattcaacctggcgaacgcatcgcccagatgatttttgttccggtagtacaggctgaatttaatctggtggaagatttcgacgccaccgaccgcggtgaaggcggctttggtcactctggtccacccatcggcacgctttctggtggcaatcagcaaaaagtggtgatcggtcgttgggtctatgctgccagccagattttgttgctcgacgagccaacgcgcggcgtcgatatcgaagccaaacagcagatttaccgtattgtccgtgagctggctgccgaaggaaaaagcgtggtgtttatctccagtgaagtggaggagttgccgctggaacctgaagatgtctgcttcgtcattaccattgccgcaggcaagagcgtctcgctcaaacaatttgtcagtcgccatattaatgagatcggtttgctggtggtgattgccattctttatctggtcttctccctgaacgcgcctggctttatctcattgaataaccagatgaacgtgctgcgcgatgccgccaccattgggattgccgcctgggcgatgacgctgattattatctccggtgaaattgatgtcagcgttgggccgatggtggcttttgtctcggcttctgttcgttatgacgttaacgatcaacgtctggatatagacgttcctcaagcctgggtaatgaaaaattaccaaaactatgttgatccatcgttatgggaaaacggcattaatgcggccatgttgtcatacaacctcaacggatatcatagtgaaacccctggtcgaaaaaatgaaagcatttatgctgcatttaacggtgggatgaatttaggtgcatggcgactgcgtgcctcgggcaactacaactggatgaccgattctggcagtaattatgattttaagaatcgcaagccggggcgtcggcgttatctgacgctggtgatgatctttattacggtagtcatttgttatgtcgaccgcgccaacctggccgtggcttccgcccatattcaggaagagttcggcattaccaaagcggaaatgggctatgtattttcggccttcgcctggctttatacgctatgtcagatccccggcggttggtttttagatcgcgtaggttctcgcgtgacttattttattgcgatatttggctggtcagtggcgactttattccagggctttgccacgggcttaatgtcattaattggtctgcgcgcgataaccggtattttcgaagcgcctgctttcccgaccaataaccggatggtgaccagctggttcccggaacatgaacgcgcttctgccgttggtttttatacgtctggtcagtttgtcggtctggcgtttctgacgccgctgctgatctggattcaggagatgttgagctggcactgggtgttcattgtcactggtggtatcggcattatctggtcgctgatttggtttaaggtttatcagccgccgcgcctgaccaaaggtatcagcaaagctgaactggattacattcgtgatggcggcggtctggtggatggtgatgcgccggtgaagaagcgcagaggatccccttcagcgtccaaggtctccctctcttggggaccttggtctgcttcctgcacttcctatgtgccctctagcacccagtctagaagtggtcattccagacgcttaatatcaactttgaccgatcgacgatggcagtacactgtggtcaaaactcatgcctccacaaccgcgtctgtttcccttgatgccccacgtgtcgatgatgtcccctga

SEQ ID NO: 24329 - DNA, 1740 bp, Homo sapiens
  SIMILAR (1167)..(871): 951254mologous to synthetic construct InsB peptide,accession number Z37515,Smith-Waterman Score=494.
cacattggctaggtcgcgctgttgtgtccgttgggttcggtgttctggggcctcgctggccccgttcagtgcttcttgggaccacggatgtggcggcgttcgccgttctgtgtgtgttagtaggatgagcccagctctgcaccgcgctgcgtgtcgctggctgtcgtggtcggatgtcgttagctggcgttctgtgggctggaagtctttcaggtttcgggtgttccgcgtcttttccctgtatgtggcggtggggtatgtctctgctgtggtgtggttgtgtcccggcgcggcgtgctttccggtctggtctgtgtgttgcgtgtgtagtgcggggtgttgcggtgcgtcgtgcgggggttcgtatgtgcggagacttgtaccctcgtaacccccagcccttggggaggcccacggggggagatcaccaggtccggtttgaggcacgccttgggcgcgaacagggcgccgcgcaatatcctgtttaggaagacctaggttctgagagacaacgcgagctgtggctggcgggttctccgctgttggtgtcaaaggtgttgcggagtgtcgacgagagtgttgcgcgggggtggcccctgcgtttttgcggctggaattgaatgaaggaatgttcaggcccttcagggggcccacggaaccgggggggccctgacagacccggcttgacaacacttggggactctctgcgctgacctcctttgaaatgggctctctccatcgcccagggattaaacgtagaaatcctcggcgagtttgatgatgccgctttgatgaaagcttttggtgcgatgcacaatgcaatcttcgttgccccaacgctttatgcatatgacttttatgccgataaaagtgcagctttcccttcaggcgggattcatacagcggccagccatccgtcatccatatcaccacgtcaaagggtgacagcaggctcataagacgccccagcgtcgccatagtgcgttcaccgaatacgtgcgcaacaaccgtcttccggagactgtcatacgcgtaaaacagccagcgctggcgcgatttagccccgacatagccccactgttcgtccatttccgcgcagacgatgacgtcactgcccggctgtatgcgcgaggttaccgactgcggccaattgaggcctcttagtgaatccgaattggacccgctcttgatctgcatccccccgtaaccctccaggagggggatgccctgggacccccaatttgccatcgcatatttagaattgagaattccgtaattgtccacccgcacctctaacattggggaccggacattcgctaattccacaatcgcggtatccgcgatctgcggataagcggaattcccaatattcgccaactcagattgcgcccactctctcagggaagacgcataatgtgaaaccgccccttcgtaaagcggaatctttatggatatccgacgtggtatccgaaatcggactggttttcgaaaccgctcgcgatcctcgtacccccttccgctccgggggcctggaagacctacttctccatgttttataaggtcccctgaacaaagcagcattttgtacacatagccagccaggtgtgctgcaagtatgtggacccctctctgacgcgtacatttatcactctctccacaacagcttatatgtcgggggtggcggtcctcatggggctgcttggtcctcctttgcgcgtgatcgcacacacaaccacccat

SEQ ID NO: 24330 - DNA, 3411 bp, Homo sapiens
  SIMILAR (1291)..(2004): 981254mologous to Escherichia coli Respiratory nitrate reductase 1 beta chain (EC 1.7.99.4),accession number D90758,Smith- Waterman Score=1206.
atggctaaactcttcatatggcggggagcagcgggggactgggggcccttcttgcgaacgctgatcacgggacaccatagggaatttgacgcttttgaggatgaggtaaatgacgggttggaagaaagcagcttggagggcgcatgtagtcacaggccccatagctggctgtgtcagaatctcccgtgtcagtggtgggaagaccaggaaaccatagggcacactatgctccggggatatgctacgaggatcttggggccctcttccgacaaggcacaagatcagtatgaagggtgtatcctcgcggttcctttatatggccacacaactggttccaaccggggattccaaaaggctcccaacggcctgtaccaaaaacagggggctcccgttaccgtgactcgtaactatccaaaacatgcagaaggctcggtgctggtcgaatttggcgataccaaagtgttgtgtaccgcctctattgaagaaggcgtgccgcgcttcctgaaaggtcagggccagggctggatcaccgcagagtacggcatgctgccacgttctacccacacccgtaacgctcgtgaagcggcgaaaggtaagcagggtggacgcacaatggaaatccagcgtctgatcgcccgtgctcttcgcgcggcagtagatttgaaagcgctgggtgagttcaccattacgctggactgcgacgtgcttcaggctgatggtggcacgcgtaccgcgtcgattacgggtgcctgcgtggcgctggtagatgcgctacagaagctggtggaaaacggcaagctgaaaaccaatccgatgaaagggatggtagccgcagtttctgtcggaattgtgaacggcgaagcggtttgcgatctggaatacgttgaagactctgccgcagagaccgacatgaacgtagtgatgaccgaagacgggcgcatcattgaaaaaagtaagatgaggagcgaaggcatgaaaccatatcagcgccagtttattgaatttgcgcttagcaagcaggtgttaaagtttggcgagtttacgctgaaatccgggcgcaaaagcccctatttcttcaacgccgggctgtttaataccgggcgcgatctggcactgttaggccgtttttacgctgaagcgttggtggattccggcattgagttcgatctgctgtttggccctgcttacaaagggatcccgattgccaccacaaccgctgtggcactggcggaacatcacgacctggacctgcccgcaatccgcgtattgaaccggaaacctgtgtcggttcgtatccgtaatcttggcgtgctgttgtacgatgccgacgctatggaacgtgcagccagcaccgagaacgagaaagatctttaccagcgtcagctggacgtgttcctcgatccgaacgatccgaaagtcatcgagcaggcgattaaagacggtattccgctgagcgttattgaagccgcacagcagtcgccggtttataaaatggcaatggaatggaaactggcgctgccgctgcatccggaatatcgcacactgccgatggtctggtacgtgccgcctctgtctccgattcagtctgcagcagacgcgggtgagctgggtagcaacggcattctgccagacgtcgaaagcctgcgtattccggtacagtatctggcgaatctgctgaccgccggtgataccaaaccggtactgcgcgcactgaaacgtatgctggcgatgcgtcattacaaacgtgctgaaaccgttgacggtaaagttgatacccgtgcgctggaagaggtcggtctgaccgaagcccaggcacaggagatgtaccgttatctggcgattgctaactacgaagatcgctttgtggtgccgagtagtcatcgtgaactggcacgggaagccttcccggagaaaaatggctgcggcttaccctttggtgatggctgccacggttcagataccaaattcaatctgttcaacagccgtcgtatcgatgccatcgatcaaaacggagccgcatccatgatcgaactcgtgattgtatcgcgtctccttgaatatccggatgctgccttatggcagcatcaacaagagatgtttgaggcgattgccgcgtcgaaaaatctgccaaaagaggatgcccatgcgctgggcattttcctgcgcgatttaacgacgatggatccgctcgatgcccaggcgcagtacagcgaactgttcgaccgtggccgcgccacgtcactgttgctgtttgaacatgtgcacggcgaatcccgcgaccgcggccaggcgatggtggacctgctggcgcagtacgagcagcacggcttgcagttaaacagccgcgaattgccggaccatctgccgctgtatctggagtacctggcgcagctgccgcaaagcgaagccgtggaaggtttgaaagatatcgcgccgattctggcattgctgagcgcgcgtctgcaacagcgtgaaagccgttatgccgtgctgtttgatctgctgctgaaactggcgaataccgctatcgacagcgacaaagcactgttggcaaagggcagtggtccctatttctatctgccgaaaacccagtcctggcaggaagcggcctggtggagcgaagtcttcagctatgcagaagatcgctttaatctgccgcgcggcaccatcaaggcgacgttgctgattgaaacgctgcccgccgtgttccagatggatgaaatccttcacgcgctgcgtgaccatattgttggtctgaactgcggtcgttgggattacatcttcagctatatcaaaacgttgaaaaactatcccgatcgcgtcctgccagacagacaggcagtgacgatggataaaccattcctgaatgcttactcacgcctgttgattaaaacctgccataaacgcggtgcttttgcgatgggcggcatggcggcgtttattccgagcaaagatgaagagcacaataaccaggtgctcaacaaagtaaaagcggataaatcgctggaagccaataacggtcacgatggcacatggatcgctcacccaggccttgcggacacggcaatggcggtattcaacgacattctcggctcccgtaaaaatcagcttgaagtgatgcgcgaacaagacgcgccgattactgccgatcagctgctggcaccttgtgatggtgaacgcaccgaagaagtatgcgcgccaggaatatttgtcggcaccctgatggaagtcggtgcccacaaccagccggagagctggatagcagagttgctggcggcaaaggacagtactctggcggcatctccggcaaaagcggaaggtctgtatctgttctcggtggattaccctgaccggtatgatcttcccataccgcctatgggcccgctatttctgtcggacttacgagaataa

SEQ ID NO: 24331 - DNA, 3066 bp, Homo sapiens; identical to SEQ ID NO: 15785
  SIMILAR (3066)..(1825): 951254mologous to Escherichia coli K12 putative thiosulfate sulfur transferase,accession number AE000270,Smith-Waterman Score= 2155.
  misc_feature (1)...(3066): n = a,t,c or g

SEQ ID NO: 24332 - DNA, 2529 bp, Homo sapiens
  SIMILAR (445)..(1029): 1001254mologous to Escherichia coli unidentified reading frame,accession number X01714,Smith-Waterman Score=965.
atgggtggtcttcgtgacccctggttacataagctccgttcattgtggggattgtgccgatacggtcacaaggaacagtatgaccatattcgaattgagctgaacctggctccgggtgacactacgctggttccgaccgggctggcgattcatattgccgatccttcactggcggcaatgatgctgccgcgctccggattgggacataagcacggtatcgtgcttggtaacctggtaggattgatcgattctgactatcagggccagttgatgatttccgtgtggaaccgtggtcaggacagcttcaccattcaacctggcgaacgcatcgcccagatgatttttgttccggtagtacaggctgaatttaatctggtggaagatttcgacgccaccgaccgcggtgaaggcggctttggtcactctggtcgggtattttgtaacatggcagaaaaacaaactgcgaaaaggaaccgtcgcgaggaaatacttcagtctctggcgctgatgctggaatccagcgatggaagccaacgtatcacgacggcaaaactggccgcctctgtcggcgtttccgaagcggcactgtatcgccacttccccagtaagacccgcatgttcgatagcctgattgagtttatcgaagatagcctgattactcgcatcaacctgattctgaaagatgagaaagacaccacagcgcgcctgcgtctgattgtgttgctgcttctcggttttggtgagcgtaatcctggcctgacccgcatcctcactggtcatgcgctaatgtttgaacaggatcgcctgcaagggcgcatcaaccagctgttcgagcgtattgaagcgcagctgcgccaggtattgcgtgaaaagagaatgcgtgagggtgaaggttacaccaccgatgaaaccctgctggcaagccagatcctggccttctgtgaaggtatgctgtcacgttttgtccgcagcgaatttaaataccgcccgacggatgattttgacgcccgctggccgctaattgcggcacagttgcagtaatatgacgccggatgacttttcatccggcgagtttctttaaacgccaaactcttcgcgataggccttaaccgccgccagatgttccgccatttccggcttctcttccaggtaagcaatcaggtctttcagggtgatgatagagatcactttgcagttgtaatcacgctcaacttcctgaatcgccgaaatctcgccgcgcccgcgttcctgacgatcgagcgaaatcaacacgccagcaagcgtcgcgccattggcctgaataatctccatcgactcgcgaatcgccgttccggcggtgatcacatcatctaccagcattacgcgtccttgtaacgcgctaccaaccagattgccgccttcaccgtggtcttttgcttctttgcggttaaagcagtacggcaggtccaggtcgtgatgctccgccagtgccacagcggttgtggtggcaatcgggatccctttgtaagcaggggccaacagcagatcgaactcaatgccggaatccaccaacgcttcagcgtaaaaacgggctaacagtgccagatcgcgcccggtattaaacagaccggcgttgaagaaataggggcttttgcgcccgcgattcagcgtaaactcgccacactttaacacctggttgctaagcgccaattccataaactggcgctgatatgggttcatgccttcgctcctcatcttacttttgtgattaaacccgatgggcaggtactcaggagcgtcgttagtcagccggagaatggcctctaccactttacctggccactcgatagcaatgcggcaaccggtatgtggcatattcgcgctaacacgggcgataatcagtatcggatgtgggatttccacgtcgaagattttatgccagagcgcatggcgctgaatctggttttgaattcggcgatatagctgccgaaaatctttcccgcacgctggatgaagttcagttgacgctggatgataaagggcgcggcgaagtttcgctggactaaaaagcgcagaataatccgtattgcagattcgctgtaccgccgggtgctgaatcatccgctcagcaaaaatagcatggtactcttccatcacattctcgacgcgaccaatttctacgacagttttatcggcataaaagtcatatgcataaagcgttggggcaacgaagattgcattgtgcatcgcaccaaaagctttcatcaaagcggcatcatcaaactcgccgaggatttctacgtttaatccctgggagttaaaccagttaagcaatttgcgccctaacattgaacgtcgcccaggaatcaaaagtcgccgttcttccagacaagccgggaacggtttttctggtggtggatttgtacaccagaaactcacgccacattcgccaattctcacggagaacaggccttcctgctgcgtagagtctatcggacagtcagaaatgatcatatccagtttatgctgacttaattgctccagcagcat

SEQ ID NO: 24333 - DNA, 518 bp, Homo sapiens
  SIMILAR (390)..(1): 1001254mologous to Escherichia coli putative,accession number L10383,Smith-Waterman Score=647.
gagcgtatcaacatccgccaccacgcgattgagcaattcgccctgacgatagcgcgccagtccggcaggggagaggggcagcaatttgctgaaggtgtaaatgcgcagatgctgcaacacgcggaaagtcgcgtcgtgacttaccagacgttcaaaatagcgcccggcagtacgggtgattgctgcgccacgcacgcccgcagcgggtagcatatagttgaagctgtacagtccggcaacccccgcaaccgctgaggccgagaggaaccagccggaaagtgtcaacagaccgatactggcgagcagcgtcacaattgccagcacaataccaagacttaacatccatttatgacgtttatacagtgccagatagggtagcaaagcgcgcatttaaatctcctcctgacgatgggccagtaatgtggcgaatgggccaccagccacacttaattccgcgtaacgtccttgctcaataatccggccatcctgcataacccaaatgacatcccagtcagcaa

SEQ ID NO: 24334 - DNA, 1150 bp, Homo sapiens
  SIMILAR (322)..(810): 791254mologous to Escherichia coli Dipeptide transport ATP- binding protein DppF,accession number D90788,Smith-Waterman Score= 596.
atggcagaagatcgcagcacggtaacagcggcaaccggcatgaccgtgacgcctgccagcacctcggtggtgaaagggcagagcaccacgctgaccgtggccttccagccggagggcgtaaccgacaagagctttcgtgcggtgtctgcggataaaacaaaagccaccgtgtcgcgacagtatcagccgtatcccattcaggggagcggttttgaactgaatggcaaaggcaccagtacgcgccccacgctgacggtttctaacctgtcggtatggtcccgggatggcggaagatatgcagagtctggtcggcggaacggtgacccgctctggatagctaagcgtagtagtgaacaacaacggcgagcgttggcaaaggagttgtctgtgcaggtgggtattcgtccggagtatctcgaccgcctgcttcatgcgttctccggcgggcagcggcaacgtatcgccattgccagagcactctcttcgcagcctgacgtgattgtgcttgatgagccaacctctgcgctggatatctccgttcaggcgcagatcctcaatttactggtaacgctacaggaaaatcacgggctgacctatgtgctgatttcacacaatgtctcggtgatacgtcatatgagcgatcgggtggcggtgatgtatctcgggcagattgtagaactgggcgacgcgcagcaggaaatcgcccaggcattacgccgcacgccagcgccgatggtttatatcggcaatctggggcgtgagttgagtttacctgcggctaatttgaagctggaaagcaagctggcaattatggagcagtatgttggtaaaaaggtcattgatgcggtcatcgtcgggccaaaagtggatgtctcggcggtgaaagagcggattgtgatccaggaggtactggaggccagcgatattccgtatcgtcatgaccgccagttgttacataacgcgctggaaaaggcgttacaggctttaggaggcttggaagtcattcagttgtaccggagggattcaaaccttgtaccgggccaacttttaaaaacgtcggaaatggggaaaacccggctgtacgccgcagattctcgtttgattgcggccaaaggttcaccgattcagccaacgctggattcactgaaag

SEQ ID NO: 24335 - DNA, 2927 bp, Homo sapiens
  SIMILAR (2404)..(2060): 441254mologous to Escherichia coli LYSINE-ARGININE-ORNITHINE- BINDING PERIPLASMIC PROTEIN PRECURSOR (LAO-BINDING PROTEIN),accession number D90862,Smith-Waterman Score=185.
atgtgtaaaacgattccaagtaactcagaccttcgagaagtgcggggctgctttttcatgttggaggtaaaacctgcagatgaccaagaccccattgatgctctctcggagatctggacagctgtccctccactacagaaacctcacagaacacagaaagcccatgatgaagacttccttctggatgctttgtctgaggacttctctggtccacaaatgcttcatctcttggagaaaggagacagatacgacatcgagttcggtacccatttcttcccacttccaggtgctgctttacagccgacaaatatttatcaaatgacatcgtgtaacatccttgaaggcagagcccagaagccagccgcctttgccgcctttccaacctcgatggtcaacggttttagaagccggccacctctgccgcctttccaacctcgatggtcaacggttttagaagtgacatattacctgctgtcggaatccgaggcaatctcctttctccctccaaagcggattggcactgcacagaaaaagaagctgctgagatcagctgttgggatgggaactcaaaacgtcataaaacagcctacacagggcttaagggtcagggagggacacgggaccagaagctctgcatgccaagtgaggacgtccctgtccccgggtatcagcacaagacttaagaagaagtttgtaagtcgtttctacagccttcctgacaattctttgaactgccaaaatattttcataattcccacaaataaggcatctgaccactccacaacaaagaaggcgctgcatctttatcgcagcaacttcaaaccgtcacacggctggaaaaaccatacgcgatggtgggtacagagctcgattcgtagtgttttcgattttgaaaagttcaggaatattctcttccacattccagatccatttagtgtaccattggaacttcaaactcaaaatacagtcatgggttgcttaatgggatacatccttagacatgcgtctttggatgactttatagttgtgggaaatcggtgtactcacacaaacctaaatgatgttgatgcctttggcggtttggactgtgtcgtagtgggatccgacgcccccaatgttgcacacacgccgttgggttcaaactatacacactttacacgcctggcgtactacaaaatagtatcttacgcgcagcgcaacgcaggcttgtttcgccttttagtaatcggtttaatcatttgccgcgttattgcctcgcacaccggtagtgttttgcgttctagtctacttcttttattttcggtggcaaagtggtcggcgccgcggattggtcccgttcacaatctatcacgcatcgtggccgttctagcggtgtacgccgtcaacgtatcctccataataccccgtgctagcctcaccctaagccgggcttccgttgtgcgccgacccggccgtgtatggttggcgctacacaacagccgcgttggccttttggctctggctggcaggccgtctggtcttaatcaggccggcgtttgttatcgaatcgcgggtggggtgaggtattcctataaaatacgcgtacgcgttcggatttttccgccatcagtaccccatacagcttgtccacgtgttttaccgttttccgcttgctgcgcggcggggcccggttctggtggcgtctttcggtcaatgtcccatagcccacaaaatctataccaaaatcctccccctctgctccggccagtgctttttctctcgcttctgtgtcccgctcttgctaccacccgttgccgtgtactctaccccgggctctacctatatttgcatcgaattcaactggatagcggttttgtgctgggcgtttttctgaaaggaggatcaagtaaaggggggaatggtgtgtcccaagaaattgttgtgccaaggtacgcggtagcggggcggggtggtggggggtatatcgcaagcatctgtcacaagcgttatcgggtattccgcttcgtgtcaaccaacgcccgcaatcatgcaacttcatcttgtaacgcagcatccagacgcctgcagccagatcggaatagaccaaatcctggttggcataggccaccaatccacgcctttactacgccaggtctcgttagcgtaagcttcctgggttatccctgcagcacaccaacatgtttacctttcagtgaatccagcgttggtgaatcggtgaacctttggccgcaatcaaacgagaatctgcggcgtacacttgtcggagaaggcaatctcctgctgacgtttatcggtaatggaaagcacgaaataatagcgtcgatttttttcgctttcagtgaggggatcagcgctcaaagtcactggcaacccaggtacatttcacctgcatccgtttgcacactcgttaccgagatcgatatcaaagccaacaaaatcacctttagcatcttcgatgagaacgctggggcttggttgccgccgttttgtaaggccgtagtccccgggtgggtgtataaacccaacttggggcatgaaattgcatgtgttgaccactggttgatgcccaacaggttgatcgaaaacctgtgtgatatcatgttaccaatatgggttttgaccaagtttaatgactgttgtgctggttgtgtaccatgttgtgtgataattgttgatgatgccttgcatggtgcaccgaaaaggatgtgctgctgcatcacacgaggaatgaggctgctgaaattgagtgtgcatgcggcaaccagaagcacgctgcagcaagcatcccacggccattgtgcctggagtgcaccagggtggctggacacctctgggatggatggtgataggctgtggtggaccctgcatgaagtcctgagagacctatgcaccagccatggaaacatcgtggaaagtgcacgcatgag

SEQ ID NO: 24336 - DNA, 672 bp, Homo sapiens
  SIMILAR (626)..(381): 581254mologous to Escherichia coli g20.3,accession number M99278,Smith-Waterman Score=191.
atggtgctcggcaaacagcattcgccagcgtcgttagtcagtagcgtaccgccatccagagaggctttgcgcccgacaaccacagcgcggtatccaccacatgcagataatcatccagaacgtgaaataaagatcgtgtggcccgacgctattgctacgatgtttatcattcttagcgaggctgcggtggcgagttgcgtttttaactcaccggctttcgcgcgcgtaggcgaccaggctccttgtaacgtccagcagacgctgccgccagcaccgatggccagcaacgaatcaagacgctgtttcagttctgccacttcgatttccaggcttcgacgcgggcctgtaaatcaccgtcaaccgcgttcgacatatccgcaccgccggctgatcttcaacctcaccactgaaaagatgcatgtagcggtttcgcgtttacccggttcgcgggccagacgcaccacaaaaggaccatctcgcgatttgccagttgttccagcgtcgactccacttccgccatatcgcgaattcatacattcgcgcggcgcggctgcgcagttcacctggcgtctggcaccacgcaataacaacgtggtgattaacgccacttccgctgcgctcagttcagatcgccaaattctgaattacaaaaacgttgctcatatttggtga

SEQ ID NO: 24337 - DNA, 2496 bp, Homo sapiens; identical to SEQ ID NO: 24215
  SIMILAR (1702)..(2136): 991254mologous to Escherichia coli K12 putative enzyme,accession number AE000410,Smith-Waterman Score=762.

SEQ ID NO: 24338 - DNA, 3554 bp, Homo sapiens
  SIMILAR (556)..(1614): 971254mologous to Escherichia coli malate synthase (isoenzyme G),accession number X74547,Smith-Waterman Score=1788.
atggccagaaaacgcaaatcaagaaataacagtaaaattggtcacggagcgattagtcgcattggtagaccgaataatccttttgaaccgtgccgcaatcgctacgcacaaaaatacttaacgttggcgctaatgggcggtgccgcttttttcgtattgaaaggttgtagcgatagtagcgatgtcgataacgacggcgacggaacgttttacgcgacagtgcaggattgtattgatgacggtaataatgccgacatttgcgcgcgtggctggaacaacgccaaaacggcattttatgccgatgttccgaagaatatgactcagcagaactgtcagtctaagtacgaaaattgctactacgacaatgttgaacagagttggatcccggtcgtttctggatttttgttaagccgggttattcgtaaagatcgcgatgagccgtttgtttataacagcggcggttcctcttttgcttcgcgcccagtctgggtaccgagctcgattgtaatcatgtcatacggtttagcctcgtatgtgatcgccgtggccttcctggaacgcgatcgcattcaggcagcgcttgatgagtggcatcgcagcaatccggggccggtaaaagataaagcggcctataaatcgttcctgcgtgaactgggctacctggtgccgcaaccggagcgcgtgacggtggaaaccacgggcattgacagcgaaatcaccagccaggcggggccgcagctggtggttccggcaatgaacgcccgctacgcgctgaacgcggcgaacgctcgctggggctcactcgacatcatcccgcaggaaggggcgatggtcagcggctacgatccgcaacgcggtgagcaggttatcgcctgggttcggcgtttcctcgatgaatctctaccgctggaaaacggcagctatcaggatgtggtggcgtttaaggtggttgataaacaattacgcatccagttgaaaaatggtaaagaaaccacgttacgtactccagcacagtttgtcggttaccgtggcgatgccgctgcgccgacctgcattttgctgaaaaataacggcctgcatattgagctgcaaatcgatgccaatgggcggattggcaaagacgatccggcgcacatcaacgatgttatcgtcgaagctgctatcagtaccattctcgactgcgaagattcggtcgcggcggttgatgcggaagataaaatcctgctgtaccgcaacctgctgggcctgatgcaggggactctgcaagagaaaatggagaaaaacggtcggcaaatcgtgcgtaaactgaatgacgatcgtcattacaccgccgccgatggctctgaaatttctctgcacggacgctcgctgctgtttatccgcaacgtgggtcatttgatgaccattcctgtgatttgggacagcgaaggcaatgaaatcccggaaggcattcttgatggcgtcatgactggcgcgattgccctctatgatttaaaagtgcagaaaaactcgcgcactggcagcgtctatattgtgaaaccgaaaatgcacggtccgcaggaagtggcgttcgccaacaaactgtttacccgcattgagacaatgctcgggatccgggatctctttctgttccagccattgcccaaacagcattgtcttcccgcggacctcgggagcaattgcggtaacctgagcaatatgttccgactccattgccagaatcagatcgtaatttcgtgccatctcagcagtgagcttacgtccggcatgtccttcaagagatacgccatgattagcggcaacatctgccgctgtcgcatctgcagggtgttttaccagaccatgaacacctgccgatttgacttttacgcccggcagacgtttacgcagcaagcgctcgccaatgggcgaacggcaaatgttgccggtcatgcaccccggaaatcgtcggtaccagcagagaaatcacacggttccaacgagccagcggcgcggaatattggtaatcggctgctgacccgatttgctgacttcggcggttgacgtacgctttttgcgagccggaacgccgcgacgctgacatcgacttgcgggctttcaatgactgcggagacgtggtaatcaccgtgatatttttggcggtcattaatccttcggcgataagcattgtcgtacttccgctgtcgagaataacgcattcgcctgaatttcgcagtgaagccctgaagcttgctgaacgcatcggtgttactgccgcagcccgtgaactcagcctgtatgaatcacaactctacaactggcgcagtaaacagcaaaatcagcagacgtcttctgaacgtgaactggagatgtctaccgagattgcacgccgcgacatacttcgcgaagcgcctgaaatgaagtatgtctttattgaaaaacatcaggctgagttcagcatcaaagcaatgtgccgcgtgctccgggtggcccgcagcggctggtatacgtggtgtcagcggcggacaaggataagcacgcgtcagcagttccgccaacactgcgacagcgttgtcctcgcggcttttacccggtcaaaacagcgttacggtgccccacgcctgacggatgaactgcgtgctcagggttacccctttaacgtaaaaaccgtggcggcaagcctgcgccgtcagggactgagggcaaaggcctcccggaagttcagcccggtcagctaccgcgcacacggcctgcctgtgtcagaaaatctgttggagcaggatttttacgccagtggcccgaaccagaagtgggcaggagacatcacgtacttacgtacagatgaaggctggctgtatctggcagtggccccttctttggaaaagtttgaaagctcctgggatttagcacgggccttccagccaacaggcaaaagccacccgtataccgggaacccccgggaaggcccgacaaaggccaggaaggttacaaaaggttgggaagaccgacactttctgttatttttccgcgctgatatcaatggtaatcggatctttgtcgccgccttgttgaatggtgagtttactgtcgctggtggcgatcgccgttttcgtatcgtctctggtggtgcgcgtggtcagggtttgcgcctgcgccagatgggtgacgctgatggtgtatttcccggcgatggcgttacccgcagtggtggcactgaactgcgcgcgaaggatgacgcagcgggtcagtcgattgctaaccgtttcacctctaacattaaaggcctgactcaggcggcccgtaacgccaacgacggtatctccgttgcgcagaccaccgaaggcgcgctgtccgaaatcaacaacaacttacagcgtgtgcgtgaactgacggtacaggccactaccggtaaaacagaagcagaggcgggtggcaagtgcagatccaaatgtgcttctatagtattgtacaaggctttattcaattcggataagtgttccagcgcagttcattcacgtcgttcatctatcgatttagttcatggtcgtaggcaatcacgatggctgtccttatag

SEQ ID NO: 24339 - DNA, 698 bp, Homo sapiens
  SIMILAR (698)..(24): 1001254mologous to Escherichia coli phenylalanyl-tRNA synthetase beta-subunit,accession number K02844,Smith-Waterman Score=1145.
ctttatgcctgccgccgactctagaggatcaggcttatggcgaggctcttatacccctccgcaacacccttaccgcggtacacgtcaaataagtttacgccaactacctgatttacgccaactttcttacattcggataaaatatccgctgcgggaacgttttctgcgaccaccaccgcgatgtcacgacggttcgccgggaagcgagaaatctcgcgcgcctgaggcaccacgcggtctgcgagcttgttccactccagttcgaacaccagagtgcgaccgttaagatccagtttacgttccagttcaggatgaacaaccccaacaaaaccaatacgttcacctttcagataaatcgctgcggattgccccggatgcagtgccggattcgcttctgcacggaactcaacctcattcagtttaccggtcaggtcgagaacggattcaagatcgcctttcaaatcatagaaatcaacggtctcttttgccaggttccagtgctcttcgtaacggttaccgcaaatcacaccggctaacatcagatcctgacgaatgcccaacggtgcctgagtatctggtacgaaacgcagaccgctttcgaaaatgcgcacacggttctgctgacggttctggttgtacaccacggttgccagcaggccagtccacagagaaagacgcattgctgacatttcaacaga

SEQ ID NO: 24340 - DNA, 3496 bp, Homo sapiens
  SIMILAR (2068)..(2259): 1001254mologous to Escherichia coli MviM protein,accession number D90743,Smith-Waterman Score=345.
tcagtcgttctgtctcttgctctcgtctgccgtcgatctgccggtgtgttgccggcagttgttaccaggatagtgtagtgatggagctaagcaaggacatctgcactgtttcacctcattccgagcggtcaaacttccgtggtccgtttcccgagttgacggtcgaccagcgataaaagctgggtcgccgtccttcagaaaatttgaaggaactccgggccaagccacggtcacaggagttccccagcggtagcccggtaccgaacacacggattcaccagcggcaacaggccgggacaaccacatgttccgtttctcattcacagtcagtgcctgaccgtaactttgctcggaataccgcccatcatgtagtgacaggttgggataacggaatcggctcatcacagccgcgaccttcacggatttcgatcatgatggaacgcgcaaccacgtcacggcccgccaggtctttggcgttcggcgcataacgctccataaaacgttcgccatgtttgttcagcagataaccgccttcaccacggcaaccttcggtgaccagtacgcccgcaccggcaatgccggtcgggtggaactgccacatttccatatcgccggcacggatagccatgccgacaccgtcgccggtgttaatgtggcgttggtggtggactgataaatacgccctgctccgccagtcgccagcacgtagcgcgggctttgaaataaaccacttcaccggtttcgatgcacagtgggtacaacccaccaccgcgccatcctggtttttcaccagatccagcgcaaccactcggagaaaatggtggtgtggtttttcaggttctgctgataaaggtgtgcaacagtgcgtgaccggtacggtcagctgctgccgcagtgcgtgtttagatagcgcttccacgctgttagaatgagtggcaggggacacggcagcccaatgccagttagaagatttgctgactgggatgtcatttgggttatgcaggatggccggattattgacaaggacgttacgcggaattaagtgtggcaaggccaccagaaggtcacccacagcgtcgttaatccggacgcccagcagataaccactcaggcgtgaacgctttacggcgcacaagcccgatctcggttgaaaggtcgcaacgcgtctttctctggggacggccctgctggcaaccgtggtgtacaccagaaccgtcagcagaaccgtgtgcgcattttcgaaagcggtctgaccggtaaactgaatgaggttgagttccgtgcagaagcgaatccgcactgcatccggggcaatccgcagcgatttatcgcccgcggcgttaatcgcatccatgatggtcagaggaatatggtaatcggctgctgacccgatttgctgacttcgccggtgacgtacgcttttgcgatcggaacgccgcgacgctgacatcgacttgcgggctttcaagacaatactcaaaaaatgattgatgaccttacggcgtttcctcacgaaaattaaatatgcatttgtcggcagcaaccccgccttaaaaaagtgcgctttgttcatgcggatgcggcgtgaacgccttatccggcctacaaagtaatgcacatattcaaggaaatgtaggcctgataagcgtagcgcatcaggcaattttgctttatcatcactcaaaagtagcccattgacaaaaaatcggcgatactggaaggtatcgccaacacatttattgcttagtaaacggccgaagatttcgctaaatgcgtacttcggtgcctgttctttagtcaggccggtgctggcggcagcgtctgactggacgttacaaggagcctggtcgcctacgcgcgcgaaagccctgccaatttgtgaaagctggcgcattccttatgccgattcgttatccagccttgccgccagttgcgatgcggtttttgtgcattccagcaccgccagccactttgacgtggtcagtacgttactcaatgcgggggtacatatctgtgtcgataaaccgctggcagaaaatctgcgcgatgctgaacggctggtggaaggatatgcgcgaatggcgtgaggagcgcgggcagggcgtagtgcataaaccgattcctggttggcagagtacgcttgagcaacgtgggtttgtcggctgtgcgcggcacttcattgaatgtgtgcaaaaccagacagttccgcaaaccgccggcgaacaggccgtgctggcgcaacgtatcgttgacaagatctgctcctcttttaatgtggtgcgcgtcgctccactcggcgaccccattcaatcgaaacccgtcgtgtgagcatgctcgacattgccgagaagcaaaatattcgtattgaaattgatctctgtcggcgcgtctgggctgtccggtgatcccgctggtttcaacccgggtcgcggtattgaagcgctcaagctggcgattgatcgctataaaggccgtgaagcgtcgcagcatctggatgccgccctcgcccgtctgcgtaatgagtggacgatccggcgctgcacattgccgatgcgcgttaccagtgcattgcgccatctgtgatgtggtaagcaacaccctgacggcagaacccagccgttcaccactgcggtagataaaatcgtgctcaaccgtttcctcggtctgccgttttcctctttgtgatgtacctgatgttcctgctgggctttgaaagtatacagtgggctgggtaactgcggtcagtttgcgcccccgaatcacatcggcgctgatcagcaactgcgggccgtgacagatggcaaacaccggtttgccatcagcttcctccggcgttgttgcattggatgaggcgaatttcccacaatcgggataattacctcatggtctattaagcctggtgcatgagccgtggagcgcaggcagacaatttgggcgatcgtagcaaacatgggatgaacgcaaacgctttttgcgccgctgttccgtgttgttaccaggtactggaaatccactgatgcgagaacgtgccgcgggtaccggctcacttcagcggacatatctaggtacagctcccagcgacgtatagtcaccgtagacattaaagtcgaatactttttcgccatctgtcgtaggtgccgtcctgacgcagctcgccaaggccagcaggttgcttgaggaatccttcgctggcagcaacttcatcttgtaacgcagcatccagacgtcctgcagccagatcggaatagaccaaatcctggttggcataggccaccacatccacgcctttactacgcaggtctttcagtgaatccagcgttggctgaatcggtgaacctttggcgcaatcaaacgagaatctgcggcgtacagcttgtcggagaaggcaatccctgctgacgtttatcggtaatggaaagcgacgaaataatagcgtcgattttttcgctttcagtgaggggatcagcgcgtcaaagtcactggcaacccggtacat

SEQ ID NO: 24341 - DNA, 1581 bp, Homo sapiens
  SIMILAR (1536)..(931): 991254mologous to Escherichia coli PhoQ protein,accession number D90393,Smith-Waterman Score=1038.
ttacacagctcggtttaactgatacaggtacgctaccggttgcacccggagacagacacctttaaccagcagcaggttgcgctcagcgtcaacgcgtactacgtcaaggctctgaacggttacacgttcgttacccatctgacctgccattttcttgcctttgaacactttgcccggagtctggttctgaccgatagaacccggaacgcggtgagacaaggagttaccgtgagtagcgtcctgtgtacggaagttccagcgcttaacggtacctgcgaaacctttacctttagaggtgccagttacgtcaactttattaacgtcagcaaacagttcaacgctaatgctctgacctacagtgaactcttcgccttcagccaggcggaattcccacagaccacggccagcttctacgccagctgtagcgaagtggccagcttcaggcttggtcacacggttagcttttttagcaccggtggtcacctgaatagcacggtagccatcgttagccaggtctttaacctgagtaacgcggtttgcttcaacttcgattacggttactgggatagagacgccgtcttccaggctgatctgcacgtctacaccggcagccagatccagacgcatcagagcatcaacggttttctcggttggctcaacgatgtcaaccagacgcaagtgagtacggatttcgtactgatcgcgcgcgtctttgttgacgtgcggggagatcagaacagtgaagcgctctttgcgtgtcggcagcgggatcggaccacggacctgcgcaccagtgcgcttggcagtctcgacgatttccgcggttgcttgatcgatcagacgatgatcaaacgctttcaggcggatacggattctttggttgattgatgggagagtgtaaccgttcttacgtaaacgggatcgctctagagtcgacaatttgtcgtaacgttcgcgttcactttttaacaatcggttcaggtttcgtaccagactggtcagttctcgcgttgtggctggattgagcaattcgcggttatgttcttccagttcgcggacttcttttgccagggcttcgatggggcgtaaactccaccaggcggcgacccacagcagcgggatcactaacagcagattggctgagagcacatagataaaccagctccagaccatataggaactttttagctccaccggaatggtatccaccaccacaatggttaattttggcatccgcgatgttgccgggtagacgtttactgccaccgagtgggtcatctccgcgtcgtcatcatcttcccgcacttcctgcaactgttgctgtatcgaatgatctccactcagcaagaggctggtatcgttaacatccgcttcaatttcatgaaaaccattcgatttcagccagtcaggctggatcatcttcatcagccagggcacgtcacgttgcgcccataaaagctgcccgttctcatcataaattagcgtcatggtggggctttgcttgtcgatattttcgggtaactcgacatgcaacttaagaatatagggaattatcggggttcgaagcttcttgtgactcat

SEQ ID NO: 24342 - DNA, 1704 bp, Homo sapiens
  SIMILAR (604)..(735): 1001254mologous to Escherichia coli stringent starvation protein,accession number M69028,Smith-Waterman Score=219.
  misc_feature (1)...(1704): n = a,t,c or g
atggacttcggcgaagctctcgtgactcacatagttccacctggcagacacaggacgactgacgccaccacatatgcccgcatccttcgcgtactgtgcatgacgcgtatacacttgacgcactctccatacggttcactgagctgctctatccggcatcgaactaatgtggaagtcagtattgctactcctagttcagttagacctggctctacaattagagcccgccagtcctcatgcaggagtttacgccgggcgtctctccttacacattatggtagtcagcagttacgtgcgatctctcatcctgatcataatcgtgttcggacccctgacggagtcgtcgtcacgatttacctccgtggtgtcctaatggatccgagtcttataacatactgcgctaggcacacctcaagacaatatccatcttatgcaactcgcaaccgactgctcatttataagggagtttcccgagttcggagccaccatcaaacacgattttcgccttgtggcccaaaccagcgtggcccgattgctgcaactctctcagggccaggcggtgaagggcaatcagctgttgcccgtctcactggtttctgtgcgctggctgccgtgctggctatctacgcccgtgaaaatggcgcaggcacgatgtttgagcctgaagctgcctacgatgaagataccagcatcatgaatgatgaagaggcatcggcagacaacgaaaccgttatgnnnnnnnnnnatatcgatgctgccgtggcgttgggtaataccattaacgaattggataaatattacacccaggaaaattataaagacgatgcgtttgcgaaagggaaaacgctgcaccagacattcttaaaaaatctggaagcctttgaacctgtagccgaatcttatcatgcggcgattcaggaaattaatgataagcgtcagcttgcggaactgaaaaatattgaagaaagagaagggaaaacattccactactactctctggcagtcatgatttcagcgaaacaaattaataacctgatatcgcaagataagtttgatgcagaagcggcaatgaagaaagtgtctgaactggaaacgctagtggcgcaggccaaagaagcggataaaggcggcatgaatttctcgtttattaattcggcaggccacgtgagtgaacgctacgcgtccctcaggggtagcgcacgcggcatacgctattatccgttccttgcgcgccacgctcgccgtcttcggcgtctgcaggtctctccgagaacctccgttgacgctcgcggcaagaaaccagactatcgctccagtgttcaggcagatgccatcaccatgactcatacgtgtatatggccacttgaggctcgcgtccactctcgtctcaatattacactcctgatcagatacaccacaatcgcccccaatacacataccgccgctccccgtacgttggccgattcccttaatgcagccggtacaaaacatgtggccgactgtcaagcgggacgtgagagccacgcatattcatctcttcactcccacgggacactcgcagtcgcaattcttgctacaatgctctcaacagcgggccctgatgatccatcagctcctccctgtcacactgtgaggaagaaccaccacactcaccccaactacgcaatacgcctctatatcgtaacggtggccaacttccaatag

SEQ ID NO: 24343 - DNA, 1944 bp, Homo sapiens
  SIMILAR (1165)..(1941): 921254mologous to Escherichia coli K12 putative frv operon regulatory protein,accession number AE000465,Smith-Waterman Score= 1208.
atgcatccacgttttcaaaccgcttttgcccaacttgcggataacttgcaatctgcactggaacctattctggcagacaagtacttccccgctttgttgaccggggagcaagtctcatcgctgaagagcgcaacggggctggacgaagacgcgctggcattcgcactacttccgctggcggcggcctgtgcgcgtacgccattgtcgaattttaatgttggcgcaattgcgcgcggtgcgagtcgaagatcggcgaaaaacattccacgcgcggtacgtcaggtgttctggcgaatcctgttgttctatgtgttcgcgatcctgattatcagcctgattattccgtacaccgatccgagcctgctgcgtaacgatgttaaagacatcagcgttagtccgttcaccctggtgttccagcacgcgggtctgctctctgcggcggcggtgatgaacgcagttattctgacggcggtgctgtcagcgggtaactccggtatgtatgcgtctactcgtatgctgtacaccctggcgtgtgacggtaaagcgccgcgcattttcgctaaactgtcgcgtggtggcgtgccgcgtaatgcgctgtatgcgacgacggtgattgccggtctgtgcttcctgacctccatgtttggcaaccagacggtatacctgtggctgctgaacacctccgggatgacgggttttatcgcctggctggggattgccattagccactatcgcttccgtcgcggttacgtattgcagggacacgacattaacgatctgccgtaccgttcaggtttcttcccactggggccgatcttcgcattcattctgtgtctgattatcactttgggccagaactacgaagcgttcctgaaagatactattgactggggcggcgtagcgggcacgtatattgcatccggtggagagccagcggttaacagtcacgccttcggcgttttgcgcaatgtagttagcatcgcggtcttctttcatcagtttggcgatgcgatcaaacgcctcttcccaactgatttgctgccatttatcagaacctggcgcacggtattccggaaacttcagacggctttcggagtggatgaaatccaccaggccagcgcctttcggacaaagtgcaccgcggttgaccgggtgatccggatcgccttcgatatggatagattagatttcttttcttggcggtccgggtatatatctaggatccccctgatcggtttgtattttgcctgtgcgctggagcggcatcaaaacgaacgccagccgatcattttgctctcggaccagaacgcgattgccactattaatcagctcgccattgagcgcgatgttttaaattgtcgggtaattattgcccgtagcttaagcgaacttgttgccattcgcgaagagattgagccgttattgatcattaacaacagccattatttactggatgacgcggtaaataattacatcaccgtaaaaaatatcattacggctgccggtatcgaacaaataaaacattttctggcgacggcatttattcgccaacagccggagcgttttttctctgcccccggaagttttcattattcgaatgtacgcggtgaaagctggcaacatattacccggcaaatttgtgcgcaattagtcgcacaacaccatattaccgccgatgaagcacaacgcatcatcgcccgcgaaggcgaaggtgaaaacctgattgttaatcgcctcgccatcccacattgctggagcgaacaggagcgacgttttcgtggattttttattaccctcgcccaaccagttgaggtgaataacgaagtcattaaccatgtcttgatcgcctgcgccgccgccgatgcgcgtcatgagctaaaaatatttagctatctggcaagcatattgtgtcagcatccggcggagattattgccgtgttgtga

SEQ ID NO: 24344 - DNA, 1605 bp, Homo sapiens
  SIMILAR (1550)..(1603): 941254mologous to Escherichia coli high affinity ribose transport protein,accession number M13169,Smith-Waterman Score=88.
atgaggggaaaggcgattaataccatgacacgggccgtgaaaccgcgcaggtttgcaatcaggcccatcatctacgccagcgttcttagcgctggcgtattgttgtgcgccttttccgcccacgcggatgagcgtgaccaactcaaatctattcaggctgacatcgccgcaaaagagcgcgcggtacgccaaaagcaacaacaacgcgcaagcctgctcgcacaattgaaacattgtcgccgctgttggcaattctggcgtttgcgccaaagctggcgatttgcaccaggtcaccattactggcgacatgacaccgttcacccaatgtacaaacgcgtactcgcattccggtattcgcaatccgactgctatctccagcgctgcttatccgcgaagaattaccggttacaactggggcctaccggtgaagagcgtactgtttatggcatctacggcattagtgaatccaacctcgctgagtgtgaaaaaggcgtaaaaagtgctgtggcgttaacgcctgcgctgcaaccaattgatggcgtggcggtgagttatatcgatgctgccgtggcgttgggtaataccattaacgaaatggataaatattacacccaggaaaattataaagacgatgcgtttgcgaaagggaaaacgctgcaccagacattcttaaaaaatctggaagcctttgaacctgtagccgaatcttatcatgcggcgattcaggaaattaatgataagcgtcagcttgcggaactgaaaaatattgaagaaagagaagggaaaacattccactactactctctggcagtcatgatttcagcgaaacaaattaataacctgatatcgcaagataagtttgatgcagaagcggcaatgaagaaagtgtctgaactggaaacgctagtggcgcaggccaaagaagcggataaaggcggcatgaatttctcgtttattaattcggcaggccagtatcaactcgaggctaaaaaatacgttcgccgcatcagagataaagtcccgtactctgactgggataaagagcaacttcaggacgcaaactcaagctggatggtcgaagactctttcccgagagcattacgcgagtacaacgaaatgctcatgacgcgcatcggcggcggcgcaggcgatcaagacatggttaatgacttcagttattcacctcaactggttggtcgaggctggtttaacgatcaggtcgctaccggttgcacccgggacagcacctttaaccagcagcaggttgcgctcagcgtcaacgcgtactacgttgttaatcgctttggcaaaattgactggaaacccatgtatgccgaagcggataaattgctggctaaacctaacatgcgctttaaaagcgacaagctggtgggcgatctttccatcggtgaccagcaaatggttgaaatcgccaaagtgctgagctatgagtcgaaagtcatcattatggatgaaccgaccgatgcgctgaccgatacagaagctgaatccctgttccgcgtcatccgcgagatgaaatcgcaagcgccgcggtattgtctatatctcccaccgcatgaaaataatcttcgagatttgcgatga

SEQ ID NO: 24345 - DNA, 1263 bp, Homo sapiens; identical to SEQ ID NO: 7094
  SIMILAR (646)..(1251): 911254mologous to Escherichia coli RhsC protein precursor,accession number D90709,Smith-Waterman Score=1003.

SEQ ID NO: 24346 - DNA, 894 bp, Homo sapiens; identical to SEQ ID NO: 7095
  SIMILAR (277)..(882): 911254mologous to Escherichia coli RhsC protein precursor,accession number D90709,Smith-Waterman Score=1003.

SEQ ID NO: 24347 - DNA, 1071 bp, Homo sapiens
  SIMILAR (226)..(777): 991254mologous to synthetic construct aceA,accession number A31763,Smith-Waterman Score=968.
atgttgtacactgcgacccggggtacggctgtgcgggcccaccgaggtacagcccgccgcctagacgcaccctggtgctgcggcccctgcacacttgccgctatacccgtatacacccaatttggtaagctgacaacgccggcacttcgcctacccgctggccctgcaccttttgccgcacaccgcgcaattgacgttgtatacgacaccgtgcagcccgggggcgccgctgacgtgacgggcgttccaaccctgctggttgcccgtaccgatgctgatgcggcggatctgatcacctccgattgcgacccgtatgacagcgaatttattaccggcgagcgtaccagtgaaggcttcttccgtactcatgcgggcattgagcaagcgatcagccgtggcctggcgtatgcgccatatgctgacctggtctggtgtgaaacctccacgccggatctggaactggcgcgtcgctttgcacaagctatccacgcgaaatatccgggcaaactgctggcttataactgctcgccgtcgttcaactggcagaaaaacctcgacgacaaaactattgccagcttccagcagcagctgtcggatatgggctacaagttccagttcatcaccctggcaggtatccacagcatgtggttcaacatgtttgacctggcaaacgcctatgcccagcgcgagggtatgaagcactacgttgagaaagtgcagcagccggaatttgccgccgcgaaagatggctataccttcgtatctcaccagcaggaaaatcgcagttctaagcaacaacaaccgttgctgactgtaggccggataaggcgttcacgccgcatccggcaatcggtgccccggaccggcatcggttgcgcatcacgaaggtttaacacggctaaaccgtgggccgatgcggtgatctctaatcgtccgtttgcgggtaataccggcagcgtagatgataacgacgaaatacagcgcaatctgaatgacactaactacaaccgcatgtgggaatacaataaccgcggcgtgggtagtaaagtggttgcagaggcgaagaagtaa

SEQ ID NO: 24348 - DNA, 1088 bp, Homo sapiens
  SIMILAR (168)..(668): 951254mologous to Homo sapiens heparan sulfate D-glucosaminyl 3-O-sulfotransferase-2,accession number AF105374,Smith-Waterman Score=851.
aagaagaagaagaagaagaagaagaggaagaagaagaggaagaagaagaggaagaagaggaagaggaggaagaggaggaagaggaggaagaggaggaagaggaagaagaagaagaagaagaagaagaggaagaagaagaagaagaagaggaagaagaagaagaaaagatgttatggctggtcctgggccgcgcggggccacctcagccgcggagggcgcgcaggctgctcttcgccttcacgctctcgctctcctgcacttacctgtgttacagcttcctgtgctgctgcgacgacctgggtcggagccgcctcctcggcgcgcctcgctgcctccgcggccccagcgcgggcggccagaaacttctccagaagtcccgcccctgtgatccctccgggccgacgcccagcgagcccagcgctcccagcgcgcccgccgccgccgtgcccgcccctcgcctctccggttccaaccactccggctcacccaagctgggtaccaagcggttgccccaagccctcattgtgggcgtgaagaaggggggcacccgggccgtgctggagtttatccgagtgcacccggacgtgcgggccttgggcacggaaccccacttctttgacaggaactacggccgcgggctggattggtacagtcttgtgaatggcacccccaaaggttgtacagtatacaacctggttgcaataacccgttgttcacgtgatgcaaagaatagggactcagtcatcaagaattcctccaaagacagtgatgggctcggaggcaagctgggctttcccaggatgggaaaatattcatccagagaaggtaccgcctatacgcccctcgactctagaggatccaccgtagtagggcccagatacaccgacaaggacactccccccgctctcgcacatctcgccaaatggacacacacagcccggaatcggacaccgagcgcacgcacgccctggactgggacacgcgctgtagacgggatgggtggaggagccgagcgatacagcaagaaggtagccacccgcaatccggaagagagcccttaccagaacccgaccatgctggcaccctga

SEQ ID NO: 24349 - DNA, 1236 bp, Homo sapiens; identical to SEQ ID NO: 8878
  SIMILAR (1)..(657): 851254mologous to Escherichia coli No definition line found,accession number U00039,Smith-Waterman Score=880.

SEQ ID NO: 24350 - DNA, 849 bp, Homo sapiens
  SIMILAR (613)..(846): 981254mologous to Escherichia coli K12 putative transport protein,accession number AE000241,Smith-Waterman Score=423.
atggaagatttgaatgttgtcgatagcataaacggcgcgggaagctggctggtagctaaccaggcgctgctgctaagttatgcagtaaacatcgtggcggcactcgcgatcatcatcgttggtttgattatcgcgcggatgatttccaacgcggtgaatcgcctgatgatctcccgtaaaatcgatgccactgttgctgattttctttctgcattagtccgttacggtattatcgcctttacgctaatcgctgcactgggacgcgtggtgatccgtgatagcgccatcaacgaaggttttaacacggctaaaccgtgggccgatgcggtgatctctaatcgtccgtttgcgggtaataccggcagcgtagatgataacgacgaaatacagcgcaatctgaatgacactaactacaaccgcatgtgggaatacaataaccgcggcgtgggtagtaaagtggttgcagaggcgaagaagtcggataagatgcgcaacatcgcatccgacaataagtgccggatgctgcgaaaatgccttatctggcctacagattcgatgcgattctctgatgaccaaagggggttacgatctggttacggcatccggcgatgctcgctgcgtttgattatgggtaaacgcgtgcagccgattaataccgcattgattcccaactggaaaacgctcgatccgcgcgtggttaaaggcgactggtttaatgttggcggcaaagtttacggcacaccttaccaaagggggccgaacctgctgatgtacaacactaaaaccttcccgacgccgccggatagctggcaagtggtttttgttgagcaaaatctgccggacggatag

SEQ ID NO: 24351 - DNA, 1548 bp, Homo sapiens; identical to SEQ ID NO: 8879
  SIMILAR (721)..(1386): 961254mologous to Escherichia coli UNKNOWN PROTEIN FROM 2D- PAGE (SPOT M92) (FRAGMENT),accession number D90883,Smith-Waterman Score=1099.

SEQ ID NO: 24352 - DNA, 1468 bp, Homo sapiens; identical to SEQ ID NO: 8881
  SIMILAR (406)..(906): 881254mologous to Escherichia coli adenylosuccinate lyase,accession number M74924,Smith-Waterman Score=794.

SEQ ID NO: 24353 - DNA, 2469 bp, Homo sapiens; identical to SEQ ID NO: 8874
  SIMILAR (1444)..(2088): 991254mologous to Escherichia coli elongation factor Tu,accession number J01717,Smith-Waterman Score=1087.

SEQ ID NO: 24354 - DNA, 1917 bp, Homo sapiens; identical to SEQ ID NO: 7097
  SIMILAR (814)..(1827): 761254mologous to Homo sapiens gonadotropin inducible transcription repressor-2,accession number AB021642,Smith-Waterman Score=1478.

SEQ ID NO: 24355 - DNA, 1179 bp, Homo sapiens; identical to SEQ ID NO: 8884

SEQ ID NO: 24356 - DNA, 2294 bp, Homo sapiens; identical to SEQ ID NO: 8890
  SIMILAR (1548)..(1730): 1001254mologous to Escherichia coli RhsC protein precursor,accession number D90709,Smith-Waterman Score=335.

SEQ ID NO: 24357 - DNA, 4128 bp, Homo sapiens
  SIMILAR (1276)..(2154): 911254mologous to Escherichia coli rhsA,accession number U00039,Smith-Waterman Score=1410.
ctgactactcatcgggaaaacatggcgctgacgaatggtttctgccatcacatagcgggtcagtggcacaattaaatgatgttcttccgcgataggaataaacacatccggtgaaatccagccctgacgcggattgttccagcgcagcaaaatctctacaccaatacattgctggctgcgcgcattaagcaaaggctgacagaacaattcgaactcatgttgcgccaggcccagattgatttcgcgggaaaagctcattcgctcactgaagcgcaggccaacaccacccaggtttcagcggagcgcgaccgtctgtttaaaaattatcaacgttacttgaaaggcagccaggcggcggtgaatccgttctcggaacgtgacatcgacgatgcgcggcaaaatttcctcgcgcaggatgcgctggcgcagatccagagccagctggatagcctggttaacggcgagcaatcgcagattgtgagcctgaaagcacagctcgcggaagcaaaatataaccttgagcagacgatagtgcgtgcgccgagcaatggttatgtgacccaggtactgattcgtccgggtacctatgccgcgtcgctgccgctacgtccggtgatggtgtttatacccgatcagaaacgacaaatcgtggcgcagttccgtcagaactccttgctgcgactggctcctggcgacgatgcggaagtggtgtttaatgctctgccaggtaaggtattcagcggtaagctggcagccattagtccagccgttcccggcggagcttatcagtcgaccggcaccttacagacgttaaacacagcgccgggttcagatggcgttatcgcgaccattgaactggatgagcacactgatttgagcgctttaccagacggtatttacgcccagaacccaaaaaatctgaaaattgttgaactgaaagccccgcaactgccgcgttctctggacgacgcgcaaatcgctctggcagttatcaataccacctatgccagccagattggcctgactccggcgaaagacggtatctttgttgaagataaagagtccccgtacgtaaacctgatcgtgacgcgtgaagataacaaagacgccgagaacgtgaagaaattcgtccaggcttatcagtctgacgaaatcccctgtcgaacccgttcaaagcactgcaccccagccgaaagcggagcctgcaaaaccgaaagcgccgcgcgccacgccggtccgaatttataccaatgcagaagaattagatcggcaaaccgttccgcgatctcggtgaagggctggcgaaccccctgtataccggacagcctgcccgccgtggaatggctgacctacggcagcggttacctggcaggcatgaaactcggcgacacaccgctggtggagtacacccgcgaccgcctgcaccgggaaacgctgcgcagcttcggccgttatgaactcaccaccgcttatacccctgccgggcagttacagagccagcacctgaacagcctgctgtctgaccgcgattacacctggaacgacaacggcgaactcatccgcatcagcagcccgcgccagacccggagttacagctacagcaccaccggcaggctgaccggcgttcacaccaccgcagcgaatctggatatccgcatcccgtatgccacagacccggcaggtaaccgcctgcccgacccggagctgcacccggacagcaccctcagcatgtggccggataaccgtatcgcccgtgacgacaactatctttaccggtaatgccggtcccggcagggtgacagagaaaaacgaccctcatcccgaaagggggttatccgcacggatgatgagcgcacccaccggtaccattacgacagtcagcaccggctggtgcactacacgcggacacaatatgcagagccgctggtcgaaagtcgctatctttacgacccgctgggccgcagggtggcaaaacgggtatggcggcgtgaacgggacctgacgggctggatgtcgctgtcacggaaaccgcaagtgacctggtacggctgggacggcgaccgcctgaccacgatacagaacgacagaacccgcatccagacgatttatcagccggggagcttcacgccactcatcagggttgaaaccgccaccgcagtcatggaccgcatcctcaaagatcatcaaatcgtggtcgacattccccacggagaagcgtggctgcgcgatgatgaagagcgtccgatgattttgattgcgggcggcaccgggttctcttatgcccgctcgattttgctgacagcgttggcgcgtaacccaaaccgtgatatcaccatttactggggcgggcgtgaagagcagcatctgtatgatctctgcgagcttgaggcgctttcgttgaagcatcctggtctgcaagtggtgccggtggttgaacaaccggaagcgggctggcgtgggcgtactggcaccgtgttaacggcggtattgcaggatcacggtacgctggcagagcatgatatctatattgccggacgttttgagatggcgaaaattgcccgcgatctgttttgcagtgagcgtaatgcgcgggaagatcgcctgtttggcgatgcgtttgcatttattgcacatcctccattctttggccagaaccactctgttgttggtggttgcagtgttgaatactgggtggttgcagtgtgggaaggaatactgggtggttgcagtgttgaaattggaagttggactggtggcaccacctcgaggcccgggtctcgatttaaccttgtgttcccgttctaccaaaaagtcgattccccccctttgttccctcgcaagggaaaagacagctgcctgctgtatgcaaccaaatctaatcccaaaagcttggttctgccctgccctggtcgcacataacatcttttcttcttcttcttcctcttcttcttcttcttcttcctcttcttcttcttcttcttcttcttcctcttcctcctcttcctcctcttcctcctcttcctcctcttcctcttcttcctcttcttcttcctcttcttcttcctcttcttcttcttcttcttcttcttctttttttttttttgacagggtcttattcttcgcctctgcaaccactttactacccacgccgcggttattgtattcccacatgcggttgtagttagtgtcattcagattgcgctgtatttcgtcgttatcatctacgctgccggtattacccgcaaacggacgattagagatcaccgcatcggcccacggtttagccgtgttaaaaccttcgttgatggcgctatcacggatcaccacctgaccgttggtattggcatcaacatccagcgagcggcccagttgcgccacaccatcaccgaaagcattgaaacggctgtttacggcgaggaaaccgtagtaaatgttggacagcgtagccggtgcaaacacatacgcttcttgctgagtacgtgagttcaccacgcggaattcggtgttatcgaacaccactgcgccgcgaccagaaacgatattcacattcccttcaatgtagctgttggtcaccagcgtacgcggctgacgattcgtttccagacggttctgcacaccgctgttggtgacaaagaaggtgttctgacgaccgagaatgttaacgttgttaatctgtacctggtcaccatcagtacgcagtgccaccgccggatggttacctgcatctacgctatcgcccagcgtgttgtcttgtggtgtgtgggtctctggtgtgtcgggttggcaggtgctgtgtgtctggtgttgtcgggggtagttgtcggtggctggtaccttgttgtcgttgatggttacttgtctctgctgcgtcgggtgtttcatagagttgtctatattcggaattgtaagactgacgtctctggggatatcatttttcccaccggtcattatgtgcatatcgtgatacgccattcttgtcggcaatgtgataactggaaatggtccagcttgtgagtggttaagacaaatattaaggtaaccattgttgtgtataaccaacacagaggaaactgaaatcgaatgataagttaataaaagaaagttgatgtcaggtcgattattggtcat

SEQ ID NO: 24358 - DNA, 2049 bp, Homo sapiens
  SIMILAR (642)..(4): 991254mologous to Escherichia coli K12 orf, hypothetical protein,accession number AE000315,Smith-Waterman Score=1138.
tcagcgactacccgcaatttgttgccaacccagccagccttcacgtccggcaatatttccgcgaacaacttgtccgagcggcaacgtctctgataacagttcgcttaaagggcaaaatgtcacgccttcctgagctgcgcgtttgaggagatccacaaaattatgctgataagcgcagccttcaacttctgcatgaatggtataaaccggcgtgcctttatctcgcaggatgcggttgagtaaccaaccgttaaaatcttctgctttcacatcccgaccaatcacttcatcccaggtgggtaaggtcaccggaatttgcgcagtgccagggtttcctgattcgagcaatggacggaacggcatggccccacgacaatcgctgttgtagcgcaaatggaacgcttcttttgcttcgatcaccttctggtcggcacgccagcccgcagcggcagaacaggttaccggttgaccgataatctcttccagagtgcgaagaccgcgtgcaatatcgtcgatcattgtttgccgatcccagttaccgctacgggcttgccaggcatggtgatcccaggcgtgcaggccgacttcgtgatgtttagccgcttcacgaatgatatcggcattggcatgaccaatctctttactgatagcgtcggtgttgccgcaggtctggcatggagcctgcaacgcgatgacatcatcatgtatcgccagacaggtgagttgaaatacggccttaattatccggatgcgaaagggagatttgtcagcggtgatgagttcgcaaactggcttaatcaacatcgtcaggaggggattattactctcgtgctttcggttgaccgcgatgaagatatcaacagtctcgccattccgcccgcagatgccatcgatcgtcaggagcgtctggtgctgattcagtatcgtcccaaatgatctggctaacattagtctttgccagcttgctgcccttatttccttaatcctgaaataaaggtttttcaggtacgtcagcagcccaaataccaggctacccagcacacctatggctgcccactgtgagggagtgactttatctagcagctgtaaaaaccagtacccggcactacctgctgaggtgccataggcgacacccgttgttaacttatccatggatttcataaccccacctgttaaataatcgtcggctgatggcgtaaggccaatccctaaccccatcatactggcgaccgctgaggcgatattttgtttatcgtttacggcctgaataactgcccgtcgtttaatatgtaattctttatttaacgcctgataaaacggattatcgccgcgataattaaacagggtttcattttcccccaggtgctgatgaataatgtcgtgccactgtagccaggcgataaggtgaaaattcacagcggtcatttgcaaggttggggacagccaacgccgacaacgactcatctctatatgaagatgttgaccaaccgtaataccttgatcgtcaaactgaaccttatcaccatgccggaacagatcatcaaagtgagtgagtgccaaccgacaactgtttggcgcattgtcgtactcttcacaaagcagcgtcagcaactgctggcgagccgggagtgcgatatttaccgctctggcaaagacctgttcaacctgtccttgcccccgctgcgccagaaaatccgcatccgcagttagcgcccacacacaccgtctttcaccaagttgcccaaccgcaatctgcgcgttctgtgactcaatggcatcagtgacatctttagccgtcatctggaaactgttgagtttcgccgggtccagccagatacgcatgggatattgcgaaccataggcatcgatatccccgacgccattcacgcggcttaacgggtcctgaatattactggcaacataatcagcaatatcctggttatccatcggaccatcggtagagacgaaggcaatggtcagaatgttggtatcgccggttttacgcaccgtcacgccctgattttgcaccgcctgcggtaactttcgcat

SEQ ID NO: 24359 - DNA, 1317 bp, Homo sapiens
  SIMILAR (1044)..(496): 991254mologous to Escherichia coli 50 kD protein,accession number L10328,Smith-Waterman Score=920.
tcaccggcattcagtaccggtacattgccggaaaacttcctgcggatgacgcatcactatcgcatcgacgtaagtgctgataaccgaaatggtatcggccagcgtttcgccctttttacccagtgatgtattggcgctgtcggagaagcccaccacgctggcccccaggcggtgcatagatgtttcgaaagagaggcgggtacgggtagaggcttcgaagaaacagctggcaatgactttgtgcttcaacagctctggttgcgggtttgctttcagtttcgccgctgtcgccagcaccagattaaggtcatcgcgactaaggtcgtttatggaaatgatatgttttggttggcagaaatccagcgtctggcggagcgggagccgattgccgcggtgcgtgatctgatccatggcatggattatgaatcctggctgtacgaaacatcgcccagcccgaaagccgccgaaatgcgcatgaagaacgtcaaccaactgtttagcaatacagaagctggagaaaatccgccccagcaggtcgtctgaagtaaattccccggtgatttcgcttaagttctgctgtgccagacgcaactcttccgccagcagttcacctgcccaggctcccaacagttgcgctttgccctgttgtagatgttccgctgcctgttccagcgcctgtaggtggcgacgacgcgccaggaagccgccttccatgttggtgtcaaagcccatgctctgtttgagatggttacgcagcacgtccacgccttcaccagtccttgccgagagacgaattaacgcgtgaccgttcacttcactcattcccagcgtttcgccggtgatatcggctttattgcgcaccacggtgatcggcagtttcgctggcagacgggcaataaattccggccagatctctgccggatccacggcgtctgttgtggtgccatcgaccataaacagcacgcggtcggcctgttcaatttcctgccacgcgcgctcgataccaatacgttctacttcgtcactggcttcacgtagcccggcgtatcgatgatatgcagcggggtaccgaaaatcgatgctatactgtatgcgtgatgggggatttggttctcgagaccagccatccatataactttcgcctaaccccaaagagccttcttgcagaacgcgtttaaaaaaatcggggtttttcacacgaatatccgccggggcagaaccgttaatggctataccggcacggctaagtaattcgttggcgatacggtaccagttgtcatccggtacactgacttcttctatacacgatgaactcat

SEQ ID NO: 24360 - DNA, 1020 bp, Homo sapiens
  SIMILAR (825)..(334): 931254mologous to Escherichia coli activatory protein,accession number J01614,Smith-Waterman Score=766.
tcagcatcgaaacgttccgtattcctgcagagttaattcagcacgatatcgattttgttgccgctcacggcgtgaaatttgagtatggctgctcacccgatttaaccattgagcagttaaaaaatcagggcttccactatgttctgattgccaccggcactgataaaaatagcggtgtgaaatctccgctttatgagcccaggctggcattgccgtcagataacgttttgcacgcttatgtgcttcctccgggccgactttttgccaggaatcaaggaagctggctaaacctgataccgcttcttcccagggtttgagattgccgttgctgtcgcccgcttgtaaatgcccactaaacgcctgaaccagcgctgatgacgggcggtgcagggggcggatcaggctgacggtgaacggaaccgcaatactgaaccgccgcaccactaaaccgcttgccgcataatctagtgcggtgagcgggttaaccaccgaaatacctacccccgcccgtaccattgcgcagactgacgcggcgctgtgggtttctacgatcatgcgtcgtttaacctgatgttcagtaaatagctgatccagcaactggcgatagctgtcagtacgggaaaggctgatgtagttctcaccctgaaaatcatccggcgttaataccttttttaccgccagcggatgacccggaggtaacacacacacttcatctaaagagagtaattcggtacgttctgttcccgcaggcgtatggagcgtttcagtgagtcctaaatcatgacgcttgggccgagagccactcttcaagtagtatggggatttgccatcgccagtgggatctggaaggtgtgcagttccatccagaaagtatttttcgatgaagtgatcctgccgatttatgctccggcagagtttattccggtaaaaggtcagggcagccgaatctgggatcagcaaggcaaggagtatgtcgatttcgcgggtggcattgcagttacggcgttgggccattgccat

SEQ ID NO: 24361 - DNA, 1248 bp, Homo sapiens
  SIMILAR (574)..(1230): 951254mologous to Escherichia coli was o492p and o826p before splice,accession number U28375,Smith-Waterman Score=1119.
atgattactgcgccagttgaggccctgggttttgaactggttggcatcgaatttattcgcggtcgcacatccacactgcgcatctatattgatagtgaagatggcatcaatgttgatgattgtgctgatgtgagccaccaggtaagtgctgtgctggatgttgaagatcccatcaccgttgcttataacctggaagtctcctcaccgggtctcgatcgcccactgttcacggctgaacactacgcccgttttgtcggagaagaggtgactctggttctccgtatggcggtacaaaaccgtcgtaaatggcagggcgttatcaaagcggtagacggtgaaatgatcacagttaccgtcgaagaaattttggctgtagttgaagccgtatccaatgaaaaggcgctacctcgcgagaagattttcgaagcattggaaagcgcgctggcgacagcaacaaagaaaaaatatgaacaagagatcgacgtccgcgtacagatcgatcgcaaaagcggtgattttgacactttccgtcgctggttagttgttgatgaagtcacccagccgaccaaggaaatcaccctgaagacgcacgcagttctctctcgcgcctttgacggcaaactgcccatttcttattccggtggtgccagtcagctgactatccgcgatatttttgatacaggtattcgccctattactatggcaaccgacctgctgaaacctggcggctatctgcgcttaagtgcctgcatgcgcgagctggaaggctccgacgcctggggacttgaccatgttgacgtcgaacgactgaacagactggcagcagatgcgttaaccatggaatacacccagaaacactggaagccagaagagcgtattgaagtggcagaagacctgccgctgaccgactgctacgttgccccctgtgttactgcctgcgctatcaagcaagatattccggaatacatccgtctgcttggcgaacaccgctatgccgacgcgctggaactcatctaccaacgcaacgctctgcccgccattaccggtcatatttgcgatcaccagtgccaatacaactgtacccgcctggattacgacagtgcgctgaatatccgcgaactgaaaaaagtcgcgctggaaaaaggttgggatgaatataagcaacgctggcacaaaccagccggttctggttcacgccatccggttgccgtgacttggtgcagtccggcggtctgcagcagtacttaa

SEQ ID NO: 24362 - DNA, 1293 bp, Homo sapiens
  SIMILAR (1050)..(535): 991254mologous to Escherichia coli cyclopropane fatty acid synthase,accession number M98330,Smith-Waterman Score=922.
tcaggaagctttttccagatcgtgttggtagcagacaaacagcaaccccatatccagttgcccggagttggtgacgcccagtgaataactgtagccacgacgcagcatcaggctggactcactctccgccgtgcggggattcgccagccggatatggctgtccagcgcgatcaccttcccttccgggtcgctggcgtaatcaggcacatcatgctcatgctgcattcccagcggcgcaccggtttgcttatcacggccaaaaatcgtctgctgttctttcagcggcgttctgtcccaaaattccactcgaaactgaatcaagcgtactgcctgatagctgccaccgattgtccacgcaggctcctgctgatctgccgttacccacaccactttttgcatcaacttatcattctggctatcgggattggcagtgccgtctttgaaccccaccaaattatcggcgtctctcgctgctgccctcgccacctcggcgtcgagcgtgtactctttctgtttctgaatgattttattgaacaagtcataattagatgccatgtagtgtgccagtccgccccagccgcagccaatatccagtacgcgcatccctggttttaactgcaatttttcacaaatcattttgagcttcgcctgctgggcagattccagattatcggcatctttccagtaagcgcaggaatattgcatgaagggatcaagcatgcggctgaacaagtcattacccaaatcgtaatgctctttgccgactatccaggcacgttttttactctgcagattgaagagacgagcgccggcaatacgcagcgtgtctttgaaatgatgggggagttggttctcgagacctgcgcgtaagactttgctaaaaaacatatccagtcggtcacattcccaccagccatccatataactttcgcctaaccccaaagagccttcttgcagaacgcgtttaaaaaaatcggggtttttcacacgaatatccgccggggcagaaccgttaatggctataccggcacggctaagtaattcgttggcgtgcggtgcgcgtgattccgcggcgaaagaagttttgttgtggttccggtttgtgttgctgttgaagcagacattgctgaactggacgacgaagaacgtgacgagtttatggcggacgttgggttcacccgttggggtgaaagaagtgcgtgcatggaccattccggttggagcaaccgcgccgcaggcagcgggcaaaatccatactgattttgaaaaaggctttatccgtgcacaaaccat

SEQ ID NO: 24363 - DNA, 4224 bp, Homo sapiens
  SIMILAR (3507)..(2851): 981254mologous to Escherichia coli pseudouridine synthase 1 (hisT) (aa 1-270),accession number X02743,Smith-Waterman Score= 1142.
ctagacaacagagtgagaccttgtcaacgcactgacatccgcatggttcaaagactgatgatcggccagcggtacacatttttccggttgtacgccacacatcttcagcgtggcaaaaaagcgcggcggatgcccaatccccgccatcgccactacatgttcaagctgagcaacgtcacaacgcgtaccggtacgtaaattcaccgcctgacccggcagcagatgcatggggatttcaccgctgcgagggacaccgccgttgacgattaccgcatcaaccgactttaagcgccccgctcgctcacgcattggccccgccggcaaccaccagccattgccaaagcgacgcacaccatcaataacgacaatttccacatcacgcgccagacggtaatgctgtaaaccgtcgtcggttacgatgatctgcacatcagggctgttgcgccagaatggcaccatatccccgcgatacgaccccacgcgaataccgcgctgttgccactgttccacagccagacacgacggggttttccgttgcgccatcagtaatgcaacagagataataaagacagtcaggcaggtcatataataaatggaagtggtcggtatgccttcatacttgtcccgaacggtcttttgataagacgccgcagaaaacagtcctaataccagtacggcaaaataatatcctttttcatttaactgcatctctgcattccatagccccggctgcatgctgaggtgacttagaggatcccccgcgttgaagacgctaccctggttctgagcgttggcgacgaagttgaagctaaattcaccggcgttgatcgtaaaaaccgcgcaatcagcctgtctgttcgtgcgaaagacgaagccaggcaatcgcacattcccgccaagacggttgaagatgcagtaaaagagatgctggagcatatggcctcgactcttgcgcacggcgagcgtatcgaaatccgcggtctcggcagtttctctttgcacggacgtaatccgaagactggcgataaagtacaactggacaggcaaaataccgtttcccttcaccttttttacaaacccttgcgctttcgccgttggcttcggatctttcaatgccgcaagtgccgtcttaatcgagaacagtgccagaaccaccacgaccaccataaagaagatggttaacccggcatccagacggttgttgaacaccagttgcgccagctgtgactcagtatactgcgacggaatattgccgctgtcgatcattgcctggaacttattagcaatggccaggaagccgactttcgcatccgggctaaacgctttctgccagcctgcggtcagggtacaaatcagcagccaggccgttggtaccagcgccacccaggcgtaacgttgacgtttcatcttgaacaacaccacggcacagagcatcagcgccatccctgccagcatctggttggcaataccaaacagcggccacagagtgttaatgccgcccagcggatcgaccacgccctgatggaggaagtagccccacgccagtacgcacagcgctgttgccagcaggttagcaggcagtgaatcggtccgcttcaggccaggagacaccacgcccagcagatccgaccgcacgggaaatgatcgactgttcacccacttcgctggcaatcggttaacgttccggtgtatgctaaagcccaggtataacacataagtgtatgttgcattgctgacgatgccgaccgggcagctatccagacacaccaggcaacccgttttcttctcttctgctgccgttaaattaccgccaaagcgcatgtccagtttcttgccattactgtcaacaatcacttcatcgaaggaatacgcttttgccgccccttgccagttgaccgaaatatccagtttgctgcctgtgacatgagtcgtttctttattatccatcgtcatgttttcgcccggcgtaccacctgcctctttcagggcttcataaaatgctttcggggtcgcataacccataaacagcgatttatgtccgttggagccatctttaaacacaataccgtgacgagtgtcgtcggtgaggaaacgaccattaatttgcaccagcatggttaccgtatggttattggcatcgacacgcagcggttggctgttcgaaagtccgtcgtattccacttttgccgccgcattctcttgttgatcgcagccgctaagcccagcaacagccagtaaacagagtgcagccagtccttttttccatgacactgaataatgttgcaacatcgttctatccttcattttttgggtgagtaagtgggctgcggcgcgaagcagacagatccacatgtttgtgtcgggcgtagagtttagcgagctggacgagaataaacagcgccaggccgccagacagagttgtaaaataaagcgcagcgtaatgccttcattggcgagatcgttggcatcacggtataaataacaatacgggtagggtcccgcaaccagttcaatgccgctcaggtcgccctgaacgccgcttttctgccgtcgattatgctttccggctttatttttcagatcgacagtatgcccgcggtgatccgcgcggtgacgtacattattcccgctcgttatttcgtcagcaccctgcaaagcctgttcctcgccgggaatattccagtggtgctggtggtaaacgtgctgtttttgatcgcttcggcggtgatgtttatcggcctgacgtggccacgtttttggcgcgccagagccttttcctgtgtcgttgtgtaaagccccagggattcgcccaccttctggaccaaagggggtcccgggggttcccgggggaaagctctccggctggttgtgggcaccgacttccatcaggctgccgacaatattcctgaccatatgatgtacaaaagcattcgctttaatatctaccaccacataaggaccgtgacgcgtgacattaatatgcataacgttgcgccacggggttcgggactggcactgcaccgcacggaacgaggtgaaatcattctcgcccagcaagcattgcgcagcccgatgcatccgttcagcgtccagcggttcgtaaaaatgggttacccctttactcagtaccgccgggcgcagccgatgattgtagatgatgtagcgataacggcgagccgtggcgctaaatcgggcatgaaaatcatcaggtacagttttaacccaacgcacagcgatgtcaccaggtaaattcgcatttacgcccaaggtccacgccgcgtctttgcgcagcgcggttgtttcgaaatgcacaacctgcccggtaccgtgtacccctgcgtcagtacgcccggcgcagaagacggtgatgggttcgttcgccacctgggagagcgccttttccagcttctcctgcacactgcggacttcgttctgccgttgccagccgtaatacttactggcggcgtactcaatgcccagcgcaattttattaaccggcggttgttgccatatgtagaaagtagcgcggactaataagagagctccaacatcgggggagtcaattcctcgttgtttctttcttcctcttttttttctttcgctttctgctaacacggacgagcaccaagggggaatttctccccccccgggtcgaggcgtattttgctggcttagcgtctgacgcgcctgtagccaggtcaccagatggttaaacagtttcgctggaattaactcgccatctttcaccccggaaagttccagcatcgattgccagatctgtttgctgggttcccccgttgccgccgcaagtttggtcaccagctgttttagcgcattgtgctccgccggtaataaaggacggtcggtcgcctcgcgctgctgtggttgcggaataaccatcttcccttcctgcaacagggtgagaatggtttttaattgctccggtgagagctgattcagcggcgtctgaccaaagttatgacggatataatccgtgaccgcctgacgattattccccagacgtaaatactcccctaattgcgctaaaagctggcgggcagaatggcttttttgcgcggccagcagacgttgcgccagattatgctcagcggcagggaagtgacgcgaaagcagcggtgaatctcccgacagaccaatatcgtgcctgatacccgcccacagttctgctctttgctgttgcgtcagtgaggtcactttcgtcat

SEQ ID NO: 24364 - DNA, 1770 bp, Homo sapiens
  SIMILAR (961)..(1497): 931254mologous to Escherichia coli K12 transketolase 1 isozyme,accession number AE000376,Smith-Waterman Score=878.
atggacgttaaaatgctcgatttctttcgtcatatggggaccgcgacattaatcagcgtgaccgttttgctgattgccagcctgtttattcgccatgcctggtgtcgttatctttgcccatatggcgcgctgatgggcgtggtttcgctattgtcgccgtttaagattcgtcgcaatgccgaaagttgtatcgactgtggcaaatgcgcaaaaaattgcccatcacggatcccggtcgataaattaattcaggtacgaacagtggaatgtaccggctgtatgacttgcgtagagtcatgtccggtagcctcaacattgaccttttcactgcaaaaacctgcggcaaataaaaaagcctttgcgttgtctggctggttaatgacgctactggttctggggattatgtttgcggtgattggttacgcaatgtatgcgggagtatggcaaagcccgcaacaagcggaacatcacctcgcacggggtgatgttcacaacgtcattgaacggcgctcaacagattatcgctcgctgaccgatcccgccgttattcaggccatgcattacattcgtaatcacgcctgtaaagggattaaagtggatcaggtactggatgcggtcgggatctcgcgctccaatcttgagaagcgttttaaagaagaggtgggtgaaaccatccatgccatgattcatgccgacgcgctggaactcatctaccaacgcaacgctctgcccgccattaccggtcatatttgcgatcaccagtgccaatacaactgtacccgcctggattacgacagtgcgctgaatatccgcgaactgaaaaaagtcgcgctggaaaaaggttgggatgaatataagcaacgctggcacaaaccagccggttctggttcacgccatccggttgccgtgattggtgcagtcgttaagggcgtgcccttcatcatccgatctggagtcaaaatgtcctcacgtaaagagcttgccaatgctattcgtgcgctgagcatggacgcagtacagaaagccaaatccggtcacccgggtgcccctatgggtatggctgacattgccgaagtcctgtggcgtgatttcctgaaacacaacccgcagaatccgtcctgggctgaccgtgaccgcttcgtgctgtccaacggccacggctccatgctgatctacagcctgctgcacctcaccggttacgatctgccgatggaagaactgaaaaacttccgtcagctgcactctaaaactccgggtcacccggaagtgggttacaccgctggtgtggaaaccaccaccggtccgctgggtcagggtattgccaacgcagtcggtatggcgattgcagaaaaaacgctggcggcgcagtttaaccgtccgggccacgacattgtcgaccactacacctacgccttcatgggcgacggctgcatgatggaaggcattccacgaagttgctctctggcggtcacgttcggtaccgagctgattatcgcgaggcttcgtactaccgcaaacaagtttttgccttttattcacaagaagggtcccggttacattccacggattggagttccaatgcacctgcttggcggaactttgcccgatgccctgaaacgctgcctgaatgaagaagttgatagcatcctggcggaagatggcgaaatggacatgcattgtgattactgcggtaaccactatctgttcaatgcgatggatattgctgaaatccgcaacaacgcgtctccggcagatccgcaagttcattaa

SEQ ID NO: 24365 - DNA, 1275 bp, Homo sapiens
  SIMILAR (1074)..(562): 991254mologous to Escherichia coli cyclopropane fatty acid synthase,accession number M98330,Smith-Waterman Score=909.
tcaaaccccaccgccattggcggacgcccccggcggccctaccaggcagaggatcggtcccttgattttgttgacacggctttgaaccgcaagatactcaaggattcgatctttcacgcgctccagaccataatggtcggtatcaaggatttcctgcgcctgacgcaggtcttttttgaccttgctacgcgcattccacggcacctgtaccatccagtcgatataaccacgcactacggtcgcttctgccgacatcggagacatcattttcagcttctgcaactctgcttccgctttctcttttgcctctttcggcatcttcgccgcgtcgattttgcgcttcagggcttcgttttcgtccggcgcgtcgtccatttcaccgagttctttctgaatagctttcatttgctcgttcagatagtactcacgctgggatttctccatctgctttttaacgcggttgcgaatgcgtttctcaacctgcagcagatcgatttccgattccatcattgccatcagatattccagacgttcgttaacgtcggacatctccagaacagacaccgcaaaataggtatcgtaatttttcggtccgacgtgctcgaacatccccacagaaacaatacgatcaaactggtcgttcaggtcacgataatcttgcagcaaaatggtgacatccaggccttcacagcgttcctgagccattttttgctgttcggcagaaatggtgacgcccaccacgcttacgtcataattagatgccatgtagtgtgccagtccgccccagccgcagccaatatccagtacgcgcatccctggttttaactgcaatttttcacaaatcattttgagcttcgcctgctgggcagattccagattatcggcatctttccagtaagcgcaggaatattgcatgaagggatcaagcatgcggctgaacaagtcattacccaaatcgtaatgctctttgccgactatccaggcacgttttttactctgcagattgaagagacgagcgccggcaatacgcagcgtgtctttgaaatgatgggggagttggttctcgagaccagactcaggagcccagctggcttcacccagtggatcccacaccagggctgcaggtggagctgcctgccagtcccgcgcggtacgctcgcactcctcagcccttgggtggtcgatgggactgggcgccgtggagcagggggtggcactcctcagggaggctcgagctgcacaggagcccatggagggggtgggaggctcaggcat

SEQ ID NO: 24366 - DNA, 2055 bp, Homo sapiens
  SIMILAR (892)..(2052): 991254mologous to Escherichia coli D21141 uses 2nd start; frame determined by Lac fusion,accession number U28375,Smith- Waterman Score=2037.
atgctcgccgtcaatgaagcgatggcttatatgtcgcaaaaagtgcagggcggggaattggggcttaatgatgtcctcgccacaaatatggtactgaccattcgtcaacgactttttgccgaggcggaagccaaagaattagcggttcgcgattttgcctgcacatttctgggactgatttcatcgcctgacggcaccttgattatgcagattggcgatggcggcgtggtggtagatttgggtcacggtctgcaattgcctctcacgccgatggcgggtgaatatgccaacatgacgcacttcattaccgacgaagatgccgtttccagactggaaactttcaccagcactgggcgtgcgcacaaagttgcagcatttacggatggtatccagcgactggcgttaaatatgctggataattctcctcatgtgcctttctttaccccgtttttcaatggactggcggcagcaacgcaggaacaactcgatttattacctgaattgttaaagcagtttttgtccagcccggcggtaaacgagcgtacggatgatgataaaacgttggcactggcgctgtgggcagaggtcattgctgattacgccaataaacatgccgttagaataagtgacatccgtaagccagaaatgctcggttcttccgtgatcggttatcggggctttgactgcgaaagtatcggcatcttttttattcataacctcgatgaatttatcggtttctttccgcgcatgtttaatcgcggtgtccgccgggtaatctgggtgttaaacatcgacagcaaaggtcagtttaacaacgtaccaccggagctgaacgatatgtgccgcatcatcagccatgtccaccagcatcatcattatctgctgggccgcgtggagctacacccggcaaaagtgcaggaaggcgttgatatcgccatcgaaaacgatgtgattgtcgctatcggcgatgccctgacgcaacgctaccccgacgccagcttcaaagagatgcatggccggattgtgatgccagggattgtctgctcgcacaaccatttttactcggggctttcccgcggaattatggcaaacatcgccccttgcccggatttcatctcaacgctgaaaaatctctggtggcggctcgatcgcgcccttgatgaagagtcgctctattacagcggactgatttgttccctggaagcgattaagagcggatgtacatcggttatcgatcaccatgcctctccggcgtatatcggcgggtcgctctccacattgcgcgacgcatttttaaaagttggcctgcgcgcgatgacctgttttgaaactactgaccgtaacaacggcatcaaagagttgcaggaaggtgtagaagaaaacatccgtttcgcccgtttgattgatgaggcgaagaaagcgacaagcgagccgtatctggtggaagcacatatcggtgctcacgcgccgtttaccgtgccggatgccggtctggagatgctgcgtgaagccgtgaaagccacaggccgtggtttgcatattcacgctgcggaagacctttacgacgtttcctacagtcaccactggtacggcaaagacctgctggcacgactggcgcaattcgatctcatcgacagcaaaacgctggtcgctcatgggctgtacttgtcgaaagatgacatcaccctactcaatcagcgcgatgcgttcctggtgcataacgcccgttcaaacatgaacaaccatgtcggctacaaccatcaccttagcgacatccgcaatctggcgttgggaacggacggcattggttcggacatgtttgaagagatgaaatttgccttctttaaacatcgcgatgcgggtggtccgctgtggcctgacagttttgccaaagccctgactaacggtaacgaactgatgagccgcaactttggcgcgaaatttgggcttctggaagccggttacaaagctgatttaaccatttgcgattacaactcgccgacgccgctgctggcagacaatatcgccgggcatatcgctttcggtatgggctaa

SEQ ID NO: 24367 - DNA, 1615 bp, Homo sapiens
  SIMILAR (22)..(879): 901254mologous to Escherichia coli was o492p and o826p before splice,accession number U28375,Smith-Waterman Score=1350.
atgaacgcgcggcaacaagttgcggcgttacgcgtcccaggcgtagaaaaagcaacgatcgtttaccgtcgttcactacaagagatgcccgcatggcgcgaagagtatgaagaagcgttgcacgacggcttccgtttcctgaataatccggaacgtttcgatgctgatggcaccttaaccttgcgcgttatgtcgcttggcgaaccggatgagaaaggtcgtcgtcgtccggttgaaaccaatgaaacagtaacactgcttgtagacagcctgatcaccgccattggtgaacagcaggatactgaagccctgaatgcgatgggcgtgccgctggacaaaaacggctggccagacgtcgaccataatggcgaaactcgtctgactgacgtctttatgatcggcgacgtacagcgcggaccatcctccattgtcgctgctgtcggaaccgcgcgtcgggcgaccgatgccatccttagtcgggaaaatatccgttcccaccagaacgataaatactggaacaacgtcaatccagcggaaatctatcaacgtaaaggcgatatctctatcacgctggtgaacagtgacgatcgtgacgcgtttgtcgcccaggaagccgctcgctgcctcgaatgtaactacgtttgcagcaagtgtgttggatgtctgcccgaaccgggccaacgtctccattgcggtcccaggcttccagaaccgtttccagacgctgcaccctcgaagctttactgtaacgaatgcggcaactgcgctcagttctgtccgtggaacggtaaaccgtacaaagacaaaatcaccgtcttcagcctggcgcaagactttgataacagcagcaacccaggcttccttgtggaagattgccggtgggtcccgcacaggggtctctaccaccgtctgtatcgggagccgacctggcgctcggaatggccacggagacacatatgcccggagggttcgacattccctgaaaggcactgtgatcatctctcagcgaacaacagtcgaaataagctgttaccgctacaaaagccggggtttatcaattgacggcaaccctcgaaaatggcgattcgatgcaacaaacagtgacctatgtgccgaacatgtgaaggcgaacttcacgctgagcgatggcggtaaagtgattactgatgctgaaggcaaagcgaaagtcacgctgaaaggtacaaaagcaggcgctcatactgttacagcatcgatgactggcggtaagagtgagcagttggtggtgaactttattgcggatacgctcactgcgcaggttaatcttaacgttaccgaggacaattttatcgctaataacgtcgggatgaccaggctgcaggcaacagtgactgatggaaacggcaacccgttagccaatgaggcggtgacattcacgctaccggcagatgtgagcgcaagctttactctcggacaaggcggttccgccattactgatatcaacggcaaggctgaagttacactgagcggtacaaaatccggcacctaccccgtgacagttagcgtgaacaattatggtgtcagtgatacgaaacagcacgaccgagggcgcaaccatgacggcaagcgtcactga

SEQ ID NO: 24368 - DNA, 2680 bp, Homo sapiens
  misc_feature (1)...(2680): n = a,t,c or g
atgtgcgaactcgatattttacacgactctctttaccaattctgccccgaattacacttaaaacgactcaacagcttaacgttggcttgccacgcattacttgactgtaaaactctcactcttaccgaacttggccgtaacctgccaaccaaagcgagaacaaaacataacatcaaacgaatcgaccgattgttaggtaatcgtcacctccacaaagagcgactcgctgtataccgttggcatgctagctttatctgttcgggcaatacgatgcccattgtacttgttgactggtctgatattcgtgagcaaaaacgacttatggtattgcgagcttcagtcgcactacacggtcgttctgttactctttatgagaaagcgttcccgctttcagagcaatgttcaaagaaagctcatgaccaatttctagccgaccttgcgagcattctaccgagtaacaccacaccgctcattgtcagtgatgctggctttaaagtgccatggtataaatccgttgagaagctgggttggtactggttaagtcgaccgggcggtgaatccatacagatatttcataatcctcgagtgctggtggaaccggaaccaaaaagcatgcgtaatctgccatccggagtcgttcctgccgttcgccagccgctggcggaagacaaaacattgctgccgttttttagtaacgaacgggtgattcgtgctgctggcggcgttggcgcattgtccgactggctattacgtcatgttacatcctgccagtggcctaatggcgattaccatcacactgaaacagtcattcaccgttatggtccggcccaaatggttttggtttggccattgaaccaaccaattgcttgccaagacatggaaatcactggagctgcttgctcaccaaaatctgacagcatgggtgattgacgtcatccgtcacgcaataagcggtacgcaggagcgggaattatctttggctgaattatcctggtgggcggtctgcaatcaggtggtggatgcactacctgaggctgtatcgcgtcgttcgctgggattaccagcggaaaaaatctgctcggtgtaccgcgaaagcgacatcgtaccgggagagcagaccgccaccagcatattgaaacaacgcacaaaaaatcttgcaccgttgccttacgcccaccagcaacaaaaatcaccacaggaaaagacggtggtaagcatcaccgttgatccagagtctccggaatctttcatgaagctgcctaaacgtcgccgctgggttaaggagaaatacacacgttgggttaagacacagcnctggagaacgagcatgaaccttgaagccttaccaaaatattactccccaaaatctccaaaattgagcgatgacgctccagcgacaggcaccggttgtttaacaattacggatgtaatggcagcgcaggggatggtgcagtcgaaagcaccacttgggttggccttatttctggcaaaagttggtgttcaggaccctcagtttgcgattgaaggcctgctaaattacgcgatggcactggataacccgacattgaacaaattgagtgaagaaatccggttacagattattccttacctcgtgagttttgcctttgctgattactccaggtctgcggcagtaaggctcgctgtgagcgtgggtgcggtgcgtgggggggggtgggggggagggaggtcggcgtgtgggttgctgaggagtcgctggttcttgttgtgggtttggtgcagtgtgtgtggtgttgggccttatgaaaaaaacattcgtcgaaggagttggaaggagaaatggcagatgccgctgcggggctcgctgcgggcccccctgcggctcggcgcttcccgcgccggtcgcttgtgcccgcgcgtgtcagtcgtattcgcggcgggggcttggcccttcatcgctcactgcgcctctgctcgccgttcgcgcgggctgcgtcggcttcggcccgctggcgatgctcgtgacggtataaacgacgcgccagcgatgaaagctgccgccatcgggattgcaatgggtagcggcacagacgtggcgctggaaaccgccgacgcagcattaacccataaccacctgcgcggcctggtgcaaatgattgaactggcacgcgccactcacgccaatatccgccagaacatcactattgcgctggggctgaaagggatcttcctcgtcaccacgctggatgaccgggttgtggctggcagtgctggcagatacgggggcgacggtgctggtgacagcgaatgcgttaagattgttgcgcaggagataaggcaaaccgatcgcaacattgagcgcgatcggtcccctcgcccctctggggagagggttagggtgaggggaaaaggcggcatcgaagccaatcagcccctatcaaccgcctttacgaatcaaataacgataaggcagtccatccgtctctttagcaaccagttcgtgttccataaaggtacaaaacccaggaatatcgcgggtagtggccggatcgtcggcgataatcagcaacgtttcgccaggctgcatattgcgcacggttttgcgcaccatcatcaccggttccgggcagcgcaggccaagcgcgtcgagtgtgtggtcagggctggaaaagagatcggtcattttcttctcatcacttaa

SEQ ID NO: 24369 - DNA, 5243 bp, Homo sapiens
  SIMILAR (1657)..(1791): 311254mologous to Escherichia coli was o492p and o826p before splice,accession number U28375,Smith-Waterman Score=49.
atgggcagtaataccaactggcggttaggcagcgacacatttaacgcgccagaactgtcctctttggtattacgctcattaaaagaagatgccgaagaatttctgcaacgtccgattaaagatgtggtgatctccgttccggcttatttcagcgatgaacaacgcaagcatacccgtttagcagcggagttagccgggttaaatgcggtaggtgatgcttcgggtacgccgcatctttctgttggctgcgtgcgtaatgactacggtatgccggagcaagtccagttctggtcggtggccgataacgttcgctttggcggcgcgctgatggcagtaaaaatcgccgagaaactgcaacaaccgccagtttataaaattgcgctgggcattgagtacgacggcagtaagtattacggctggcaacggcagaacgaagtccgcagtgtgcaggagaagctggaaaaggcgctctcccaggtggcgaacgaacccatcaccgtcttctgcgccgggcgtactgacgcaggggtacacggtaccgggcaggttgtgcatttcgaaacaaccgcgctgcgcaaagacgcggcgtggaccttgggcgtaaatgcgaatttacctggtgacatcgctgtgcgttgggttaaaactgtacctgatgattttcatgcccgatttagcgccacggctcgccgttatcgctacatcatctacaatcatcggctgcgcccggcggtgcatttgttgcaaattattcgcgaagcggtgctgaatgcgatgaagcacgccaacgccagcgaaatcgccgtcagttgcgtcaccgcgccggacggcaatcacacggtttatatccgtgataacgggattggtatcggtgaaccgaaagaacccgaaggtcattatggtctgaatatcatgcgcgaacgcgcggaacggctaggtgggacgctgactttttcacaaccttccggcggcggcacgttaacgctggaaaacaccgtgacccaggttatcgagcaaaatatgaccggcctcgataatctcatgtatatgtcatctcagagcagtggcaccggtcaggcatctgtcactttaagttttaaagcaggcaccgatccggacgaagccgtgcagcaagtacaaaaccagctgcaatcagccatgcgaaagttaccgcaggcggatattgctgattatgttgccagtaatattcaggacccgttaagccgcgtgaatggcgtcggggatatcgatgcctatggttcgcaatattccatgcgatctgctgacccgcgaactacagttccagtgcgtgatggagaaactatgagttcatcgtgtatagaagaagtcagtgtaccggatgacaactggtaccgtatcgccaacgaattacttagccgtgccggtatagccattaacggttctgccccggcggatattcgtgtgaaaaaccccgatttttttaaacgcgttctgcaagaaggctctttggggttaggcgaaagttatatggatggctggtgggaatgtgaccgactggatatgttttttagcaaagtcttacgcgcaggtctcgagaaccaactcccccatcatttcaaagacacgctgcgtattgccggcgctcgtctcttcaatctgcagagtaaaaaacgtgcctggatagtcggcaaagagcattacgatttgggtaatgacttgttcagccgcatgcttgatcccttcatgcaatattcctgcgcttactggaaagatgccgataatctggaatctgcccagcaggcgaagctcaaaatgatttgtgaaaaattgcagttaaaaccagggatgcgcgtactggatattggctgcggctggggcggactggcacactacatggcatctaattatgacgtaagcgtggtgggcgtcaccatttctgccgaacagcaaaaaatggctcaggaacgctgtgaaggcctggatgtcaccattttgctgcaagattatcgtgacctgaacgaccagtttgatcgtattgtttctgtggggatgttcgagcacgtcggaccgaaaaattacgatacctattttgcggtggtggatcgtaatttgaaaccggaaggcatattcctgctccatactatcggttcgaaaaaaaccgatctgaatgttgatccctggattaataaatatatttttccgaacggttgcctgccctctgtacgccagatgctcattaccgcgagccgtgccaatacaactgtacccgcctggattacgacagtgcgctgaatatccgcgaactgaaaaaagtcgcgctggaaaaaggttgggatgaatataagcaacgctggcacaaaccagccggttctggttcacgccatccggttgccgtgattggtgcaggtccggcgggtctggcagcaggttacttccttgccagagcgggccatccggttacgctgtttgaacgcgaagccaatgcgggcggcgtggtgaaaaatatcgttcctcagttccgtattcctgcagagttaattcagcacgatatcgattttgttgccgctcacggcgtgaaatttgagtatggctgctcacccgatttaaccattgagcagttaaaaaatcagggcttccactatgttctgattgccaccggcactgataaaaatagcggtgtgaaactggcgggcgacaaccaaaatgtctggaaatcactccccttcctgcgtgaatacaacaagggtacagcgctcaagctgggcaaacatgtggtcgttgtcggggcgggtaacaccgcaatggactgcgctcgtgcggcgttacgcgttccaggcgtagaaaaagcaacgatcgtttaccgtcgttcactacaagagatgcccgcatggcgcgaagagtatgaagaagcgttgcacgacggcgtagagttccgtttcctgaataatccggaacgtttcgatgctgatggcaccttaaccttgcgcgttatgtcgcttggcgaaccggatgagaaaggtcgtcgtcgtccggttgaaaccaatgaaacagtaacactgcttgtagacagcctgatcaccgccattggtgaacagcaggatactgaagccctgaatgcgatgggcgtgccgctggacaaaaacggctggccagacgtcgaccataatggcgaaactcgtctgactgacgtctttatgatcggcgacgtacagcgcggaccatcctccattgtcgctgctgtcggaaccgcgcgtcgggcgaccgatgccatccttagtcgggaaaatatccgttcccaccagaacgataaatactggaacaacgtcaatccagcggaaatctatcaacgtaaagcggatatctttatcacgctggtgaacaatgacgatcgtgacgcgtttgtcgcccaggaagccgctcgctgcctcgaatgtaactacgtttgcagcaagtgtgtgatgtctgcccgaaccgcgccaacgtctccattgcgtccccagctttccagaaccgtttccagacgctgcacctcgacgcttactgtaacgaatgcgcaaactgcgctcagttctgtccgtggaaccctggcgcaagactttgataacagcagcaacccaggcttccttgtggaagattgccgggtacgagtacgtctgaataaccaaagctgggtgttaaacatcgacagcaaaggtcagtttaacaacgtaccaccggagctgaacgatatgtgccgcatcatcagccatgtccaccagcatcatcattatctgctgggccgcgtggagctacacccggcaaaagtgcaggaaggcgttgatatcgccatcgaaaacgatgtgattgtcgctatcggcgatgccctgacgcaacgctaccccgacgccagcttcaaagagatgcatggccggattgtgatgccagggattgtctgctcgcacaaccatttttactcggggctttcccgcggaattatggcaaacatcgccccttgcccggatttcatctcaacgctgaaaaatctctgtaacgaacgggtgattcgtgctgctggcggcgttggcgcattgtccgactggctattacgtcatgttacatcctgccagtggcctaatggcgattaccatcacactgaaacagtcattcaccgttatggtaccggcgcaatggtgttgtgctggcactgcgacaaccaactgcgtgaccagacatcggaatcactggagctgcttgctcaacaaaatctgacagcatgggtgattgacgtcatccgtcacgcaataagcggtacgcaggagcgggaattatctttggctgaattatcctggtgggcggtctgcaatcaggtggtggatgcactacctgaggctgtatcgcgtcgttcgctgggattaccagcggaaaaaatctgctcggtgtaccgcgaaagcgacatcgtaccgggagagcagaccgccaccagcatattgaaacaacgcacaaaaaatcttgcaccgttgccttacgcccaccagcaacaaaaatcaccacaggaaaagacggtggtaagcatcaccgttgatccagagtctccggaatctttcatgaagctgcctaaacgtcgccgctgggttaaggagacatacacacgttgggttaagacacagccaaagcatcacaacgagctgcatacggatacagtggcatttgaagataagtatggctcccaactggagctgatatttcgttttatcgatcgcgcgctggcaattggcgtactggcaacgagcatgaaccttgaagccttaccaaaatattactccccaaaatctccaaaattgagcgatgacgctccagcgacaggcaccggttgtttaacaattacggatgtaatggcagcgcaggggatggtgcagtcgaaagcaccacttgggttggccttatttctggcaaaagttggtgttcaggaccctcagtttgcgattgaaggcctgctaaattacgcgatggcactggataacccgacattgaacaaattgagtgaagaaatccggttacagattattccttacctcgtgagttttgcctttgctgattactccaggtctgcggcaagtaaggctcgctgtgagcattgttcaggtacgggattttataatgtattgcgcgaagtggtgaaacactacagacgcggggaatctgtaatcaaggaagaatgggtgaaggaactatgtcagcattgccatggtaaggcgaagccagacagcgtgcagagggtgtaa

SEQ ID NO: 24370 - DNA, 1059 bp, Homo sapiens
  SIMILAR (483)..(4): 961254mologous to Escherichia coli Membrane protein MosC,accession number D90722,Smith-Waterman Score=764.
tcaactattctccatcgccgtctgcgttttggtatcgggtttggcgacggctttcgcgacaatagccgcgagaataaccagcgccagtacaaccagcattgcactacgtaatccataatgttcgccgagatagcccagcagcggcggcccgacgaggaaagccagataaccggtcgttgctaccacactgacgcgggttggtgcatcggggccggtatcgctggcggcagaaatggtcagcgggaagcccagcgaggcacccagtccccagagtacaacagacaccccagcgacccacgcgctatcgacaaaaataatcagcccaatacccaacgcccccattagtgcactggcccgaaccacggcaacgcgactgtaacggtcgatgaaccaaccgccggtgaagcgtccaaccgtcatccccagggtaaaaccggcataaatcagcgagccggaagtagggccgatcatccttggtccatgagcacatcgatggtcgcaagtaccgtggcacatgccatggtgtttcgaacaatagagccgttcctcaaaacagcccatggggacaaatcggagaacacccttcttgtgatgatgtgagttgataaaatgcccttcttgtgatgatgtgagttgataaaatgcctgtgtgatgagacgaagtgagtgaatgacataggcatttgatatgagtggaaacttccagaaatgattcataagatttaatttgcatgttgctctaagtagtgtgatgtaatcttgttccaccccactctgtcctgaagggcgaattctgcagatatccatcacactggcggccgctcgagcatgcattgctccctgggcacatctaatgccttggtgcttctgggccttttctccagtggtgatggcctgctcataacagggcaaaggaagctcctccgagatgccagccatatcttcatagttatcctgtagccctcgccatgcggcatccccagtacgcggatataactcttcaaaggcggttaagccttgctctactgccaggcagccgttttcaaaaagagtacgcat

SEQ ID NO: 24371 - DNA, 1716 bp, Homo sapiens
  SIMILAR (562)..(1128): 1001254mologous to Escherichia coli K12 putative oxidoreductase,accession number AE000459,Smith-Waterman Score=1009.
atgaaggacgaagcagagacacgagggagcggtagcgacgtcgaaggaagcttgtctgagtgggatgtcgttgagtggagtgatgatcaagctgtattcacctttgtttatgacacgatacaactcaccatcacctttgaagagtcagttgggctgctggacggccagaaacaccattatcaggatgagttcgcggctatcccgctggtgccgaaagcgggcgatcgtgatgagcctgatatgatgccagccgccacccaggcgttactaacgcatccgccgaaaggcgcagcgaaagaggtgcgggcaggtcataccgcagcaccgtcgctcgatccggccactattgcagccaataacaccgagtttgaaccggaacgtgcaccggtcgccccaccgaagctgaaaccggtggagccgcctaaaccaaaggttgaagcaccacctgcgccgaagccagaaccgaagccggtcgtggaagaaaaagctgcaccgacgggtaaagcctatgttgtgcaactgggtgcgctgaaaaatgccgataaagtgaatgagattgtcgagtatgcgtttgcgggattgctacgtggcaccaagaccgaagtggtgaagtgtatctccaatgatcttgaagtgcccgccagtgcggagattgtgctggaagggtatatcgaacaaggcgaaactgcgccggaagggccgtatggcgaccacaccggttactataatgaagtcgatagtttcccggtatttaccgtgacgcatattacccagcgtgaagatgcgatttaccattccacctataccgggcgtccgccagatgagcccgcggtgctgggtgtcgcactgaacgaagtgtttgtgccgattctgcaaaaacagttcccggaaattgtcgatttttacctgccgccggaaggctgctcttatcgcctggcggtagtgacaatcaaaaaacagtacgccggacacgcgaagcgcgtcatgatgggcgtctggtcgttcttacgccagtttatgtacactaaatttgtgatcgtttgcgatgatgacgttaacgcacgcgactggaacgatgtgatttgggcgattaccacccgtatggacccggcgcgggatactgttctgaagccaatccactgccgtaaagtacgagcaccaggcatggcagcattcaccatgacctgcatgaagagcgcttgggcgttgagtgaactttgggatgaacacattgctttctgctcccattcatacccagatgcacaagaaggaggtcagaagggttctatttcggttggccaaaaaggtccctttatcaccggtcgtgtgacgggtaattcgcccaatgtaaatatcccttttcagccgattgagcgtcaaaatgtaggtatttccataagcgtttttcctgttgcaatgactgcgggtaatattgttctggatattacaagcaagccggatagtttgagttcttctgctcaggcaagtgatgttattactaatcaaagaagtattgctacaacggttaatttgcgtgatggacagactcttttactcggtggcctcactgattataaaaacacttctcagaattctggcgtaccgttcctgtctaaaatccctttaatcggcctcctgtttagctcccgctctgattctaacgaggaaagcacgttatacgtgctcgtcaaagcaaccatagtacgcgccctgtag

SEQ ID NO: 24372 - DNA, 654 bp, Homo sapiens
  SIMILAR (1)..(588): 911254mologous to Escherichia coli K12 putative oxidoreductase,accession number AE000459,Smith-Waterman Score=947.
atggacgccatgaaatataacgatttacgcgacttcttgacgctgcttgaacagcagggtgagctaaaacgtatcacgctcccggtggatccgcatctggaaatcactgaaattgctgaccgcactttgcgtgccggtgggcctgcgctgttgttcgaaaaccctaaaggctactcaatgccggtgctgtgcaacctgttcggtacgccaaagcgcgtggcgatgggcatggggcaggaagatgtttcggcgctgcgtgaagttggtaaattattggcgtttctgaaagagccggagccgccaaaaggtttccgcgacctgtttgataaactgccgcagtttaagcaagtattgaacatgccgacaaagcggctgcgtggtgcgccctgccaacaaaaaatcgtctctggcgatgacgtcgatctcaatcgcattcccattatgacctgctggccggaagatgccgcgccgctgattacctgggggctgacagtgacgcgcggcccacatagagagcggcagaatgtgggccagtttagagaacatcttcaggctcgaaagtgtgacttacccgggatcacacacaggctggcagtgaagaatccaggggtacgtagccagggttcgtacgagggggtaatcaaggcggattaa

SEQ ID NO: 24373 - DNA, 1707 bp, Homo sapiens
  SIMILAR (1153)..(1704): 1001254mologous to Escherichia coli ORF 2 (AA 1- 301),accession number V00279,Smith-Waterman Score=1000.
atccggttttgagcaagacaccactcacagcaaaggccatagacgccgcacagccgcaggacaagccctataaactcaccgattcactgacgccggggctgtttttgctggtgcatcccaacggttcgaaatactggcgattcaggtattggctgaataaacgagagtttttgcaggccattggagtttacccgctaatcacactcaaagaagcacgcaggcgcgccacggagagcagatcccttattgccaatggaattaacccagtggaacaagcccgcaaggaaaaagccattgatgcgctcaacatggcggcaggatttaagaaggtggcggaagactggtttgctaccagggttggagggtggtcggaatcctatgcaaaacaggtcagatcggcactagaaaaagacgtctatccggtacttggcaagcggtcgattgtcgatataaccgcccgtgacgtgctggcattactccagaagaaagaacgtaccgcaccggagcaggcccgcaacgtacgccggcgcatcggtgagatcttcaagtttgccgttatcaccgaactggggtggctggttggcgcgcgccgcgttccctcaccacattacgattgccgcccggatgacgaaacacccaccctgctggtggtgcacaatattagcctgccgccaggcgagtttggcggtccgtggatcgacgcattattcactggaactattgatccgcaggcacatcctttctttgctgagatcgcccatttgcgcgtctccgctcactgtttgattcgccgtgatggtgaaatagtccagtatgttcctttcgataaacgtgcatggcatgcgggagtctctcagtatcaggggcgcgaacgctgcaatgatttttctattgggattgagcttgaaggcacccgatacgctggcgtataccgatgcgcagtatcaacagcttgcggcggttacgcgggcactgattgattgctatccggatatcgctaaaaacatgacgggccattgtgatattgcgccggatcggaaaaccgatcccggtcctgcatttgattgggcacggtttcgtgtgctgggagtattgttcaacgttcccacgctactggtgtggctgctgattggtttgctgtgtattggcgcaggcagagttgccgtgaaagaaagcaatcagcgatggtgctctgacgggttcgagttctgctgtgataacggagagagactgcgtgtcacgttcgcgctggactgctgtgatcgtgaggcactgcactgggcggtcactaccggcggcttcaacagtgaaacagtacaggacgtcatgctgggagcggtggaacgccgcttcggcaacgatcttccgtcgtctccagtggagtggctgacggataatggttcatgctaccgggctaatgaaacacgccagttcgcccggatgttgggacttgaaccgaagaacacggcggtgcggagtccggagagtaacggaatagcagagagcttcgtgaaaacgataaagcgtgactacatcagtatcatgcccaaaccagacgggttaacggcagcaaagaaccttgcagaggcgttcgagcattataacgaatggcatccgcatagtgcgctgggttatcgctcgccacgggaatatctgcggcagcgggcttgtaatgggttaagtgataacagatgtctggaaatatag

SEQ ID NO: 24374 - DNA, 2389 bp, Homo sapiens
  SIMILAR (1049)..(2377): 921254mologous to Escherichia coli K12 putative oxidoreductase,accession number AE000459,Smith-Waterman Score=2156.
atgccatgcacgtttatcgaaaggaacatactggactatttcaccatcacggcgaatcaaacacatcccatcttgcgcattgccgtcgccggttatgccatgccagcgccagagttgcttactcgccatgcggcatccccagtacgcggattaactcttcaaaggtggttaagccttgctctacggccaggcagccgttttcaaaaagcgtacgcatacccgcctgtcgtgcgccgtacgaccataaaaaccgtggtagcaatgtacacaaccgggtgcctgccagtggggcagcggcgatggccatacattgtctggaatgtggatgggctccccttgctgccggcgacaatgtgggcaaagtttgcgtaccagacgctgggctattaccagcggagacaacaccaggtgacccagttgcgccgcctgaacatcaaaccggttatcctggcagctgacggctctgagccagatctttctcagcaagccctgactgaaaaaggcgtgctgttcaactctggcgagttcaacggtcttgaccatgaagcggccttcaacgccatcgccgataaactgactgcgatgggcgttggcgagcgtaaagtgaactaccgcctgcgcgactggggtgtttcccgtcagcgttactggggcgcgccgattccgatggtgacgctggaagacggtaccgtaatgccgaccccggacgaccagctgccggtgatcctgccggaagatgtggtaatggacggcattaccagcccgattaaagcagatccggagtgggcgaaaactaccgttaacggttatgccagccctgcgtgaaaccgacactttcgacacctttatggagtcctcctggtactatgcgcgctacacttgcccgcagtacaaagaaggtatgctggattccgaagcggctaactactggctgccggtggatatctacattggtggtattgaacacgccattatgcacctgctctactttcgcttcttccacaaactgatgcgtgatgcaagcatgactaaccctagctcggtaccccgtgccggtgggcctgcgctgttgttcgaaaaccctaaaggctactcaatgccggtgctgtgcaacctgttcggtacgccaaagcgcgtggcgatgggcatggggcaggaagatgtttcggcgctgcgtgaagttggtaaattattggcgtttctgaaagagccggagccgccaaaaggtttccgcgacctgtttgataaactgccgcagtttaagcaagtattgaacatgccgacaaagcggctgcgtggtgcgccctgccaacaaaaaatcgtctctggcgatgacgtcgatctcaatcgcattcccattatgacctgctggccggaagatgccgcgccgctgattacctgggggctgacagtgacgcgcggcccacataaagagcggcagaatctgggcatttatcgccagcagctgattggtaaaaacaaactgattatgcgctggctgtcgcatcgcggcggcggcgctggattatcaggagtggtgtgcggcgcatccgggcgaacgttttcccggtttctgtggccctgggtgccgtccccgccacgattctcggggcagtcactcccgttccggaatacgctttcagagtatgcgtttgccggattgctacgtggcaccaagaccgaagtggtgaagtgtatctccaatgatcttgaagtgcccgccagtgcggagattgtgctggaagggtatatcgaacaaggcgaaactgcgccggaagggccgtatggcgaccacaccggttactataatgaagtcgatagtttcccggtatttaccgtgacgcatattacccagcgtgaagatgcgatttaccattccacctataccgggcgtccgccagatgagcccgcggtgctgggtgtcgcactgaacgaagtgtttgtgccgattctgcaaaaacagttcccggaaattgtcgatttttacctgccgccggaaggctgctcttatcgcctggcggtagtgacaatcaaaaaacagtacgccggacacgcgaagcgcgtcatgatgggcgtctggtcgttcttacgccagtttatgtacactaaatttgtgatcgtttgcgatgatgacgttaacgcacgcgactggaacgatgtgatttgggcgattaccacccgtatggacccggcgcgggatactgttctggtagaaaatacgcctattgattatctggattttgcctcgcctgtctccgggctgggttcaaaaatggggctggatgccacgaataaatggccgggggaaacccagcgtgaatggggacgtcccatcaaaaaagatccagatgttgtcgcgcatattgacgccatctggatttttccataa

SEQ ID NO: 24375 - DNA, 924 bp, Homo sapiens
  SIMILAR (157)..(897): 981254mologous to Escherichia coli K12 NADH dehydrogenase I chain C, D,accession number AE000317,Smith-Waterman Score=1322.
atgcaggcactgatgctgttgcaggaatctatcggcaaagaacgtcgtccgctctcctgggtggttggcgatcagggcgtttatcgcgccaatatgcaatcagagcgcgaacgcaagcgcgcttactgcgccgacagtcaccacggaccatttgcaatggtgaacaatatgaccgacttaaccgcgcaagaacccgcctggcagacccgcgatcatcttgatgatccggtgattggcgaactgcgcaaccgttttgggccggatgcctttactgttcaggcgactcgcaccggggttcccgttgtgtggatcaagcgtgaacaattactggaagttggcgatttcttaaagaaactgccgaacccttacgtcatgctgtttgacttacacggcatggacgaacgtctgcgcacacaccgcgaagggttacctgccgcggatttttccgttttctaccatctgatttctatcgatcgtaaccgcgacatcatgctgaaggtggcgctggcagaaaacgacctgcacgtaccgaccttcaccaaactgttcccgaacgctaactggtatgagcgtgaaacctgggatctgtttggcattactttcgacggtcacccgaacctgcgacgcatcatgatgccgcaaacctggaaaggtcacccgctgcgtaaagattatccggcgcgcgctaccgaattctcgccgtttgagctgaccaaagccaaacaggatctggagatggaagccctgaccttcaaaccggaagagtgggggatgaagcgcggcaccgaaaacgaggacttcatgttcctcaacctcggtccgaaccacccgtcggcgcacggggctttccgtatcgttttgcaactcgatggcgatgagattgtggcctgcgtgccactcatcgattctcgacagtacgcatga

SEQ ID NO: 24376 - DNA, 878 bp, Homo sapiens
  SIMILAR (422)..(877): 991254mologous to Escherichia coli Citrate lyase alpha chain (acyl lyase subunit) (citF) homolog,accession number D90702,Smith- Waterman Score=773.
cgtcaccctgaccggctcaatgttggcgattgatgctccggtgatcgccagcggcgcgaccacgccgaataaccgcgtcgcggatgaccagggctttttacgccagtggagcaaggtggcgaaagaacgcaaactgcaacggttttatatcggcgaaccgagcgccgaagccgttgccgcgcaaatgccggatctgattttaattagcgcaaccggcggggattcggcgctggcactgtatgatcagctttccaccatcgccccgacattaatcatcaattacgacgacaaaagctggcagtcgctgttaacgcaacttggcgaaattaccgggcatgagaaacaagcggcagagcggattgcgcagtttgataagcaactggcggcggcgaaagagcaaatcaaattaccgccgcagccgggcgtggttacccgcatttatacctccggcctgcgtggtccactggcggaagagatctcccgtggtctgctggcagaaccggtgcagatccactctcacggcggtcgtgtgcatctggtacagagcggcgaactgaatattgacgtggctttcatcggcgtcccgtcctgtgatgaattcggtaatgccaacggctacaccggtaaagcctgctgcggctccctcggctatgcaatagttgatgccgacaacgcaaaacaggtcgtgatgcttaccgaagaactgctgccttatccgcataatccggcaagcattgagcaagatcaggttgatttgatcgtcaaagttgaccgcgttggcgatgctgcaaaaatcggcgctggcgcgacccgtatgaccactaacccgcgcgaactgcttattgcccgtagcgctgcggatgtgattgtcaactctg

SEQ ID NO: 24377 - DNA, 738 bp, Homo sapiens; identical to SEQ ID NO: 13731
  SIMILAR (166)..(729): 971254mologous to Escherichia coli Citrate lyase alpha chain (acyl lyase subunit) (citF) homolog,accession number D90702,Smith- Waterman Score=957.

SEQ ID NO: 24378 - DNA, 1995 bp, Homo sapiens
  SIMILAR (1381)..(1983): 991254mologous to Escherichia coli Citrate lyase beta chain (acyl lyase subunit) (citE) homolog,accession number D90702,Smith- Waterman Score=1001.
atggtaatagacatgatcttgttcagcttcacgaggaagactacgcgcaaaacgatcaggaaagatctgataaaaaatctgatccgcagcccattgtgggccgatatccggtacatcgacggcaaactgctccagtcgtgccggcggcattcggctgaagccctgcggtgtaaaccaacgctggcgatcgtgccacagcagtttgaaactgtaactgccgccgggacgaataaaacagaaaccgaggttaatgatcgcgccgccgcccatgatgacaacatagcttggcagagcgacatacagtggatcgacgccaagtgcggcagcggcttcatgcatcggttttgcggcgttcatcgcaaaggacatcccggcagagaaaatgccgcacatcaccgccagcaccagcccttttttcagattgaactcttcggctttaatgcccatcttgcgctctttcaactgcccggcgcgagttacaatccctacgccaatcagcgccaccagaacgccgagcaacgtcatgcgtccgccttcggtgctaatcaacacatcgaaattgccgttgataattggcgtcatcagcgtaccgacaatcaactcagtgacattctggcatggcagcccaaacagaccataaaggccccaggaggtacggaaacgcccggtgactgcactggcgaaagattccagttcatcacgaggcaaatccagtaccggaataatttcttcgtagatagctttttcaacgaatgcgcagggtccgccactttcttctgcggttcctgtgcggtgattcgtcgtaagccgctggatgaaattggcggcattgctgtcgaaaccgtgactgaagatgcgcatacttctctgcggttgcaccgtcgtggctatacctccgcgtatatgcgtattccacagacgcaggggctggcgaccgaaagtctgtcggcgcatatcggtcagcgtattcgctgggcgcgcgggatggtacaaatcttccgtctcgataacccgctcaccggtaaagggctgaagtttgctcagcggctatgttacgtcaacgccatgttccacttcttgtcgggcattccacggctgatcttcctgactgcgccgctggcgttcctgctgcttcatgcctacatcatctatgcgccagcgttgatgatcgccctattcgtgctgccgcatatgatccatgccagcctgaccaactccaagatccagggcaaatatcgccactctttctggagtgaaatctacgaaacggtgctggcgtggtatatcgcaccaccgacgctggtggcgctgattaacccgcggggatcctctaggagcacaataaatcccgtccctaggccaaacagcaaatatcccgtgaacatgttgtttgtgcctggtgccaatgccgcgatggtcagcaactccttcatctacccggctgatgccctgatgtttgacctcgaagactccgtagcattgcgtgaaaaagacaccgcccgccgcatggtttaccacgcgctgcaacatccgctgtatcgcgatattgaaaccattgtgcgtgtcaacgcgctggattccgaatggggtgttaacgacctggaagccgtcgttcgcggtggtgcggacgttgtgcgtctgccgaaaaccgataccgctcaggatgttctggatattgaaaaagagatcctgcgtatcgaaaaagcctgtggtcgtgaacccggcagcaccggcctgctggcggcgattgaatctccgctggggattacccgcgcagtggaaatcgctcacgcttccgagcgtttgatcggtatcgccctcggtgcagaagactatgtgcgcaacctgcgtacagaacgctccccggaaggaactgaactgctgttcgcacgctgttccattttgcaggccgcgcgctctgcgggtattcaggcgttcgataccgtctattccgacgctaacaacgaagccggatttctgcaggggatcctctag

SEQ ID NO: 24379 - DNA, 2370 bp, Homo sapiens
  SIMILAR (765)..(4): 981254mologous to Escherichia coli Hsp70,accession number U01827,Smith-Waterman Score=1234.
ctaagcgcgggccaccgtaatagtggtattacggggaatcactttctccaccaggccgcccatcgtttcgaggcccagcgacagtgggatcacatcaagcaacagcatttggctgtctggcttgttacccaccagaatatccgcttgaatcgccgcgccaatagcgacgactttatccgggtcgatggaagtcagcggtggacgaccgaaaaattcgcctacccgttcacgcaccagcggcacgcgagtagaaccgcccaccatcaccacttccagcacttcatcagcttctacacccgcgtctttcagcgcgcgacgacaagccagtaaggttcgttttaccagtggcgcgatcagttcattgaattgttcacggctgatttcgccctgccagcccgcaacgttaacggtcacggagtccgcatcgctcagcgcgattttggctgcaatggcggcatccagcagttcacgctgaacgcggttatcgctacgatcaggaatgcccgcctgctcgcgaatgtaatccgccagcagatggtcgaaatcatcgccgccgagcgcggaatcaccgccggttgccagcacttcaaacacgccgcgacttaagcgcagaatggaaatatcaaacgtcccgccaccgaggtcataaacggcgatcacgccttcctgaccggaatccagcccgtatgcgatagccgcagcggtcggttcgttaagtaagcgcaggacgtgaaggcccgccagacgcgccgcgtcgtctattccgacgctaacaacgaagccggatttctgcaagaagccgcccacatcaaacagctgggctttgacggcaaatcgctgatcaacccgcgtcagattgatctgctgcacaacctctacgcaccgacccagaaagaagtggatcacgcccgccgcgtcgtagaagccgctgaagccgccgctcgcgaaggcctcggcgtggtttccagcgatcatcgggatagcatccaccagacccataacgataaagaactgagtacgcagcagaggaatcagatcaggttgacgcgctgcgccttccaggaatttacccccgaggatgccgataccgatcgcagcaccgattgccgccagacccatcatcacagcggcagccatgtacagcagatccatattcaggttttccatgacagtcctggcccatcggcatgtcgtcatcgccccggcattctcctcgggcacgtgtccagcccaacttggtgaagccttgtggacagttgtgtcctggtagtccagagtggaaaagtagatatcgatgaagggtaagctagtgcccaaatcatccgagaccattgggtcagtgtggctcaaggtcttcttaaagttctccaccagctcactgaaacttgtgcagtcagcatttttccgcgccacttcaggtacgctcataattagcttgtcggttttttgcagcatactcgccgcctctgctgcggaaatccccggcagcgtcgatggcatatacaacaagtcgccttcattgatctgcggtaaaaattccccgccaactttattgagcggccagagaaccgtcagcaccgaaagcgccgccaccagcagcgtggttttcggccagtgcagtactttcagcaacagcggatgataaacacgaatcaaaaagcgattgagcgggttactgctttccggcggaattttgccacggatccagtagcccatcaggatcgggatcactacgatcgccagcagcgccgcacccgccatcgcatacgttttggtgaacgccaacgggccaaacagacgcccttcctgcccttccagggtgaagatcgggataaacgacaacgtgataatcagcagactgataaatagcgccggccccacttcaacagacgcatcggtgatcacctgccagcgcgttttattatccagcgtggcgtcaggatgctggtgctgccactcttccagccgtttatgcgcattctcgatcatgacgatagcagcatcgaccatcgccccgacggcaatcgcaatgccacccaacgacataatattggcatttgtacagggccaacaacgaacatgggcgcaacaagatggtacacttcctggctcgaacgcacacttccgtgtggctctggccaagaaaggcgtctggaagtagccgagcaccagcacaatccacgcgtacgtttcagcgaagagcagaataagcccgcacaccaggctgaccggatcgtcccagttcagcgtagaggtgtaacgccaccagatataacggcaagaaacggtcagcgacagcacaatcaacattagcgccgagaagcgccccggcatccgccgtacgatcagcgctaccccccacagcagcat

SEQ ID NO: 24380 - DNA, 1954 bp, Homo sapiens
  SIMILAR (1601)..(1912): 941254mologous to Escherichia coli K12 citrate lyase beta chain (acyl lyase subunit),accession number AE000166,Smith-Waterman Score=484.
cggcagcttaatggtgtgcagctcgcgtttcgggaatcctttcacaccgttacgcgtgttacggaacagcacgcggctggtgccgtggcgatccatcagcatcgaaaccagctcctgacgggcgctctgggcatcttcgctgtcgctgtttgctgcctgcaacagcggctcgatatcctgctcgccgatcatctcgccgagcatgttcagttcgtcattgctcagtttgttacctgccagcagcatggcaacggcgtccgcaaccggacgataatttttctgctcttcaacgaactgcgcaaaatcgtggaaacggttcgggtccagcagacgcagacgggcgaagtggcttttcatccccagctgttccggggtcgcgttgtttatgggcctgatttgaacgccaggcgcggcaacggggttatcaactgctcgactctagaggatccccaatttggcctgatcctgttcgtttatactatcgggattcaggtagggccgggcttctttgcctcattgcgcgtctccggattacgcctcaacctgtttgctgttctgatcgtcatcatcggtggtctggttaccgccatcctgcataaactgtttgatattccactgccggtagtgctggggattttctccggtgcggttaccaatacgccagcgctgggggcagggcagcagattttgcgcgacctgggtacaccaatggaaatggtcgatcagatggggatgagttacgcgatggcgtatccattcggcatttgcgggattttgttcaccatgtggatgttgcgggttattttccgcgtcaatgtcgagacagaagctcagcagcacgagtcttcacgcaccaatggcggcgcgctgatcaagactatcaatattcgcgttgagaaccctaacctgcatgatttagccattaaagatgtaccgattctcaacggcgacaaaattatctgctcgcgtctgaaacgcgaagaaaccctaaaagttccttcgccagataccattatccaactgggcgatttgctgcatctcgactctagaggatccccactcgatacgcaggatatcgacctgcaaatcaatagcagcgttgagaaacagtttggcgatgcaattcgcaccaccattctggacgttctcgcccgctacaacgtgcgcggcgtacagctgaatgtcgatgacaaaggcgcactggactgcattttacgtgcacgactggaagccctgctggcacgcgccagcggattgccaatgatttccgcttcgctgcaacaacgtaaaactcgcacccgccgcagcatgttgtttgtgcctggtgccaatgccgcgatggtcaacaactccttcatctacccggctgatgccctgatgtttgacctcgaagactccgtagcattgcgtgaaaaagacaccgcccgccgcatggtttaccacgcgctgcaacatccgctgtatcgcgatattgaaaccattgtgcgtgtcaacgcgctggattccgaatggggtgttaacgacctggaagccgtcgttcgcggtggtgcggacgttgtgcgtttgacgaaaaccgataccgctcaggatgttctggatattgaaaaaagagatcctgcgtatcgaaaaagcctgtggtcgtgaacccggcagcaccggcctgctggcggcgattgaatctccgctggggattacccgcgcagtggaaatcgctcacgcttccgagcgtttgatcggtatcgccctcggtgcagaagactatgtgcgcaacctgcgtacagaacgctccccggaaggaactgaactgctgtccgcacgctgtcccatttggcaggccgcgcgctctgcgggtattcaggcgttcgataccgtctattccgacgctaacaacgaagccggatttctgcagaagccgcccacatcatacagctgggctttgacggcaaatcgctga

SEQ ID NO: 24381 - DNA, 6231 bp, Homo sapiens; identical to SEQ ID NO: 13733
  SIMILAR (4291)..(4734): 801254mologous to Pan troglodytes prot GOR,accession number D10017,Smith-Waterman Score=617.

SEQ ID NO: 24382 - DNA, 3525 bp, Homo sapiens
  SIMILAR (3524)..(3090): 831254mologous to Escherichia coli Citrate lyase alpha chain (acyl lyase subunit) (citF) homolog,accession number D90702,Smith- Waterman Score=584.
  misc_feature (1)...(3525): n = a,t,c or g
atggcagccgattatgaaaatcagctcgacgagttttccctcgatgcgcccattgtcgcacatgaaaactatcaatgggctaactacgttcgtggcgtggtgaaacatctgcaactgcgtaacaacagcttcggcggcgtggacatggtgatcagcggcaatgtgccgcagggtgccgggttaagttcttccgcttcactggaagtcgcggtcggaaccgtattgcagcagctttatcatctgccgctggacggcgcacaaatcgcgcttaacggtcaggaagcagaaaaccagtttgtaggctgtaactgcgggatcatggatcagctaatttccgcgctcggcaagaaagatcatgccttgctgatcgattgccgctcactggggaccaaagcagtttccatgcccaaaggtgtggctgtcgtcatcatcaacagtaacttcaaacgtaccctggttggcagcgaatacaacacccgtcgtgaacaatgcgaaaaccaggtatccccccaacgtatcacgacggctaaactggccgcctctgtcggcgtttccgaagcggcactgtttcgccacttccccagtaagacccgcatgttcgatagcctgattgagtttatcgaagatagcctgattactcgcatcaacctgattctgaaagatgagaaagacaccacagcgcgcctgcgtctgattgagttgctgcttctcggttttggtgagcgtaatcctggcctgacccgcatcctcactggtcatgcgctaatgtttgaacaggatcgcctgcaagggcgcatcaaccagctgttcgagcgtattgaagcgcatctgcgccaggtattgcgtgaaaagagaatgcgtgagggtgaaggttacaccaccgatgaaaccctgctggcaagccagatcctggccttctgtgaaggtaagcaatcaaggctttcgggtgatgatagagatcactttgcagccgtaatcacgctcaacttcctgaatcggcggaatttgccccgcccgcgtcctgacgatcgatcgaaatcaacaacgccgcaatgcaatgttgtaggtctctttgacatgcgcttcgaggcgatccagttcttcggcaacgtcaattcgttgtgccagcagaaccagatcctgctccagacggatgttttccagttgcacctgagcatcttccagcttcgcgaccagacgctcacgctgccattgcaggatttccggcatatgggagcggactttgaccacttcggcgacgctgctcgatcaatgctttcagtgcctgaccttcgggttccgcgcgacaataaagtgttcagcgtaccattcaacgccgcgagaatttcaacggcaatggcgttaaagatcctgctccttggcttgcaggtcgactctagaggatccccctgtgaattcaatcggctgtggttcaccggtcagcagacgcgcacgttcgcgcatcctctcaatggaaaccactttaatgcccgcttcctgcagacgttctgccagttccggacgtgccgggttaactgcgataccgtggtctgtgaccagaatatcgacactggagcctggggtgatgcaggtcagtacgttatccaccagagtcggaatacgaccgcgtaccagcggcgcgacgatgatggaaagcgcagaggcaatcgcggtatcgcagtgaccaccggaagcaccacgcagtacgccgtcagagccggtcagcacgttaacgttgaactgggtgtcaatttccagcgcgctcagtaccaccacgtcgagacgatcaaccgatgcgcctttcgaaccccagttagcgtactggttggcgctgatttcgatgtgattggggttacgggccagcgattgcgcagcatggctgtcaaagctctgcacatccagcagtttgcggatcagacctttttcgtgcaggtcaaccatcgtcgcggtaataccgccaagggcgaagtcggcgcgaatatcgcggctacgcattttgtcttccaggaaacgggttaccgccagcgatgcgccgccggtgccggtttgcatggagataccttctttggagtagccagagttgacaatcacatncgcagcgctacgggcaataagcaggtcgcgccgggtaatggtcatacgggtcgcgccagcgccgattttttgagcatcggccacgcgggcaactttgacgaacaaaacaacctgatcttgctcaatgcttgccggattatgcggtttaagcgacagatcttcggctttgagctcggtaccccgctggtccctgcagacacgctgcattatttgcagaacctgcttgagcactcccgccaggacgcggcagctcgcacccttgagtctggggatgtgatgatacgcatcgccccactcgatacgcaggatatcgacctgcaaatcaatagcagcgttgagaaacagtttggcgatgcaattcgcaccaccattctggacgttctcgcccgctacaacgtgcgcggcgtacagctgaatgtcgatgacaaaggcgcactggactgcattttacgtgcacgactggaagccctgctggcacgcgccagcggtatcccggctctgccatgggaggattgccaatgatttccgcttcgctgcaacaacgtaaaactcgcacccgccgcagcatgttgtttgtgcctggtgccaatgccgcgatggtcagcaactccttcatctacccggctgatgccctgatgtttgacctcgaagactccgtagcattgcgtgaaaaagacaccgcccgccgcatggtttaccacgcgctgcaacatccgctgtatcgcgatattgaaaccattgtgcgtgtcaacgcgctggattccgaatggggtgttaacgacctggaagccgtcgttcgcggtggtgcggacgttgtgcgtctgccgaaaaccgataccgctcaagatgttctggatattgaaaaagaagacctgcgtatcgaaaaagcctgtggtcgtgaacccggcagcaccggcctgctggcggcgattgaatctccgctggnggatacccgcgcagtggaaatcgctcacgccttcgagcgtttgatcggtatcgccagcagtacgtatacgaccgcgtaccaccggagcgacgatgatggaatgcgcataggcactgggggactcgcagggaccaccggatgcaccacacaattccccgccggagccggtcagcacgttaacgttgaactgggttgtaatttgcagcgcgctcagtaccaccacgtcgagacgatcaaccgatgcgcctttcgaaccccagttagcgtactggttggcgctgatttcgatgtgattgggggtacgggccagcgattgcgcagcatggctgtcaaagctctgcacatccaacaggtggcggatcaaacctttttcgtgcaggtcaaccattgtcgcggggattccggctatggcgaaatcagaccgaatatcgcggctacgcatttttgtcttcaggaaacgggttaccgccagcgatgcgccgccg

SEQ ID NO: 24383 - DNA, 2684 bp, Homo sapiens
  SIMILAR (403)..(1158): 1001254mologous to Escherichia coli Citrate lyase beta chain (acyl lyase subunit) (citE) homolog,accession number D90702,Smith- Waterman Score=1263.
  misc_feature (1)...(2684): n = a,t,c or g
atggctattaattcaccactgaatattgctgcgcaacccggcaaaacccgtctgcgaaaatcactgaaattgtggcaggtggtgatgatgggtctggcctatctcacgccgatgaccgtatttgatacttttggtattgtctccggcattagcgacggtcacgttccggcgtcctatttgctggcgctggcgggtgtgctgtttaccgctatcagctacggcaaactggttcgccagtttccggaggccggttcggcctatacctacgcgcaaaagtcgattaacccgcacgtcggatttatggtcggctggtcatcgctgctggattgtctcttagccgtcgtgattatcgctgcaatttatgttggtttttcgctggctggctttcatgtctatatcggcatgttgtttgtgcctggtgccaatgccgcgatggtcagcaactccttcatctacccggctgatgccctgatgtttgacctcgaagactccgtagcattgcgtgaaaaagacaccgcccgccgcatggtttaccacgcgctgcaacatccgctgtatcgcgatattgaaaccattgtgcgtgtcaacgcgctggattccgaatggggtgttaacgacctggaagccgtcgttcgcggtggtgcggacgttgtgcgtctgccgaaaaccgataccgctcaggatgttctggatattgaaaaagagatcctgcgtatcgaaaaagcctgtggtcgtgaacccggcagcaccggcctgctggcggcgattgaatctccgctggggattacccgcgcagtggaaatcgctcacgcttccgagcgtttgatcggtatcgccctcggtgcagaagactatgtgcgcaacctgcgtacagaacgctccccggaaggaactgaactgctgttcgcacgctgttccattttgcaggccgcgcgctctgcgggtattcaggcgttcgataccgtctattccgacgctaacaacgaagccggatttctgcaagaagccgcccacatcaaacagctgggctttgacggcaaatcgctgatcaacccgcgtcagattgatctgctgcacaacctctacgcaccgacccagaaagaagtggatcacgcccgccgcgtcgtagaagccgctgaagccgccgctcgcgaagggcctcggcgtggtttccctgaacggcaagatggtggacggtccggttatcgatcgcgcccgtctggtgctctcccgtgcagaactttccggcatccgcgaagaataaggcaatcaaaatgacgcagaaaattgaacaatctcaacgacaagaacgggtagcggcctggaatcgtcgcgctgaatgcgatcttgccgctttccagaactcgccaaagcaaacctaccaggctgaaaaagcgcgcgatcgcaaactgtgcgccaacctggaagaagcgattcgtcgctctggtttacaggacggcatgacggtttccttccatcacgctttccgtggcggtgacctgaccgtcaatatggtgatggacgtcatcgcgaagatgggctttaaaaacctgaccctggcgtccagctccctgagtgattgccatgcgccgctggtagaacacattcgccagggcgtggttacccgcatttatacctccggcctgcgtggtccactggcggaagagatctcccgtgcttactgcgccgacagtcaccacggaccatttgcaatggtgaacaatatgaccgacttaaccgcgcaagaacccgcctggcagacccgcgatcatcttgatgatccggtgattggcgaactgcgcaaccgttttgggccggatgcctttactgttcaggcgactcgcaccggggttcccgttgtgtggatcaagcgtgaacaattactggaagttggcgatttcttaaagaaactgccgaaaccttacgtcatgctgtttgacttacacggcatggacgaacgtctgcgcacacaccgcgaagggttacctgccgcggatttttccgttttctaccatctgatttctatcgatcgtaaccgcgacatcatgctgaaggtggcgctggcagaaaacgacctgcacgtaccgaccttcaccaaactgttcccgaacgctaactggtatgagcgtgaaacctgggatctgtttggcattactttcgacggtcacccgaacctgcgatggatcccctnccctaaaaagatcccccacgcccaccaccagaaccacgaccagaatcaaccagacccagtgcttcaaatgctggtcgagattgtgcaaccacggcgcaatcacctgaccaccagcgtaaccaatagtggtaaaaatcaacgcccaggcaaatgcgccgagaatattcagcggcagaaagattttcggcggcagctggctggcaccaatcagcgtcgggccaatcacccgaaagccatacataaagcgcgtaccaatgacaaacagatacggatggcgttggataagtttctgcgcccgctcaattttatcctgatgtttcgagaaacggcgtaacagcttgccgccaaaccgccgcccgcacagatagagcacctggtcgccaatcatgccgccaagcgccacagaaagtaccaccagcgggaactttaatagcccctgatgcgccgcaacgcctcccagcaaagtcacggtttcaccttccgccaggctacc

SEQ ID NO: 24384 - DNA, 436 bp, Homo sapiens
  SIMILAR (144)..(362): 521254mologous to Escherichia coli Hyf F,accession number M63654,Smith-Waterman Score=167.
agcaactgctgatctggtccgccagcgcctttatcccaaagtgctgctggtaccgttaatcatgacttacgctgcacgaaatatccccagaacatcccggaaaaagcgttattcggcatttacggtcagcgttcatcgctggaagctgctggaagtacatcattatttgtactgttggtgtcgcttttggtctgttcgtaccgtgctggtatacgccaacgccgccagcgttatgccgcaggcagaatggcgatattctggagcgaggttcttaagcaatcgtccttgcttgacccacattaatgctgttggcctttgtgtttttgctaattggctttggtaccaaaccgggctatttcccatgcacgcctggctgccggatgctcacagtgaacgccgagtccggtcagcgccctgctctccgccgtattgctga

SEQ ID NO: 24385 - DNA, 3243 bp, Homo sapiens
  SIMILAR (2674)..(3240): 991254mologous to Escherichia coli sulfite reductase (NADPH) flavoprotein beta subunit,accession number U29579,Smith-Waterman Score=999.
atggagcgcgatgagcgagttacacggcgacgcacgttatctggtttatggcggcatcctgtttgccgcgtgggggaaatcggcccagctaccgatgcaagcgtggctaccggacgcaatggaagcgccaacaccgatcagcgcctatctccacgccgcatcgatggtgaaagtgggcgtttacatttttgcccgcgctattatcgacggcggcaatatcccgcatgtgattggcggcgttggcatggtcatggcactggtcaccattctttatggctttctgatgtatttgccacagcaggatatgaagcggtgctagcctggtcgaccatcactcaacttggctggatgttcttcggcttgtcgctctccatcttcggctcgcggctggcgctggagggcagcatcgcctacatcgtcaaccacgcgttcgctaaaagcctgtttttccttgtagcaggtgcgctgagttacagctgcggcacgcgcttgttgccgcgtctgcgtggcgtattgcacaccctgccgttgccaggcgtgggtttctgcgtggcagcgctggcgattaccggcgtgccgccgttcaacggcttcttcagtaaattcccgctgtttgctgccggttttgcgttgtcagtggagtactggatcctgctgcccgccatgattcttctgatgattgaatcggtcgccagtttcgcctggtttattcgctggtttggtcgcgttgtgcctggcaaaccgagcgaggccgtcgccgatgccgcaccgctgccaggatcaatgcgcctggtgttgattgtactgattgtgatgtcgctgatttccagcgtaatcgccgcgacctggttgcacgtcaaaagctatcgccgatttgcccgcctgggtgaagataccgcaaaagccctggcagctggcgctgatgtcgtgcattttgacgtcatggataaccactatgttcccaatctgacgactgggccaatggtgctgaaatccttgcgtaactatggcattaccgcccctatcgacgtacacctgatggtgaaacccgtcgatcgcattgtgcctgatttcgctgccgctggtgccagcatcattacctttcatccagaagcctccgagcatgttgaccgcacgctgcaactgattaaagaaaatggctgtaaagcgggtctggtatttaacccggcgacacctctgagctatctggattacgtgatggataagctggatgtgatcctgctgatgtccgtcaaccctggtttcggcggtcagtctttcattcctcaaacactggataaactgcgcgaagtacgtcgccgtatcgacgagtctggctttgacattcgactagaagtggacggtggcgtgaaggtgaacaacattggcgaaatcgctgcggcgggcgcggatatgttcgtcgccggttcggcaatcttcgaccagccagactacaaaaaagtcattgatgaaatgcgcagtgaactggcaaagtttgaagatattcgcggcgtcgcttttgatcttgatggtacgctggtcgacagtgctcctggtcttgctgctgcggtagatatggcgctgtatgcgctggagttgcccgtcgcaggtgaagaacgcgttattacctggattggtaacggcgcagatgttctgatggagcgcgcattgacctgggcgcgtcaggaacgtgcgactcagcgtaaaacaatgggtaaaccgcccgttgatgacgacattccggcagaagaacaggtacgtattctgcgtaaactgttcgatcgctactatggcgaggttgccgaagaggggacgtttttgttcccgcacgttgccgatacgttgggcgcgttgcaggctaaaggcctgccgctaggcctggtcaccaacaaaccgacgccgttcgtcgcgccgctgctcgaagccttagatatcgccaaatacttcagcgtggtgattggtggtgatgatgtgcaaaacaaaaaaccgcatccggacccgctgttactggtggctgagcggatgggaattgccccacaacagatgctgtttgtcggcgactcacgcaatgatattcaggcggcaaaagcggcaggcctcgacgcccaggccagacgcaaaaatgccgggtattactattatctccggctcgcaaaacggcaaatgcgcgccggggttgctgaagccttacgtgatgatttattagcagcaaaactgaacgttaagctggtgaacgcgggcgactataaattcaaacaaatcgccagcgaaaaactgctcatcgtagtgacgtcaacgcaaggggaaggggaaccgccggaagaagccgtcgcgctgcataagttcctgttctccaaaaaagcgccaaagctggaaaacaccgcgtttgccgtgtttagcctcggcgatagctcttatgaatttttctgccagtccgggaaagatttcgacagcaagctggcggaactgggtggtgaacgcctgctcgaccgtgtcgatgccgatgttgaataccaggctgctgccagcgagtggcgcgcccgcgtggttgatgcgcttaaatcgcgtgcgcctgtcgcggcaccttcgcaatccgtcgctactggcgcggtaaatgaaatccacaccagcccgtacagcaaagacgcgccgctggtggcgtggcgcttaccgaacgtggaaggccgcgcccgtgccggtggtgcctccagcttcctcgctgaccgcgtggaagaagagggcgaagtccgcgtatttatcgaacataacgataacttccgcctgccagccaatccagaaaccccggtgattatgattggcccaggcaccggtattgcgccgttccgcgcctttatgcagcaacgcgccgccgacgaagcgccaggtaaaaactggctgttctttggtaatccgcactttacggaagacttcctgtaccaggtggagtggcagcgctacgtcaaagatggcgtgctgacacgtatcgatcttgcctggtcgcgcgatcaaaaagaaaaagtttacgtacaagacaaactgcgcgaacagggcgcggagctgtggcgctggatcaatgatggtgcccacatttatgtctgcggcgacgctaatcgcatggcgaaagacgttgagcaggcacttctggaagtgattgccgaatttggtggcatggacaccgaagcggcggatgaatttttaagtgagctgcgcgtagagcgccgttatcagcgagatgtctactaa

SEQ ID NO: 24386 - DNA, 2124 bp, Homo sapiens
  SIMILAR (83)..(211): 471254mologous to Escherichia coli Hyf D,accession number M63654,Smith-Waterman Score=86.
gcttcattccagcgctccaatagtcatgacaaagtaaggagaatagttgcagaggagggtcgtacagcaagaaacctaatagcttggagtgttccactagaaagcaaagatgatgatgacggaaccgtttgcgctagccgcattgaccgagttacacgccgacgcacgttatcttggtttaggcggccatcttgtttgccgcgtggggaaattcgggccagcctaccaatgcaagcgtggctaccgaacgcaatggaagcgccaacacggatcagcgcctatctccacgcggcatcgatggtgaaagtgggcgtttacatttttgcccgcgctattatcgacggcggcaatatcccgcatgtgattggcggcgttggcatggtcatggcactggtcaccattctttatggctttctgatgtatttgccacagcaggatatgaagcggttgctagcctggtcgaccatcactcaacttggctggatgttcttcggcttgtcgctctccatcttcggctcgcggctggcgctggagggcagcatcgcctacatcgtcaaccacgcgttcgctaaaagcctgtttttccttgtagcaggtgcgctgagttacagctgcggcacgcgcttgttgccgcgtctgcgtggcgtattgcacaccctgccgttgccaggcgtgggtttctgcgtggcagcgctggcgattaccggcgtgccgccgttcaacggcttcttcagtaaattcccgctgtttgctgccggttttgcgttgtcagtggagtactggatcctgctgcccgccatgattcttctgatgattgaatcggtcgccagtttcgcctggtttattcgctggtttggtcgcgttgtgcctggcaaaccgagcgaggccgtcgccgatgccgcaccgctgccaggatcaatgcgcctggtgttgattgtactgaatgtagatgtcgctgatttccagcgtaatcgccgcgacctggttgcacgtcaaaagctatcgcctgtcatgcggattttacgcctgccagtcactggtgctggtgtctatttccccactctctcgtgcctgttcgccgcagagcaactgctgatctggtccgccagcgcctttatcaccaaagtgctgctggtaccgttaatcatgacttacgctgcacgaaatattccccagaacatcccggaaaaagcgttattcggtccggcaatgatggcactgctcgcggcgttaattgtcctgctttgcgcatttgtcgttcagcccgtgaagctaccgatggctaccgggctgaaaccggcgctggcggtagcgttaggtcattttctgcttggcctgctgtgcattgtcagccagcgcaatatcctgcggcaaatttttggttactgcctgatggaaaacggctcccatctggtgctggcgcttcttgcctggcgagcaccggaactggtggaaataggtatcgctaccgacgccatcttcgccgtcattgtgatggtgttactggcaagaaaaatatggcgtacccacggcacgctggacctcacgccgctgcttttttcgctgctctgttttgcctgccggaaacggagactttctgcgactcgcacggtgaccgtattacatagcttagggatcacactgctgctgattctggcactctgggtggtccaaactgccgctgatgcaggagaaatattcgctgcgggactgtggcttcatattgatggtctgggcggtttgttcctcgccattcttggtgtgattggctttctcaccggtatttactcgattggctacatgcgtcatgaagtggcacacggcgagctttcacccgttacgctgtgcgattactacggtttcttccatctgtttttgttcaccatgctgctggttgttaccagcaataacctgattgtgatgtgggcggcgatcgaagccaccaccttaagctcggcgtttctggtaggcatttacggtcagcgttcatcgctggaagctgcatggaagtacatcattatttgtactgttcgtgtcgcttttggtctgttcggtaccgtgctggtatacgccaacgccgccagcgttatgccgcaggcagaaatggcgatattctggagcgag

SEQ ID NO: 24387 - DNA, 1698 bp, Homo sapiens
  SIMILAR (217)..(507): 721254mologous to Escherichia coli hyf E,accession number M63654,Smith-Waterman Score=327.
cgctggcgattacccggcgtgccgccgttcaacggcttcttcagtaaattcccgctgtttgctcccggttttgcgttgtcagtggagtactggatcctgctgcccgccatgattcttctgatgattgaatcggtcgccagtttcgcctggtttattcgctggtttggtcgcgttgtgcctggcaaaccgagcgaggccgtcgccgatgccgcaccgctgccaggatcaatgcgcctggtgttgattgtactgattgtgatgtcgctgatttccagcgtaatcgccgcgacctggttgcacgtcaaaagctatcgcctgtcatgcggattttacgcctgccagtcactggtgctggtgtctattttcgccactctctcgtgcctgttcgccgcagagcaactgctgatctggtccgccagcgcctttatcaccaaagtgctgctggtaccgttaatcatgacttacgctgcacgaaatattccccagaacagtcccggaaaaagcgttattcggtccggcaatgatggcactgctcgcggcgttaattgtcctgctttgcgcatttgtcgttcagcccgtgaagctaccgatggctaccgggctgaaaccggcgctggcggtctcgctaccgacgccatcttcgccgtcattgtgatggtgttactggcaagacacactctggcgtacccacggcacgctggacgtgaacaacttgcacgcgctgaagggcataatgagctgcagttattcctcgtgatgttcgctttactcctgctcacgccgatgcttatctcgttgctcctgttttggctggcggaaccggagaccatacatagcaatacgcagcactctgggtggtccaaagtgccaatcttcaagagaaaattcactgcggcctgtggcctaattgatgccctgaacagttgtcctcacatcctgtgtccaggacatcaaccggcttacccgatggtcaacgtcagaaggccccggcagaacacgacgggggccaacaaggaccaacgtaaaacacagagtggagcacgcaccaaagaagtgggcacaacccctaaccgattgacgaaggccgactggaaacgacctataaggacaaaggagcggatcaagatacagagaggggtaactcagatcgtggccgccctctcgcccttttcgcgtatcgaaatagagaggagaaggaaaggagagcacgaaaagaaactgctgcaagctagcagctggacgtcacatgtggcaacatcatcgttccaccatcaacaccacgtcagcaccagcagcaccatatcatgcagcacacacgtcaccgataaggtgcatcgctggggccaattccatcgtcccatcagcacattggcacacactgttcgtgtttggcatggcaagcccggtattgagcacacaccaactcgtattcggcgtcagcacatcttgccccagtttcttctggctgttgttttgaaactcaggtgccgcaacggtgtgcagccaactgccagcccgcctagtgcctacactgtaaagggttgtgagggtcagggcctgcagaaacctagaaatgcactgaggcacaacccggaccccaaggcgacggcatccctgagcacggcgcccctccaagatgccgaccccgagggccccactgttcacacccgcgacacgacgaccatagctgcaagctag

SEQ ID NO: 24388 - DNA, 3944 bp, Homo sapiens; identical to SEQ ID NO: 17667
  SIMILAR (3093)..(3686): 961254mologous to Escherichia coli GAD alpha protein,accession number M84024,Smith-Waterman Score=1061.
  misc_feature (1)...(3944): n = a,t,c or g

SEQ ID NO: 24389 - DNA, 1281 bp, Homo sapiens; identical to SEQ ID NO: 17662
  SIMILAR (922)..(1275): 941254mologous to Escherichia coli similar to,accession number D90883,Smith-Waterman Score=565.

SEQ ID NO: 24390 - DNA, 175 bp, Homo sapiens
  SIMILAR (131)..(90): 1001254mologous to Escherichia coli GltL,accession number U10981,Smith-Waterman Score=73.
ccgattcgccactttacggcaaagcccattcgtgggtcaccaccatcatggtcattccttcgttcgccagttccaccatacgtccagtactcgttgatcatctccggatccagcgccgatgtcggttcatcacgctcaccaatggtgaggcggtacggaagaaatcggccagcac

SEQ ID NO: 24391 - DNA, 247 bp, Homo sapiens
  SIMILAR (101)..(127): 771254mologous to Escherichia coli GltL,accession number U10981,Smith-Waterman Score=35.
aaccgacatcggcgctggatccggagatgatcaacgagtactggacgtatggtggaactggcgaacgaaggaatgaccatgatggtggtgacccacgaatgggctttgccgtaaagtggcgaatcggcaggcggcgcggtaaaaccgttaagcgtgagttgattatcgcggacaatgtgcacggcgaaagcggtctcgacgcccggcattaccggaaccgacattcgcaccgcaaaactgtacggcg

SEQ ID NO: 24392 - DNA, 551 bp, Homo sapiens
  SIMILAR (1)..(201): 971254mologous to Escherichia coli GltL,accession number U10981,Smith-Waterman Score=329.
gtgctgaccgactgctcaaccgaagtgaaaaaaggcgaagtggtggtggtttgcgggccgtctggttccggcaaatcaacgctgattaaaaccgtcaacggcctcaaaccggtgcagcaaggtgaaatcaccgtcgatggtatcgtggttaacgacaagaaaaccgatctggcaaagctgcgttcccgcgtcgggatgatacccttgaagtcaaagctatcattaaaaggtgtccgatttacttacttgggggggaaacctgggaaacttgcggtgccggtaccactcggttatgtagtgatggcgcaggatctacagcttgcggggtgtgaatacagcttttccgcgataaaaattgcagcaggcggtcagtttcttcccgtgattggcgccattctgaacataaccgataatgtcatatatgaccaggagattgagttcacattcggtcgcctatccttttgcggattgcctcgttggcccaaaggggaagtagagcgaatctgggcctgcggttatcgcgaggaagtccctgttattgcggtaaacaa

SEQ ID NO: 24393 - DNA, 766 bp, Homo sapiens
  SIMILAR (375)..(581): 921254mologous to Escherichia coli K12 putative tRNA synthetase,accession number AE000169,Smith-Waterman Score=316.
cgatgctgtttgacgaaccgacatctgcgctgtatccggagatgatcaactaagtactggacgtgatggtggaactggcgaacgaaggaatgaccatgatggtggtgacccacgaaatgggctttgcccgtaaagaggcgaatcgggtgatctttatggacgagggtaaaattgtcgaatactcgccgaaagacgctttcttcgatgatccgaaatcggaccgcgcaaaagacttcctcgcgaaaatcctgcattaatcactctggcgcgcatacccaattgcgcgccatctcacgctttatcgtttcgcccctcgtatctgttacatcctggcgttacccttgtcgcaaagaagcacacctcaaggagcaacaatggcactgccaattctgttagattgcgacccaagtcatgacgacgctatcgcaatagttctcgccctcgcctcaccagagcttgatgtcaaagcaattacgtcttccgccggaaaccacacaccacaaaaaaccttacgcaatgttctgcgtatgctgaccttgcttaatcgcaccgatattccggtagcaggcgggcgcggtaaaaccgttaatgcgtgagttgattatcgcggacaatgtgcacggcgaaagcggtctcgacggcccggcattaccggaaccgacattcgcaccgcaaaactgtaccgcggtagagctgatggcgaaaacgctgcgtgaaagtgcggaacctgtcaccattgtgtctaccggaccgcaaacctacgttg

SEQ ID NO: 24394 - DNA, 979 bp, Homo sapiens
  SIMILAR (572)..(979): 991254mologous to Escherichia coli histidine transport protein hisP,accession number D90861,Smith-Waterman Score=677.
gggcgagtttgaggtgaaggaagacatgaaactgacatctaaagggcgctatgccgtgaccgcaatgcttgacggtgcgctcaactctgaagcgggcccgcatttcgagctgttccctcatctgtcgattatcgaaaacctgaccctggcgcaggtgaaagtgcttaaacgcgataaagcgccggctcgtgaaaaagccctgaaactgctggagcgtgtcgggctttctgctcacgccaataagtttccggcgcagctttccggcggtcagcagcagcgtgtggcaatcgctcgcgcgttgtgtatggatcctattgcgatgctgtttgacgaaccgacatcggcgctggatccggagatgatcaacgaagtactggacgtgatggtggaactggcgaacgaaggaatgaccatgatggtggtgacccacgaaatgggctttgcccgtaaagtggcgaatcgggtgatctttatggacgaggaacaccaacaggagcacaatgcacggcaatctgtagatgcgaccaggcatgagacgcttcgcagtgagtatatcgccctgtgctctaaagacttcctcgaaaaaccgagtgaagggtcgatcgtggtcaatggccagacgatcaatctggtgcgcgacaaagacggtcaactcaaagtcgccgataaaaatcaactgcgcttactgcgcacacgcctgacgatggtattccagcacttcaatctctggagccatatgacggtgctggaaaacgtcatggaagcgccgattcaggtgttgggcctgagcaagcaggaagcgcgcgagcgggcggtgaagtatctggcaaaagtcgggatagacgaacgtgcgcaggggaaatatccggtgcatctttccggcggtcagcaacagcgtgtttctatcgcgcgggcgctggcgatggaaccggaagttttactgtttgatgaacctacctcggcgctcgatcctgaactg

SEQ ID NO: 24395 - DNA, 4119 bp, Homo sapiens
  SIMILAR (3523)..(4104): 981254mologous to Escherichia coli K12 putative invasion protein,accession number AE000369,Smith-Waterman Score=978.
atgacgctggttcagtctctgctcaatggcaacaaaatcctctgttgtggtaatggaacttccgctgccaatgcacagcatttttgctgccagcatgatcaaccgtttcgaaacggagcggccagcttacctgccattgcactaaatactgataatgttgtcttaacggcgattgccaacgatcgcttacatgatgaagtgtatgcaaaacaggtgcgggcgctgggtcatgcgggagatgtattgttagccatttccacccgtggcaacagccgcgatattgttaaagcagttgaagccgccgttacgcgtgatatgaccattgtggcattgaccggctatgacggcggcgaacttgcaggtttgttagggccacaggatgtggagatccgcattccttcgcatcgtagtgctcgcattcaggaaatgcatatgctgacgagtagggtgaagaatcatggaggcagttttggaatagcgtttgcaatctttgaagcaccttgtgtctgtcactttccagcactgggaactcaggggcttaattggacttacagttccatgtggctggggaagcctcacaaacatgatggaaggcaaggaccttcgcggttgattttcgctttaatgttacgcggagcaggagacgcccataccgaccgggcaggatgcgccgtgacgtggcaggcgaatcacgcggatgtcgtgagcgaagtatttaccaccaaactgcgcacccagaccaagattttgcgcttcgatcagcaattctttttccagttccacatcgcggaacgcctgaccgtgctcattcccttccgttggcagttcatcatagtatttcgcggaaggacgaagcgagcggaagtattatggtattacgtgcccctgtatcacgttattatagctgatcgaatctgcagccaaaaagaagaagaaggaggcaggaagagaaggaagagaggaggaggaggaggaggaggaggaggaggaggaggaggaagaagaggaggagagaagaagcaagcaagaggagaaaaacagggctgctttccctgtgatgcggccggctgggtcacctacctgcatcagattctgtacggagaaaatatcgtcaagttccgcttcagtcaacagaccgcgttccagaacgacttcacgtacactcttaccggtttcggcacagattttacccacgatgtcaccgttgtggtgaccgatgaacgggttcagattatggattactacgattccagtctggaaaccgccatcgatcatgataattaccttgagtttcaacaggttttatctgacatcggcgaggcgctggaagcgcgctttgtgctggaagataagctgattctgctgaccaatgcggtactgccgctgcgtctggaaaatgacgagttaattgtcggcagtgaagatggtattgacccggtttcgctggcggccctgacgcgtaaagtcggacgcaaagtgcgttacgtcattgttctgcggggacaaattgtcacagggttacgtcactggtatgcacgccgacgcggtcacgatccgcgggcaatgttgtacaatgcggttcagcatcagtggctcacggaacagcaggccggtgaaatctggcggcaatatgtgccgcatcagttcctgttcgccgaaatactgaccacgctcggtcatattaatcgttcagcaattaacgtgtgttattgcgccatgaacgcagttctctgccgctcggcaagttttggtcaccgaaggcgttatcagccaggaaacgttggatcgcgtcctgacaattcaacgcgaattacaagtttcgatgcaatcactattactcaaagcaggttgcgcaactggagtccgaaaatgaaggagaataaccttaatcgcgtcatcggatggtctggtttactgctgacgtctttattggagtaccagcgcactcgcagacaatattcggaccagcgcagaagagctggggctgagcgattatcccattttgttatttatccccgtctcgataaagcgctgaaggcacagaaaaataacgacgaagcaaccgccatccgcgaatttgaatatatacaccagcaggtgccggataatattccgctgactttataccttgcggaagcctatcgccattttggtcatgatgaccgggcgcggctgttgcttgaggatcaactgaaacgtcacccaggagatgcccgacttgagcgcagtctggcggctattccggttgaagtgaaaagcgttacgacagttgaagaactgcttgcccagcaaaagcgtgcgatgctgcgccgaccctgcgttgtcgcaagcgcaactgaacgatgcgacgtttgctgcatcgccggaaggaaaaacgctgcgaaccgatctgctgcaacgggcatctacctgaaacaatggtatggcacttcggtttttgaaggcatccgttgctacgactcgcacaaaggaccggttgtattccgccatcgtgagcatatgcagcgtctgcatgactccgccaaaatctatcgcttcccggtttcgcagagcattgatgagctgatggaagcttgtcgtgacgtgatccgcaaaaacaatctcaccagcgcctatatccgtccgctgatcttcgtcggtgatgttggccgggcagctccctggtatcttccgtgttcttcatgctgctgccggaacaggtttacgtttacgctggcagaaatcgcgattcagtccgctgattccgctgcggccttcggtatcgaaccgcgcgttgctatgctctcctactccaccggtacttctggtgcaggtagcgacgtagaaaaagttcgcgaagcaactcgtctggcgcaggaaaaacgtcctgacctgatgatcgacggtccgctgcagtacgacgctgcgcagaaaaaagcatcagacagtggttttattcagcagcaaaccaaagataatcagacacgcgacggtgagccagattggcgcaggcagaccgaaccagttggcgtaaccaagggcaaagaagctttcatcttcgataccgaccgtttaccgtctgaaatgatgtacgccagacctcgaacaatctctgaaagcggccggattcccggaaaaacaaatttatcagttaaacattggctgatcgtcggtatgaacgacagcaccgtgctgggcggcgtacgcgcgacggaaggtcagggctttaaagcggccgatatcatcggcattggcattaacggtgtggatgcggtgagcgaactgtctaaagcacaggcaaccggcttctacggttccctgctgccaagcccggacgtacatggctataaatccagcgaaatgctttacaactgggtagcaaaagacgttgaaccgccaaaatttaccgaagttaccgacgtggtactgatcacgcgtgacaactttaaagaagaactgggagaaaaaaggtttaggcgggggcgagtgatatacgttgaccacgcgactgatcgtcgcgtcgatttttcaccttcgtgtctgggattaacgctcacggaagatggaattcttactcaaggaaatgagcaagtttatattccacagaaagagttaggtgtattaatagtattacttgaatccgctggtcatgttgtactgaaagatatgatcatcgaatcagtatggaaaaatattattgttagtgacgagtccctgacaagatgtatctattctttgcgctgcatttttgaaaaaattggctatgatcgttgcatagaaacaatctaccggaaaggttatcgtttcagcgggcaggttttcaaaactaaaattaatgaagataatacttcagactattccatagctatattccctttcactacttcattgaatacactggatccattaatacttaatcaggaattagtgcaaatcatttcaaataaaaaaatcgatggtctctatacctatccgatggctgcgacaaattttggtaatgatcacatatctcaaaattcattcttgagcagattcaagccagattatttcgttacaggaagaataaaccagaataatgcagtgaacactttatacattgagttgatcgacgctaaaaaaactttttcctcatcgcagtaa

SEQ ID NO: 24396 - DNA, 1594 bp, Homo sapiens
  SIMILAR (571)..(1143): 941254mologous to Escherichia coli GltL,accession number U10981,Smith-Waterman Score=883.
atgcttatcgccgaaggattaatgaccgccaaaaatatcacggtgattaccaacagtctcccggcagcgtttgccctttccgaaaataaagacattactctggtcgtctgtggtggcacggtccgccataaaacgcgctcgatgcatggttccattgccgagcgttcattacaggatattaatgccgatttaatgtttgtcggtgctgatggtattgatgcggttaatggtattacgacctttaatgaaggttattctattagcggtgcgatggtcacagccgctaataaagtgattgccgttctcgattcatcgaaatttaaccgtcgcggttttaatcaggtactaccaatcgaaaaaattgacattattattaccgatgatgctgtgtcagaggtggataaactggcattgcagaagacgcgggatacctcactggtgtatgtcttatccctggccgatttcttccgtaccgcctcaaccattggtgagcgtgatggtacgcaggttgagatgatcctgtttgccggatttgtttatctcgttattagtcttagcgcgtcgttgttggtgctgaccgactgctcaaccgaagtgaaaaaaggcgaagtggtggtggtttgcggcccgtctggttccggcaaatcaacgctgattaaaaccgtcaacggcctcgaaccggtgcagcaaggtgaaatcaccgtcgatggtatcgtggttaacgacaagaaaaccgatctggcaaagctgcgttcccgcgtcgggatggtattccagcatttcgagctgttccctcatctgtcgattatcgaaaacctgaccctggcgcaggtgaaagtgcttaaacgcgataaagcgccggctcgtgaaaaagccctgaaactgctggaacggggtcgggcttttttgctcacgccaataagttttccggcgcagctttccggcggtcagcagcagcgtgtggcaatcgctcgcgcgttgtgtatggatcctattgcgatgctgtttgacgaaccgacatcggcgctggatccggagatgatcaacgaagtactggacgtgatggtggaactggcgaacgaaggaatgaccatgatggtggtgacccacgaaatgggctttgcccgtaaagtggcgaatcggaagcacacaacaaggagcacaattgcactgcaatcgctggctacatgtacgtaagcatctgctcgtggcttactacaatctggttggcattaagcctggcaaagaatcgtacatgaggctaaacgaaaaagcccttgatgatttttgtcagagcctggtcgattacttgtctgccggacatttcagtatttatgagcgcattcttcataagctggaaggcaacgggcaactcgcgcgcgccgcgaagatttggccgcaactcgaagccaatactcaacagattatggattactacgattccagtctggaaaccgccatcgatcatgataattaccttgagtttcaacaggttttatctgacatcggcgaggcgctggaagcggcatttgtgctggaagataagctgattctgctggtgcttgacgccgcccgcgtcaaacatcctgcttga

SEQ ID NO: 24397 - DNA, 1251 bp, Homo sapiens
  SIMILAR (263)..(310): 1001254mologous to Escherichia coli pyruvate,water dikinase,accession number X59381,Smith-Waterman Score=80.
tcagcttgcgaaagcggcgcgcaaatccgccagtggattatcgacactcccttccagcctgagctgaaaacgccatccgcgaagcctatgcacagctttccgccgatgacgaaacgcctcttttgcggtgcgctcctccgccaccgcagaagatatgccggaccttcttttgccggtcagcaggaaaccttcctcaacgttcagggttttgagccgttctcgtggcagtgaaacatgtatttgcttctctcgcatcatctgggtgatgttctccattgataccgaatccggctttgaccaggtggtgtttacacttccgcatggggccttggtgagatggtcgtgcagggtgcggttaaccggatgagttttacgtgcataaaccgacaatgaccgacccggactgggaaccgatatgaagaaagcatctgccatcgtcacaaacgtggcggtcgtcctgtcagggcgatatcgccgtgaacgggcatccggggaatgggcagcgctttcatttctgaggccacatacgctgaccgtgttcgtcataccccatatacagtgggatgatccccagatgtcgcgaccaatcaggtaggcatctttttcgctgtcgtacagtgcaaaggaaacatgccctgcaagtcgtcgagaaattccggccctttttcccaagtgatcggtaccgatatggtgctccaggcgattacgcgcaatcttttggcggtcaaattgacgacgttgtaaaggcaatacagacaccctcgaaatttcgacgtttcctgcgcgtatcatttgattagattcgactacccattttgcattcgggtaaatcaccacttcggcgaatgcccaacctgatgaggcgtcacagtcacacggcccgtcactatcctgccctgggaacacgggggccgcagcccacggacaggcaggaacggcccgcagtggcctctgggcaatgacttgaacaggggaaaggcgggaaacgctcggcgcgaagggctctgggcctcgtattcggagggcgaggcctgtgctcccaatgatgtaaaccgcgtgcaggccagatacttcccagagccacagccccgcaccatcccagggtccagctggagaactaaggctgaggccccaatcgctgcccctggatggtgtggagaaaggattgccctcttgatggcagtgagaaggaagggtcagcaaaaggaccaagaacaaatggtccaggtcatagtgcttcccagccttcat

SEQ ID NO: 24398 - DNA, 2387 bp, Homo sapiens
  SIMILAR (1519)..(2385): 981254mologous to Escherichia coli Mlc protein,accession number D90801,Smith-Waterman Score=1447.
  misc_feature (1)...(2387): n = a,t,c or g
atggtcatgagccagaaaaccctgtttacaaagtctgctctcgcagtcgcagtggcacgtatctccacccaggcctggtcggcaggctttcagttaaacgaattttcttcctctggcctgggccgggcttattcaggggaaggcgcaattgccgatgatgcaggtaacgtcagccgtaaccccgcattgattactatgtttgaccgcccgacattttctgcgggtgcggtttatattgacccggatgtaaatatcagcggaacgtctccatctggtcgtagcctgaaagccgataacatcgcgcctacggcatgggttccgaacatgcactttgttgcaccgattaacgaccaatttggttggggcgcttctattacctctaactatggtctggctacagagtttaacgatacttatgcaggcggctctgtcgggggtacaaccgaccttgaaaccatgaacctgaacttaagcggtgcgtatcgcttaaataatgcatggagctttggtcttggcttcaacgccgtctacgctcgcgcgaaaattgaacgtttcgcaggcgatctggggcagttggttgctggccaaattatgcaatctcctgctggccaaactcagcaagggcaagcattggcagctaccgccaacggtattgacagtaataccaaaatcgctcatctgaacggtaaccagtggggctttggctggaacgccggaatcctgtatgaactggataaaaataaccgctatgcactgacctaccgttctgaagtgaaaattgacttcaaagatgttttaaatatgaatattgaacttcgtcatctgcgttactttgttgctgttgcggaagagctgcatttcgggcgcgccgctgcccgcctgaatatttcgcaaccgccgctaagtcagcagattcaggcgctggagcaacaaattggtgcccgactgctggcacgaaccaatcgcagtgtattgctgacggcagcaggaaaacagtttcttgcagatagtcggcaaatcctgtctatggtggatgacgctgccgctcgcgctgaaaggctgcatcagggtgaagcgggggagttgcgcattggttttacttcgtcggctccttttattcgggcggtgtccgatacgttatcgctgtttcgccgtgattatcctgatgtccatttacaaacccgcgaaatgaacactcgcgagcaaatcgctccgctcattgaaggaacgctggatatgggattgctgcgtaacacagcgttaccggagtcgcttgaacacgcagtcatcgtccatgaaccgcttatggcgatgatcccgcacgatcatcccctggcaaataacccgaatgtaacgctggctgaactggcgaaagaaccctttgtcttttttgatccgcacgtcgggacagggctgtatgacgatattctcgggctgatgcgacgttaccatttgacgcccgtcatcactcaggancctacagattatttcggagcgcgaaaatatagggagtatgcggtggttgctgaaaaccagcctgggcacattgatcaaataaagcagaccaacgcgggcgcggtttatcgcctgattgatcagcttggtccagtctcgcgtatcgatctttcccgtctggcgcaactggctcctgccagtatcactaaaattgtccgtgagatgctcgaagcacacctggtgcaagagctggaaatcaaagaagcggggaaccgtggccgtccggcggtggggctggtggttgaaactgaagcctggcactatctttctctgcgcattagtcgcggggagattttccttgctctgcgcgatctgagcagcaaactggtggtggaagagtcgcaggaactggcgttaaaagatgacttgccattgctggatcgtattatttcccatatcgatcagttttttatccgccaccagaaaaaacttgagcgtctaacttcgattgccataaccttgccgggaattattgatacggaaaatggtattgtacatcgcatgccgttctacgaggatgtaaaagagatgccgctcggcgaggcgctggagcagcataccggcgttccggtttatattcagcatgatatcagcgcatggacgatggcagaagccttgtttggtgcttcacgcggggcgcgcgatgtgattcaagtggttatcgatcacaaacgtggggcgggcgtcattaccgatggtcatctgctacacgcaggcagcagtagtctcgtggaaataggccacacacaggtcgacccgtatgggaaacgctgttattgcgggaatcacggctgcctcgaaaccatcgccagcgtggacagtattcttgagctggcacagctgcgtcttaatcaatccatgagctcgatgtt

SEQ ID NO: 24399 - DNA, 1563 bp, Homo sapiens
  SIMILAR (1105)..(1515): 1001254mologous to Escherichia coli K12 putative ATP-binding component of a transport system, fragment 1,accession number AE000424,Smith-Waterman Score=694.
atgatgtacaagccgactcaggaagtgacggatggctgtggtttctccatcggtcaccagcagcagtttgcatcatggattgcctataaagtcgcgccgttcctcggcaaaaaagaggagagcgttgaagacctcaaattgattatgggtggcgctatggggctgggtaactggacgcctgcggctgaatttaatatttacgttgacccggaagcggcagaaattgtcttccagtcagggatcccggtggtgatggccggtctggatgttactcaatgcgcaggtttcgtgacggcttactggaacccgccgacgctcaatggcgtactgatgaaacttagcgttgggcaatatctggcaaaagataaaggcgcaacgatcgacgtcgccaaacgctttgacagcggcgtggcggtaggggtatgggcggcaatcagtaacgtatctaaagatgactacggcgaaggcggctttagtaaaggtttttatatctcgattccattcgacttgatgaccattggacctaaccgcaaccgcgcggtggtttcgtggacaccattgacgcgtgatggtggacaaatgctgtcacgcaaataccagctctatccaatgacggcagagcgagaagtaccgaatttatcgaccagtaacaaggatgtcattgaactacctgacaatcagtatgacctggacaaaatggtcaatatctatcccgtcacgccaggattgattgatcagttgcgcgccaaaccgattatgtcgcaggctaacccggagctggagcagcaaatcgcaaactatgaatatcgtatcgggattggtgatgacggtctgatcacccggactaacaccccgagcaaccgtagcggtggtcgacatgatatggtaaaagataaagcggcctataaatctttcctgcgtgaactgggctacctggtgccgcaaccggagcgcgtgacgaagatatcgagtatgttgagtcgatcaaaaacgctgccggagtcattgccgctcggcattcgccagcggctttcgctggcggtggcggtgattcatcgcccggagatgttaatcctcgatgagcctacttctggtgtcgatccggaagcggcagggcagagcaacgaagccgaagcgccgcccgtggtacacgacaccacccacgcgccgcgtcagggatttagcctgcgccgtctgtttagctacagccgccgcgaagcgctggaactgcgacgcgatccagtacgttcgacgctggcgctgatgggaacggtgatcctgatgctgataatgggttacggcatcagtatggatgtggaaaacctgcgctttgcggtgctcgaccgcgaccagaccgtcagtagccaggcgtggacactcaacctctccggttcccgttactttatcgaacagccgccgctcaccagttatgacgagcttgatcgtcggatgcgtgcgggcgatatcacggtggcgattgagatcccgcccaatttcgggcgcgatatcgcgcgtgtacgactggactgtcatcgtcagtgcggtacgtactgctatcggtag

SEQ ID NO: 24400 - DNA, 2445 bp, Homo sapiens
  SIMILAR (762)..(4): 941254mologous to Escherichia coli similar to E. coli multidrug resistance protein A,accession number U00006,Smith- Waterman Score=1156.
ttattgcggctcaagattagcgactgccgaagcgccgatgcggaacatttccgggtcaggtttatcgaccatgattttgaccggaaaacgctgggcaacgcggacccagttaatagaacgagacactttcggcaggccgcccagcaccaggccgccgtcatccggtagcacgccgtagccaatcgaatccactttaccctcgaaggttttgccgctgtcactcatcaggcgaatcgttgcgggtgtacctgagcgaatatttttcagatcggtttcgcggaagttggcgatcacataccagtgacgagtgtcgattagggtaaaaatagggcgcatggcagaagcaaattgcccgacggaggttttgagggaaatgacccggccatcaaacggcgcgcgaacggtcgccatttccagatgcagtttggtcagggcaatatccgcttcgaccgccgcacgctgggcaactaatgcatccacgccgctgacggcgctggcggctgactgcgcctgtaacaatacggcattaagatccgcttctgcggcgcgctgcgccgttcttgcacggtcaacatcttccgatgagacaaaaccttctttcagtaatggctcggtgcggcgtaatgtatctgtggcctgtttcgcggcggcacgggctttttctaccgtggcattaaccgagtcggcaccaaactgttgcgcgtcggggatcgtctgaatcacatcgcgcgccccgcgtgaggcaccaaacaaggcctctgccatcgtccatgcgctgatatcatgctgaatataaaccggaacgccggtatgctgctccagcgcctcgccgagcggcatctcttttacatcctcgtagaacggcatgcgatgtacaataccattttccgtatcaataattcccggcaaggttatggcaatcgaagttagacgctcaagttttttctggtggcggataaaaaactgatcgatatgggaaataatacgatccagcaatggcaagtcatcttttaacgccagttcctgcgactcttccaccaccagtttgctgctcagatcgcgcagagcaaggaaaatctccccgcgactaatgcgcagagaaagatagtgccaggcttcagtttcaaccaccagccccaccgccggacggccacggttccccgcttctttgatttccagctcttgcaccaggtgtgcttcgagcatctcacggacaattttagtgatactggcaggagccagttgcgccagacgggaaagatcgatacgcgagactggaccaagctgatcaatcaggcgataaaccgcgcccgcgttggtctgctttatttgatcaatgtgcccaggctggttttcagcaaccaccgcatactcccgtgtaaccggtaatattatgcggattgcacgtttacatattgagttccgagcacctgaagtacaagggaagttatcacgaagtggacgaactgcgcttttggttggtctaccgttcaggtgtacaggggcgtttgttctatggacctcgcaggtatctgatgccgttccgagtcgcgtcaacgtctccataccctgacaatgccccccatttaagcgctttatctcggccaatttggaccatactaaatatggatttgtaagagtattgtcggacatctcgcgggatattttgcctgcatattggccatgataccgcttagccaatatgttcttgtgcgtcgcggcgcccttgtccccccccgagctctgcgtgtaaccgtcttccgcgttccccgctggccccgggtagctttttaccccggggagggtctctggcacctgtatcgctttggtctgcacggacttcccgggacgtgtgggaaccctgtcagatagcggggggaaccagagcgggtagcaaggtccacttcctgggtaagtaaagtagttcagtccctcgtcgaccggcactgttattgcaagcaacttcctttccgtagcattgggatttccccaggattcgtcaaaagcaataatcgggccaaccaaggcacccccggggtccttgccaaggttacgtttaaagaccggtttgccagttgacacgctcgggcttggatgcttacattcatggaatgcaagaccatgcatccgttcagggtttgtcgaatcgagagtgacggttgcacttttgaaggccacggacaggataaaggagcgtgcagcagacaagacacgggcggcggcacaaccgcccataccgtcgttacgcatttcggtggcacggcgttgcgccggcaaaatcgacctgccagataagatagcggtcagccagctgctggaatctgggttaacgacgtcagtaacgcaatgatgtgttccccagctcagcaaataaaccacctgaacaacaggtaacgctgaggatccccgacttgcgataatgtgcggaaccataaatgtaggcat

SEQ ID NO: 24401 - DNA, 2162 bp, Homo sapiens
  SIMILAR (828)..(1388): 971254mologous to Escherichia coli BexD protein homolog,accession number D90735,Smith-Waterman Score=916.
atgaatgatgtagacagggttgggggcaaaaatgcctccctgggtgaaatgattactaatctttccggaatgggtgtttccgttccgaatggtttcgccacaaccgccgacgcgtttaaccagtttctggaccaaagcggcgtaaaccagcgcatttatgaactgctggataaaacggatattgacgatgttactcagcttgcgaaagcgggcgcgcaaatccgccagtggattatcgacactcccttccagcctgagctggaaaacgccatccgcgaagcctatgcacagctttccgccgatgacgaaaacgcctcttttgcggtgcgctcctccgccaccgcagaagatatgccggacgcttcttttgccgcatgtacccttgttcctggtcagaatttatcgaccagtaacaaggatgtcattgaactacctgacaatcagtatgacctggacaaaatggtcaatatctatcccgtcacgccaggattgattgatcagttgcgcgccaaaccgattatgtcgcaggctaacccggagctggagcagcaaatcgcaaactatgaatatcgtatcgggattggtgatgtgttgatggttacggtctgggatcacccggaactaaccacccccgcagggcaataccgtagcgccagtgataccggcaactgggttaacgccgatggtgcgattttctacccctatattggtcgcctgaaagtggccgggaaaacacttacccaggtacgcaacgagattacagcgcgtctcgattcagtcattgaaagcccgcaagtcgatgtcagcgtcgcggcgttccggctcgcaaaaagcgtacgtcaaccgccgaagtcagcaaatcgggtcagcagccgattaccaatattcctctgaccatcatggatgcgattaacgccgcgggcggtctgaccgcagatgcagactggcgcaacgtggtgctcacccagaatggcgtaaagaccaaagtgaacctctatgcgctgatgcagcgtggcgacctgcgccagaacaaactgctgcacccgggcgatattttatttattccgcgcaacgatgatctgaaagtcttcgtgatgggtgaagtgggtaaacagagcacgctgaaaatggaccgcagcggtatgaccctggcggaagcgctgggtaacgctgagggtatgaatcaggatgtcgctgatgcgacggggatttttgttattcgtgcaacgcaaaacaagcagaatggcaaaatcgccaatatttatcagctgaatgcgaaggacgcatcggcaatgatactcggaacggaattccagcttgaaccttacgacattgtttatgtcactaccgcgccgctggctcgttggaaccgtgtgatttctctgctgaaaaaacttgagcgtctaacttcgattgccataaccttgccgggaattattgatacggaaaatggtattgtacatcgcatgccgttctacgaggatgtaaaagagatgccgctcggcgaggcgctggaacagcataccggcgttccgggcgaggcaaaaggccttgttggtgcccccccgggggcgcgcgatgtgattcaggtggtatcgatccccaacgtggggcgggcggtcattccgaatggtcatctgctaccgcaaggcagcagtagtctcgtggaaatagcccacacacagggcggaccccttatggggaaacgctgttattgcgggaatcacggctgcctcgaaaccatcgccagcgtggacagtattcttgagctggcacagctgcgtcttaatcaatccatgagctcgatgttacatggacaaccgttaaccgtggactcattgtgtcaggcggcattgcgcggcgatctactggcaaaagacatcattaccggggtgggcgcgcatgtcgggcgcattcttgccatcatggtgaatttatttaacccacaaaaaatactgattggctcaccgttaagtaaagcggcagatatcctcttcccggtcatctcagacagcatccgtcagcaggcccttcctgcgtatagtcagcacatcagcgttgagagtactcagttttctaaccagggcacgatggcaggcgctgcactggtaaaagacgcgatgtataacggttctttgttgattcgtctgttgcagggttaa

SEQ ID NO: 24402 - DNA, 1389 bp, Homo sapiens
  SIMILAR (963)..(358): 661254mologous to Escherichia coli IS5 39.3kDa protein,accession number U70214,Smith-Waterman Score=663.
atggctggcaatcgccgctttatgtgcacgccgaaaacgcacgggttatcaatatcacaacatggcacattcccggaacacgctgggtgcaaaattcgttgcgctggcagatctggcagagttcgacctgcggaactgctggccccttataccggtgatatcgccgctgaaggaatcagcaaagccatgcgcggaggcgcaaagttcctgcatcacggcattaagcgccagcaacgttatgtggcggaagccattactgaagagtggcgtatggcacccggtccgcttgaagtggcctggtttgcgggcgtcatctatcatctgtattactatcgtgcgcgcttcttttgcgccgcgcaaccccttgtatctggctttcacgaagccgaactgtcgcttgatgatgcgaaatgggtgctccaccctggcccggatgctggctttcatgtattcgatgttgatggccgttttgttcttgcgtggatgctgtttcaaggttcttaccttgccggggcgctcggcgatcagccagtccacatccacctcggccagctcctcgcgctgtggcgccccttgcagattacccagctgattgaggtcatgctcgttggccgcggtggtgaccaggctgtgggtcaggccactcttggcatcgacaccaatgggggcctttatgccaaagggccactgattgcctttcttggtctgatgcatctccggatcgcgttgctgctttttgttcttgggcgaactgggtgcgcttatgatggtggccgtccgcagcttgctgagaaactgtacagcgaactgcgtgcacaaggtatcgaagtgctgctggatgaccgcaaagagcgtccgggcgtgatgtttgctgatatggaactgatcggtattccgcacactattgtgctgggcgaccgtaacctcgacaacgacgatatcgaatataaatatcgtcgcaacggcgagaaacagttaattaagactggtgacatcgtcgaatatctgaacgctgcgcttttgattgctgtgacagtgttgaccagcatggaagccagcgacctggtcgatcttggcatgacactgtcacctgcagattatgcagaacgtctggcggcactgacgcaaaaatgtggccttgatggtgtggtgtgttctgctcaggaagctgtgcgctttaaacaggtattcggtcaggagttcaaactggttacgccgggcattcgtccgcaggggagtgaagctggtgaccagcgccgcattatgacgccagaacaggcgttgtcggctggtgttgattatatggtgattggtcgcccggtaacgcaatcggtagatccagcgcagacgctgaaagcgatcaacgcctctttacagcggagtgcatga

SEQ ID NO: 24403 - DNA, 576 bp, Homo sapiens
  SIMILAR (576)..(358): 1001254mologous to Escherichia coli IS5 39.3kDa protein,accession number U70214,Smith-Waterman Score=377.
atggctggcaatcgccgctttatgtgcacgccgaaaacgcacgggttatcaatatcacaacatggcacattcccggaacacgctgggtgcaaaattcgttgcgctggcagatctggcagagttcgacctgcggaactgctggccccttataccggtgatatcgccgctgaaggaatcagcaaagccatgcgcggaggcgcaaagttcctgcatcacggcattaagcgccagcaacgttatgtggcggaagccattactgaagagtggcgtatggcacccggtccgcttgaagtggcctggtttgcgggcgtcatctatcatctgtattactatcgtgcgcgcttcttttgcgccgcgcaaccccttgtatctggctttcacgaagccgaactgtcgcttgatgatgcgaaatgggtgctccaccctggcccggatgctggctttcatgtattcgatgttgatggccgttttgttcttgcgtggatgctgtttcaaggttcttaccttgccggggcgctcggcgatcagccagtccacatccacctcggccagctcctcgcgctgtggcgccccttg

SEQ ID NO: 24404 - DNA, 4707 bp, Homo sapiens
  SIMILAR (2203)..(2787): 971254mologous to Escherichia coli No definition line found,accession number U00039,Smith-Waterman Score=940.
  misc_feature (1)...(4707): n = a,t,c or g
atggcgcgaacactggcgcacgagcttatcgactttggtgaaatcaaacgcggtttgttaggcatcaaaggcaccgagatgagtgccgatatcgccaaagccttcaaccttgacgtgcagcgtggcgcgtttgtcagcgaagtgttgccaggttctggctcggcaaaagcgggcgtcaaagcgggcgatattattaccagcctcaacggcaaaccgctgaatagctttgctgagttgcgctctcgtatcgcgaccaccgagccgggcacgaaagtgaagcttggcctgctgcgtaacggcaaaccactggaagtagaagtgacgctcgataccagcacctcttcgtcggccagcgctgaaatgatcacgccagcgctggaaggtgcaacgttgagcgatggtcagctaaaagatggcggcaaaggtattaaaatcgatgaagttgtcaaaggaagcccagctgctcaggctggcttgcaaaaagacgatgtgatcattggcgtcaaccgcgatcgggtgaactcgattgctgaaatgcgtaaagtgctggcggcaaaaccggccatcatcgccctgcaaatttttccggtggatcatagaggtgcgatcggagggcagaccactgacattcccccagatcccagcggcattaaccacgacaggtgcatgaagggcctgagtttcgccggtgagatggttacgtacacgaacaccgcacaccgtcgcgccttcacgaatcagccccgtgacttcatgagcgtggcctggttgggtaaaggtattgccattctgccctcggttggtgaagtgcgttctccggttgcgggtcgaattgcttcgttgttcgccacattacacgccattggcattgagtcagatgatggtgtggagatcctgattcatgtcggtatcgacaccgtaaaactggacggccaaatcttttccgctcacgtcaacggcgaagccgggctgaagcgggtggtgaaaaaggaacacgcggacggcagcgtcacgcagagtcagtttgacgccgtgggcaggctcagggcacagacggcatccgcaggcaggacaacagagtacagcccggatgtgagcgatgtacgcatcaattgcttcgtcagtgaacacgccaccggctttcaggaactcgcggtccagatccagttcgttcagtgcttcttccagagagcctgcaacctgtgggatctctttcgcttcttctggcggcaggtcatacaggtttttgtccatggcttcgccgggaccaacttcgtgcagatgctggcgatcttcttgatcccaacggcgctgtgctttgcctttggcgtggtgatgtgggcagaagttcagggtaatcctcatctgctggcactgggcacggacagcagcatcaatatggaaggtaaagagagccgtttcggcgtgctggtcagtagcctgtttgcggtcgtgacgacggcggcttcctgtggcgcggtgattgtgaagagttacaaaaccagcaatatctcccggttgatacagatggccattgacatcaggttgaataatgtcagcaggcccggagacacaatcggcactgatacaaggaatcccccacgacaaggcttcaatccctttttattctttgccacgggttccgtcggtgagattatgccgcgtgaacatgaagattattcctgggaatactcggaaatttgttcacagcaatacgccggtacgatttccaagtggtgcgaaaagctttcttgcgtcacccggaaaaccccgcaaggcattcgtgggcaggatgaatttgttcgcgtgagttgggatgaggcgctggatcttattcaccaacaacataaacgcattcgtgaggcttatggtccggcatcgatttttgctggttcggtgacgaagcagcgacagacctccgtggaacgcctggtacagcaatttgctgatgcaggtatccggaagtctgctgacgactctgtgtctgcacaagagaaacagactttgattgaccacctgaatcagaaaaattcaggcccggacaaattgacgctgcaacgtaaaacacgcagcacccttaacattcctggtaccggtggaaaaagcaaatcggtacaaatcgaagtccgcaagaaacgcacctttgtgaaacgcgatccgcaagaggctgaacgccttgcagcggaagagcaagcgcagcggcttattgtcgtgttcggttttgcgatgatcccgcactcgaatttcatcgatataaccgccttcccgcaagcctccgtctttttccgcgatgtcttgcttaccattccattttgcttcttttctgcagtatttattcaggtacttaacccaatgaatattgcctatcgtaaacgggaagcggataaagtactggcaacccggctcgcgctgcgtacccaccgaattagttatatcacgctcatcgcggtgatcctgttttttgccttttcgtttaccttctcaattagccacgaagaagccgtttctgcctttgaacaaaatatctcagcactggcgctggccgcgcaggtgatccctgggcatatcattcatatcacctctacggtgcttaatatctttgccgtactgaccgcattctttggcatttatctcggtttccacgaggccattaaaggcattattctcaatctgttaagccgaattattgataccaagaaaattaactcacgcgtgctgactctggcgatctgcgcttttatcgtcattacgttgacgatttgggtttcgtttcgtgtatcggtgctgggtgaaattgacgttaacgaaatggcgcagatcaaatccgctctggttttgctgcatccgataatcagcaaggatcatcagcggatcgctgttcggcacggcatcggcaaaggttttttggtccggaaaaagtcccagcaataccagcaactggatgatgaatatctacaagctcgctatattgatgtggacgatcttctgcatcgcaccctggtccacctgacccaaacgaaagaagaactcccgcagtttaactcgccaactattctactggcggagaacatttatccttccacagtactgcaactggatccggcggttgtaaaaggtatctgccttagcgccggaagtccggtatcccacagcgccctaatcgcccgtgaactggggattggctggatttgccagcagggtgagaaactgtatgcgatacaaccagaagaaacgctaacgctggacgttaaaacgcaacgtttcaaccgtcaggcaacttcacgaagaactggcgcgtattcgccgtcaggctggagctatgacaacggcgaagattacgccgatgtccgttgtgtcgctgcgccggtgtttaacgccaataacgagcttaccgctgcgatctcggtggtcggtacccgcttacaaatcaatgaagaataccgtgattatctggcgggcaaggccattgcctgcgccagggatatttcacgtctcctcataacaatggagaacatcgtgaccgaaacgaccgatcgcgaactgaccaccgttatgtctaacagcttcggcttcggcggcaccaacgccacgctggtcggagtagaccgccagcgtcgcatccgacgttacgcgccaatgcgctccggcactaacgcaaacaggaacctgatggttccctttttcacatcattgacaatcgccgccagttccaggcaaacttcccgctttgtcgatttccttctgaaaagacggagaaattatgagccagaaattaaaagtcgtcactattggtggcgggacagctataccccggagttactggaaggatttattaagcgttatcacgaattgccggtcagcgaattatggctggtggatgtcgaaggtggtaaaccgaaactggatattattttcgatctctgccaacggatgattgataacgctggcgtcccgatgaagctttataaaacgctggatcgccgcgaacgattgaaagatgctgatttcgttactacccaactgcgcgttggccaattaccggcgcgtgaactggatgaacgtattccattaagtcatggttatcttggcgccgtccagttatcgtcgattggtcgtcgatgcaactgccgtaactggcagtcgtttcttggttgcatcgantgtctttggttcgtggctgaaacgaaaaatggtgaggcggcgattgtgatcggcacccgctccgcgctgtttacgccgtttaaaaatctcggcgtgattgtcattgatgaagagcacgacagctcctacaagcagcaggaaggctggcgctatcatgcccgcgacctggcggtgtatcgtgcgcacagcgagcaaatcccgattattcttggctccgcaacgcccgcgctggaaacgttatgcaacgtccagcagaaaaaataccgcctgctgcgcctgacccgtcgggcagggaatgcgcgtccggcaattcaacatgtgctggatttaaaaggtcagaaggtgcaggcaggtctggctccggcgttaatcactcgtatgcgccagcatttacaggctgataaccaggtcattctctttcttaaccgccgtggctttgcgcctgcactgctgtgcacgactgtggctggattgccgaatgcccacgttgcgatcactactacacgctgcatcaggcgcagcaccatctggctgccaccactgtga

SEQ ID NO: 24405 - DNA, 1419 bp, Homo sapiens
  SIMILAR (837)..(361): 961254mologous to Escherichia coli Probable oxidoreductase OrdL (EC 1.-.-.-),accession number D90768,Smith-Waterman Score=811.
ttactcaaacaaattactatgcagtttttgcaccacctgctcggcatcttcgccgggcaccaggaagcacaggttatggctggatgcgccataacaaatcatgcgaatgttgaacggttccagtacgccgaatacctctttgccaacgccgcaggcttttgacaggtcattgccaatcaacgcgaccagcgccagaccttcttccacctccacccgacacagtgcggaaagctccatcagcagagattgcgtcagcaacgtatcgccagtggaggttgaaccggtggtatcaagggttaatgccacgctcacccggctgatttgactgcctgccatgaggccgactctagaggatcccccagtcacgccgtggccgctgtagccctgcatgtaatagatgttggtatcttggcgaccaaactgcggcatacgcgacagggtcagctgtaagttgcccgtccagcggtaatcaattttcacgcccttcagctgcgggaaggttttcagcagtttcggcaccacaaggcgctcaacgtcatccgggtcgcgcgcgccgtagaccacgccgccgccgtacagcaggcggttgtcggcggtaagacggtagtaatcaagcagatagttacagtcttccacacagtagtttttcgggatcagcgaacgggctaaatcttccgacagccgttcggtggtgatcacctgcgtgccgcacggcatgctgcgtttcgccagttccggctctactttatcgcccagatacgcattcccggcgacaatcacatacttcgccgtcacctgacctttggcagttcgcacaacggctggcgtggtgtttcgggggagcgaacgcagccaaggcagaggcggcttgaaggatgaagtgtatataaagaatgtcgccagaaataaacgggcatacggcccggggatctctgcgccctgacgttcacaaactgcatatatgccgaagagctggcactgctggaaactctcgacaccggcaaaccgattcgtcacagtctgcgtgatgatattcccggcgcggcgcgcgccattcgctggtacgccgaagcgatcgacaaagtgtatggcgaagtggcgaccaccagtagccatgagctggcgatgatcgtgcgtgaaccggtcggcgtgattgccgccatcgtgccgtggaacttcccgctgttgctgacttgctggaaactcggcccggcgcgcgaaggtctgcagcttcactcctgaagccagtgagaccacgagcccatgctggtcactctttgggtccacactgcctttatgagctgtaacactcaccgcgaaggtctgcagcttcactcctgaagccagtgagaccacgagcccactgggaggaatgaacaactccagaaacgccgccttaagagctgtaacactcaccat

SEQ ID NO: 24406 - DNA, 915 bp, Homo sapiens
  SIMILAR (915)..(304): 991254mologous to Escherichia coli putative,accession number M64438,Smith-Waterman Score=1057.
gttctgacgcagctgcaggccaagcaggaactggaggcgttgattgccgctggccgccgtgaacatgtgttttgcgcctgcgtgatgcatgggcacgggaagcatattttgaagcaacaaacaccgctgtggctggcacaacatccgcatgtgatggcctttcatcaggcaccaaaagagtatggcggtgatgcggcgttgttggtgttgattgaagtcgaagagtggctgccgccggagttgccctgaggagttgagcgcgttgcgccaggtacgggtaatggcaggggcgaatgcccctgccatatgtttgaggccgaacaaatcgatagataattcatcgctgtctttcagcatcagaacatcgcgaataaacatcttcatgccgatcggaatattacacacgccgataaagcgtttaaatccggtatgacgataaacggcttcagtgaccattcccgccgggttagtgaagttaatcacccatgcattcggacaaagttcttcgacatcttttacgatgtcaaaaatcaccggaatggtacgcagacctttaaacaaaccgcccgcgccgttggtttcctgaccaagataaccatgacttaatggaatacgttcatccagttcacgcgccggtaattggccaacgcgcagttgggtagtaacgaaatcagcatctttcaatgcttcgcggcgatccagcgttttataaagcttcatcgggacgccagcgttatcaatcatccgttggcagagatcgaaaataatatccagtttcggtttaccaccttcgacatccaccagccataattcgctgaccggcaattcgtgataacgcttaataaatccttccagtaactccggggtatagctgctcccgccaccaatagtgacgacttttaatttctggctcat

SEQ ID NO: 24407 - DNA, 1836 bp, Homo sapiens
  SIMILAR (160)..(693): 961254mologous to Escherichia coli INAA PROTEIN,accession number D90855,Smith-Waterman Score=903.
atgaaaccgatatctttatctgcgatagcagggagtttttccaccactttgctaaagcctcggttcatatttagcccgtggtcagcatcgccaatttcgcgatccagtccggtaagatactcgctctcggtgctgaaaatatcgccacaacgagtgatcgtcgagcgcaacggcaaaaagctgtatgtaaagcgcatgacgcatcatctgtttcattccgtacgttatccgttcggccgaccaacgattgtccgtgaggttgcggtaattaaagaactggaacgggccggtgtcatcgtgccgaagatcgtttttggtgaagcggtgaaaattgagggtgaatggcgagcgttgctggtgactgaagatatggcggggttcatcagcattgctgactggtatgcccagcatgcagtatcgccttattctgacgaagtacggcaagccatgttgaaagcagtggcgctggcgtttaagaaaatgcatagcattaatcgtcagcatggctgttgttatgttcgccatatctatgtgaaaacagaaggtaatgcagaagctggttttcttgacctggagaaaagtcgtcgccgcttgcgtcgcgataaagcgattaatcatgacttccgccagctggaaaaatatctggagccaatccccaaagcggactgggagcagaccaacctcgcccactggtgcgatccgaaattcgacagcgtattgcgtaaggcgctctcttcgcagcagctggcggcgcgtattgaagcctatgacgaagcgcagagtattctggcgcaggaattgcccattttgccgctggcgtcgtcattgcgtttgcaggcctatcggtacgatatcaaaggtctggtacttagcccgtttggtaacgcctcctttgctggggtgtatcgcgagaaacaggatgagagtaatttatttgatggcagcgcagagaaaacgtcaggtctggttgtgattggcgatggcaataccgttaatatgaatggtggacttgaactgattggagagaaaaacgcgcttgcagatgggtcgcaggttacttccttgcgcacaggatatagttataccagcgttattgtcgttagtggtgagtcgtcggtatatctgaatggagatacgacaatcagcggagaattccctctggggtttgccggggttattcgggtacaggataaagctttgctggaaattggcagtgcgcacatctgttatcacttaacccattacaagcccgctgccgcagatattcccgtggcgagcgataacccagcgacacccggtttgaaatcaggcggttaccactgtggtatccatgacaaattatcaatgcgaaatgtttggacccaattcgactgtgaaaacgaagtgagacgaaggcaaagtccggtcatcaacccgaacagtatgccgcggctgggtattgaagttgtcgatgtgcgtatcaagcagatcaacctgccgaccgaagtgtctgaagcgatctacaaccgtatgcgcgccgagcgtgaagcggtagcgcgtcgtcaccgttcacaaggtcaggaagaagcggaaaaactgcgcgcgactgccgactatgaagtgaccagaacgctggcagaagctgagcgtcagggccgcatcatgcgtggtgaaggcgatgccgaagcagccaaactgtttgctgatgcattcagtaaagatccggacttctacgcattcatccgtagcctgcgtgcttatgagaacagcttctctggcaatcaggacgtgatggtcatgagcccggatagcgatttcttccgctacatgaagacgccgacttccgcaacgcgttaa

SEQ ID NO: 24408 - DNA, 1050 bp, Homo sapiens
  SIMILAR (625)..(1047): 931254mologous to Escherichia coli 37KD protein, similar to YI22-ECOLI,accession number D85613,Smith-Waterman Score=693.
atgattgatgtcttagggccggagaaacgcagacggcgtaccacacaggaaaagatcgcaattgttcagcagagctttgaaccggggatgacggtctccctcgttgcccggcaacatggtgtagcagccagccagttatttctctggcgtaagcaataccaggaaggaagtcttactgctgtcgccgccggagaacaggttgttcctgcctctgaacttgctgccgccatgaagcagattaaagaactccagcgcctgctcggcaagaaaacgatggaaaatgaactcctcaaagaagccgttgaatatggacgggcaaaaaagtggatagcgcacgcgcccttattgcccggggatggggaacgaaccgatgactggatggatggccgccgcagtcgtcacactgatgatacggatgtgcttctccgtatacaccatgttatcggagagctgccaacgtatggttatcgtcgggtatgggcgctgcttcgcagacaggcagaacttgatggtatgcctgcgatcaatgccaaacgtgtttaccggatcatgcgccagaatgcgctgttgcttgagcgaaaacctgctgtaccgccatcgaaacgggcacatacaggcagagtggccgtgaaagaaagcaatcagcgatgtgaaacagtacaggacgtcatgctgggagcggtggaacgccgcttcggcaacgatcttccgtcgtctccagtggagtggctgacggataatggttcatgctaccgggctaatgaaacacgccagttcgcccggatgttgggacttgaaccgaagaacacggcggtgcggagtccggagagtaacggaatagcagagagcttcgtgaaaacgataaagcgtgactacatcagtatcatgcccaaaccagacgggttaacggcagcaaagaaccttgcagaggcgttcgagcattataacgaatggcatccgcatagtgcgctgggttatcgctcgccacgggaatatctgcggcagcgggcttgtaatgggttaagtgataacagatgtctggaaatatag

SEQ ID NO: 24409 - DNA, 1881 bp, Homo sapiens
  SIMILAR (1881)..(1015): 981254mologous to Escherichia coli Glycolate oxidase subunit GlcD,accession number D90811,Smith-Waterman Score=1451.
ctatatttccagacatctgttatcacttaacccattacaagcccgctgccgcagatattcccgtggcgagcgataacccagcgcactatgcggatgccattcgttataatgctcgaacgcctctgcaaggttctttgctgccgttaacccgtctggtttgggcatgatactgatgtagtcacgctttatcgttttcacgaagctctctgctattccgttactctccggactccgcaccgccgtgttcttcggttcaagtcccaacatccgggcgaactggcgtgtttcattagcccggtagcatgaaccattatccgtcagccactccactggagacgacggaagatcgttgccgaagcggcgttccaccgctcccagcatgacgtcctgtactgtttcactgttgaagccgccggtagtgaccgcccagtgcagtgcctcacgatcacagcagtccagcgcgaacgtgacacgcagtctctctccgttatcacagcagaactcgaacccgtcagagcaccatcgctgattgctttctttcacgggcactctgggcgttatctcttcgaaacggacgattttgccgtcgcgcattccctgataaagcggggcagggaccagcgcttccgttgacggaccatgattgataagcagggcgtagttccagccatacttgatttgatcttcggtggtagatgccccgccctggatggttaacccggcatcgccgctaatagcggttgccagtaattcagaaagaagagattttgcggtacccggttcccccaccaacatcaaaccgcggccggtagcaagagtgactaacatacgttcgacagcggaggggctaatcaccactttacggctgatattttgcgcttcgtcgccaaggataaaagcacgggccgcaggcaaacttaactgccaaccgggcgggcaaggtgcgttatcattttgttttaattttgccagttcatcggcgtataacacagcagcaggcggacgctgcaaatgattattcagacggcgcactttaggcaagcgtgtaatatccagccgcgcttcggtaataaaggccagcgtcccttctgaacccgtcagaatgcgcgtcaggtcgaactcggtcatctcatcgttaaagacatgacgcagatcgtaaccggtaagaaagcggttaagtttggggaagttgtcgataattaactggcgttgctgacggcaacgttgataaaccgtgttataaattcgcccgattgtggtattggatttacccagcgtttccgccaattcgacgggtaaaggttgcgtatcgagaatatcgccccccaacaacaccgcgcgtacgccaagtacgtgatctgacgttttgccatagaccagcgatccctgaccggatgcatcggtattgatcatcccaccgagcgttgcccggttgctggtcgaaagttccggcgcaaaaaagtagccgaacggtttcaggtactgattgagttgatcttttatcaccccgggctcaacgcgcacccagccctcttcagggttaatttcgatgatgcggttcatatggcgggacatatcaacaataatcccctggttgagcgcctgaccgttagtgccggtgccgccgccgcggggggtaaagatcagcgatgaatagcgttcctgcgcggcaagacgggcgatcagcgccacatctgcggttgaacgcggaaataccaccgcatcggggagaagttggtaaatactgttgtcggtcgacattgtcagacgatcggcataacttgtcgccgtatcgccggtaaaaccttgttgctccagctctggcaaaaaattaagcaccagttgaacgacgccgggtgcctgggaaatctgtggaatcat

SEQ ID NO: 24410 - DNA, 648 bp, Homo sapiens
  SIMILAR (1)..(171): 1001254mologous to Escherichia coli K12 putative toxin,accession number AE000184,Smith-Waterman Score=283.
atgagtcgtcgcgcaggtacgccaacagcaaaaaaagtgacgcagttagtgaacgtggaagagcacgttgaagggttccgccaggtcagagaggcgcatcggcgcgagcttattgatgattacgttgagctgatttctgacttgatcagggaagtgggggaagctcgtcagttttggggctctactggctggacgagggcagtggcacgatcatacggggagcgcgccaagcagctccggcgcttctccatcgccaccctaaggggttttggcgtgggcaagcgcggcatcgaggaacgcatccaggaggaggcgggcttcctcatcgacgccctccggggcacgcacggtctgttggagtttgctggaggtccactccagaccctgttttcctgcgtatcaccagtggaggctgcagaacagcagatattggcacctgatccttcctgtggaagcttcatggggctccgcatcagtgagcgctatggccccgtgttcaccattcacctggggccccggcgggtcgtggtgctgtgcggacatgatgccgtcaaggaggctctggtggaccaggctgaggagttcagcgggcgaggcgagcagatcttactcaccattatgctagactggactccctcaccctcgtaa

SEQ ID NO: 24411 - DNA, 1377 bp, Homo sapiens
  SIMILAR (192)..(4): 981254mologous to Homo sapiens KIAA0654 protein,accession number AB014554,Smith-Waterman Score=320.
tcacttgatctccttgttgatggcctccagctgctcctgaagcatgatggccagcgtctgcacgtcagcctgcccactgggggacagcagctcggccccaaacatcccctctgcctcctcctcatcggagccgtccagttccccagggaatgggggtggtatggagcccgcaggggcagaccgctcccaatccaggtctgattgccgatggccgcgacatgggaacggtggtattccctgatgcaccagtgaaaattttccttgacgcctcctcggaagaacgtgcgcatcgccgcatgccatggcgatggccgtcttccccgtgcccggctggccagcaataaggactgcccgaccggcaatcttcccttcccggatcatctccagcaccacgccagccgcccgccgtgccgccagctgacccaccatgccttgcgaagccagacgggttaacggcagcaaagaaccttgcagaggcgttcgagcattataacgaatggcatccgcatagtgcgctgggttatcgctcgccacgggaatatctgcggcagcgggcttgtaatgggttaagtgataacagatgtctggaaatataggggcaaatccataaacgccaacagccatagcgtcatttccggtaaagacggccttccaacgcaggcgcgccggagttttatccagcgggccggtaatacaggcgatacgggtatgacctttatcgatcagatattgcgttgctaagtctccgcccagcaacgagttatcctgaataagatcgcagttctgaatagaaagctcagtgccgcggatctctagagtccgcataggccgcttcgcagcaaacatacggtaaagttggcaggaagggagaccctggtaccttgggctcctccataaatcagtagcgggattcagtttctgagccttggcattgtcatcggtcagatcggcaagtgtgatggtattcatcgcggtaaactgcgtcgacatagccatccctgtaacatcaatggcataaggaacggtacacagccggtccccagacgggttgcaatattgccggcgaatgcggcctgaaaagcgtctgaagcggcaaataccccggtggcggacctgcaggcatgccgtgctaagttctgcctgtctgcgaagcagcgccccatacccgacgataaccatacgttgccagctctccgataacatggtgtatacggagaagcacatccgtatcatcagtgtgacgatccccatccccgggcaataagggccgtgcgctatccacttttttgcccgtccatattcaacggcttctttgaggagttcattttccatcgttttcttgccgagcaggcgctggagttctttaatctgcttcat

SEQ ID NO: 24412 - DNA, 1064 bp, Homo sapiens; identical to SEQ ID NO: 10404
  SIMILAR (409)..(792): 901254mologous to Escherichia coli ORF 2 (AA 1-301),accession number V00279,Smith-Waterman Score=609.

SEQ ID NO: 24413 - DNA, 888 bp, Homo sapiens
  SIMILAR (451)..(783): 851254mologous to Homo sapiens serine threonine kinase 11,accession number AF032986,Smith-Waterman Score=488.
atgccgggaccccttagaagcgaacgacgccgacagctaccgtttattctggcagtaatccatccgtatgcatcccgatcaggataccctgaaagccatgatgcaggatgccggattcgaaagtgtcgactactacaatctgacggcagggtattgcgcgtggaggtaaaaggcttttcgacgtcattgattctggtgttcagcgaacgccaggttgatgtactgggcgaatgggcaggcgatgctgactgcaccgttatcgcctacgccagtgtgttgccgaaacttcgcgatcgccagcagcttaccgcactgattcgcagtggtgcccacagcccagttggctctgctgactaccgttctccgtcgggggctggacttgtgtacttccagcgggctgtgtttttggaagctcccagcaactgcaaagggacacgtgtgagggccagggaggcctcgccctcagaacgggtgtgtgctgcccgcaggtacttctgtcagctgattgacgccctggagtacctgaatagccagggcattgtgcacaaggacatcaagccggggaacctgctgctcaccaccggtggcaccctcaaaatctccgacctgggcgtggccgaggcactgcacccgttcgcggcggacgacacctgccggaccagccagggctccccggctttccagccgcccgagattgccaacggcctggacaccttctccggcttcaaggtggacatctggtcggctggggtcacccttcgcttcgcgcgtattactactggaggtactcgcaaggaagaacacaagcacaagccttgcatcgacgacccgcaacaagcgcagctcgtggtagacacgttcgcatcagcgcaagctatcagcatctaa

SEQ ID NO: 24414 - DNA, 2286 bp, Homo sapiens
  SIMILAR (1645)..(2217): 1001254mologous to Escherichia coli putative,accession number M64438,Smith-Waterman Score=987.
atggatactcgcgtgttgcaggaacagcgactggaagccatcgcgcaaatcaaagaggcacaaagcgccgttgctgccgcgcaggctttgctggagcaacgacaaagcgaaactcgtgccgcacagtcgctggttaatcaacgccaggcagaactggactccgtagcaaaacgtcatacgcgttcccgttcactggcccaacgaggggctatttctgcgcaacagctggatgacgatcgcgccgccgctgagagcgcccgagctgcgctggaatcggcgaaagtcagcgaactgaaagccccgcgtgacggacgcgtgcagtatcgggttgccaagcaggcgaagtgctggtttccttatgtctacatggtcggtatggaagaagggtttttgccgcaccagagcagcatcgatgaagataatatcgatgaggagcggcggctggcctatgtcggcattacccgcgcccagaaggaattgacctttacgctgtgtaaagaacgccgtcagtacggcgaactgttatctcaaaagaaccgcttacacccaacctggctggctcctgatgaatggaaaggtaccgccgacgagaagcagttacagcttctgaccgcacatccggcacaccgtttacacagtcagcttaactatgcggaactgcgtaaaaaatatgcgatcgccgatcgtgaaccaatcactattcacaccgaagatgctgcacgctttggtattgcgaatggcgatctggtgcgtgtctggaacaaacgtggtcagattttgacaggcgcggtggtgactgacgggatcaaaaaaggcgtggtatgcgtgcatgaaggtgcatggccagatctggaaaatggcttgtgtaaaaacggcagtgcgaacgtgttaacggcggatatccccagctcgcagctggcaaatgcctgtgccggtaactcagcgttggtgtatatcgaaaaatatacgggcaatgatgcgcttgaagcgttactgcgtgaacatcagcactggcgaaacgatgaaccccagccgcatcaatttaatagtacccaaccgttctttatggacaccatggaaccactggagtggttgcactggctggatcgcgacgagaaagtagtgttcatgcaaacgtgcgtgacagaaaggccacttttctcgttatcccacgaagcctggcagcgtgagcttgactttgccagtggcgaattacgccgcaatgttgtctggcgtaccagcaacggctcaggttacaccatcgccagccgtcgctttgtttcggcagaccaactgccgctcattgcgctggaaatcactattacgccactggacgccgacgctgataattcccgaatctactttgccttcactcgagacattaagttcaccgtcgccagcatcaccgatatagatatagcggaaagcttcgcccgttccgaggaaattccaatgccctttatcggtcacgttgacgacaccgcccgcgtgaatagtcggggccaagctccatgcctgcaagtcgcctctagaggaccccaggccaacgcccataatgcgggctgttgcccggcatccaacgccattcatggccatatcaatgattttctggtgcgtaccgggttgagaagcggttacgctccattgaaagatgctgatttcgttactacccaactgcgcgttggccaattaccggcgcgtgaactggatgaacgtattccattaagtcatggttatcttggtcaggaaaccaacggcgcgggcggtttgtttaaaggtctgcgtaccattccggtgatttttgacatcgtaaaagatgtcgaagaactttgtccgaatgcatgggtgattaacttcactaacccggcgggaatggtcactgaagccgtttatcgtcataccggatttaaacgctttatcggcgtgtgtaatattccgatcggcatgaagatgtttattcgcgatgttctgatgctgaaagacagcgatgatttatctatcgatttgttcggcctcaaccatatggtgttcattaaggatgtgctgataaatggcaagtcgcgctttgccgaattgcttgatggtgtggcgtcagggcagttaaaagcgtcctctgtaaaaaatattttcgatctgccatttagtgagggcttaattcgttcgttgaatctgctgccatgttcttatctgctgtattacttcaagcagaaagagatgcgctttttgatgcggtataagaaggcacacggatcccgccctggaaggagagcattgacgcgatattga

SEQ ID NO: 24415 - DNA, 1662 bp, Homo sapiens
  SIMILAR (726)..(872): 571254mologous to Escherichia coli 37KD protein, similar to YI22-ECOLI,accession number D85613,Smith-Waterman Score=125.
atgaaaattaatcgtattgttaatgagggatttatgaaaacgatgctggcagcttatttaccaggaaattcgaccgtcgatctgcgggaagttgcggtgccgacgccggggattaaccaggtactgatcaaaatgaaatcctccgggatttgcggaagcgatgtccactatatctatcatcaacaccgtgccacagcggcggcacccgataaaccgttataccagggctttatcaacggtcatgaaccgtgcgggcagattgtggcgatggggcaaggctgccgccattttaaagagggcgaccgcgtgctggtgtatcacatttctggctgtggtttttgcccgaactgccgtcgcggttttcctatttcttgtactggcgaaggaaaagcggcttacggctggcagcgtgacggcggtcatgccgaatacttgctggcggaagacaaagatctgatcctcctgccggatgcgctgagctacgaagatggtgcgtttatcagttgcggcgttggtacagcgtatgaaggaattttgcgcggcgaagtttccggcagtgataacgtgctggtggtcggtctgggcgcagtcggcatgatggcgatgatgctggcgaaaggtcgcggtgcaaaacggatcatcggcgttgatatgctgccggaacgtcctggcgatggcaaaacatttggccacggtcacttttcccaacacgaacccgatgaacttggaatgatatggccccccgccagttcgtccccactattgattccggatgtgccttctccgtataccccatgtttatcggaaagctgccaacgtatggttatcgtcgggtatgggcgttgcttcgcagacaggcagaacttgatgggtatgcctgcgatcaatgccaaacgtgtttaccggatcatgcgccagaatgcgctgttgcttgagcgaaaacctgctgtaccgccatcgaaacgggcacatacaggcagagtggccgtgaaagaaagcaatcagcgatggtgctctgacgggttcgagttctgctgtgataacggagagagactgcgtgtcacgttcgcgctggactgctgtgatcgtgaggcactgcactgggcggtcactaccggcggcttcaacagtgaaacagtacaggacgtcatgctgggagcggtggaacgccgcttcggcaacgatcttccgtcgtctccagtggagtggctgacggataatggttcatgctaccgggctaatgaaacacgccagttcgcccggatgttgggacttgaaccgaagaacacggcggtgcggagtccggagagtaacggaatagcagagagcttcgtgaaaacgataaagcgtgactacatcagtatcatgcccaaaccagacgggttaacggcagcaaagaaccttgcagaggcgttcgagcattataacgaatggcatccgcatagtgcgctgggttatcgctcgccacgggaatatctgcggcacgggcttgtttccttcataagctccttacaaaagttcatcaatgattttgctttcgaagacggtctgttcagcggctacgacgctgaaaaacgtcaatacgaaaaatcgtcctggaactatcagctcgatgaaaacggctatgcgaaacgcgatgaaacactgactcatccgcgctgt

SEQ ID NO: 24416 - DNA, 2265 bp, Homo sapiens
  SIMILAR (1549)..(2262): 1001254mologous to Escherichia coli K12 putative hexulose-6- phosphate isomerase,accession number AE000491,Smith-Waterman Score= 1236.
atgggctgggaagtgacttcagcggtgacgctgatcttcctcgcgctaatctttttaccgcgctatctgaagcgcggcattgccaccatccccgattttctggaggaacgttatgataaaacgacgcgtattatcatcgacttctgcttcctaattgccaccggcgtctgctttctgccgattgttctctactccggcgcgttggcgctcaacagcctgtttcacgtcggggaatcgctacagatttctcacggtgcggctatctggctactggtaattttgcttggtctggcgggaattttgtatgcggtgatcggcggactgcgcgcaatggcagtggcggactccatcaacggtattgggctggttatcggcgggttgatggttttcggtgatttcacctgcgttgctgcaagcggggtaaatgccatcagggcggccgccagaaacagtgacctgaacatgttattctccttcacgctcgaagccgtcagcggcctgttaacgcaatattacggggaggcatacatgatatatgcgcaagcgttgatgatcgccctattcgtgctgccgcatatgatccatgccagcctgaccaactccaagatccagggcaaatatcgccactctttctggagtgaaatctacgaaacggtgggcgtctgcggtaaggcatcctggcgcttacttcttatggcccgccaacctgagatgctcaccgtggtcgtcagtatggatttctccgacggtggtttggggatcaagatcaacggtcaggcgcagattctggaagggcagaaagtgaatctgttgcttaaacgcggtcagcaggaatacgtcttcccgacccaggtggcgcgcgtgatgggtaatgaagttgggctgaaattaatgccgctcaccacccagcaacatatcgattttgtgcagtgtacgtttgcccgtgcggatacatgggcgctctggcaggacagctacccggaagataagccgctggaaagtctgctggatattctgaagctcggcttccgtggctaccgccatctggcggagtttgcgccttcttcggtgaagggcatattccgggctacgcttgccatcgtccctggcgacccggatcgtgtggaaaagatcgccgcgctgatggataagccggttaagctggcatctcaccgcgaattcactacctggcgtgcagagctggatggtaaacctgttatcgtctgctctaccggtatcggcggcccgtctacctctattgctgttgaagagctggcacagctgggcattcgcaccttcctgcgtatcggtacaacgggcgctattcagccgcatattaatgtgggtgatgtcctggttaccacggcgtctgtccgtctggatggcgcgagcctgcacttcgcaccgctggaattcccggctgtcgctgatttcgaatgtacgactgcgctggttgaagctgcgaaatccattggcgcgacaactcacgttggcgtgacagcttcttctgataccttctacccagaccatggtgcaagtcaggctctactgtcgcgcctcaactggagccgcgagcagcgtctggcgctggtcaatgcgattgttgaaaccggcgtgcgcgtgccgtccatgtgcctttctgctcatcgtcgtttcccgctgggcagtgaagatgacgcggtgcgggcgcaggggctggagattatgcgtaaagctatccagttcgcccaggatgtcggtattcgcgtgatccagctggcgggctatgacgtttactatcaggaagccaataacgaaacgcgtcgtcgtttccgtgacggcctgaaagagagcgttgagatggcaagccgcgcgcaggtgacgctggcgatggagatcatggattatccgttgatgagctccatcagcaaggcgctgggatacgcgcactatctcaacaatccgtggttccagctctacccggatatcggcaacctgtcggcgtgggacaacgatgtgcagatggagttgcaggccggaatcgggcatatcgtcgcggtacatgtgaaagacaccaaacctggcgtcttcaaaaacgtgccgtttggcgaaggtgtagtggatttcgaacgttgtttcgaaacgctcaaacagagtggctattgcgggccgtacctgattgagatgtggagcgaaacggcggaagacccggcggcagaagtggcgaaagcgcgtgattgggtgaaagcgcgcatggcgaaagcgggcatggtggaggcggcataa

SEQ ID NO: 24417 - DNA, 1540 bp, Homo sapiens
  SIMILAR (1540)..(794): 991254mologous to Escherichia coli 3-(2,3- dihydroxyphenylpropionate)1, 2-dioxygenase,accession number Y09555,Smith-Waterman Score=1293.
gagagcgcgaatgaccgaagctgatttgcagattggtatggtggctggtcaggacatcaacggtattgacctgctgcccacagataatttgcgtcagtcgttggcggtcctcatgcgtaagcatattgagataggtatgcgccagttcgttacttaaaatattgacgccatcagcggtacgcaaaatgcagatacccactggcgcggaggcgacaatcttgcgattgaactgctcatgttcttccagtcgcagggcgtcgctttccgccggaatgaaaatacgtcgctcgtacatccgtgcgagagtaaacaatgcagctccggcaagcacattcagcaaaattgcgttaaggatcaacatgcgaatgcgttccagcaccttatcaaccggcaccgaatacacgatgcttagcgatgagggtggcagatttttcttcagcaccagctcccggaacccttccgtatagccaaaccaggagcgttcctgcatccagcgaggatcgcccttaattttactttctggtccggtaagcgaaatcagggtatgaccattttcatcaagaatggtaacccccatcggcaacgtacccggtaagaaaaagttctccatccggatggtctgctcgacacccaaaagcgccagacgggttaacggcagcaaagaaccttgcagaggcgttcgagcattataacgaatggcatccgcatagtgcgctgggttatcgctcgccacgggaatatctgcggcagcgggcttgtaatgggttaagtgataacagatgtcagtcccgtagcgtccctgctccagcaaagtcatgaactggttatcccaaatcggtgtgagcggatgcagcgttctctgatcctcaacaaacttctcagcggcgctaatcacccgttgctgacgcaattcgcgctcactggcgggtaaatctttcccgctccccaacagacggtcgcgcatatgggcatcggctttcgccagttcgggcaccggcggctgatgggaaagcccaccggaacccaggaacagcacgcgtttattgagagtgctggtgaaacgtccaatggcttcacccaacatgcgggtacgctggaaaccgggcagcggcgtggcgacaccgttgatgaacacaggcagaactggcaccttatccagcccaccgagcaggaactccagcggctgggcgaacccgtggtccacctgcatacagtaagaaacggcaagatcgatcccgctcttcatgacggcatgcgcacaggcctccgccagctccacaggcacgggcagctctcctgccgcactgccgaaatcaccaattgccgtcgctccaacgcctaaacagaacggtggcatcacgtcatagaaaaagccgttgtagtgatctggcgcaaacagcaccaccagttcaggggagaatgccgcaatacgctcgcgggcgctggcaatcacgccattgacctcatcgagcacctcttgcgccgggtcgacataccccaccagcggcgagtgggaaagacagtgaagataagcgtgcat

SEQ ID NO: 24418 - DNA, 2607 bp, Homo sapiens; identical to SEQ ID NO: 10417
  SIMILAR (1138)..(995): 1001254mologous to Escherichia coli ORF 2 (AA 1- 301),accession number V00279,Smith-Waterman Score=268.

SEQ ID NO: 24419 - DNA, 1337 bp, Homo sapiens
  SIMILAR (603)..(719): 311254mologous to Escherichia coli matches PS00107: Protein kinases ATP-binding region signature,accession number U00006,Smith- Waterman Score=48.
atgaaaaaaagacatctgcttagcttactggcgctgggcattagcacagcttgctacggcgaaacatatcctgcgcccattggtccgtcgcagtcggatttcggtggcgtaggattattacaaacgcccaccgcgcgtatggcacgggaaggggagttgagtctgaactatcgcgataacgatcagtaccgttattactcagcttcagtgcaactcttcccgtggctggaaacaacgctgcgctacaccgacgtgcgcacccggcagtacagcagcgtcgaagcgttctctggcgatcaaacgtataaagataaagccttcgatctcaaactgcgtttgtgggaagagagttactggctgccgcaagtggcggttggtgcgcgggatatcggcggtacggggctgtttgatgcggaatatcttgttgccagcaaagcctgggggccgttcgattttacgctcggcctgggctgggggtatttgggcaccagcggtaatgtggaaaatccgctctgtacagccagtgaggaatattgctatcggcacaacgcattgatgaaatcgcgtttgctaagcggcagagatggcaacttttggtgcaaaagtactgcatccggcaacgttgctacccgcagtacgcagcgatatcccggtctttgtcggctccagcaaagacccacgcgcaggtggtacgctggtgtgcaataaaactgaaaatccgccgctgttccgcgctctggcgcttcgtcgcaatcagactctgctcactttgcacagcctgaatatgctgcattctcgcggtttcctcgcggaagttttcggcatcctcgcgcggcataatatttcggtagacttaatcaccacgtcagaagtgagcgtggcattaacccttgataccaccggttcaacctccactggcgatacgttgctgacgcaatctctgctgatggagctttccgcactgtgtcgggtggaggtggaagaaggtctggcgctggtcgcgttgattggcaatgacctgtcaaaagcctgcggcgttggcaaagaggtattcggcgtactggaaccgttcaacattcgcatgatttgttatggcgcatccagccataacctgtgcttcctggtgcccggcgaagatgccgagcaggatggcactggcaccagcgggataggtgcccagaagaaaaaaatgtacgccaataacggcgctatagaccgaaagctgctttttgaagcgacgttcgtcacgattgaaaaatgttgtgataccaatcagaaaggcgatgacacccacgccctgggccagccaatacgcggtcatgataaatccttagcag

SEQ ID NO: 24420 - DNA, 1413 bp, Homo sapiens
  SIMILAR (503)..(658): 961254mologous to Escherichia coli 37KD protein, similar to YI22-ECOLI,accession number D85613,Smith-Waterman Score=276.
atgattgatgtcttagggccggagaaacgcagacggcgtaccacacaggaaaagatcgcaattgttcagcagagctttgaaccggggatgacggtctccctcgttgcccggcaacatggtgtagcagccagccagttatttctctggcgtaagcaataccaggaaggaagtcttactgctgtcgccgccggagaacaggttgttcctgcctctgaacttgctgccgccatgaagcagattaaagaactccagcgcctgctcggcaagaaaacgatggaaaatgaactcctcaaagaagccgttgaatatggacgggcaaaaaagtggatagcgcacgcgcccttattgcccggggatggggatcgtcacactgatgatacggatgtgcttctccgtatacaccatgttatcggagagctgccaacgtatggttatcgtcgggtatgggcgctgcttcccagacaggcagaacttgatggtatgcctgcgatcaatgccaatacgtgtttaccggatcatgcgccagaatgcgctgttgcttgagcgaaaacctgctgtaccgccatcgaaacgggcacatacaggcagagtggccgtgaatgaaagcaatcagcgatggtgctctgacgggttcgagttctgctgtgataacggacagatcactgcgtgtcacgttcgcgctggactgctgtgatcgtgaggcactgcactgggcggtcactaccggcggcttcaacagtgaaacagtacaggacgtcatgctgggatcggtggaacgccgcttcggcaacgatcttccgtcgtctccagtggagtggctgacggataatggttcatgctaccgggctaatgaaacacgccagttcgcccggatgttgggacttgaaccgaagaacacggcggtgcggagtccggagagtaacggaatagcagagagcttcgtgaaaacgataaagcgtgactacatcagtatcatgcccaaaccagacgggttaacggcagcaaagaaccttgcagaggcgttcgagcattataacgaatggcatccgcctagtgcgctgggttatcgatcgccacgggaatatctggggcagcgggcttgtactgggcatgccatcggtagcggaccatcttcagcgtttttcggcgcaccggtacgcagggtttcacgcacatcggtcacagcaaaagcatgtccacgcggcttgttgtaatcgcgcgagaagggataccccgcccacaggatcaccagccgtggatcttccgccagggcgtcaacacgctctgactgttccgaggtggctttccaggagagatattgatcgggatgctgcggggcaaaggtttcattcttcgcttccacagttacaggttttgcgggagcagccgtttgttcagcgtgaacagaagtga

SEQ ID NO: 24421 - DNA, 1978 bp, Homo sapiens
  SIMILAR (1088)..(1681): 981254mologous to Escherichia coli 'glucose dehydrogenase (pyrroloquinoline-quinone)',accession number D26562,Smith-Waterman Score=1029.
atgccgatgcaaccgcagattggcggcagttactgctatgtgcgctcgccagtgaatcatatctacctgctgctgggagagctaaatacggtcgccgaacttgccatcgtgaccaacgccccggaaaatatgcagcgtcgcggggcaatgtatttgcaacgcgaattgaaagataaagtcgcgatgatgaatcgactacagcaggcgctggaacacaaccatttttccctgatggcccagccgattaccggtatgcgtggtgatgtttaccatgaaattcttctgcgcatgaaaggtgagaatgatgaactgatcagccccgatagcttcttgccggtcgcgcacgaatttggtttatcgtcgagtatcgacatgtgggtcattgacatacgctgcaatttatggctgaaaacagagcgaagatgcccgctcaccgttttgctactaatctgtctccaaccctcatgcacaagtaagcacagccgatctggagattttcttgactcccttaggcaagccgctgccgttcagcgaagttactggatcgaaagtaaagcggataaagaaaaggtgggcgattacgtttttggcctgaaggcgcagggacgatataacggtgaaccgctcacgggtacgggaaaaataggcggctatgctggcgctgcgtggcgaagggacgccgtttccggtacaggctgatttccgctctggtaacacccgtgttgcttttgatggcgtcgtgaatgacccaatgaagatgggcggtgtcgatttacggcttaaattttctggcgattcactgggtgatctctatgaactgacgggcgttctgctgcccgataccccgccgtttgaaacggatggtcggctggtagcgaaaatcgacactgaaaaatcgtcggtctttgattatcgcggttttaatgggcgaattggtgatagcgatatccacggttctctggtctacaccaccggaaagccacgaccaaaactggaaggtgatgtcgagtcgcggcaattgcggctggcggacctgggaccgtcatctggcgttgattccgggaaaggggcaaaaaagtctaaacggatccccgccagcggcgcagttgccgcactggtggtcgcactgctgattagcggtggtatcctgacctgggccggatttaacgatccgcaggagatcaacggcaccttaagcgccgatgccacacctgctgaagctatctcccccgtagccgatcaggactggcctgcctatggtcgtaatcaggaaggtcaacgcttttcgccgctgaaacaaattaacgccgataacgtccataatctgaaagaagcctgggtgttccgtactggcgatgtgaagcagccgaacgatccgggtgaaatcaccaatgaagtgacgccgattaaagtgggcgacaccctttacctgtgtaccgctcaccagcgcctgtttgcgcttgatgccgccagcggcaaagagaaatggcattacgatcctgagctgaaaaccaacgagtctttccagcacgtaacctgccgtggtgtctcttatcatgaagccaaagcagaaaccgcttcgccggaagtgatggcggattgcccgcgtcgtatcattcttccggtcaatgatggtcgactgattgggattaacgctgaaaacggcaaactgatccccacgctggattcggtagtgcgtgccaaaaaggtttttggtgaaaaccatatcaccattatctcgcaagaatttcataatcaacgcgccatctggctggcaaaacagtacggcatcgacgctatcggttttaacgcgccagacctcaatatgaagcacggtttttatactcaactgcgggagaaactcgctcgtgtcagcgccgtgattgacgccaaaatcctccatcgccagccgaaatatctcgggccttcggtcatgattgggccgtttagtgagcatggctgtccggcgcagaaataa

SEQ ID NO: 24422 - DNA, 575 bp, Homo sapiens
  SIMILAR (249)..(572): 961254mologous to Homo sapiens cytochrome P450-2A6,accession number AF182275,Smith-Waterman Score=556.
gtcatagggacagaaatctcaggtcccccaaacaacctgcgtagcaagacatggaccccatgtctgccaaacttcctgtttcagagatgtgaaccttctattccccaaagctcctccttcacaggaccccaactcctccatgcctgccacttccccttatctggggcaccccagttccctctccagcccctgtgtactttcaccaatcccctaacctgcctcatcacacacaacttcctcctccctaccagggcaccgaagtgttccctatgctgggctccgtgctgagagaccccagcttcttctccaaccctcaggacttcaatccccagcatttcctggatgacaaggggcagtttaagaagagtgatgcttttgtgcccttttccatcggaaagcggaactgtttcggagaaggcctggccagaatggagctctttctcttcttcaccaccgtcatgcagaacttccgcctcaagtcctcccagtcacctaaggacattgacgtgtcccccaaacacgtggtctttgccacgatcccacgaaactacaccatgagcttcctgccccgctga

SEQ ID NO: 24423 - DNA, 2174 bp, Homo sapiens
  SIMILAR (937)..(518): 971254mologous to Escherichia coli 37KD protein, similar to YI22-ECOLI,accession number D85613,Smith-Waterman Score=722.
atagctattgacctcttcaaactcttggaagttgtcattaagagagggtaccgagctcgattgtatcatagcgatcatcatgttgctgctgctaattgtgccgataatgtggttccacaaacaccagcaaaaaagcgtgggagaacacggatgaataatttaccggtagttcgttcgccctggcggattgtgattttgctcggggctttacggggatcctgtagagtccacctgagatcgattgtcactggaaagcggatgttgcgggttgttgttctgcgggttctgctcttagctgacatgagattggggatcgtctggatctcggtaccaagttatcgggcggcgatgaaacgtgcgggtctcaacattcctgatggctatgaagtcactggtgattttgaatttaacggcgggtttgacgctatgcgccaactgctatcacatccgctgcgtcctcaggccgtctttaccggaaatgacgctatggctgttggcgtttatggatttgcccctatatttccagacatctgttatcacttaacccattacaagcccgctgccgcagatattcccgtggcgagcgataacccagcgcactatgcggatgccattcgttataatgctcgaacgcctctgcaaggttctttgctgccgttaacccgtctggtttgggcatgatactgatgtagtcacgctttatcgttttcacgaagctctctgctattccgttactctccggactccgcaccgccgtgttcttcggttcaagtcccaacatccgggcgaactggcgtgtttcattagcccggtagcatgaaccattatccgtcagccactccactggagacgacggaagatcgttgccgaagcggcgttccaccgctcccagcatgacgtcctgtactggttcactgttgaagccgccgttagtgaccggcccagtgcagtgcctcacgatcacagcagtccagcgcgaacgtgacacgcagtctctctccgttatcacagcagaactcgaacccgtcagagcaccatcgctgattgctttctttcacggccactctggcggcgagaaccaccccagcgagcagccagatcatccccggcaggtagcccatttgcgccgccagtaccggccccaccagcggacctgctccggcaatggccgcaaaatggtgaccgaacagcactttcttgtccgtcggcacatagtccagcccgtcgttatggcgcaccgctggcgtcatacgcgtcgggtcaaccgccagcacatttttggcgatatacagcccataaaaacggtaagcgatcagatagatacagaccgacgccaccacaatccacagcgcgttgatctgttccccacgatttaaagcaatgtatcccagagcaaatgctcccattacagagagcactgtccagacgaggtatttccctgatttgttcatagttgttatccgtgtgcgtgtccatagagatgttacattttgtttcaccgaaggaatgataccgctgacttcagccaggattgccggctctttcggacgacgtgcttcgaacaggtccgcaacgcgcggcagaccaccggtgatgtccttggtaccgccggattcctgcggaatacgcgccagggtgtcaccagagctgatctgtacgccatcttccagctgaacaatcgctttacccggcaggaagtactgcgctggcatatcggtacctgggatcagaacgtcgttaccctgagcatcaacgattttcagtgccggacgcagatctttaccacctgcggtacgttctgcggaatccagaaccaccagcgaagacagaccggtcagttcgtcggtctgacgcgtaatggtctggccgtcgatcatgtcagtaaagcgtacaaaaccgcttacttcggtgataaccggcatggtgtgcgggtcccagtttgcaacggtttcgccgccagcaacctgttcgccatcgcctttcgccagtaccgcaccgtaaggtactttgtagcttttgaccaacatcttgatataccatatctttgaacactggcagaatattaacagcctgccaagttggccgcctggatatacctcgtactggcaatgccggagaaacagctcatatggcagcattaaagcaaacctctcgctgagctggaagcgagccat

SEQ ID NO: 24424 - DNA, 3993 bp, Homo sapiens
  SIMILAR (1613)..(2245): 881254mologous to Escherichia coli K12 putative kinase,accession number AE000393,Smith-Waterman Score=941.
atgagccagaaattaaaagtcgtcactattggtggcgggagcagctataccccggagttactggaaggatttattaagcgttatcacgaattgccggtcagcgaattatggctggtggatgtcgaaggtggtaaaccgaaactggatattattttcgatctctgccaacggatgattgataacgctggcgtcccgatgaagctttataaaacgctggatcgccgcgaagcattgaaagatgctgatttcgttactacccaactgcgcgttggccaattaccggcgcgtgaactggatgaacgtattccattaagtcatggttatcttggtcaggaaaccaacggcgcgggcggtttgtttaaaggtctgcgtaccattccggtgatttttgacatcgtaaaagatgtcgaagaactttgtccgaatgcatgggtgattaacttcactaacccggcgggaatggtcactgaagccgtttatcgtcataccggatttaaacgctttatcggcgtgtgtaatatttcgatcggcatgaaaatcctgaaaacaaggacccttgataccaccggttcaacctccactggcgatacgttgctgacgcaatctctgctgatggagctttccgcactgtgtcgggtggaggtggaagaaggtctggcgctggtcgcgttgattggcaatgacctgtcaaaagcctgcggcgttggcaaagaggtattcggcgtactggaaccgttcaacattcgcatgatttgttatggcgcatccagccataacctgtgcttcctggtgcccggcgaagatgctggatttgcccctatatttccagacatctgttatcacttaacccattacaagcccgctgccgcatatattcccgtggcgagcgataacccagcgcactatgcggatgccattcgttataatgctcgaacgcctctgcaagtcccaacatccgggactgataaccctactcggtaccctgttttcccgaataaattcaaagccgcactggctgcgaaacaggtacaaattggttgctggtcagcactctctaacccgattagcactgaagttcttggtttggcctgggtctgactggctggtgctgaatggcgaacatgcgccaaacgatatctccacgtttattccgcagttaatggccttgaaaggcagcgccagcgcgccagtagtgcgagtgccgaccaacgagccggtaattattaagcgtcttctggatatcggtttctataacttcctgattccttttgtagaaacaaaagaggaagcagagctggcggtggcatcaacccgttacccaccggaaggcattcgcggcgtctccgtttctcaccgcgccaatatgtttggcaccgtggcggattatttcgctcagtcgaacaagaacatcactattctggtccagatagaaagtcagcagggcgtagataacgtcgatgccattgccgctaccgaaggcgtagacggcatcttcgtcggccccagcgatctggccgcggcattaggccatctcggcaatgcatcacacccggatgtacaaaaagcaattcagcacatttttttgactaccctacgtcgaccccgagaaatctacgaaggtgcattgaaggcaattgcatttgaactggaaaaacggaatttaaatgacagtgtggccttaattggccaccgcatcgctcacggcggcagtatttttaccgagtccgccattattaccgatgaagtcattgataatatccgtcgcgtttctccactggcacccctgcataattacgccaatttaagtggtattgaatcggcgcagcaattatttccgggcgtaactcaggtggcggtatttgataccagtttccaccagacgatggctccggaagcttatttatacggcctgccgtggaaatattatgaagagttaggtgtacgccgttatggtttccacggcacgtcgcaccgctatgtttcccagcgcgcacattcgctgctgaatctggcggaagatgactccggcctggttgtggcgcatcttggcaatggcgcgtcaatctgcgcggttcgcaacggtcaaagtgttgatacctcaatgggaatgacgccgctggaaggcttgatgatgggtccccgcagtggccatgtcaactttgggcggatcgccattgatgacaaagtaagcaaagcggatctggaaatttttgttgatcccttaagcaagccgctgccgttcagcgaagttactggatcgaaaggtaaagcggataaagaaaaggtgggcgattacgtttttggcctgaaggcgcagggactatataacggtgaaccgctcacgggtacggaaaaaataggcggtatgctggcgctgcgtggcgaagggacgccgtttccggtacaggctgatttccgatctggtaacacccatgttgcttttgatggcgtcgtgaatgacccaatgaagatgggcggtgtccatttacagcttaaattttctggcgattcactgggggatctttatgaactgacgggcgttctgctgcccgataccccgccggttgaaacagatggtcggctggtacagaaaatcgacactcctagacgaaccctagctcgtaccctccccattcttccccagccgtttggtcagggcatcaacagcacgctcgacggcagccgtctcttccgcaaaccaggccacttcaagcggaccgggtgccatacgccactcttcagtaatggcttccgccacataacgttgctggcgcttaatgccgtgatgcaggaactttgcgcctccgcgcatggctttgctgattccttcagcggcgatatcaccggtataaggggccagcagttccgcagggtcgaactctgccagatctgccagcgcaacgaagttttgcaccacctgaatatcgccctgcacttccagctcaccactgcgaatcagtgcggtaagctgctggcgatcgcgaagtttcggcaacacactggcgtaggcgataacggtgcagtcagcatcgcctgcccattcgcccagtacatcaacctggcgttcgctgaacaaaaaatgttaaacccttcgtctgatgtttttcatctcggcctcactaaaaacgatttacaaggggctacgcttgccatcgtccctggcgacccggatcgtgtggaaaagatcgccgcgctgatggataagccggttaagctggcatctcaccgcgaattcactacctggcgtgcagagctggatggtaaacctgttatcgtctgctctaccggtatcggcggcccgtctacctctattgctgttgaagagctggcacagctgggcattcgcaccttcctgcgtatcggtacaacgggcgctattcagccgcatattaatgtgggtgatgtcctggttaccacggcgtctgtccgtctggatggcgcgagcctgcacttcgcaccgctggaattcccggctgtcgctgatttcgaatgtacgactgcgctggttgaagctgcgaaatccattggcgcgacaactcacgttggcgtgacagcttcttctgataccttctacccaggcgtggcgttcagcaacggggagcgcgccaagcagctccggcgcttctccatcgccaccctaaggggttttggcgtgggcaagcgcggcatcgaggaacgcatccaggaggaggcgggcttcctcatcgacgccctccggggcacgcacggtgagcgccaatatcgatccggctgcacgaagcaagtgacccatgaagtgttccttatgctgggctccgtgttgaaaaaccccaggttcttctccaacccccgggacttcaatccccagcacttcctggataagaaggggcagtttaagaagagtgatgcttttgtgcccttttccatcgcttggaagttcctgttagaatctaccattgagccgccaccagctgatactcccttaactgccaagcacccaatacctgcgcccag

SEQ ID NO: 24425 - DNA, 4994 bp, Homo sapiens
  SIMILAR (928)..(1671): 911254mologous to Escherichia coli 37KD protein, similar to YI22-ECOLI,accession number D85613,Smith-Waterman Score=1212.
atgagtcatcaacttaccttcgccgacagtgaattcagcagtaagcgccgtcagaccagaaaagagattttcttgtcccgcatggagcagattctgccatggcaaaacatggtggaagtcatcgagccgttttaccccaaggctggtaatggccggcgaccttatccgctggaaaccatgctacgcattcactgcatgcagcattggtacaacctgagcgatggcgcgatggaagatgctctgtacgaaatcgcctccatgcgtctgtttgcccggttatccctggatagcgccttgccggaccgcaccaccatcatgaatttccgccacctgctggagcagcatcaactggcccgccaattgttcaagaccatcaatcgctggctggccctaggcgtcatgatgactcaaggcaccttgttcgatgccaccatcattgaggcacccagctctaccaagaacaaagagcagcaacgcgatccggagatgcatcagaccaagaaaggcaatcagtggcactttggcatgaaggcccacattggtgtcgatgccaagagtggcctgacccacagcctggtcaccaccgcggccaacgagcatgacctcaatcagctgggtaatctgcttcatggagagaagcaatttgtctcagcgatgccggctaccaaggagccacagcgcgaggagctggccgaggtggatgtggacctgctgatcgccgagcgtcccggcaaggtaaaaaccttgaagcagaatccgcgcaagaacaaaacggccatcaacatcgaatacatgaaagccagcatccgtgccagggtggagcacccgtttcgcatcatcaagcggcagttcggcttcgtgaaagccagatacaaggggctgctgaaaaacgataaccaactggcgatgttattcaccctggccaacctgtttcgggtggaccaaatgatacagctgccaacgtatgagttatcgtcgggtataggcgctgttcgcagacaggcagaacttgatggtacgcctgcgatcaattccaaacgtgtttaccggatcatgcgccagaatgcgctgttgcttgagcgaaaacctgctgtaccgccatcgaaacgggcacatacaggcagagtggccgtgaaagaaagcaatcagcgatggtgctctgacgggttcgagttctgctgtgataacggagagagactgcgtgtcacgttcgcgctggactgctgtgatcgtgaggcactgcactgggcggtcactaccggcggcttcaacagtgaaacagtacaggacgtcatgctgggagcggtggaacgccgcttcggcaacgatcttccgtcgtctccagtggagtggctgacggataatggttcatgctaccgggctaatgaaacacgccagttcgcccggatgttgggacttgaaccgaagaacacggcggtgcggagtccggagagtaacggaatagcagagagcttcgtgaaaacgataaagcgtgactacatcagtatcatgcccaaaccagacgggttaacggcagcaaagaaccttgcagaggcgttcgagcattataacgaatggcatccgcatagtgcgctgggttatcgctcgccacgggaatatctgcggcagcgggcttgtaatgggttaagtgataacagatgtctggaaatatatgggcaaatccaattaggcacgggtgaactgaatattaccaccggagtagtagttacagcccgtgatacacacattgctctcaatttccaaaagcgccgtaccaccggccttgccacgcagagccgccagcgttgccagaatcgccgtcgggtgatgggcaaaatcgtcatataccgtgacgccattcgcttcaccacgcaactccagacggcgacgagcattaataaacgaacccagcgcgttagcggcatctgccggcgctacaccaacatggcgagccgctgcaatcgccatcaggccattgtgcatattatgttcgcctaccagcgaccatttcacttcgcccactttttcgccatccagcaaaacttcccattcggaagcatcggtggtcagctttttcgcctgccagtgaccctgctcacccaccagctcctgctcgctccagcagcccatcgccatggtctgtttcaggttgatgtcattttccggccagataatacggccctgccccggaacgatacgcaccagatggtggaactgtttctggatcgctttcaggtcgtcaaagatatcggcgtgatcgaactcaaggttgttgaggatcagcgtacgcgggcagtaatgaacaaatttagagcgtttgtcgaaaaaggcgcagtcatactcatccgattcgataaaaaaaaggatatttttctccagtaccgcttccacacacggatttccacgggtcatggcgttgccaataatcaccagatccggctgcggctcgagctggctggcatcgtacccctgaatcagctcaatcccttgcctctcaactctgttccgatgatcaacatcatgaacggtggtgagaacgctgacaacaacgttgatatccaggaattcatgattcagccggttggcgcgaaaactgtgaaagaagccatccgcatgggttctgaagttttccatcacctggcaaaagttctgaaagcgaaaggcatgaacactgctgttggtgacgaaggtggctatgcgccgaacctgggttccaacgctgaagctctggctgttatcgctgaagctgttaaagctgctggttatgaactgggcaaagacatcactttggcgatggactgcgcagcttctgaattctacaaagatggtaaatacgttctggctggcgaaggcaacaaagcgttcacctctgaagaattcactcacttcctggaagaactgaccaaacagtacccgatcgtttctatcgaagacggtctggacgaatctgactgggacggtttcgcataccagaccaaagttctgggcgacaaaatccagctggttggtgacgacctgttcgtaaccaacaccaagatcctgaaagaaggtatcgaaaaaggtatcgctaactccatcctgatcaaattcaaagcacaacatgcaggtttgttacatatgtatacatgtgccatgttgggggtgggggggcaatgctggcggtactgcatgtctcaggcgttcaaagaggaccgattcgcgcaggatcagcgcgtcgcagtgaccaaaaacgtagttcgccagttggttaaattgctcatcctggaacgggccaacactgtgaccaatcataaacagcggctttttcgccataaacgtgcaaagtgcatgttcaaactgcggcacgccatagagatcgacaaaaaacgatccgccgacctggataatggcgtcgaacagcggatcgcccattaccgggcggttgagcagccaggaagaactgaccggatagcggctcatcacatccacttcggcgtgtggattgagaatgttgatggcatcaaggaaaagatcgcaattgttcagcagagctttgaaccggggatgacggtctccctcgttgcccggcaaccatggtgtagcagccagccagttatttctctggcgtaagcaataccaggaaggaagtcttactgctgtcgccgccggagaacaggttgttcctgcctctgaacttgctgccgccatgaagcagattaaagaactccagcgcctgctcggcaagaaaacgatggaaaatgaactcctcaaagaagccgttgaatatggacgggcaaaaaagtggatagcgcacgcgcccttattgcccggggatggggattgcacgtcattctcagacgaaccgatgactggatggatggccgccgcagtcgtcacactgatgatacggatgtgcttctccgtatacaccatgttatcggagagctgccaacgtatggttatcgtcgggtatgggcgctgcttcgcagacaggcagaacttgatggtatgcctgcgatcaatgccaaacgtgtttaccggatcatgcgcccagaatgcgctgttgcttgagcgaaaacctgctgtaccgccatcgaaacgggcacatacaggcagagtggccgtgaaagaaagcaatcagcgatggtgctctgacgggttcgagttctgctgtgataacggagagagactgcgtgtcacgttcgcgctggactgctgtgatcgtgaggcactgcactgggcggtcactaccggcggcttcaacagtgaaacagtacaggacgtcatgctgggagcggtggaacgccgcttcggcaacgatcttccgtcgtctccagtggagtggctgacggataatggttcatgctaccgggctaatgaaacacgccagttcgcccggatgttgggacttgaaccgaagaacacggcggtgcggagtccggagagtaacggaatagcagagagcttcgtgaaaacgataaagcgtgactacatcagtatcatgcccaaaccagacgggttaacggcagcaaagaaccttgcagaggcgttcgagcattataacgaatggcatccgcatagtgcgctgggttatcgctcgccacgggaatatctgcgggagcgggcgttgtaatgggggcaaatccagttgtgcaccacgcgatgaccgtaaagttcgcgtgatggcagccgattatgaaaatcagctcgacgagttttccctcgatgcgcccattgtcgcacatgaaaactatcaatgggctaactacgttcgtggcgtggtgaaacatctgcaactgcgtaacaacagcttcggcggcgtggacatgagatcagcggcaatgtgccgcaggtactcagctcaagaacagccttctccagaagtctcccctgagaactgcaggctggattccctggatgagcagtgtaggaagagcttatctgtcattacttcccagtgtctgtttatcagcttattcaatgcacccagaagcaagcagttccatggggattaa

SEQ ID NO: 24426 - DNA, 2851 bp, Homo sapiens; identical to SEQ ID NO: 15910
  SIMILAR (1412)..(2182): 881254mologous to Escherichia coli hemN,accession number D16509,Smith-Waterman Score=1149.

SEQ ID NO: 24427 - DNA, 1578 bp, Homo sapiens
  SIMILAR (1)..(618): 931254mologous to Escherichia coli similar to human protein that oxidizes 11-cis retinol into 11-cis retinaldehyde,accession number U82664,Smith-Waterman Score=975.
atgggatttaccggcgtgttgatcgatctggattcaccagaaagtgttgatcgcgcagccgacgaggtgatcgccctgaccgataattgtctgtatgggatctttaacaatgccggattcggcatgtatggccccctttccaccatcagccgtgcgcagatggaacagcagttttccgccaactttttcggcgcacaccagctcaccatgcgcctgttacccgcgatgttaccgcacggtgaagggcgtattgtgatgacatcatcggtgatgggattaatctccacgccgggtcgtggcgcttacgcggccagtaaatatgcgctggaggcgtggtcagatgcactgcgcatggagctgcgccacagcggaattaaagtcagcctgatcgaacccggtcccattcgtactcgcttcaccgacaacgtcaaccagacgcaaagtgataaaccagtcgaaaatcccggcatcgccgcccgctttacgttgggaccggaagcggtggtggacaaagtacgccatgcttttattagcgagaagccgaagatgcgctatccggtgacgcatgagcgcggcaagctggcggaactgcgtttgctggtgatccctggccaggtggattatttgcaacacatcgaagaactggcggcgtttatcaagggactcggcgatgttccggtacgcctgaacgcgtttcatgcccacggcgtgtatggcgaggcgcaaagctgggcgagcgccacgccggaagacgttgagccgttggctgatgcgttaaaggtgcgcgggacttgtaggcctgataagacgcgtcaagcgtcgcatcaggcattgtgcgccaactgccggatgcggcgtaaacgccttatccggcctacggttcggcacaaacctgcaacggctgccggatgcggcgtgaacgccctatccgacctacggttatgttctggctcgttggcctttggcaacgattatcctatgagattggggcaattacgcgccctcgtcaaatcattgcgctttttctttacgcggttggcgcaacacttcgttgatttgcggatcgtccagcggacccgaaatgtgatagcgcaaaatggagactttgctccacagcggccccagcactttactggcggcaaacactgccgcgccaacaataaggttaaccgcaaaagccgcagccacgcccaccgtcgcagaaatctctggtgcgacaaccgcttccatattcaggtcgcgacgtaccagatttaccgaccctttcatggcgatatccgcctccaggccatccaccagcgtgtcgtcggtgtgcataacgccgtctttaatccacgcggtgctgggaatggagtcaaaatagaacccgtcgcttatacagagaagcggggaaggcgacggaagagggcgaaagcgcgagagcagacacagagcgacgcgaaaggaaagagaccaagaacgaagaagaaaagatggcaagagagagggggagaaaagcgcagagagacgacgacagcagaccagagcgcaaacgagcacagtcaagagcgcaagttgacccgggataaaagcaaatga

SEQ ID NO: 24428 - DNA, 789 bp, Homo sapiens
  SIMILAR (789)..(172): 931254mologous to Escherichia coli similar to human protein that oxidizes 11-cis retinol into 11-cis retinaldehyde,accession number U82664,Smith-Waterman Score=975.
cccgcgcacctttaacgcatcagccaacggctcaacgtcttccggcgtggcgctcgcccagctttgcgcctcgccatacacgccgtgggcatgaaacgcgttcaggcgtaccggaacatcgccgagtcccttgataaacgccgccagttcttcgatgtgttgcaaataatccacctggccagggatcaccagcaaacgcagttccgccagcttgccgcgctcatgcgtcaccggatagcgcatcttcggcttctcgctaataaaagcatggcgtactttgtccaccaccgcttccggtcccaacgtaaagcgggcggcgatgccgggattttcgactggtttatcactttgcgtctggttgacgttgtcggtgaagcgagtacgaatgggaccgggttcgatcaggctgactttaattccgctgtggcgcagctccatgcgcagtgcatctgaccacgcctccagcgcatatttactggccgcgtaagcgccacgacccggcgtggagattaatcccatcaccgatgatgtcatcacaatacgcccttcaccgtgcggtaacatcgcgggtaacaggcgcatggtgagctggtgtgcgccgaaaaagttggcggaaaactgctgttccatctgcgcacggctgatggtggaaagggggccatacatgccgaatccggcattgttaaagatcccatacagacaattatcggtcagggcgatcacctcgtcggctgcgcgatcaacactttctggtgaatccagatcgatcaacacgccggtaaatcccat

SEQ ID NO: 24429 - DNA, 2112 bp, Homo sapiens
  SIMILAR (1453)..(2028): 941254mologous to Escherichia coli 6-phospho-beta- glucosidase,accession number U29579,Smith-Waterman Score=956.
atgagcgcagcacgcggcgtatttgaacgcggcgactggtcactctcttctccggctaaacgtaaagcggtactgaataaactcgccgatttaatggaagcccacgccgaagagctggcactgctggaaactctcgacaccggcaaaccgattcgtcacagtctgcgtgatgatattcccggcgcggcgcgcgccattcgctggtacgccgaagcgatcgacaaagtgtatggcgaagtggcgaccaccagtagccatgagctggcgatgatcgtgcgtgaaccggtcggcgtgattgccgccatcgtgccgtggaacttcccgctgttgctgacttgctggaaactcggcccggcgctggcggcgggaaacagcgtgattctaaaaccgtctgaaaaatcaccgctcagtgcgattcgtctcgcggggctggcgaaagaagcaggcttgccggatggtgtgttgaacgtggtgacgggttttggtcatgaagccgggcaggcgctgtcgcgtcataacgatatcgacgctcttgccgcggcattgatatcaatatcgcggcatatagatccagatctatcgggtaaatcacgcacagtgcgtgaagccgaattcttcgaacttttcggcgagaaagtaaacgcagaaaacatcgtcgcccgttatgccaaactgcatctctatgatgcatttgccattcaggaatcacgccgtgttgatgctggtaatgaaatcgctccgttactgaaggtggaagggatgaaggtcggtctgatgacctgttatgacttacgctttccagagctggcgctggcacaggcattacagggagctgaaatcctggtacttcctgccgcctgggttcgcgggccgctcaaagagcatcactggtcaacgttgcttgccgctcgtgcgctggataccacctgttatatggtggcggcgggggagtgcgggaacaaaaatatcggtcaaagccggattatagatccctttggcgtcaccattgcggcagcgtcagaaatgcctgcactcattatggcggaagtgacgcccgaacgtgtgcgtcagaggatccccagttttaacgccgtggcagagttgataaacgccgggcatcaggagattgctttccttaccggctcgatggattcccccaccagcattgaacgtcttgccgggtataaagacgcgctggcgcagcatggtattgcgctcaatgaaaaacttatcgctaacggtaaatggacgcctgccagcggggccgaaggggtagaaatgttgctcgaacgtggggctaaatttagcgcgttagttgccagtaacgacgatatggcgataggtgcgatgaaagcgttacacgagcgcggcgtagcggtgccagagcaggtgtcagttatcggattcgatgatatcgctattgccccctacaccgttccggcgctctccagcgtaaaaattccggcgcggggcacgtatccggcttactctgcccgcgtattccgcgaaaaaggggtacccatcaacaaagcaccgggcgatgatgaaatcctgaaaaacaccgtcgattttgtctctttcagctattacgcctcgcgctgcgcctcggcggagatgaacgccaacaacagcagtgcggcgaacgtggtgaaatcgctgcgtaatccgtatctacaggtgagcgactggggctggggaattgatccactcggtctgcgtatcaccatgaatatgatgtacgatcgttatcagaagccgctgtttctggtggaaaacggcctgggcgcaaaagatgaatttgctgccaatggcgagattaacgacgactatcgcatcagctacttacgcgaacatatccgcgcaatgggcgaagcgattgcagacggcattccgctgatgggctacaccacatggggctgtattgatttagtttccgcctctacgggtgaaatgagcaaacgctacggctttgtctttgttgaccgtgaccacgcaagcgacgggacgcttacgcgcacgccaacgaaagactgcgactccccggactatcaggccgggagagtccacttccagctcacctcggagctccgggagcctttcagcacctgcttg

SEQ ID NO: 24430 - DNA, 976 bp, Homo sapiens
  SIMILAR (111)..(902): 891254mologous to Escherichia coli hemN,accession number D16509,Smith-Waterman Score=1196.
ggggcggacaggcgcgatatcgtttaatgcggcggcgagccagcaatgagcaacgaagctggcgctatctggatatcatcaaccggatgattgaacgacctgaaacccgttacacgcgtgagattggttttacctccaccaacatcgacctgatttacggcctgccgaaacagacgccggagagtttcgcctttaccctgaaacgtgtggcggagctgaaccccgatcgtctgagtgtctttaactacgcgcatctgccgaccatttttgctgctcagcgcaaaatcaaagatgctgacctgccgagtccgcagcaaaaactcgatatcctgcaggaaaccatcgccttcctgacgcaatcgggctatcagtttatcggtatggatcactttgcccgtccggatgacgagctggcggtggcccagcgtgaaggcgtgctgcatcgtaacttccagggctacaccactcagggcgataccgatctgctggggatgggcgtttccgccatcagcatgattggcgactgctacgcgcagaaccagaaagagttgaagcagtactatcagcaagtggatgaacaaggcaatgcgctgtggcgtggtattgcgctaacgcgtgatgactgtattcgccgcgatgtgattaagtcgctcatctgcaacttccgtctggattacgcccctattaagaaacagggggatttgcacttcgctgattactttgcggaagatctcaagctgctcgccccgttagcaaaagatgggctgggggatgtggatgagaagggaatacaggtgacggcgaaaggccggataaggcgtttacgccgcatcaggcatctgagcatgatgcctgatgcggcgctggtcgcgtcttatcaggcctacgactttctccgcatccggcataaacaacgagcttcagctaaacggcccaatcattgcggcacacagcacggcagcaacggcagtttgcg

SEQ ID NO: 24431 - DNA, 1776 bp, Homo sapiens
  SIMILAR (1)..(579): 1001254mologous to Escherichia coli, K12, Peptide, 378 aa AppB=cytochrome d oxidase, subunit II homolog,accession number S63811,Smith-Waterman Score=1024.
atgtttgattatgaaacattgcgcttcatctggtggctgctgattggcgtgatcctggtggtctttatgatctccgacggatttgacatggggatcggctgtctgctgccgctggtggcgcgtaatgatgatgaacgccggatagtgataaacagcgttggtgcacactgggaaggcaaccaggtctggttgatcctcgctggtggggcattatttgccgcctggcccagagtgtatgcagcggcgttttccggcttttatgtggcgatgatcctggtgctgtgctcactgttcttccgcccgctggcctttgattatcgcggaaaaatcgccgatgcacgctggcgtaaaatgtgggacgccggtctggtcatcggcagtctggtgccgccggtagtcttcggtatcgccttcggcaacttgttgctcggcgtgccgtttgccttcacaccgcaattacgcgtggagtatctcggcagcttctggcaactgctgacgccattccctttattgtgcggattgctcagccttgggatggtgattttgcaaggtggcgtctggttacaactgaaaactgttgccaatccacaaatccacacaggttttcggtccgataaacggtacgtcatcggcacaattctgcatcacggcagcagcgacgttaacgtcgatatgatcgttgtgatcgtgagtcgccagtaccgcgtcgatctggcgaatcgcaaacggatcaagaacaaacggggtgagtcaagaggaactgctccaacaagcactcgtcgcgcaactggcgatagtgaacagcttgaaggtgtgcaactgccggagccggatgaaccttcagcacgtcacgccttacccgccaacgaaccgcgcattgtgctgaacaatggcgtggtttcttataacgatcgccccattcttaataaccttagctggcagcatatcggttacgtcagcagtagtttgcatctggattaccgggtcagcactaccgtgcgtaatgtgattctttctggctattttgattcgattggcatttatcaggccgtttcggatcgccagcaaaaactggtgcagcagtggctggatattctcggcattgataaacgcacggctgacgctccgttccatagtctttcctggggacagcagcgtctggcgctgattgtccgcgcactggtgaaacatccgacgttgcttattctcgatgaaccactacaggggcttgatccgctgaatcgccagcttatccgccgttttgttgatgtgctgattagcgaaggctttattcccggtgactggatcaaagaaggcgcaattgtgattgatgtcggcatcaaccgtctggaaaatggcaaagttgtgggcgacgtcgtgtttgaagacgcggctaaacgcgcctcatacattacgcctgttcccggcggcgttggcccgatgacggttgccacgctgattgaaaacacgctacaggcgatgagtaacatggcgacattttctttaggtaaacatccgcacgttgagctgtgcgacttgctgaaactggaaggctggagcgaaagcggcgcgcaggcgaaaatcgcgattgccgaaggccaggtgaaagtcgacggtgcggttgaaacgcgcaaacgctgcaaaatcgtcgccggtcagacaacttttgccctctacgccccgttcatccatgctgatagcatcgacattttgccgaagcgaccatcatgccaaccgttattacgcacgccgccgttcccctatgcattggtttag

SEQ ID NO: 24432 - DNA, 2425 bp, Homo sapiens
  SIMILAR (1)..(747): 991254mologous to Escherichia coli 3-(2,3- dihydroxyphenylpropionate)1, 2-dioxygenase,accession number Y09555,Smith-Waterman Score=1293.
atgcacgcttatcttcactgtctttcccactcgccgctggtggggtatgtcgacccggcgcaagaggtgctcgatgaggtcaatggcgtgattgccagcgcccgcgagcgtattgcggcattctcccctgaactggtggtgctgtttgcgccagatcactacaacggctttttctatgacgtgatgccaccgttctgtttaggcgttggagcgacggcaattggtgatttcggcagtgcggcaggagagctgcccgtgcctgtggagctggcggaggcctgtgcgcatgccgtcatgaagagcgggatcgatcttgccgtttcttactgtatgcaggtggaccacgggttcgcccagccgctggagttcctgctcggtgggctggataaggtgccagttctgcctgtgttcatcaacggtgtcgccacgccgctgcccggtttccagcgtacccgcatgttgggtgaagccattggacgtttcaccagcactctcaataaacgcgtgctgttcctgggttccggtgggctttcccatcagccgccggtgcccgaactggcgaaagccgatgcccatatgcgcgaccgtctgttggggagcgggaaagatttacccgccagtgagcgcgaattgcgtcagcaacgggtgattagcgccgctgagaagtttgttgaggatcagagaacgctgcatccgctcacaccgatttgggataaccagttcatgactttgctggagcagggacgctacgggactgacatctgttatcacttaacccattacaagcccgctgccgcagatattcccgtggcgagcgataacccagcgcactatgcggatgccattcgttataatgctcgaacgcctctgcaaggttctttgctgccgttaacccgtctggcgcttttgggtgtcgagcagaccatccggatggagaactttttcttaccgggtacgttgccgatgggggttaccattcttgatgaaaatggtcataccctgatttcgcttaccggaccagaaagtaaaattaagggcgatcctcgctggatgcaggaacgctcctggtttggctatacggaagggttccgggagctggtgctgaagaaaaatctgccaccctcatcgctaagcatcgtgtattcggtgccggttgataaggtgctggaacgcattcgcatgttgatccttaacgcaattttgctgaatgtgcttgccggagctgcattgtttactctcgcacggatgtacgagcgacgtattttcattccggcggaaagcgacgccctgcgactggaagaacatgagcagttcaatcgcaagattgtcgcctccgcgccagtgggtatctgcattttgcgtaccgctgatggcgtcaatattttaagtaacgaactggcgcatacctatctcaatatgcttacgcatgaggaccgccaacgactgacgcaaattatctgtgggcagcaggtcaataccgttgatgtcctgaccagccaccataccaatctgcaaatcagcttcggtcattcgcgctctctcttgttcggtattcgcaaatcacttgagcaaattgagtgggtgaatgttgtcggcgaatttgaagactctacagcactgatcaacaacctgccgaaactggatgcgcatgtgttgattaccgatctctccatgcctggcgataagtacggcgatggcattaccttaatcaagtacatcaagcgccatttcccaagcctgtcgatcattgttctgactatgaacaacaacccggcgattcttagtgcggtattggatctggatatcgaagggatcgtgctgaaacaaggtgcaccgaccgatctgccgaaagctctcgccgcgctgcagaaagggaagaaatttaccccggaaagcgtttctcgcctgttggaaaaaatcagtgctggtggttacggtgacaagcgtctctcgccaaaagagagtgaagttctgcgcctgtttgcggaaggcttcctggtgaccgagatcgctaaaaagctgaaccgcagtattaaaaccatcagtagccagaagaaatctgcgatgatgaagctgggtgtcgagaacgatatcgccctgctgaattatctctcttcagtgaccttaagccagataagacgcgttagtgtcttatctggcatttgcaccgattgccggatgcggcgtaaacgccttatccggcctacgattcccattatttcaacaaattacattaaagtaggccagataagacgcgtcagcgtcgcatctggcatttgcgctgaatgccggatgcggggtaaacgctttatcgtcctaggaattccgggatttctggacctctcggggtataacgcagcgtctgggaagcgccaaagcttgcatgcctgcagccgcgtaacctggcaaaatcggttacggttga

SEQ ID NO: 24433 - DNA, 4290 bp, Homo sapiens
  SIMILAR (1393)..(2367): 921254mologous to Escherichia coli O157:H7 2-keto-3-deoxy-D- gluconate transport system,accession number AE005622,Smith-Waterman Score=1446.
atgactgcaggcagcgagatgcgaagttcatactgcaacagccgcgcgaaagtagaagacaccgctgcgcgcctgcaaagcaagggaattagcgcggcggcctatcatgccgggctggaaaataatgttcgcgccgatgtgcaggaaaaattccagcgcgatgacctgcaaattgtggtggcgacggtggcgttcggcatgggcatcaataaaccaaacgttcgcttcgtggtccactttgatattccgcgcaatatcgaatcctattatcaggaaaccggacgcgccgggcgtgatggcctgcccgcggaagcgatgctgttttacgatccggctgatatggcgtggctgcgccgttgtctggaagagaagccgcaggggcagttgcaggatatcgagcgccacaaactcaatgcgatgggcgcgtttgccgaagcgcaaacttgccgtcgtctggtattgctgaactattttggcgaagggcgtcaggagccgtgcgggaactgcgatatctgcctcgatccgccgaaacagtacgacggttcaaccgatgctcagattgccctttccaccattggtcgtgtgaatcagcggtttgggatgggttatgtggtggaagtgattcgtggtgctaataaccagcgtatccgcgactatggtcatgacaaactgaaagtctatggcatgggccgtgataaaagccatgaacattggaggcgggcgcacgtgttggcggaaatctccatgcaattgccggccgcgttcgtggcgccaaacgaagcaagcgaaatcgtcggggaaattaacccactgtcgcaattaccaaagaccattattgtcggagttatcaacctcaccttcaccgttctggcaattatgacggtggataaattattggtcgtgaagccactgcaaattgttcctgcaaaacttccgcgccacgctgatacccactatcgccgtgccggtggtgttgatgggaaccttctccgtactttacgccttcggttacagcgtcaacaccttaaccatgttcgcgatggtgctggcgatcggtctgctggtttaccttcactcacccatgaacagcagcaaaaagctgtcgagcggatccaggaactgatggcacaagggatgagcagcggccaggcaatcgcgctggtggcagaagagctgcgtaccagtttagcttcagtttgcgccagcacttcaggttcaccgcccacaagaaataccggcgtccttctttgcctgcgcgcgccatcagctcttcccagagatcggcaccggcaacgcgggaaacctgcgcctgcgggtactttttacgtactgaacctgcccgtcagcaaacagataatcgttggcagtcaggatggttattttaaacccgagcagcgtcaggcgctgtttgaacgcattcatgccagcggtgcgcaaatcgtcaccgttgcgatgggatcgccaaagcaggagatcatcatggcggggaaatattttggatcattcaccaacgggatgattaccggtacggtgcccattctggcggtgtggtttttttgcatgggggcgtcaataaaattaagcgcgacgggaacggtactgcgtaaatccggtacgctggtggtaactaaaattgccgtcgcgtgggtggttgcggcaattgcctcgcgtattattccggaacatggtgttgaagttggattctttgccggactttcaacgctggcgctggtggcggcgatggatatgaccaatggcggactttacgcttccatcatgcagcagtacggcacaaaagaagaagctggggcatttgtgttgatgtcgttggagtccgggccgctcatgacgatgattattctgggcactgccgggattgcctcgtttgaaccgcatgttttcgtcggcgcagtattaccgttcctggtgggctttgccctggggaaccttgaccctgaattgcgagaatttttcagcaaagcggtgcaaacgctgattccattctttgccttcgcgctgggcaataccattgatttgactgtgattgcccagactggtttgctggggatcctgttgggtgtggcagtaattatcgtgaccggtattccgttgattatcgccgataaattgattggcggtggcgatggcactgccggaattgccgcttccagttccgcaggggccgcggtagcgacacctgtgctgattgcagaaatggtgcctgcgtttaaaccgatggctccggcagcaacttcgctggtagcgacggcggtcattgtgacttcgattctggtgccaattcttacctctatctggtcacgtaaagtcaaagccagagcagcgaaaatcgaaattttaggtacgatacacatccagaccagtgccgaaaccggcaaagaagcgatgtcaatgccgtcagagatcggcgctaacctgtcgctgggcggttcatcactggcagtggcgtggaaaacgaaaaacccggaactgcgtcagacggcgctggctgcggcggcatcagccattatggcggggatttccgaaccggcgttatatggcgtggcgatccgcctgaaacgtccgcttatcgccagtcttatcagcggttttatttgcggcgcggttgccggtatggcggggcttgccagccactcaatggcagcgccggggctatttaccagcgtgcagttcttcgatccggcgaatccaatgagcatcgtctgggtgttcgcggtcatggcgctggcggtggtgctgtcgtttatcctcacactgttgctcggctttgaggatattcctgttgaggaagcggctgcccaggcgcgaaagtatcagagcgtacaaccgaccgtcgccaaagaatctgaaggtgcgttccgtgaaggtgacaaaggtctgaccactgtcgatatgatcccacacggcgagcatcgaatggcggtgaaactggggctggaaaaacgttttcagttgcgagatgacgagttttatcccagccatgaggcgacggatttttatcatcgttataaagaagatatcggcctgatgcagagatggatatcagtttccggtaccctgcgggttaatacctcaccaccctggttaaagatgaaattccatttacgcggcaaagagggagaaggcgtaacgattaccaatctgcgtaatctgtttttcacccctgcggggatcaaagaagagaatatccagaagctcactattgataactaccgcgagcatgatcagaaactggcgcgtgattgcggactggatttggtgggagagatggttgatattgtggcgcatggcgagttgggcggcgacttttcgttagtgcctgacagctacgtgacgatggggccgaaaagcatcatggcggcgaaaaacttgctgataattgtcagcggcgcgggtaaagcgcaggcactgaaaaatgttctgcaaggccaagcgacaaaaacacggcccccgcaacagaaaggacacacccccggcaggacaggagacggacaacccaaacaaaacgaaagcccctcacggcggccgaaccgccatcagaaaggcagtattggtatggtgctggcaaaaagccaccagttactggaaaaacgctatccggaatcaaaaatctcctgggtggagttccccgcgggtccgcaaatgttggaagcgttaaacgttggcagtattgatctcggcagtaccggggatattccgccaatctttgcccaggctgccggggctgatttggtgtacgtgggcgtcgagccaccgaagcccaaagccgaagtgattctggtggcagaaaacagcccgatcaaaaccgtagccgatcttaaaggtcacaaagttgcctttcagaaaggttccagttcacacaaccttttactgcgtgcactgcgtcaggccggacttaagtttaccgatatccaacccacttacctgacgcccgctgatgcccgcgccgcgttccagcaaggtaacgttgacgcctgggctatctgggatccctactactctgctgcattattacagggcggcgtgcgggtgctgaaagacggcaccgatctcaatcaaactggatcgttttatctggcagctcgtccctatgcagaaaaaaacggcgcttttattcagggcgtactggcaacctttagtgaggccgatgcgttaacccgcagccagcgcgagcaaagcatcgctttactggcaaaaacgatgggcttaccggcaccggtgattgcctcttacttagatcatcagcctcctaccaccatacaagctggttaa

SEQ ID NO: 24434 - DNA, 4010 bp, Homo sapiens
  SIMILAR (2071)..(2373): 981254mologous to Escherichia coli acyl-coA thioesterase I precursor,accession number U82664,Smith-Waterman Score=505.
atggcgttgcggcgctgccttccagttcggttaacacgccgtggcacgatcgcaaggccacccagaccgaagaaaaagagcgcatcgcccgcaaagtggcggacgaaattccccaatggctcgacgctgtttatcgatatcggcaccacgccggaagcgcgcacgcattgcctcaatcacagcaatttgcgcattgtcaccaacaatttcaacgttgctaacacgttgatggtaaaagaagattttcgcatcattctcgccggtggcaaattacgcagccgcgatggcgggatcattggcgaagcgacgctcgattttatctcccagttccgccttgatttcggcattctggggataagcggcatcgatagcgacggctcgcttttggagttcgagccccacgaagttcgctttcaaacagcagacctgctaggcatagcagaaaacgaagctcgcgttgtagatatcgccgttaaagggcgaaaaattgctgctatcggtcaggatctgggcgatgcaaaagaagttatggatgcggcaaaaggtggtatcaccaccatgatcgaaatgccgctcaaccagctgcctgcaacggttgaccgcgcttcaattgaactgaagttcgatgccgctaaaggcaagctgactattgatgcggcacaactcggtggcctggtgtcttacaacatcgaccgtctgcatgagctggatgaagtgggcgttgtcggcttcaaatgcttcgttgcgacctgtggcgatcgcggtatcgacaacgacttccgtgatgtaaacgactggcagttcttcaaaggtgcgcagaagctgggcgaactgggtcagccggtgctggtgcactgcgaaaacgcgctgatttgtgagctttcatgcctgcaggtccaattttatcaacgctggtatcaaccaaataatatgacctttatcgtggtcggcgatatcgacacagctgaaaatcgcgtctggccgacaaaagccgaaaaccacctgcgctttaatatcattaatgataaagaaaaccgggtgaacggcatcgcactctattatcgcctgccaatggtacaagtgaacgatgagcaaagctttatcgaacaagctgaatggagcatgttagttcagctgttcaatcaacgtctgcaggaacgcatacagtcgggcgagttgaagactatttctggcggcactgcgcgcaggtgtaaaattgcacccggttatcagtcgctgtttttccgtgtaaatgcacgagacgataatatgcaggatgctgcgaatgcgttaatggcagagttggcaaccattggtcagcaagggttttctgctgaagaactcgatggtggtccttctcgttatatccttgccgatatgaacagcgacctgatcagtctctataacattgtgaagatgcgtactgatgagtacgtacaggccgcacgcgagctgtttgttcccgaaacaaattgcgccgaggtttactatcagttccgcgaagagttcaacaaaagccaggatccgttccgtcgggcggtactgtttttatatttgaaccgctacggttacaacggcctgtgtcgttacaatctgcgcggtgagtttaacgtgccgttcggccgctacaaaaaaccctatttcccggaagcagagttgtatcacttcgctgaaaaagcgcagaatgcctttttctattgtgagtcttacgccgatagcatggcgcgcgcagatgatgcatccgtcgtctattgcgatccgccttatgcaccgctgtctgcgaccgccaactttacggcgtatcacacaaacagttttacgcttgaacaacaagcgcatctggcggagatcgccgaagcctttctccatgcgatcgctgatattgcccagcgcaagcacgcagccatcgccatgcttagcgccagccagacaattaatagcgatcgcgaacgccattcgcgccagaaccaacgtgcaatcatgcttcctcctgcaactgcccgttcaccagcctgcgatggtctcgccacgtttgacaaccagctcaactccggtgaggatggagagttcatgctccccctgaccgacggacttcttaagatgatgaacttcaacaatgttttccgctggcatttgcccttcctgttcctggtcctgttaaccttccgtgccgccgcagcgatcacgttattgattctgggtgatagcctgagcgccgggtatcgaatgtctgccagcgcggcctggcctgccttgttgaatgataagtggcagagtaaaacgtcggtagttaatgccagcatcagcgacgacacctcgcaacaaggactggcgcgccttccggctctgctgaaacagcatcagccgcgttggggtgatggttgaacctgggcggcaatgacggtttgcgtggttttcagccacagcaaaccgagcaaacgctgcgccagattttgcaggatgtcaaagccgccaacgctgaaccattgttaatgcaaatacgtctgcctgcaaactatggtcgccgttataatgaagcctttagcgccatttaccccaaactcgccaaagagtttgatgttccgctgctgcccttttttatggaagaggtctacctcaagccacaatggatgcaggatgacggtattcatcccaaccgcgacgcccagccgtttattgccgactggatggcgaagcagttgcagcctttagcgttgctttctgcgggctgcttctacgcggtttactatgtcacctacaaaacccgcctacgcaaacgcgttgctgatgtaccgcgccgtccgctgtttaccatgaaccgcgtggagaccaatcttacgtgggtgatcctgatgggtatcgcgctggtaagcgtcggcatcttcttcatgcacaacggctttttgctgttccggcttaactcctacagtcagatcttttccagtgaagtctccggcgtggcgttaaaacgcttcttttactttttcatcccggcgatgctggtggtctactttctgcgccaggacagcaaagcgtggctgtttttcctcgtcagcacggtcgcctttggcttgctgacttatatgattgtcggcggcactcgcgccaatatcatcatcgcattcgctatcttcctgtttattggcattattcgcggctggatttcgttgtggatgctggcggcggcgggcgtgctggggattgttggcatgttctggctggcactaaaacgctatggaatgaataacgatactaccacgataacggggcggcagatagaccggctcttccgggtacattcgcgtttcgcatttggcgaacgcgtgcaggccgatcatccagatactacgaacctggagaatgacagccgccgttaccagcaagttgatcagcgtcagcggcaggcagattttccagccgaaggacattacctggtcataacgcggacgcgagatggtcacaatcccgatgtactcacccacgaagaacagaccgaacttcataccggaatattcaatgtggtaaccatccgccagttcctgctcggttaccggctggtcaaacgggagaccgtgacataccgcaacggacctgcaggcatgcaagctgataccgcccaagagttcatatcgacggcggtgtttggcacctcgatgtcggctcatcacatcctggggctgaaaacggagagaaccatgcacaaatttactaaagccctggcagccattggtctggcagccgttatgtcacaatccgctatggcggagaacctgaagctcggttttctggtgaagcaaccggaagagccgtggttccagaccgaatggaagtttgccgataaagccgggaaggatttagggtttgaggttattaagattgccgtgccggatggcgaaaaaacattgaacgcgatcgacagcctggctgccagtggcgcaaaaggtttcgttatttgtactccggaccccaaacttggctctgcgatcccggctcatcccctgatgctgtga

SEQ ID NO: 24435 - DNA, 5537 bp, Homo sapiens
  SIMILAR (1416)..(2531): 951254mologous to Escherichia coli 6-phospho-beta- glucosidase,accession number U29579,Smith-Waterman Score=1895.
  misc_feature (1)...(5537): n = a,t,c or g
ctgcatgctctgcacgtcccagcgaagcggagctgctggagcttatcgatacgctgaatgccgacaacaccatcgatggcattctggttcaactgccgttaccggcgggtattgataacgtcaaagtgctggaacgtattcatccggacaaagacgtggacggtttccatccttacaacgtcggtcgtctgtgccagcgcgcgccgcgtctgcgtccctgcaccccgcgcggtatcgtcacgctgcttgagcgttacaacattgataccttcggcctcaacgccgtggtgattggcgcatcgaatatcgttggccgcccgatgagcatggaactgctgctggcaggttgcaccactacagtgactcaccgcttcactaaaaatctgcgtcatcacgtagaaaatgccgatctattgatcgttgccgttggcaagccaggctttattcccggtgactggatcaaagaaggcgcaattgtgattgatgtcggcatcaaccgtctggaaaatggcaaagttgtgggcgacgtcgtgtttgaagacgcggctaaacgcgcctcatacattacgcctgttcccggcggcgttggcccgatgacggttgccacgctgattgaaaacacgctacaggcgatgagtaacatggcgacattttctttaggtaaacatccgcacgttgagctgtgcgacttgctgaaactggaaggctggagcgaaagcggcgcgcaggcgaaaatcgcgattgccgaaggccaggtgaaagtcgacggtgcggttgaaacgcgcaaacgctgcaaaatcgtcgccggccctccacaagaggtggaggagcagtcttctctaaactcccccggggaaaaggagactccctttcccggtctgctaagtagtgggtgttccttgacactttttgctaccggctttgattatcccagttcagtgcaaagacatgaaagaactcacactggagagaaaccctatgaatgcaaggaatgtggtaaagccttcagtcattcaagttacttacgaatacacgaaagagttcatactggagagaagccgtataaatgtccggcggcatcagccattatggcggggatttccgaaccggcgttatatggcgtggcgatccgcctgaaacgtccgcttatcgccagtcttatcagcggttttatttgcggcgcggttgccggtatggcggggcttgccagccactcaatggcagcgccggggctatttaccagcgtgcagttcttcgatccggcgaatccaatgagcatcgtctgggtgttcgcggtcatggcgctggcggtggtgctgtcgtttatcctcacactgttgctcggctttgaggatattcctgttgaggaagcggctgcccaggcgcgaaagtatcagagcgtacaaccgaccgtcgccaaagaatctgaaggtgcgttccgtgaaggtgacaaaggtctgaccactgtcgatatgatcccacacggcgagcatcgaatggcggtgaaactggggctggaaaaacgttttcagttgcgagatgacgagttttatcccagccatgaggcgacggatttttatcatcgttataaagaagatatcgccctgatggcagagatgggattcaaggttttccgtacctcaattgcctggagccgtctctttccgcagggcgatgaaatcacgcccaatcagcagggcattgctttttatcgttctgtctttgaagagtgtaaaaagtacggtatcgaaccgctggtcacgttgtgccacttcgatgtgccgatgcatctggtcaccgaatatggctcctggcgtaaccgcaagctggtggagtttttcagccgctacgccagaacctgctttgaagcatttgatggtctggtgaaatactggctaacctttaatgaaatcaacattatgttgcctagcccgtttctccggcgcgggtctcggtgtttgaagaaggtgaacaatcaggatcaggtgaaatatcaggccgcgcatcaccagctggttgccagtgcgctagccaccaaaatcgcccatgaggttaacccgcaaaatcaggtgggctgtatgctggcgggcggtaacttctacccttacagttgcaagccggaagatgtctgggcggcgctggagaaagaccgggaaaacctgttttttatcgatgtgcaggcgcggggcacgtatccggcttactctgcccgcgtattccgcgaaaaaggggtaaccatcaacaaagcaccgggcgatgatgaaatcctgaaaaacaccgtcgattttgtctctttcagctattacgcctcgcgctgcgcctcggcggagatgaacgccaacaacagcagtgcggcgaacgtggtgaaatcgctgcgtaatccgtatctacaggtgagcgactggggctggggaatcgatccactcggtctgcgtatcaccatgaatatgatgtacgatcgttatcagaagccgctgtatctggtggaaaacggcctgggcgcaaaagatgaatttgctgccaatggcgagtccggccccggcgaaatcgggaaaacgctcgccgcatttgctacctttggcgtcggatttcttttccgtccgctcggcggtgtcattttcggtcactttggcgaccgactgggacgtaagcgcatgttaatgctgaccgtctggatgatgggcatcgcgacagccttgattggtattcttccttcattctcgaccattgggtggtgggcacctattttgctggtgacactgcgtgccattcagggatttgcagtcggcggcgaatggggaggcgcggcgttgctttccgttgaaagtgcaccgaaaaataaaaaagccttttacagtagcggtgtacaagttggctacggtgtaggtttactgctttcaaccggactggtttcattgatcagtatgatgacgactgacgaacagatttttaagagcgccgggtatcgaatgtctgccagcgcggcctggcctgccttgttgaatgataagtggcagagtaaaacgtcggtagttaatgccagcatcagcggcgacacctcgcaacaaggactggcgcgccttccggctctgctgaaacagcatcagccgcgttgggtgctggttgaactgggcggcaatgacggtttgcgtggttttcagccacagcaaaccgagcaaacgctgcgccagattttgcaggatgtcaaagccgccaacgctgaaccattgttaatgcaaatacgtctgcctgcaaactatggtcgccgttataatgaagcctttagcgccatttaccccaaactcgccaaagagtttgatgttccgctgctgcccttttttatggaagaggtctacctcaagccacaatggatgcaggatgacggtaaagttatgcaaaaatcggtcttaattaccggatgttccagtggaattggcctggaaagcgcgctcgaattaaaacgccagggttttcatgtgctggcaggttgccggaaaccggatgatgttgagcgcatgaacagcatgggatttaccggcgtgttgatcgatctggattcaccagaaagtgttgatcgcgcagccgacgaggtgatcgcactgaccgataattgtctgtatgggatctttaacaatgccggattcggcatgtatggccccctttccaccatcacacgttgtgngtgtttcatcccaatcatttatgttgctagtactcagaaatcttcttgggagaaacatgtatataatatcctggagagggcttcatatccaggatctccgtctatcagcgatgttgtttcagtggaaatggatgtaaaaggctacaccactcagggcgataccgatctgctggggatgggcgtttccgccatcagcatgattggcgactgctacgcgcagaaccagaaagagttgaagcagtactatcagcaagtggatgaacaaggcaatgcgctgtggcgtggtattgcgctaacgcgtgatgactgtattcgccgcgatgtgattaagtcgctcatctgcnacttccgtctggattacgcccctattgagaaacagtgggatttgcacttcgctgattactttgcggaagatctcaagctgctcgccccgttagcaaaagatgggctggtggatgtggatgagaagggaatacaggtgacggcgaaaggtcgcttgctgatccgcaacatttgcatgtgctttgatacctatctgcgccagaaagcgcggatgcagcagttctctcggcgggcgttttttccataccccaaacccctttgctgtggaaactattttggagaggaccaggttctcggaaattatctcttttatgtgtttgggaatttggctcattaccaggttcacccaacgtgggtgtgtgtgctcccaagaggatgctggcttacaattgtgactttaccctatgatgatggcgtcgatgcgcttaatgtacttagcaagaatcatattgatatcgtgcttagcgacgtcaacatgccaaatatggatggttaccgcttgacgcaacgcattcgtcagttgggactgacgttgccggtaatcggagtaactgctaatgcgttggctgaagagaagcagcggtgtctggagtccgccgggaacgctggatgtgataaaacagacgctgacgttatatgccgagagggtcaggaaatcgcgggattcgtaggacggataaggcgtttacgccgcatccggcattcagtgcaaatgccagatgcgacgctgacgcgtcttatctggcctactttaatatttcttctggctactgatggttttaatactgcggttcagctttttagcgatctcggtcaccaggaagccttccgcaaacaggcgcagaacttcactctcttttggcgagagacgcttgtcaccgtaaccaccagcactgattttttccaacaggcgagaaacgctttcggntgtctggtgggccgcaacggcgcaggcaaatcgacgttaatgaaaatcctcaaccgtgaacaagggctggatgacggtcgcattatttacgagcaagatttgattgtagcgcgtctgcaacaggatccgccgcgtaacgttgagggtagcgtttatgatttcgttgccgaaggcattgaagaacaagcggaatatctgaaacgctatcacgatatttcgcgcctggtgatgaacgacccgagcgagaaaaatctcaacgaactggcgaaggttcaggaacagctggatcaccacaacctgtggcagctggaaaaccgcatcaacgaagtgctggcgcaactggggttagatcctaacgttgcgctgtcgtcgctttccggcggctggttgcgtaaagcggcattaggacgcgcgctggtgagtaatccgcgcgtgctgttgcttgatgaaccgacaaaccacctggatattgaaaccatcgactggctggaagggtttttgaaaactttcaacgggacgattattttcatctcccacgaccgttcgtttatccgcaatatggcgacgcgcatggggatcctctag

SEQ ID NO: 24436 - DNA, 2469 bp, Homo sapiens; identical to SEQ ID NO: 8874
  SIMILAR (1444)..(2088): 991254mologous to Escherichia coli elongation factor Tu,accession number J01717,Smith-Waterman Score=1087.

SEQ ID NO: 24437 - DNA, 1611 bp, Homo sapiens
  SIMILAR (1609)..(1529): 961254mologous to Escherichia coli YhhI protein,accession number D90709,Smith-Waterman Score=134.
ctattgtgtatctgtttctgatctcttcgctctcgtttcgtactctttccttctgtctactgtcttctctctcttggtgtgtagtgttcgcttcttcttgtgagagcagagaatatagaaagaggaaggtcgtacagcaacgacgacggtcgtgacaacagccccggcggatgtcatcaccatgtcccacaacgaggcgctggcaccgatagaaaactcgttatgtcgtgaggtatgcgccacctccttacgggcggcctgccaggtgctcatgagcgtttctgcataaggcagtagtttttcaccggcagcgataacggtggcccttgtttgcatgtcgtgcctctcggtgttgcgtttaggtctcaggctgcgccgggtgttagttagggtgatttcgttcttgcgagccgcatgcgaacatctgccactgcgaagccagttaccgaaccggtcgcacactgatggaaaagtgatgaaggaaacagtcgcggagcaggcgcaatcaaccgagctttcaaatcggtgaccggcaaaggcggcatcaaagtgattgatgccagtagcgtcaagtttggtcgtttcgacggcgcagagccgcattgcgtgggcttgactgatcttgtgaccggagacgacggcagcagcatggccgccggttttatgcagtgggagaacgcattcttcccgtggaccctgaactacgacgaaatcgacatggtgctggaaggggagctgcatgttcgccacgaaggccaaaccatgatcgccaaagcaggcgacgtgatgtttatcccgaaaggctccagcatcgaatttggtacgacatccagcgtgaaattcctgtatgtcgcctggccggctaactggcaatcccatacgctcagcgaaggcgcagagatccatctccctgcggacagtcgcctgacgccctctgcccgggagttgctggaaagccgccatctgcgcatcaagtttattgacgagcagggccgcctgtttgttgacgatgaacagcagcagccgcagcccgttcatgggctgaccagtagcgatgaacatccgcaggcgtgctgcgaactgtgtcgccagccggtggcaaaaaagccggatacgctgactcacctgtcggcggaaaaaatggtcgccaaaagcgatccgcgtctgggttttcgcgcggttctcgacagcaccattgcgctgttttacagcgaataaataatcacctccctgtttttgtatcttctctgcaatatctttctggcaacccatcgcatcagttgtgatgatttttcctttaatatccagcatgttaagaagttcagggatagctgtgatctcattggatttcttatccgtcttgatctgcccgatgaccagactgtgcattgttgagaacgcactaatgacatgaatcgctcccctgcggcgactcttgtcataagagtgccggagcgtttttccatcaattgcaatgacgtctttatcatttgatgaatggcaatcacgcatccagttaataaagcaactcgtgaaattttgcaggactgatacgggatacaactctggcaatggtatcgtgaacaggaataccattttcaaaatcaccat

SEQ ID NO: 24438 - DNA, 2825 bp, Homo sapiens
  SIMILAR (1378)..(1806): 791254mologous to Salmonella typhimurium cobalamin adenosyl transferase,accession number AF093749,Smith-Waterman Score=588.
atgtatccacataacagagtgccgtacgactgtaaaaagaacatcaagtgtttcttcttctacactggagggatcttcaggagaggatcccccctggtagttgctgcgactgacggcccgatgccgcagactcgtgagcacatcctgctgggtcgtcaggtaggcgttccgtacatcatcgtgttcctgaacaaatgcgacatggttgatgacgaagagctgctggaactggttgaaatggaagttcgtgaacttctgtctcagtacgacttcccgggcgacgacactccgatcgttcgtggttctgctctgaaagcgctggaaggcgacgcagagtgggaagcgaaaatcctggaactggctggcttcctggattcttatattccggaaccagagcgtgcgattgacaagccgttcctgctgccgatcgaagacgtattctccatctccggtcgtggtaccgttgttaccggtcgtgtagaacgcggtatcatcaaagttggtgaagaagttgaaatcgttggtatcaaagagactcagaagtctacctgtactggcgttgaaatgttccgcaaactgctggacgaaggccgtgctgcgtgccagccgacaagaaccgaaagccagcgcatccgcgaaaccatcattgcccagctgccggaaggccagtttaccgaaagcctggtcgcacagctgatggaaaaagtgatgaaggaaaaacagtcgctggagcagggcgcaatgcagccgagcttcaaatcggtgaccggcaaaggcggcatcaaagtgattgatggcagtagcgtcaagtttggtcgtttcgacggcgcagagccgcattgcgtgggcttgactgatcttgtgaccggagacgacggcagcagcatggccgccggttttatgcagtgggagaacgcattcttcccgtggaccctgaactacgacgaaatcgacatggtgctggaaggggagctgcatgttcgccacgaaggccaaaccatgatcgccaaagcaggcgacgtgatgtttatcccgaaaggctccagcatcgaatttggtacgacatccagcgtgaaattcctgtatgtcgcctggcccgctaactggcaatccctatgaaagatttcatcaccgaagcatggctaagagcgaaccatacgctcagcgaaggcgcagagatccatctccctgcggacagtcgcctgacgccctctgcccgggagttgctggaaagccgccatctgcgcatcaagtttattgacgagcagggccgcctgtttgttgacgatgaacagcagcagccgcagcccgttcatgggctgaccagtagcgatgaacatccgcaggcgtgctgcgaactgtgtcgccagccggtggctaaaaaagccggatacgctgactcacctgtcggcggaaaaaatggtcgccaaaagcgatccgcgtctgggttttcgcgcggttctcgacagcaccattgcgctggcagtgtggctgcaaattgaactggcggaaccgtggcagccgtggctggcggatatccgttcgcgtcttggcaacattatgcgcgccgatgcgctgggggaaccgctgggctgccaggcgattgtcgggctttctgacgaagatctgcatcggctttctcatcagccgctgcgctatctcgaccacgatcatctggtgccggaagccagccacgggcgcgatgctgcgttgctcaatctgctacgcaccaaagtgcgggaaacccgaaaccgtagcggcgcagggtctttatcacccgcagcttttgaagtattacgcccggaacattttgcaggcgctgaaccgcctttcgagcacggtctacgtgatgatgatcctgagcgtaacgaagcagccgctaacggtgaagcagatccaacaacgactgggggaaacgcaatgattattgaacgttgtcgtgaactggcgttgcgagcgcccgccagagtggtttttccggatgcgttagaccaacgtgtgctgaaagccgcgcaatatttacatcaacaaggtctggcaacgcccattctggtcgccaatccgtttgaacttcgtcagtttgcgctcagtcacggcgtggcgatggacgggctacaggtgattgatccgcatggcaacctcgcaatgcgggaagaatttgctcatcgctggctggccagcggttcccccagcgcatcggcgcgcataatgttgccaagacgcgaacggatatccgccagccacggctgccacggttccgccagttcaatttgcagccacactgccagcgcaatggtgctgtcgagaaccgcgcgaaaacccagacgcggatcgcttttggcgaccattttttccgccgacaggtgagtcagcgtatccggcttttttgccaccggctggcgacacagttcgcagcacgcctgcggatgttcatcgctactggtcagcccatgaacgggctgcggctgctgctgttcatcgtcaacaaacaggcggccctgctcgtcaataaacttgatgcgcagatggcggctttccagcaactcccgggcagagggcgtcaggcgactgtccgcagggagatggatctctgcgccttcgctgagccaccatgtcgatttcgtcgtagttcaaggtccacgggaaagaatgcgttctcccacttgataaaaaccggcgggcatgctgctgccgtcgtcttcggtcacaagatcagtcaagccccacgcaatgcggctctgcgccgtcgaaacaccaaacttgacgcttcttgcatcatcactttgatgcgcgcctttggcggcaccgaattgaaactggcttga

SEQ ID NO: 24439 - DNA, 966 bp, Homo sapiens
  SIMILAR (966)..(655): 1001254mologous to Escherichia coli K12 putative export protein I for general secretion pathway (GSP),accession number AE000409,Smith-Waterman Score=512.
tcaccctcccttcgcaataaacgcccgtaataactcattgccccacggtatgatttcgcccgtaacgtattgaaggatgacttcaggcaaggagcgaccatgctgcaacaggttccaacgcgtgcttttcatgtgatggcgaaaccgagcggttccgattgtaatctgaactgtgactactgtttttatctcgaaaaacaatccctttaccgcgaaaagccagtcacgcatatggacgatgacacgctggaagcgtatgtccgtcactatatcgctgccagcgaaccgcaaaacgaagtggcttttaccttctactgaagaggttgtggtcattctctggaaatatctgaattcattccgggcagcagaatccgggcagaaatcagcaactgggcctcccgcgcagcagaaaaggggaatccagtcgggcccacccttcctgccagcgcagaccgcaagtctggccccatcctctcgccgggagtcggccaccccgaccgtgggcagcctgcgcccgtttgggtcccatcgccccggcccggcagatacctgagcggtggccagggcaggtccccgttcttgccgatgcccatgttctgccatgtctcgccggaagcctgcgtccggccttatacgacttctagctcggtacccagcacggtagagcgtatgatttcgcagataccagtgaacagtgagtaaggtttgtgcttcactgagaggagccagcggatcgcgactttgcgtggtaaaaatagcttcttcacccaacaccatgattttgtccgtactccgattcctccgggcgaccagttgcaggagatcgttatcaagaatggtgatggtgcgctgtagctgattgaactgctggatttctttctgtgagcgttgatgcaactcggaagcttgcgaaaaaatcataaacgccagcacgctaagcattgagaaaatcgccagcgccgccat

SEQ ID NO: 24440 - DNA, 1863 bp, Homo sapiens
  SIMILAR (82)..(729): 911254mologous to Escherichia coli Formate dehydrogenase (EC 1.2.1.2), nitrate-inducible, beta chain,accession number D90788,Smith-Waterman Score=1099.
ttattctaacggcatgtttattggcgtaatcagcaatgaccctggtattgttacaaacgtagaatatggccaggaggagtggacgacatccgtgatgaagtggggctctgcgtcggggtgtacgataaccccgccgatctgagcgccaagtcctggacggtgatgcgctttagcgaaaccgaacagaacggcaagctggagtggctgatccgtaaagacggctgtatgcactgtgaagatcccggctgcctgaaggcgtgcccgtctgctggtgcaatcattcagtacgctaacgggattgtcgatttccagtcggaaaactgcatcggctgtggttactgcattgccgggtgtccgtttaatattccgcgcctcaacaaagaggataaccgggtatataaatgcacgctctgcgtcgatcgcgtcagcgtcggccaggaaccggcttgtgtgaaaacctgtccgaccggggctatccacttcggcaccaagaaggagatgctggagctggcggaacagcgcgtggcgaaactgaaagcgcgtggttacgaacatgctggcgtctacaacccggaaggggtcggtggtacgcacgttatgtacgtgctgcatcacgccgatcagccggagctgtatcacggtctgccgaaagatccgaagatcgacacctcggtaagcccgaccaggccagactgttccgggggatttctcctcgctttcgggcgtctcaatctcttcatccatcagagcttcgatttcgaaggtgttcatgtgaccgctgataatcaggcgcagataatcgacgataaaatcaagcatgacgctatccgcgaggatgcgtgggtagctggcgaagatctcgctctcacggggattttcaatatcacgttccagcgaaaacatccccatctgccgcgatttcgccatcaaccgataaagcagagccagcagatccatatacattgctttggtgtatttggagcgacgaaacagcaacggcagcgccttcagcgtgcctttaatcgctttgccattattgccgacgataaacgacccaatccctgcaccggcaataatcaccagttcagcgggttgatagagtgctccaaggcttccaccggtcatcaaataaccgccgaaaactgtaccgagaacaaccaggtaacctaataagataagcacgacatcatccttccatctctgttcatccagcagttgtgggataatatcggcaggattctgggaaagtttacgtctttttactgcccgggatggcggttgacataagctgcaggcaaagctgccaacaggctgtgcaatacgcagaactgaactacgggcacgagggttctcagccacctcttcttcgcccggcattaacttgcctagtgctcgcagctgacggccacccagttttttgagctgctcttcagtcatcggtaaccctgccggaacttgcggaccgcggctgttttcacgcataaaacgtttcacaatacggtcttccagcgagtggaagctgatgatcgaaagccgcccacccggggccagcacgttgagcgagctttttagcgcctgctctatctcctccagttcactgtttacccaaatgcgcaccgcctggaaggtacgggtcgcgggatgtttaaacttatctttcaccggcgttgcagcagccacgacttccgccagttctttggtgcgggtcatcggctgttcgcggttacgctcgacaatggcgcgggcaatgcgtttggcaaaacgctcttcaccataggttttcaatacccaggcgatatcggcttcttctgcggtttgtagccattcagcggctgactgcccacgggttgggtccatacgcat

SEQ ID NO: 24441 - DNA, 1158 bp, Homo sapiens
  SIMILAR (1)..(348): 861254mologous to Escherichia coli Phosphoribosylformimino-5- aminoimidazole carboxamide ribotide isomerase (EC 5.3.1.16),accession number D90840,Smith-Waterman Score=492.
atggatgtaatatatgggtatccgagcaacaagcaggtggcagtcagcggctggcaagagaactcgggcgtttcactggaacaactggtggaaacctatctgcccgtcggcctgaaacatgtgctgtgtaccgatatctcgcgcgacggcacgctggcaggctctaacgtctctttatatgaagaagtgtgcgccagatatccgcaggtggcatttcagtcctccggcggtattggcgacattgatgatgtggcggccctgcgtggcactggtgtgcgcggcgtaatagttggtcgggcattactggaaggaggccatcgcatgctggcaaaacgcataatcccatgtctcgacgttcgtgatggtcaggtggtgaaaggcgtacagtttcgcaaccatgaaatcattggcgatatcgtgccgctggcaaaacgctacgctgaagaaggcgctgacgaactggtgttctacgatatcaccgcttccagcgatggccgtgtgtacccaacattaattactcgcctggccgatcgctttggcgtgcagtgtattgtggtcggtattgatacctggtacgacgccagaaacctgaaagatatcagtgtggtgggcttgctaggggcacaggtgcccagtgtcagggcagggatgccacagagccgcaggcagactgaaggggcccagggcatggtcaggaacgaagaaggagggagcctgaggctctcccaccaccaggcctgcaaagccactcacactcagcagtggacacttgaggtcacggcccagagctcttacaatctctttcctgagcaatgggtgaaactattttgggggatccggcaaggagatcttccactggcttttagtcaaaagctgagccgacagacattccagcagcaacagacccaaacaccaagacccattgttggacaagcacctaaggatttgcaaaccggcacaggcacgccccaaacccacgctgtgcactccggggaccacgctgcgggtgagcagagctgcaagtcgtgcaaggccccaatttatccgttaactgcccagttctccctggagactcgcagcttctggggaagtgagtggggctacagcacccacggggagctccgaagacgggacaagggacgcagacgcttctattga

SEQ ID NO: 24442 - DNA, 4677 bp, Homo sapiens
  SIMILAR (2197)..(2159): 531254mologous to Escherichia coli glutamate synthase, large subunit,accession number U18997,Smith-Waterman Score=41.
ctacagcgtcatgcccgtactacccaatacatgacgcgaaatcatgaccagactgaaagagaaccccctgaggttcccaggagagtcgtggtcggcgaaatgcgcgccgatggtctgcaccttgcccgcgtcttccccgacggtcggcggcagcgtcgccccgcccggcaccagaatagtcggcaggtcgtgcatcgcggccagcgcaatcatggtggcgggcagccctttatcgcaggtcgctacgccgatcaccgcccgccgcgtcggcagggagcggatcaggcggcgaaacacgatcgccgcgtcgttgcggtacggcagggaatcgaacataccgtgcgtgccctgcgagcgcccgtcgcacggatcgctgacgaaggccgcgaacgggatcccgccattgcgggtgatctccttcgccgccgcctgcatctgcatgccgatctcccaatgcccggtgtggtagcccagcgcgattgggcgtccgtctccggcgcggatgccgccctgagtgccgataatcagcacctctttgccggtgagcttgttggcgtcccagcccatcccggcgttctgcgtcatgccgaacaggttgccgctgggagattccatcagcatctgcggggtcagcggcagagcgccctgcggccccgccgcgtgggtgatcaccgcataaaacgcgtcgtcctgcggggtgaaaattttctcaatggtcatcgttatcgtccggctcagcaaagcttgagctgttgcagcagggttttcagctgcgccttgccatgctgtaggtgactctagaggatcccttactgtaagacttgaagggaagtgcaccctccccactgggctgccgtcagggttgagggagttaatatccataaggcgctccaggctactgcagcctgcctttaacggattccccggtccatatgcacctgcgcagcacagtgttgcggcagtgagtgaatggaccgggatgcaggtgaaataagtgaactggcgcagaatcgtctggctattggcgttggttactctgccaacacttgcggaggagacgccgttacaactggtgcttgaacttcgactcaaccactgccgattagcggacgttctggtggacaacttgtaatagtttagcgccttgtgctggaggatacccatcaaccggagcagccctaccagtgtcgcggaaactccccggaagaggtttattgttgtcaggctggggagagcataacgcgcgataccgcgctggtacgttcctgtgggctctattttgcgccgcagcggttgcatattggcgcagatgtgtgggggcaatatggcatgtggtttctgcgcatcaggcgcggcactctcggggatggcacaatccgtcgggtatttgttggcagcctgtgggccgccgtcgtgattgttgaaatcggagtagagcacatcggcgtatttaaagcttaaacggtgcgcctggccctctgcttcgcaaaagacgttcatttcacgaccgatacgggtggcgagcgacataacatgcgcttcacgcagcgggtcgataggcgggttagtcacctgggcaaactgctggcggaagtagtcgtaaataatgcgcggctgactggagagcacggcgaatggggtatcatcgcccatcgaaccgaccgcttcctgaccgttttcgcccagtacgcgaattacggagtccagctcttccgcgctgtagttaaactgtttctggtagctggcaagcgtgtcgtcgtccagttcgcggctacccacttcttcatcgggcagatcttcaaacggtaccagtcggcggacgtttttctccatccactctttatatggatggcggcttttcagatcgtcatcggtttctgccgagtgcagaatacgcccactgcgggtgtcgataaccatcagttcgcctggcccgacgcggcctttttcgaccacttcgtcaggctggtaatcccagataccgacttcagaggcgcaggtgatgagcttatctttggtgatgacgtagcgcgccggacgcagaccgttacggtcgaggttacaggcggcaaaacgaccgtcggacatcacgatgcccgccgggccatcccacggctccatatgcgtggagttaaagtcgaggaaggcacgcagttccgggtccatatccggggttgttcttgcaggcgggtggtaattcatatattctattcccatatcacatcccatcatctcatcgtcatcatcatcatcgtcatcatcgtcatcatcatcatcatcgtgatcatcattctcatcatcatactcatcatcggtcaccgcctttgaaagtatgcattcagacaaaaattggaaagcctccaagttccaaattgttggcgaaacacaccggaagatggtaacgccgcgcatgtggctgcttttgccagaagggcaacggatacatatgccgatgcggatggtggcgttccatggaatgccgaatctggcgcttacaatgtcacccgctctggcgacagctatattctggccggttatctgttcagcagcctcggcgcgttcggcgtggtcagcctgatgtccagcccgtatcgtggcccggatgctgattccctgttctcttaccgcggtctgttctggcatcgtccgatcctcgcggcagtgatgacggtgatgatgctgtctctggccggtatcccgatgacgctgggctttatcggtaagttctacgtgctggcggtcggtgtccaggcacacttgtggtggctggtgggtgccgtggttgtcggttcggcaatcggcctcatcaaactggcagtacagcgcgggcggtatcgttgtgctgatctctgcactgttggtactggtgctgggtgtatggccacaaccgctgattagcattgtgcgtttggcaatgccgctgatgtaatctgttactttgtaagtcagaaagccgccgacatgctcggcggtttttaattttgctttttcgccacgataagccagcgcggtcgcgtaagtaatatatgactgaggatcggtgaagatcccctgtgattgcaggggttggcctctgcgctggcggttctggctgacgaaaacgtggttcacggcccgctggaagtgcatgaccgaagaacagtgcaacaccacatcttgctcgatcgcggaacgtgaggtgtcggcactgtaaatgttctccattaatggtccgttgtcgccaaaagtaatatgcaacaccgtcaggagcggaacacctaacgcttcttcctgcgtccagccgctcatcttctccgccactggattcataaaggtaattttcatcgccatatcaatacagaccacggcttcaccgatggaatcaagcgtaatgtgcaggcgctctttttcctgaaacaatgcctcgttaagctgtttcacttcggtcatatccatattgatgccgaggagacgttcgacttcgccttctttattcagtacccggttggcgagggcgcggatatggcgaataccgtcttttacggtaatgcgaaattccagtttaaagggcgagcgtgattgcaacgaatcacgaatcactttttcggcatgctggcgatcttccggcagcacgcactcgtaccacacctgccagttcggtttgatatgtggaggaatttcatacagctcgaacatccgcttatcccagctaaaaatattcggcttcaactcccactcccagatgccaatcccggccgcttcgttagccagagtgatgcgctcaatcagttgctggatgacctgtacggtgcgtatagctcgtaagtgtctcatctgaagctgttcaaccgcagctgcacggaaagtatcacccgccgccagcatcaccgatttaccctgctgctcaaactgacgcgccagcttaccaatcgtcgtggttttacccacaccgttgacgcccaccatcaggatcacaaacggcgctttgccttcaacattcagcggctcatcgactttcgccagaatctcgcccatctcttctttcagcaggccatagagcgcctcggcgtcacgaagctgcttgcgggatgcgccttccgtcagattggtgataattttacgtgtggtttccacacccacatcggcgatcaaaagctgctcttccagctccgcggaacaggctgataaatccggaaccgagattctctttggttttaacaggctgcgttcaggcgcgcgaaaaacttcttggtcggttttccggtccgaacgattttccacgggtgtcttctttggcgaggaacacaatacgctttctgcgttctgaacgatagcggcaaacgcgccaccatgttcggttcggtcgcggtgatccgcgagtccggtatcaacagcgtaggtcatctgccgtggttcgagcgcgtgtggtatgcgctggcaaaccatccgattctgctggcggtgctggcggctatcagtgtgatattgctggcatgggtactgtggcgtctgctgcgaattattagtcgtcgtcgtcttaacccggataacgagtaattgaagatgaatgtgttgcgtagtggaatcgtgacgatgctgctgctggctgcctttagtgttcaggcagcctgtacctggcctgccgtgttcatcccaccagacatcgatgggtgcataactgacaggcaaatgcaacat

SEQ ID NO: 24443 - DNA, 878 bp, Homo sapiens
  SIMILAR (642)..(88): 1001254mologous to Escherichia coli No definition line found,accession number U00039,Smith-Waterman Score=947.
aggccaggtacaggctgcctgaacactaaaggcagccagcagcagcatcgtcacgattccactacgcaacacattcatcttcaattactcgttatccgggttaagacgacgacgactaataattcgcagcagacgccacagtacccatgccagcaatatcacactgatagccgccagcaccgccagcagaatcggatggtttgccagcgcataccacacgcgctcgaaccacggcagatgacctacgtaataaacgtcgccaacacgtaggctgttgataccggactcgcggatcaccgcgaccgaaccgaacatggtggcgcgtttgccgctatcgttcaccgcatcgttaagcatttcataaccgcgtgggctatctgccaacagcgcaatcacgctgcgctggtcgttatacggcgactggaagccaatcaccgccgccatcgcaccggaagaggtcagcgttgaccgggtttctgccgcgcgatcgctctcgtccggcacaatgccggggaacggggtctggcgcatcggtgttttcacccagctttcggtcgcctgcaccaataggtcgatctgcttatcgtctttcagtttgtccgggataccaccgatgatcatgatgtcggcatctttgccctggcggctaacgaccgtgcagctttcgataatattctcgacccaaccggtagcgtcgatgttctgctgccgttgccggggcgtcacaatattgcgaatgcgctggcagccgctgcgctctccatgtccgtgggcgcaacgcttgatgctatcaaagcggggctggcaaatctgaaagctgttccaggccgtctgttccccatccaactggcagaaaaccagttgctgctcgacgactc

SEQ ID NO: 24444 - DNA, 687 bp, Homo sapiens
  SIMILAR (1)..(489): 981254mologous to Escherichia coli phosphatidylserine decarboxylase,accession number J03916,Smith-Waterman Score=828.
atgaaagaggcgcaaaagccggacaccgccagctaccgcacctttaacgaattctttgtccgtccgctgcgtgacgaagtacgcccaatcgataccgatccgaatgtactggtcatgcctgccgatggcgttatcagccagttgggtaaaatcgaagaagataaaatcctgcaagccaaaggccacaactacagcctcgaagccctgctggcaggcaactatctgatggcggacctgttccgcaacggtacgtttgtgaccacttacctctccccgcgtgactaccaccgcgtacacatgccgtgcaacggtattctgcgtgagatgatctacgtgccgggcgatctcttctccgttaaccatctcacggctcagaacgtgccgaatctgtttgcccgtaacgaacgcgtgatttgcctttctgataccgaatttggcccaatggcgcagattctggtcggagcgacgaatggtggcagcattgagacggaaaatgttgtcgaaaagcgtgtaagaggtgcgcaatgcgtaagcagtggctcgggatctgcatcgcggcaggaatgctcgcggcatgtacaagcgatgatggtcagcaacagacgctacgccagaatcactaacctggctaacgggcgaatgatcgtggtgcgcattaatgatcgcggcccttacggcaacgaccgc

SEQ ID NO: 24445 - DNA, 3847 bp, Homo sapiens
  SIMILAR (586)..(1407): 1001254mologous to Escherichia coli DNA-damage-inducible protein,accession number L02362,Smith-Waterman Score=1375.
  misc_feature (1)...(3847): n = a,t,c or g
atggcgactgaagaattcaactatgcaaacccgtggcagaggttggaggggactgcgtgtggaagacttgatcatttgcaagccccgttaggcaacctactagatcccttggtgtaccaacaaccggtgcgacagttttcccggcaggcttggcggctgggcaggcattgccgggcacccccagggcacagccgagggctgccagtgcagcccgtgcatggccatcaactagcactcacagccgtggcatgcacagcaacgcagcactggcatctccaacaatcatcagcatcaaattctacaagaccgccggcccccccacaaaaagaagcacaaacaaacaaacaatgcaaaaggccactgggaacacaacagaaaacatcacctggccctatacagcgacatccccaaccgacactcgaccatgcaaccccgccaaaagacgggaacagtcgagacaataaggcacaaataaagaccggagagccaacacaacacggcaaagccagctatgaaagtcctggaacaggcgcggcgctttcttggaatccgctggttaagcgcaccggcgtcgctggcgaatctgtaattttgttagtggtcggcaatatcctcaacattgtgctggatgtctggctggtgatggggctgcatatgaacgtgcagggcgcggcgctggcgacggttattgcggaatatgcaacattgctgattggtctgctaatggtgcgtaaaatcctcaaactacgcggaatttccggcgaaatgctgaaaactgcctggcgaggaaacttccgtcgcttgctggcgcttaaccgcgatatcatgctgcgttcgctgttgttgcaactctgtttcggcgcgatcaccgtacttggcgcgcgactggggagtgacattatcgctgttaacgcggttctgatgacgctactcacctttaccgcctatgcgctggatggttttgcctacgcggttgaagcgcactccggtcaggcatacggtgcgcgcgacggtagccagttgctggatgtctggcgggcagcgtgccgccagtcggggatcgtagcgttactgttttcggtggtttatttgctggctggggaacacatcattgcgttactgacgtcgttaacccagattcagcagctggctgaccgctatcttatctggcaggtgattttgccggtggttggcgtctggtgttatctgctggacggcatgtttataggcgcaacgcgtgccaccgaaatgcgtaacagtatggcggtggccgccgcaggttttgcgctgacgctccttacgctgccgtggctgggtaatcatgctttgtggctggcattaaccgtctttctggcgttgcgcgggctttctctggcggctatctggcggcgtcactggcgcaatggcaggccaggtacaggctgcctgaacactaaaggcagccagcagcagcatcgtcacgattccactacgcaacacattcatcttcaattactcgttatccgggttaagacgacgacgactaataattcgcagcagacgccacagtacccatgccagcaatatcacactgatagccgccagcaccgccagcagaatcggatggtttgccagcgcataccacacgcgctgcccagcccgcggtttaggcagatctcccgcggttcaactgccaaagtcccatgcgctaaggccagggcattcttgagagttaagtccgacccaacattaattactcgcctggccgatcgctttggcgtgcagtgtattgtggtcggtattgatacctggtacgacgccgaaaccggtaaatatcatgtgaatcaatataccggcgatgaaagccgcacccgcgtcactcaatgggaaacgctcgactgggtacaggaagtgcaaaaacgcggtgccggagaaatcgtcctagcgtatgtctctgagcnntttacttttatgtcagggatgatcaacaagttcaaagaggtgttcccgaaagcgcaggtttctatgtatgaagcgcaactgtcttcgttcttaccggcaatccgcgacggtcgactggattttgcgattggtacgttaagtgcagaaatgaagcttcaggatttacatgttgagccgctgttcgagtccgagtttgtgctggtagccagtaagtcccgaacatgcaccggcaccaccacgctggagtcgttgaagaacgaacagtgggtgttgccacaaactaatatggggtactacagcgaactgcttactacgttacaaagaaatggcatcagtattgaaaacatcgttaaaaccgactcagtcgtgacaatttataatcttgttctcaatgctgatttcttaactgtaattccttgtgatatgacgtcaccttttggttctaatcaatttattactattccggttgaagaaacattacctgtggcacaatatgccgcgacactggtgccgcatctcgattttcgcctttgcctccgcaccgcaagaagacgaaacgctgcgtctgaagatgaaagcgattgttgcccgtggcgcaggaacagtgattgtcacgctgggtgaaaacggcagcattgcctgggatggcgcgcagttctggcgtcaggctcctgaaccggtgacggttatcgacaccatgggtgccggagattcgttcattgccggattcctttgcggctggtctgcggtgatgacattaccgcaggcgatagcgcagggaacggcgtgcgcggcgaaaaccattcagggccacgggtcgattatgtcagctacggaccgctactctcatcaactcctctacgctaccgtccgccagcgactgctggatgatatcgcgcagggggtttaccaggccgggcaacagatccctaccgaaaacgagctttgtacacaatataacgtcagccgcattaccattcgcaaagccatcagcgacttagtggcagacggcgatgacttcaggcaaggagcgaccatgctgcaacaggttccaacgcgtgcttttcatgtgatggcgaaaccgagcggttccgattgtaatctgaactgtgactactgtttttatctcgaaaaacaatccctttatcgcgaaaatgcagtcacgcatatggacgatgacacgctggaaccgtatgtccgtcactatatcgctgccagcgaacggcaaacgaatggctttttcactggcagggcggctgaccacgctactcgggcttgcggtttaccgccgtgcgccgccagagcgcaaaccacctttggtcgcgtcatggctggcggcttaatgctgatattattcgtttatgtcttcgtaaatattggtatggaaaatgttgtcgaaaagcgtgtaagaggtgcgcaatgcgtaagcagtggctcgggatctgcatcgcggcaggaatgctcgcggcatgtacaagcgatgatggtcagcaacagacgtgaagtttcggatacgttagtgacgggaggttgggataaacaaaaaatgtctgacgcgattaaacatgcgcggaaagaaaccgataaattcatcgaggttatgaataaaaaagatgccgatactttcgcagtcaaagccccgataaccgatcacggaagaaccgagcatttctggcttacggatgtcacttattctaacggcatgtttattggcgtaatcagcaatgaccctggtattgttacaaacgtagaatatggccaggagtggaaaatcaagaaagaagatatttcagactggatgtatacgcgcggggataaaatttacggcggttataccattgatcctttattggtcacctatcccaaagaagaagccgacgagctaagagcaaaattagttcgctaa

SEQ ID NO: 24446 - DNA, 413 bp, Homo sapiens
  SIMILAR (2)..(139): 861254mologous to Homo sapiens unnamed protein product,accession number AK021798,Smith-Waterman Score=204.
gccccttcccctaggtgctctgtcccagggagatgggagttttatctataagcccctgactggggctgcttcctttctttcagagatgctctgcccagagaggaggaatctagagaggcagtctggctacagtggctttacatctatatttttataagtataaaattagaagctaattagatataatgaatggtcaagtaaagtagacatattttcacatttacatccatttccaaattttgtgatactgagtttgtaaagaagtccaatttcgctatttgctgcatttgcttttcaacaaaaattgtatttagtattttcactaaactatgtaagagcacttagctcgttgataactttcatcaccattgtgaagctatacaagttataaactattttaaggcttttcccat

SEQ ID NO: 24447 - DNA, 456 bp, Homo sapiens; identical to SEQ ID NO: 8071
  SIMILAR (9)..(71): 421254mologous to Bacteriophage 186 computer protein 78; putative host replication depressing protein,accession number X15001,Smith-Waterman Score=64.

SEQ ID NO: 24448 - DNA, 886 bp, Homo sapiens
  SIMILAR (571)..(491): 661254mologous to Homo sapiens Human secreted protein sequence encoded by gene 11 SEQ ID NO:72,accession number B24447,Smith-Waterman Score=92.
atgccagctgctgtggcaggcaggcagctccaggtgccagcacaggtgctggctccatgtaaacccgtggctggatcagatgcactagccagcaggcaggaacatttaagtctgctaaagcagtgcccacagctgctccttcccgcaggagctctgtcccacggagatgggagttttatctatgagcccctgactggggctgctgcccttctttcagagatgctctgcccacagagcaggaatctagagaggcagtctggctacagctgctttgcagagctgcagtgggctctgcccagttcaaactctccagcagctttgtttactgggagaggaaaactgcctactcaagcctcagtaatggcagacgccccttccctcaccaagcccaagcatcccaggttgactttagactgctgtcctcgcagccagaatttcaagccagtggattttagcttgctgggctccatgggggtgggatccactgagctagatcacttggctccctggcttcaggccccctttccaggggagtgaacagttctgtctcgctggcgttccaggtgccactgggggttcagagtcagtgctgcacacaaggaattcatacaagatgttggaagttagaagggaagtagcagctcttatatctgccctgaaagtcagtgccaagtgcaggaactgtggcagctcacatgctcttactgagccggtagctcaccttgttggcgtgagacatcaaccagacccacaggggctccagctcccaccatacctcctcctgcagcttctcctagtcctgggccaatgtgtgtacaacctcatggtgaagactagagaaaaagctactactgctggtcaccatggcagcagctgctggccatga

SEQ ID NO: 24449 - DNA, 726 bp, Homo sapiens
  SIMILAR (3)..(518): 981254mologous to Escherichia coli K12 putative alpha helical protein,accession number AE000490,Smith-Waterman Score=800.
ccggagaatctcgcgttgatctgctggcgcgggtgaaattaagtcacgataagctgaaagatttacgtgagcgcaaagccagtctggaagcccgtgcgctggaagcgttaagcaagaacgttaatccgtcgttgattaacgaagttgctgaagaaatcgcgcgccttgagaatctcattaccgctgaagagcaagtgttgtcgaatctggaagtctcccgtgatggcgtggaaaaagcagttacagcgacagcgcagcgtatcgctcagtttgagcagcaaatggaagtcgttaaagccactgaagccatgcagcgtgcacaacaggctgtaacaacctctaccgttggcgcatcttccagcgtttcgacagcggcagaatccttaaaacgcctgcaaacgcgtcaggccgaacgtcaggctcgcctggatgctgccgcacagttggagaaagtcgcagacggtcgcgaccttgacgaaaagctggcggaagccggaattggcggtagcaataaaacgtttcgtttgctggaagatgaattgctgattgcgctgccgggtgaggaatttacggtagccgccgtcagccacatcgatctgggcggcggtagtcagattttccgctactacacttcaggcgatgagtttctgcaaatcaataccaccggcggcgaagatattgatgacattgatgatatcaagctctttgtctatgaagagagctacg

SEQ ID NO: 24450 - DNA, 1638 bp, Homo sapiens
  SIMILAR (514)..(1026): 971254mologous to Escherichia coli 100 pct identical to sp:YI5B_ECOLI,accession number AP002527,Smith-Waterman Score=889.
atgtcaaagccaaaatacccttttgaaaagcgccttgaagtcgtgaatcactacttcacaactgatgatggttacaggatcatctcggcacgttttggtgtcccccgaacccaggtcaggacatgggttgccctctatgaaaaacatggagaaaaaggtttaattcccaaacctaaaggcgttagtgctgatccagagttgcgtattaaggtcgtgaaagctgtgatcgagcagcacatgtcccttaatcaggctgctgctcactttatgcttgctggtagtggttctgtagccaggtggctgaaggtctatgaagagcgcggagaagctggtttacgcgcgctcaagattggcaccaaaagaaacattgcaatatcagttgatccagaaaaagcggcatcagcattggagctgtcaaaagaccgacgcattgaggatcttgaaaggcaagttcgatttcttgaaacgcggcttatgtatctaaaaaagctgaaagccttagctcatcccacgaaaaaagatttcaaggctacgcggccaaacgagaagtgggttaccgatgttactgaatttgcagtcaatgggcgcaagctgtatttgtctccagtaatagatctcttcaacaacgaagttatttcttacagcctttcggaaagaccagtgatgaacatggttgagaatatgctcgatcaggcattcaaaaagcttaatcctcacgagcatcctgttctgcactctgaccagggatggcagtatcgtatgagaagatatcaaaatatccttaaagaacatggtattaaaccaagcatgtccagaaaaggcaattgtctggataatgctgtggtggagtgtttctttggaaccttaaagtcggagtgtttttatcttgatgagttcagtaatataagcgaactgaaggatgctgttacggaatatattgaatactacaccagcagaagaattagcctgaaattaaaaggtctgactcccattgaatatcggaatcagacctatatgcctcgtgttaactgtccactttttgggatcagtacagggacaggccgtgtcatcgtttatttacgctggggaaatcgtttatctcccaggcggaagaatccattgaagaaacccagggacgtgcgcatgctggaacagcatattcgtgacgctaaagctgaactcgataaagccggaaaatctcgcgttgatctgctggcgcgggtgaaattaagtcacgataagctgaaagatttacgtgagcgcaaagccagtctggaagcccgtgcgctggaagcgttaagcaagaacgttaatccgtcgttgattaacgaagttgctgaagaaatcgcgcgccttgagaatctcattaccgctgaagagcaacgtctgtttggcaaggataataagccagctatcgctcgtggtccgctgggacttcatctcaatagtggctttacgctcgacacgttagcgtttcgtttgctggaagatgaattgctgattgcgctgccgggtgaggaatttacggtagccgccgtcagccacatcgatctgggcggcggtagtcagattttccgctactacacttcaggcgatgagtttctgccaatcaataccaccggcggcgaagataattga

SEQ ID NO: 24451 - DNA, 2457 bp, Homo sapiens
  SIMILAR (545)..(661): 301254mologous to Escherichia coli O157:H7 isoleucine tRNA synthetase,accession number AE005179,Smith-Waterman Score=44.
atgcggtggatcctgttcatcctcttctgcctgctgggcgcacctgcccacgcggtatccatacccggcgttacaaccacaacgacaacggactcaacgactgaaccggccccggaaccggatatcgaacaaaaaaaagcggcctatggcgcactggcggatgtgctggataatgacacctcgcgtaaagagttgatcgaccagttgcgcaccgttgccgctacgccccctgctgaaccggtaccaaaaatagtgccgccgacgctggtcgaagagcaaaccgtgctgcaaaaggtcaccgaagtcagccgccattatggtgaagccctttccgcccgcttcgggcaactttatcgcaatatcaccgggtcagtgtgcaattgcattgcaacctgcgtcattgtgctggcccctggcagccaatgttgctccactagccctgccagtgtgcatttgctgcttgttaaaactgcagttcacaaccatccaactaacagctgcaactgccaaagctgcctgtttggtgcgcaggttgtgtgtgcatccatcgtaagatgtacgcaccttgcatgtgcaatggcaaagctatgtgccacttggccctgtcgatatttcacacactggtacgttgcacttgtgggaccaaaccccttggacagtaaacaccccaaacctatacatccagcccctttcgacaagcacaagaatacacccctatatctgacccagacttgtggccgttcacttcaagacctgcaaggcagtgcccctggggacccggaatctgccactatcacacaaagcgcgtttttgccgccagacccttgcaacattggggctgcccattgtggctgccccttgcattggctgcggctcattattacatccagtttacctgcccatccttgctgcctcgcggtccatattcgacacaccctggccatcaatgggcacacaggcaaacaccaggccctaacgacaccgggattgacacgcgaccggttgtaccgagagctatggtccaagggtaccacagggagaatttcggatttaaacaagacccaaagccttgtagcaccctatcctacactgggtgaagacattagaaatggtcgtaaaagaaaggccgtatgctcatctcgcctcccaatcatgtggccacacacccaacgcattcaattgcgcgaccccattcaggccgcttggtattctccacttccattcaagtggccccacgctcatggactccacttggtctcccgcattcttgtcgctaggctttctcctccctcccatcaaaggggccacaccacccagcgcctcccattagcgagtccccttcaatgcccgtttggtcatctaccccgtcccattcatcgtggcaacaccatcaacggcagctctattggagaatccccacataatggacctagggagttcggacgcagccacgatcccgcggacacccaaccggcacgcgcacccccacaccgcgccaggcagactccaccgcacaacagtggcacacaaccagcgccctcccgacaccaccaagtacagcaacgcgcacactcacgacagtacggcgcaccacaacaacagacacaatgtgacgcaccacacacgcacctgcgtccacacccaacaccggtacaatgctttgcaggccgtatccgtgctgctggcgtcgcaaaacgccgagtcatcttccgcgcgacgccgcagtggttcgtcagcatggatcagaaaggtctgcgtgcgcagtcactgaaagagatcaaaggcgtgcagtggatcccggactggggccaggcgcgtatcgagtcgatggttgctaaccgtcctgactggtgtatctcccgtcagcgcacctggggtgtaccgatgtcactgttcgtgcacaaagacacggaagagctgcatccgcgtacccttgaactgatggaagaagtggcaaaacgcgttgaagtcgatggcatccaggcgtggtgggatctcgatgcgaaagagatcctcggcgacgaagctgatcagtacgtgaaagtgccggacacattggatgtatggtttgactccggatctacccactcttctgttgttgacgtgcgtccggaatttgccggtcacgcagcggacatgtatctggaaggttctgaccaacaccgcggctggttcatgtcttccctaatgatctccaccgcgatgaagggtaaagcgccgtatcgtcaggtactgacccacggctttaccgtggatggtcagggccgcaagatgtctaaatccatcggcaataccgtttcgccgcaggatgtgatgaacaaactgggcgcggatattctgcgtctgtgggtggcatcaaacgactacaccggtgaaattgccggttctgacgaaaatctgaaacgtgcttgccattacaacgcgtgctcgatctcgcttgccaggcgcaggcattaa

SEQ ID NO: 24452 - DNA, 1518 bp, Homo sapiens
  SIMILAR (713)..(871): 711254mologous to Cloning vector pCMVLacI lac repressor,accession number U64448,Smith-Waterman Score=170.
ttaaccaataatatgaagtgatgtcagcgggatatcgacacccaacgcgcgcgaaaataaccactctggctcgccgagatcgttaaaagattcctcaccatttagcagcaaatattcgtaagtatcttcggttacttgccgttggtagcccatggtaaaattatggacctcccatttggcatggttttgattttctactttttccagcatgtagacgggttcgatatttcccggttcttcgctgttaaaaaatcgctgccagcgtttttcctgccagtttaaggtcattgctcccatcgctttggcgttgatcgcctcgcgccagtgactctctttactgataccgtagctctcttcatagacaaagagcttgatatcatcaatgtcatcaatatcttcgccgccggtggtattgatttgcagaaactcatcgcctgaagtgtagtagcggaaaatctgactgggtaccgagctcgaattcgtaatcatggtcatagctgtttccgcctggccctgagagagttgcagcaagcggtccacgctggtttgccccagcaggcgaaaatcctgtttgatggtggttccgaaatcggcaaaatccttctttaatttatacccaaaggacctcctaggagtctgtgccctcatagatagaactgggtcgctctcatcatacaggattttcgcctgctgcgcacaccagcgtggaccgctgcttgcaactctctcagggccagccggtgaagggcattcagctgtgcccgtctcactggtgaaaagactaaccaccctggcgcccaatacgcaaaccgcctctccccgcgcgttggccgattcattaatgcagctggcacgacagtttccgactttggtgatggcataatagtctcttgcagacattaatacatccagtgtgaaaagttgagaatttattgtgctaagatgcccgctttccagtcgggaaacctgtcgtgccagctgcattaatgaatcggccaacgcgcggggagaggcggtttgcgtattgggcgccagggtggtttttcttttcaccagtgagacgggcaacagctgattgcccttcaccgcctggccctgagagagttgcagcaagcggtccacgctggtttgccccagcaggcgaaaatcctgtttgatggtggttccgaaatcggcaaaatccattaattgcgttgcgctcactgcccgctttccagtcgggaaacctgtcgtgccagctgcattaatgaatcggccaacgcgcggggagaggcggtttgcgtattgggcgccagggtggtttttcttttcaccagtgagacgggcaacagctgattgcccttcaccgcctggccctgagagagttgcagcaagcggtccacgactggtttgccccagcaggcgaaaatcctgtttgatggtggttcgaaatcggcaaaatcctgttggtctgttcagggactcagtttcttcctggttaagtcttgcaggtggtgatggaaccaggaatttctccat

SEQ ID NO: 24453 - DNA, 3054 bp, Homo sapiens
  SIMILAR (1371)..(685): 991254mologous to Escherichia coli high-affinity choline transport protein,accession number U73857,Smith-Waterman Score= 1176.
ttatgagatcctattgtgctctaaagtgaactccgcgcccactgcgcgcgcttcgtcgagcatcgccagctccacgccaaactctttcagccctttttcgctgccacagatactctggaaaatcagcccgcccggtgcgccacgacggatcgcttcgatctgggtggtgacgtgcgccagtacacagccctgagttgggatgttgaatttgtcgatcacgccatagatggtatccaacacgcggcttaagttttccacgtcgtcagtcaccgggttaacgccgatcaccgcatcgcccaccccgaaggaaagcccttcgtagatttgcgcggcgatactttgcacgtcgtcacgggtgtcatttggctgcaaacgggcgctaaaggtgcccggaataccgatggtggtattggcctttttgattaccggcattttcttcgcgccgtagatcaggtccgcgttggagcaaatcttcgctaccgccgcgaccacttccgaggtcagccctttgcgggtaaaggcaatgtcgtccacgctggtttcatcgctcagcacatactcacgcagttcgctgatgctccagtttttaatctggttgtaggccgtttcgttaacatcgtcctgaatcagccgcgtcacgcagtcatcttcataggcaatcaccggattattgcggatgtccggcgagatacgcgccaggaacaagccgacaaacggcgaccatgccacccaccatgcccagaagaagagcgtccagttattcatccactcaaccggacggtcgaaggcaaaactgttgagcgtcatgcccataaagcgattcacatagtcgccaacattcagcaccagtgcattaagcaggaacgaagtgtcgcccataaacaatacgaacaggatcaatcccagcgccagcgcgacattaagctccgataacacgcgaatgcccttatcgacaccggaggtgacagagatcgtggcgattatcaccgacaaggcgatcagtgccgctttcgccgccatcgaatcgggaatatcaaacagtacgctcaagccatagttaagctgcaccacaccgataccgagcgtagtggcaataccgaagatagtgccgatcaccgctgcaatatccactgagtgacctatcggcccgttaatccgtttaccgaagatcgggtacagcgccgagcggatggtgagcggcaaattataacgatagctaaagtatccgagcgccatgcccatcagcgcatacatcgaccagccggttaagccgtagtgaaacagcgtccagaccatcgcctgacgcgcgggctcaatcgtctgtcccgcgccttccggcggctgcatatactgcgttaccgggtcggctacgaggttagttggcgatgactctaaatcagaggggtacccggccatgtgaggtgtcagtctgcccctactggggggttcctcccagttaggctcacattcactcgagatgcgctctaaagcgcattgcccggcgtatttcgctacctggcccagatgtaacggcagcagtgattcaagtttttcgcgcaacaggcgtgccagaaccggagaggtgccgccagaggagaccgctaccatgagcggtgagcggtcaataatcgacggcataataaagctggcggctttcggcgcatcgaccacgttacagaagatgcgacgagcttcagcggcttcgctgacgcgctggttaagcgcgtcatcatccgtcgctgcaatcgccagccagcaggtgtcgagaaggctttcatcaaatggcccttcgacgagggttaacatgcctgcatctgcccatgcggtgaacccagcggttttcaggtcgttaaatgctgcgatatcgcccgcatccacagaaaccgttttggcgatttgttgtttgccattggcgtagtgcatattgccaacgttaatgcgattcaccggaacgccacctttcaccagcgtcaggaaatcggcgggtgttttacaaaccagcaggattttctgtcgatcggcggcgcgatgaatgttgtcgataactttttgcagcgtccagatacgtacggcgatcccttcagcaaaaacacccttgagattgtgcaggaaggtgttgaagcgcgtaaaaccatgcgttttgccgacggcagcgaactggaagtcgactttatcgtcttctctaccggtatccgtccgcgcgataagctggcaacccagtgtggtctggacgttgctccgcgtgggggtattgtcattaatgattcctgccagacttccgatccggatatctacgccatcggtgaatgcgcaagctggaacaaccgtgtatttggtctggtagcacctggctacaaaatggcgcaggtcgccgttgaccatattctcggtagcgaaaacgcctttgaaggtgctgaccttagcgccaagctgaaactgctgggcgtagacgtaggcggtattggtgatgcgcacggtcgcacgcctggcgcacgtagctacgtttacctcgacgaaagtaaagagatctacaaacgcctgattgtcagcgaagacaacaaaaccctgctcggtgcggtactggtgggcgataccagcgactacggtaacctgctgcaactggtgctgaacgctatcgaactgccggaaaacccggattccctgatcctgccagcacactcgggtagcggcaagccgtctatcggggttgataaactgccggacagcgcgcaaatctgctcctgcttcgacgtcactctgcttgtgctctggcagcgggcgaatcacaatcttcttgcccggctggttgagtgccgaaatcggggtaatacaggccagaccattcttgccgttcatgttcagaccgtcggaaccgcacacaccttcacggcaggagcggcggaacgacaggctgggatctttctcttttagctggataagcgcatccagcagcatcatgtcgcgaccttcatccgcttccagggtgtaatcctgcatacgcggagcatcatcaacatccgggttatagcgataaattgaaaactcgagtctcat

SEQ ID NO: 24454 - DNA, 2049 bp, Homo sapiens; identical to SEQ ID NO: 10771

SEQ ID NO: 24455 - DNA, 6018 bp, Homo sapiens
  SIMILAR (237)..(749): 461254mologous to Escherichia coli isoleucyl-tRNA ligase,accession number D10483,Smith-Waterman Score=325.
atgctacacataaacatcacttacaatgagctacgatcacagatttctgatccaaataagccaggtttgttcacaactcatcgggctcggtaccccgctctgctctggcggaagcggaagttagtattacgacaaaacttctccgtccatcgacgttgctttccaggcagtgatcaggatgcactgaaagcaaaatttgcccgtaatgcagctatcggcgtgaccgattacaccattctcggcacggtaaaaggtgcggagttgagctgctgcgctttacccatccgtttatgggcttcgacgttccggcatcctcggcgatcacgttaccctggatgccggtaccggtgccgttcacacgcgcctggccacggcccggacgactatgtgatcggtcagaaatacggctggaaaccgctaacccggttggcccggacggcacttatctgccgggcactatccgacgctggatggcgtgaacgtcttcaaagcgaacgacatcgtcgtgcgctgctgcaggaaaaaggcgcgctgctgcacgttgagaaaatgcagacagctatccgtgctgctggcgtcacaaaacgccgatcatcttccgcgcacgccgcagtggttcgtcagcatggatcagaaaggtctgcgtgcgcagtactgaaagagatcaaaggcgtgcagtggatcccggactggggccaggcggtatcgagtcgatggttgctaaccgtcctgactggtgtatctcccgtcacgcacctggggtgtaccgatgtcactgttcgtgcacaaagacacggaaggctgcatccgcgtacccttgaactgatggaagaagtggcaaaacgcgttaagtcgatggcatccaggcgtgcaagcgccccagaacgcgccaaacagcgacgcattggcaaaggtgatcaaaaagcaggtagcggtgcagcaatggcctgcaaaatcatcaacaagaacgagaaactgccgccagtgcgcccgattgtgccagatgtcaattatatgcaagctcggctacgtactagtttgcccagtactggtaatagcagggcaagtgtagcgctaacgcatagtggtccggcgatatttcgaaccggtgcaggcgaggcggtttcacgttgcgccaaaagagctggttgccgctattcgccgcctggcgacgagcacggcctgaaacgacgtattgattatgtatgccgaataaagcattcacgccgcatccgcaagttgtattgctcaacttcgctaaatctgtggtggcagttgtacaacatcaaaagccagtcgtcgacgccagggtccaaggctgtctgcaagcaagctgccttcattgaccattcgcctgggaagaattcggcacttcgtcgcgcataccaaccgcacatcacctgcaatggttggctgacgtccaaacggcggccttcccccaaagggtttttttccaaaaaaccccgggatttaaacccttttcccaaaaatttccaaaccggaccggccaataatttctcctggaccatcatcggtgcccacctgcgcacggctggcacccagcgactgggcggcacgaagcgaacctgctgcacgcttttcacccccgccagcgccgacatcgccaccgtgcaaaaatcgctaaatagatcatcgacctggtttgccaccatccatgttgttgaccgaacctacgccatgtcccgcatctgccggacatatgttcggacctgcacgtctccgcgcgggacgcccttggcgtccggttcgcccatttcgcgctggacgttgaatttgaactctacgccttcttcccgcgcgtttttcactcgcggcgggaacccggcatgttctcttcatcacgacgataggcacaggaacgtgcttcgctccctggcgcacggacgtacgcacgcagtccatcgcatgtcgccaccgccaaggaccaccacgcgtttgccttccatgctgacgaagaggaacggcagcgctgcgtacacgccatcggcgtcttcgttttccagccgccgcgcattgactgataagtcccgacgccaaggaacacggcatcgtatcactcagcagatcgtccagctcttgaaggccggaataccgaaggtcagcagcccgccatttctggatgacggtcgaagacaacggcttttacgccgttacgcgtcagacatccgcacacgccagacctgccgggcctgcgccgataatcgccaccgcttgtccactttgaaaatgccatgtaccaggccctatcccattttggtacccggaatggaactccgaagaactggcttttgcgaaacaaattcaggctcgctcacctccaacgatcggcaaaacagtctgaataatatcgccgcaacggtggcgaaaacggcaaggtttttgcactacgtcatcgtgaaacggatgcccccccccaggcgcgcattgctcatcaacgcgatcgccagtacggcgcagtcccagttcgcgcagggcgtcagattacctttgcggaaaaaatgttcaatggcgcgctccgcctgcccgcaatatagactttgccttctttcagccgctggcgcagatcgtccggggcaagtccaccagcaccacgtcgtcggcggcatcgaaaaaaggatcgggccggtttcccaacagccagcccttccagcatggcggcggtatctttcgcccgtgggtttctaccacgccaaccacaatatccagcccttgcgccgcagtcgctgggcttctgccagcatcgcccaggtcttcccgacgcctgacaggcaccgaagaaaactttcagcttcccccgatgcggcgcggcagttgttccagcagacgatcggggtcgggacttcaaccggaacgctcgcgctggcatccgggttagcggccctgcataacccgtcaatgtcgttaaaagtagttgctggcttgttcaatttgctgttgatactggataatttgctgattatgcgcggcatctgcccttgtaattcatgccgttggctgagtaaccgcagctggcgttctgctcatcttgtgcatccagccacggttgaatatcgtccagtggctgcaggtgatattgaggctggccgtgacggcttgccattgttgacgcgaccaggtgctgagcagtgggcgttgctcagcatgttgcgccagggcggtagcaacttcatcgcggttaacgtcaacgtgatcgccgcaagcgcattaagtttttgctcagatgggttaactgttgctgccattgccgcagatgctcgcgatcgctggttgttgggagaactgcgcacgccaacccgccgttactacgaagacctggtgaaaaacaggcctcgctcccctgtcagaccacctatcccgcaaccgccaaaacgccagacctccctgaacgtcattaaacctggcgtggctacgggtcgttacgctggcagcgccgccttcatcttcaacaccaccgaatttgtccctgttggcctgctcctgacattgcgcaaagttttcacatgcaaaccgctcaggtcggcatcatttgaccatttacgcatgggtagtagcgctaatgtcattgccttttatgtaatgaccagtcaggttgaacggcgcaaattactgatctgcctgtttgtgtgtttattgccagccacgtactgtcgtttttgtcgtggagctttaccgtctgctaaagagaatgatgtggtactggtcgcgggcaaaggccatgaagattccagattgttggcaatcagcgtctggactactccgatcgcgtcacggatacgcgtctggcgtttggtgaactggctgcatggttcgccagcaagttccggcgcgcgtggttgctctgacggggtcctccgcaaaacctccgttaaagagatgacggcggcgattttaagccagtgcggaacacgctttatacggcaggcaatctcaacaacgacatcggtgtaccgagacgctgttgcgcttaacgccggaatacgattacgcagttatttgaactggcgcgaaccatcagggcgaaatagcctggactttgagtctgactcgccggaagctgcgctggtcaacaacctggcagcggcgcattctggaaggtatattaaggccaggccgcaaccggcgattttcgacaaggagaaggggggaaggaaaaaggcgccagggaacaaaggggataaatccaggggtaaaacgcaggtgcaaagatctatcaacttcccttcaacaaccctccccgattctgctgttataatttcgacggccaacaccctgatatcaaaccccgtgatttcagcatcagtattatctccgatgtatatactagacaccttcccgggagcggtaaaacagctgccgacgaagtgcgatcaaggtgaccggacccgcgcaggtgattggcgggcgctcctattgttcttcagctccgatgacggtgcagaaaagaacggaatcaacgctgaactggcgatgaaatcttcgacctggtggagaaattcgctggttacggatttaacaaatcgcatctgcggcctatgctttggtgtcatatcaaacgttatggctgaaagcgcctatcctgcggagtttatggcggcggtaatgaccgccgatatggacaacccgagaaggtgcgctgatgaactcgctggcgatggtaccgagctcgatttagaagaggtggtgagagcccaaggggccgtggtggggcttaaagccctccgtgctccctcaggtggcggggacgtcttactttccgttgctacgctcttgaataacatttacgtgacaatacagacgttacgccttcgatacctgcgcgccgaggtgtgccgaaatttagaaatagggtatcatctgggagaaatgtgcaaacagcaccttcagctcagcctaactaacgggctaagttatctggaaaagaagtctgagggcagctgggaacatctgggaactactcaagttcaacaagctatgtcctttgtccagcccttattgatttccccccctccactaccagctgtaccaggaagtgacaacagggactcactagatgcgtcatcattgtcaccaagaagagaaaaaaagaatccaacatatgtcttccattggcgagcatttgcccggcaaagcgttcaacgaaatgacctggtctatgcaggtgacgcgcgtaacaacatgggcaattcgatgctcgagctgcggcgcttaccggtctggatttgcgtctggtcgcgccacaagcggctggccggaagctgcgctggttacggaatgccgcgccctggcacagcaaatgttggtgccatcagccgcacctttaccatcggccaggtttttcgccaatcaaaggtcgctttcgcctggttgttagcatcgttcagtacggtgcccccagtgcaccggatttcaccagcgccagcgcttctggcagcgcatcgacccaaacaccggaatgctggacttgttgtgtgctttcagcgcttcaaccggcccattgccatcgcatcgttgttggcgataaccacttcgattttgttgcgttcgggccagacagccaggcgtccatcttatctttcgcctgagcggttcccacattgcggaagcccggggcggctggaccctacagtcatgacaacccaggggacttcgaaaacggtcggagagcacgccgatggccagtgcgcccggcggcaaatccgcgcgcagcgcaggatcgacgcctttcgaggtactcaaagcgacgaaagccaaagcgaagtccggagacgtcctgaacagcgctgtgtccgaccagtagtcggaacactcctggtagcaccatcaaacgcgcctaaccaagagccgtgccttatcaacggcgaccgaaagattgttagtccgaggatccaacgaattaaagaggcaagagaaagcgaaatccaatcaaagagcgtacgaggtacggggaagacactgtacgaggatgagtcggacacggaggaacgagctgacgattag

SEQ ID NO: 24456 - DNA, 1656 bp, Homo sapiens
  SIMILAR (1521)..(745): 1001254mologous to Escherichia coli TatD protein,accession number AJ005830,Smith-Waterman Score=1373.
tcagctactccgatggcctgcatctcccagtgaaacaggaagcggaatggcaacaggctgtgcatcttcaggtggggccggcggttgtatttctccagcggcaagcacgtcctctataagcggaatcaatttggctaatgttttactactgcgaaaaatatccctgcacgccaaacggacttcccggtccggctcaccagggttacgacgcgctatctcaaaagctttcggtacaacagtgtcaaatttaatgatgtctgcaatatcgtaaacaaaggaaagaggctttcctgtatgcacaaacccaatagctggtgcataaccagctgcaagtatcgccgcttcagttacgccgtataaacaggaagttgcagcgctaatgcattggttgatcgtatcgcccttttcccagtctttcggatcgtagcgacgtccattccatgtcacgccgtattgcttcgccagaagtgcgtaggttgcccgcacgcgactgccttctatacctctgagttgctctccaggctgaccagaagcataaacacgaacgcccgcttcccccacccataccaacaatgttccaacttgcgcagccaggcgtacagctgcatgcgaaacccgtgtaccaggttccagcatgatgcaggcaaccgagccaacaggaatatgagtgcggatccctgtcttgtcgataagtacaaacgcgccatctattacatcgatctggccattatttgtcagaaagatcagtgttttgacattagcatccgtggtggcagccagccatgcggcatcttctccacgccagtgcgcaatacgttgcaaaatatggggcagatgggctggctcgttgcgccgggatgatggctttggcgtgagatcgcgagggagcagatacggcgcatcagtttcgatcagtaatttttccgccggaatcaacggcaaaagttcccgcagctccagtccgcgtcgttcatcgcaaacccaaccggtaatgccgatataaattccatgcgccacgcacgcctgcatctcttcgcgtgtgccggtaaagcaatgaagaaccgcaccaggcagtttatccagccacggctccagcaatgtcataaaccgctcgtgggcatcgcgacagtgcataaataccggcatgtttaaatctgcggcaatgcgtagctgggcaacaaaagcgcgttcctgctcttccggcgtcgaaaagttgcggttaaagtcgagaccacattcaccaatcgccaccacttctggctgcgcggccagctcaataatcgcttcttcagtcgcagcttgccactggctgctgtcgtgaggatgtacgcccgccgttgaccaacaggacgaatactgacgcgccagcttttgcgcctgctggctttcacgcaggttagtgccggtgatgagtagcccattaactcccgcgtcaaaagcgcacgctacaacatcatcacggtctttcgcaaattgcgaactggtcaaattaacgccgatatcaaacatcctgtactccatatgacaaccgccctcttcccgatttcgccctttaccaacgtaaaagcgtgagaagaagacaccgatttcaaacagacagtacatcgggatcgccaacagcgtgcgcgagaagacatccggcggcgtcagcaacat

SEQ ID NO: 24457 - DNA, 4317 bp, Homo sapiens
  SIMILAR (2335)..(2955): 971254mologous to Homo sapiens EMR1,accession number X81479,Smith-Waterman Score=1056.
atggattccccctttggtgttttgcaggaggaccctgtgctgaccgtgatcacccaggtggggctgaccatctctctgctgtgcctcttcctggccatcctcaccttcctcctgtgccggcccatccagaacaccagcacctccctccatctagagctctccctctgcctcttcctggcccacctcctgttcctgacgggcatcaacagaactgagcctgaggtgctgtgctccatcattgcagggctgctgcacttcctctacctggcttgcttcacctggatgctcctggaagggctgcacctcttcctcaccgtcaggaacctcaaggtggccaactacaccagcacgggcagattcaagaagaggttcatgtaccctgtaggctacgggatcccagctgtgattattgctgtgtcagcaatagttggaccccagaattatggaacatttactcactgttggctcaagcttgataaaggattcatctggagcttcatggggccagtagcagtcattatcttgataaacctggtgttctacttccaagttctgtggattttgagaagcaaactttcctccctcaataaagaagtttccaccattcaggacaccagagtcatgacatttaaagccatttctcagctatttatcctgggctgttcttggggccttggtttttttatggttgaagaagtagggaagacgattggatcaatcattgcatactcattcaccatcatcaacacccttcagggagtgttgctctttgtggtacactgtctccttaatcgccagatcaactcccttctcctgacctggaccttgtggatcctgaggcagaggctttccagtgttaatgccgaagtctcaacgctaaaagacaccaggttactgaccttcaaggcctttgcccagctcttcatcctgggctgctcctgggtgctgggcatttttcagattggacctgtggcaggtgtcatggcttacctgttcaccatcatcaacagcctgcagggggccttcatcttcctcatccactgtctgctcaacggccaggtacgagaagaatacaagaggtggatcactgggaagacgaagcccagctcccagtcccagacctcaaggatcttgctgtcctccatgccatccgcttccaagacgggccctcctcaggacctgtctgttcatctctggtacgcaggccccatggagcgggcaggggcagagagcatcctggccaaccgctcggacgggactttcttggtgcggcagagggtgaaggatgcagcagaatttgccatcagcattaaatataacgtcgaggtcaagcacattaaaatcatgacagcagaaggactgtaccggatcacagagaaaaaggctttccgggggcttacggagctggtggagttttaccagcagaactctctaaaggattgcttcaagtctctggacaccaccttgcagttccccttcaaggagcctgaaaagagaaccatcagcaggccagcagtgggaagcacaaagtattttggcacagccaaagcccgctatgacttctgcgcccgagaccgatcagagctgtcgctcaaggagggtgacatcatcaagatccttaacaagaagggacagcaaggctggtggcgaggggagatctatggccgggtgaggcaggcagggctgggtgacggggagggcatgggggttgagctggtggtggacgagactggaactggggactggagaagtgtctcggtggcactcacacggcccctgtctaaaccttgtatgtacggtacagcttcatttctgtacgtaccggactgcccggcaatagatgatgcttaccgccattcgattccgcctgtttcacaccacccgacaaattgttacattgtcaccccgtataagtgcccggtcaccgctactatacctatcagacattgtggagacacggtatttgttcacacacatgaggtttgcactggtcgcactatctgtaactcccagtcatccaacgttatcaatgagaccactggtgtggcttttgtctcctttgtgggcatggaatcggttttaaatgagcgcttcttccaagaccaccaggctcccttgaccacctctgagatcaagctgaagatgaattctcgagtcgttgggggcataatgactggagagaagaaagacggcttctcagatccaatcatctacactctggagaacgttcaggtttgtgaagaggtctctactgagattcttgtctacctgttgggaactcctcgtctctcgattgccttaactctcattttttacgggaagctattgaggccgccaaagcagaagtttgagaggcccatctgtgtttcctggagcactgatgtgaagggtggaagatggacatcctttggctgtgtgatcctggaagcttctgagacatataccatctgcagctgtaatcagatggcaaatcttgccgttatcatggcgtctggggagctcacgatggacttttccttgtacatcattagccatgtaggcattatcatctccttggtgtgcctcgtcttggccatcgccacctttctgctgtgtcgctccatccgaaatcacaacacctacctccacctgcacctctgcgtgtgtctcctcttggcgaagactctcttcctcgccggtatacacaagactgacaacaagatgggctgcgccatcatcgcgggcttcctgcactaccttttccttgcctgcttcttctggatgctggtggaggctgtgatactgttcttgatggtcagaaacctgaaggtggtgaattacttcagctctcgcaacatcaagatgctgcacatctgtgcctttggttatgggctgccgatgctggtggtggtgatctctgccagtgtgcagccacagggctatggaatgcataatcgcgtctgtttggacaaggataataagccagctatcgctcgtggtccgctgggacttcatctcaatagtggctttacgctcgacacgttagcgtttcgtttgctggaagatgaattgctgattgcgctgccgggtgaggaatttacggtagccgccgtcagccacatcgatctgggcggcggtagtcagattttccgctactacacttcaggcgatgagtttctgcaaatcaataccaccggcggcgaagatattgatgacattgatgatatcaagctctttgtctatgaagagagctacggtatcagtaaagagagtcactggcgcgaggcgatcaacgccaaagcgatgggagcaatgaccttaaactggcaggaaaaacgctggcagcgattttttaacagcgaagaaccgggaaatatcgaacccgtctacatgctggaaaaagtagaaaatcaaaaccatgccaaatgggaggtccataattttaccatgggctaccaacggcaagtaaccgaagatacttacgaatatttgctgctaaatgatcgtccgccgcttcctcaaaccctgtttgccgcctgtcagcatctgctggcgatgttcgttgcggtgatcacgccagcgctattaatctgccaggcgctgggtttaccggcacaagacacgcaacacattattagtatgtcgctgtttgcctccggtgtggcatcgattattcaaattaaggcctggggtccggttggctccgggctgttgtctattcagggcaccagcttcaactttgttgccccgctgattatgggcggtaccgcgctgaaaaccggtggtgctgatgttcctaccatgatggcggctttgttcggcacgttgatgctggcaagttgcaccgagatggtgatctcccgcgttctgcatctggcgcgccgcattattacgccgctggtttctggcgttgtggtgatgattatcggcctgtcgctaattcaggttgggttaacgtccattggcggcggttacgcagccatgagcgataacaccttcggcgcaccgaaaaatctgctgctggcaggcgtggtcttagccttaattatcctgcttaaccgtcaacgtaacccttacttacgcgtggcctcactggtaattgcgatggcggccggatatgcgctggcgtggtttatgggcatgttgccagaaagcaacgaacctatgacgcaagaactgattatggtgccaacgccgctctattacggtcttggcattgaatggagtctgctgctgccgctgatgctggtctttatgatcacttcgctggaaaccatggcgatatcacggcgacctctgacgtttccgaacagccagtgtccggtccgctgtacatga

SEQ ID NO: 24458 - DNA, 2109 bp, Homo sapiens
  SIMILAR (1333)..(2106): 1001254mologous to Escherichia coli Ferredoxin I,accession number D90724,Smith-Waterman Score=1354.
atggtcattatccttgcagtgctggcgatgatcgtggtgaaagccctgactcatagcccgtggggaacatataccgttgcgttcaccattccgctggcgctgtttatggggatctacctgcgctatctgcgtccggggcgtattggcgaagtgtcggtcatcggtctggtattcctgattttcgccattatctctggcggctgggtggcagaaagtccgacctgggcaccgtactttgactttaccggcgtgcagttgacctggatgctggtgggttacggttttgtggcggcggtgctgccggtgtggttactgctggccccgcgtgactacctctctaccttcctgaaaatcgggactatcgtcggtctggcggtaggcattttgattatgcgcccgacgctgaccatgcctgcgctgaccaaatttgtcgatggcactggcccggtatggaccggtaacctgttcccgttcctgtttatcaccatcgcctgtggcgcggtgtctggcttccatgcgctgatctcttgtgggaccacgccgaagatgctggcgaacgaaggcaggcgtggctttatccgcttcggtgggatgttaatggaatccttcgtggcgattatggcgctggtttccgactgtatcatcgatccgggcagtcattgctcccatcgctttggcgttgatcgcctcgcgccagtgactctctttactgataccgtagctctcttcatagacaaagagcttgatatcatcaatgtcatcaatatcttcgccgccggtgtagcggaaaatctgactaccgccgcccagatcgatgtggctgacggcggctaccgtaaattcctcacccggcagcgcaatcagcaattcatcttccagcaaacgatacgcttacgtgtcgagcgcgctgggaaaaaccagacctatttattcttattgacagccgtatcctatatgtgctctaaagatgtacaaggttggagagcagaacagcgtctgtatgtcctgtcatctgccggaacagttgcaaaaagcgttctggccgcacgatgtccacgagcagccatgacctggtctcgtcgccagtttctcaccggcgtcggcgtgctggcagccgtcagcggcaccgcagggcgcgtggtggcgaaaacgttgaatatcaatggggtgcgttacggcatggtgcatgacgagtcgttatgcatcggctgtaccgcctgtatggatgcttgtcgggaagtgaacaaggtgccggaaggcgtctcgcgcctgacgattattcgtagcgagccgcagggcgaatttcctgatgtgaaatatcgcttcttccgcgtgagtgaatatatcaccctgaccgtgcggcggattgatgacggtgtcggctcccagtggctgacgcgcgatgtaaaacgcggtgattatctctggctttcggacgcgatgggggaatttacctgcgacgataaagcagaagataaattcctgttgctggcggcaggctgcggcgtcacgccgattatgtcgatgcgtcgctggcttgcgaagaaccgtccacaggccgatgtgcgggtgatctacaacgtgcgtacgccgcaggatgttattttcgccgatgagtggcgtaactatccggtaacgctggtggcagaaaataacgttaccgaaggctttatcgctggtcgtctcactcgcgaactgctggcaggtgtacctgacttagcttcacgtaccgtgatgacctgcggcccggctccgtatatggattgggtagagcaggaagtgaaagcgctcggcgtgacgcgtttctttaaagagaaattcttcaccccagtagcagaagcggcgaccagcggtctgaaattcaccaaactgcaaccggcacgagaattttacgccccggttggcaccacgctactggaggcgctggaaagcaataacgttccggttgtcgctgcctgccgtgcgggtgtttgcggctgctgtaagacaaaagtggtttccggtgaatatacggtgagcagcacaatgacgctgaccgacgccgaaatcgctgaaggttacgtactggcctgctcctgccatccgcagggggatttggttctcgcataa

SEQ ID NO: 24459 - DNA, 2180 bp, Homo sapiens
  SIMILAR (2180)..(1497): 961254mologous to Escherichia coli methionyl-tRNA formyltransferase,accession number X63666,Smith-Waterman Score= 1122.
atattctgttttgtcgtatcgccagcacagcctgccgacattgttcggtgacattggcaatatcatggttgatatcaatgcgcacaatatcctgttcatctgcttgtggacgctccagtgcctcaaactgactttttagtaacgctaccggcataaaatgcccagcccgacgctgcattcgcgcgagaatagtttcatagtcgccattcagaaatcgtttggcactttgttgtttgccattggcgtagtgcatattgccaacgttaatgcgattcaccggaacgccacctttcaccagcgtcaggaaatcggcgggtgttttacaaaccagcaggattttctgtcgatcggcggcgcgatgaatgttgtcgataactttttgcagcgtccagaaacgtacggcgatcccttctgccagtaccatttccatcaggttttgttgtaccggatcttcggcaacctcatcgttggctaccagcaccagatttgcccccgcaaatccgacccattgaacgccgacctgaccgtgaatcaagcgttcatcaatccggcttaaaacaatatttggcatagcgtgttcctctttgttttgcttattggccttcacaggctgtgtggtactgcgccaggatgtcctgaatatggttgataatgagttcccgtggcgttggctgcagctcgccggagcgaactttcacgtactgcagcggcagatactggctgatcagcggcagcggaattggtgaatccgccagattacgtaccagatgagcgaaagcgtcatcaatctggctgtccggccagtaatagcgcacgcgatccgagtagctataaccacgcgccagacgacgcgcgttgccgtcaccgtggtagtggctttgccagtattccgggcggtcgagcatcacgtcttccagcacctgacgcagaccagaacaggctttcgctggcaccagttcttcttcaatcgccgcccgagagaacagagcttcacgcagggggacagtcaagctgggcccctttcgaatgggaaggggcaccccgcggggaggaatggactctagtatctgtaggggctctaaaataagatctactcgccactcgcatagccaggcggtggcttctttaatgccaactcgtcgcatccgtttgaaaacccaaccgcactgaccaacttcgtgcagatgctggcgatcttcttgatcccaacggcgctgtgctttgcctttggtgaagtgatgggcgatcgccgccaggggcgcatgttggggagagctgttgaccgcgggggggaatgccgggcaaaatgggcaacccgaattgggaaaaacactgccaaagaaaccggcggactggtaccacggattgggcgagtataacaccgaatggtacggacgatgaaggaggtacaaagaggcgacactctttgtgtccttctgcttcacgtcgagaagaagacagaacgaaacatcggacagaggaagagacaaaggatggaccgaactggctgttttgttggcttcaagatcgttcctggctgcagcgttggttgccgtatcaatgaccgatgctttccagactttaaccggctgtccttcaatttccagccagctcattggccatggattgaaagcgcgaatgcagcgttcaagctgtgctgccgaaagtgaccagtcaatacgcgcttcttctttactcaacttctcggcgtaagtgacaagagtttcgtcctgaacttctggtttcgccgtgccgtctgccagttgtttcaacgtggtgataagcccttgtgggccaagctctgccagcttgtcgtacagcgtaccactggtatcttctgcagtaatcgggcaggagagcttatagagcatatcaccggtgtctaaaccgacatccatttgcataatggtcacaccagtttctgcatcacccgcccatagtgagcgttggattggtgcagcaccgcgccagcgtggcagcagtgaaccatgaacgttgatacagccaagacgcggcatctccagcactgctttcggcagaattaaaccataggcgacgacgaccataacatcagcctgcagttcggcgaccagttgctggttttcttgtggacgcagggaaacaggttgaaaaacgggcagacctttttcctcagccagaactttaaccgggctgggcat

SEQ ID NO: 24460 - DNA, 1198 bp, Homo sapiens
  SIMILAR (471)..(379): 801254mologous to Escherichia coli KbaZ,accession number AF228498,Smith-Waterman Score=130.
cataaatcgtcgtgttgtactgatcgtggctgcgtactgtcgccatgaccagcttactgttaaacgctgaagagggatcgttacccgaacgttatccgtgaagagattgaacgtctgctggagaacattactgttctggcagaagcggcggcgctggcaacgtctccggcgctgacagatgagctggtcagccacggcgagctgatgtcgaccctgctgtttgttgagatcctgcgcgaacgcgatgttcaggcacagtggtttgatgtacgtaaagtgatgcgtaccaacgaccgatttggtcgtgcagagccagatatagccgcgctggcggaactggccgcgctgcagctgctcccacgtctcaatgaaggcagccagctcgccggagcgaactttcacgtactgcagcggcatatactggctgatcagcgggagtggaattggcgtgtccgtcccattacttatcagcattggcgaaagcgtcatcaatctggctgtccggccagtaatagcgcacgcgatccgagtagctataaccacgcgccagacgacgcgcgttgccgtcaccgtggtagtggctttgccagtattccgggcggtcgagcatcacgtcttccagcacctgacgcagaccagaacaggctttcgctggcaccagttcttcttcaatcgccgccagagagaacagagcttcacgcagggcgaaggtcagcgctgggccaactttcagaatggcaaagtggtcaatcaccagctggcgcagcgattgcggcgtttgataatcggtagagtgcgcttcgaaaatcagcgtttcgtagttttcgaccatctggcttaaggcgctcgctttggcgggctgataatcaataacgttggtgtgatcgaattcgacgccgggttgaaccaccagggcaatgatgcgtggccagatggcattcaaaccttgcttttcaaaggcgtgacgatgggcttccagcgtggcgcgggcggcatccggcgtggtgaccgccagctcgcttaaggtttcatgcgcgccgccaggtaccggcacttcggtaccaatgacatactccagatcggcttcgccaaagtgttcaagacaggtttcttccgccactttcgccagacgggcggcgcgttcagccaagatgtcatcagttacgggaatcggatctgctgacaggacatgttgcat

SEQ ID NO: 24461 - DNA, 5652 bp, Homo sapiens
  SIMILAR (4777)..(4875): 811254mologous to Escherichia coli isoleucyl-tRNA ligase,accession number D10483,Smith-Waterman Score=139.
atgggccgcggcggactcacgcgcgcgggcttcgctcgggcctgggccactcggtcatggcgacccctggctggcgagcgcgcccaacgccgcgggcggaccccatccccgcaccctcgcgccgcgggcggccgccattgttacctcgggccgcggttccagtcgccttggcaacggtcgcgcagcgtcagggacgctgctgcggaaagtggagacggtggcggtgcggggatgcgcatgtacgatggggccgcggggcaaaacgacggcattcagacacgcaaccgttttatacagtgtccaagagtacgttccacctggggctactgggaagcccaaggattcacatttgccatggaggaatcaacagggacgcccacctgctccccagcctcaggctgggcttctccaccggaactctgggaggagcccatccccagctacacgtctgggcccaggctctcggagctgctttggagaaacatgcttggcgttgtctatgccaatgccaggctcctgggactctacaggtttctccaggagaatgttttgacccacacgaggagcgtgttaaagtctctgatccaacagaccccagagacgagcagtttcatcctgtgcctcagccacaggtcagcccctcctcacactggccagcctcagcgacaggacccagttcccatccttctttcagccctgctcagtcacctcacgaccacccatgcagtggtgcagctgatgctcacttccgatggtcttggctgccacctgccgcctctaccgaccacagttgctgttgtgttcaccatggctgtctcttccgtcctggcctcagggtcaccaggggtctgccagacgccttcaacaagtccaagttcctaccttcagcgtgctgctgttctgcagcttctggacaaccttcctgccccgtaccacagcgcacagggcaagtccactgtggccgtggagatcttttcctcctggcttccatggcagggctgctgggtggcatctttgccccaaatgtacatcatcctgctaaagcccgagcggaatgccccagactggccacatgacctagggtccaggacccgctgggctggtgttcggggcggcctggagactacacacagggcggcgccactacgcaagcgcgggttacgtcatcggctgggcgccagcccaagcggcgcgttacccaggtcagtacgtgtgttggtagcgatctccgctctggtcttcgactctcttttgagtcggtccggggggtttgtgccgttaaaattcactgcccctggtgacatgcccaatggtccaacccgtcagccaggaaagcgcttgtccaggaccatatggcggccccctggccgacgccggaagtccccgccgggatacgagctccagcagacccctcggcgcgctccggtcgacgcagggaaagcagccgccatgtccgcggctgaggtgaggcctttgctcagactgtgggtccgccgtagtgcggggcttggggggtcaggagagccggctgggagaggcggcgtcaggttgggatttgctgtgttcctgggcagtgcctggtcaatcagtcctcgggatggcagccatcaacccgtgggcctctgggggcgggctgtgaggctggaagtcctgttctacttcagctgcatagatctgatcatgattggtgccttccactccgctctgtgctcctggcccatctccctcctgaacagccgccccgacccatcccccacccaatcaccccaccatcctccccccaaccagccgtcacagccgtcgtcgctgcccctcccctgtattcccagtgcgctgcccttcacacttccccagctcgtttattatggaactcctccgtgtggcatcctagctcccaacgccctccccactccagaaccatcactgactggcgcagtgaacacgtcttctatgtcactaagcatccggctcagcggcaaagcccttctgcccatccccgcaatagaatttggggctcggctgcagatctcagtgcccatgccagggccaccacagattgcccatgggggggcccagatcctcctcaccagccatgtagacctcatccccttcacatcatcccaggccctcttcatcttccagaaacagccaccatcagtccaggactctcatcagctcagcaagcccagggacaccgaagcccagcgtctgcgcttccggcagttccagtaccagtggcgagcgggccgcacctcgcgctgggccagctctggacgctgtgccccagtggctgaggcccgaggcgcgctccaaggagcagatgctggagctgtggtgctggagcagttcctgggcgcgctgcccagcaagatgcggacctggtgcagtcacagggcccccgaagctgcagggaggccgccagcctggtggggacctcacacagatgtgccagcaggaaggggtgctgcagggatgttcggggaaagtctgcccccccagaaggcctggagaattgggggctctgggaagaacaggcccctctacgatccctttctcccgcacagttctggtatctctggactcggtcgaacccaggactggagtttcggtgaggaggaagatgggaagagtccaaggtccagaaagaaccatcgcagggcatgcgtgccgcttctgggacggcctcaaggatgccccatcaaggactgtgtgaggttgtccccagcgctcccagtcttccctcacccggactatgcggctgcttccggcgtcgaccgggagcgccccccggggtctcctgggacctgtagttccacgcgcacttccggcgtcggacagcggcgccgccatgacaggaaatcaattgccaagcctgaggtcatctccctgttggagcaaggagaagagccgtgtcagtggagcaggcatgtcctcaacgcacttgtccagccatgctggatcacaacttcgcaaacacccgacgtcagcatcgatggtgttattgatatcttccatctgtgcgccacggacataagcccgcttcaaacgctgacggtgcgagagaccttctgccagacgtgttgtcagctcatccagcgtttcgtgaacgccgcctgcgcgacttcattcagacaggcgaaacccgctgccatcgcaatcggttaccggaaagcgtacccgcctgatagaccggacccgtcggggccaggcatccattacatcacgacgaccaccgaatgcgcctaccggcattccacgccgatgattttgccgaggcagcttaaaccacgctcgcgcttcaatcacgcagtggtaccgactagtcgatggcttggcgctgagatcgcgagggagcagatacggcgcatcagtttcgatcataatttttccgccggaatcaacggcaaaagttcccgcagctccagtccggtcgttcatcgcaaacccaaccgcgcacgctacaacatcatcacggtcttcgcaaattgcgaactggtcaaattaacgccgatatcaaacatcctgtctccatatgacaaccgccctgacgggcggttgaatttattcttcagtttttcgctttctgcttcagcgtcgttttcctcttcccgatttcgccctttacaacgtaaaagcgtgagaagaagacaccgatttcaaacagacagtacatgggatcgccaacagcgtttgcgagaagacatccggcggcgtcagcaacatcccgacaacgaatgcaccaaccagcacatacgggcgttttttgcaatcagcgacaccataaaggtcagcttgatcggcgtaaagaaggcgaggccacgtcggtggcgatcatcgttgaaccttgcggcaactgctgatcaatggcgcggataccagatgcgtgataagcggttgagtatcttctacagacagtttacggtttatcactcgacgaaggggaaggtgcagcggttttcggttagcgtccgcagcaggttttaccaccggctctggcgtggtttctggcttcgttccggcgaactggcctgcgtttgtgcagcggcaggcgttacgccctctgcgcagcttcattatctttcaccaccgggttatggatggtgtgcgcttatcgctcgccttttcaggatcgtttgcaacgtaggaacgcttcatcgacccgcggcctggcgtagttcatccatcgacgctttcagttcgggcgtcattgagctttcagatcatcaccgactttgccgtcaagcgtttatgcgcttgagcgtatcgcggaacaggaaagggacatcaagcaagttcatcactggtgataaccggcaaagttattcgagccggacatttccatatcgatggtgccgccactacgccgctgatcatcgcctgcgcgttaccgagagtgctgtccgggaacgttttaatttcagctcgcctttggttctctcctgcaataaatcattgaatttttcgccgcaatatgttgcgagcgggcaacgcatcctgaccgcatggtcagcgtccagtcaggccaatgaacatgagattcgtattcgcgtcgcggagagtcgctgtccgatatgtcgagtgcctatagataatcggtctgcctggagtagctacatcctcgccggcataacaggttgcactgtgatatcggtccacctagcgcataccggtgcgtccctccttatgctaatggcagcattcatattggtcactcggttacaagttctgaaagacattatcgtgaagtccaaagggctttccggttatgactcccttcgcgccaagtgccgcgaatacgcggcgacccaggttgacggtcaacgcaagactttatccgtctggtgcgtgctgggcgactggtcgcacccgtacctgccatggacttcaaaactgaagccaacatcatccgcgcgctgggcaaaatatcggcaacggtcacctgcacaaaggcgcgaagccagttcactgcgtaatgcagcgtatcggcgtgaccattacaccattctcggcacggtaaaaggtgcggagcttgagctgctgcgtttacccatccgtttatgggcttcgacgttccggcaatcctcggcgatccgttaccctggatgccggtaccggtgccgttcacaccgcgcctggccacgcccggacgactatgtgatcggtcagaaatacggcctggaaaccgctaaccggttggcccggacggcacttatctgccgggcacttatccgacgctggtggcgtgaacgtcttcaaagcgaacgacatcgtcgttgcgctgctgcagaaaaaggcgcgctgctgcacgttgagaaaatgcagcacagctatccgtgtgctggcgtcacaaaacgccgatcatcttccgcgcgacgccgcagtggtcgtcagcatggatcagaaaggtctgcgtgcgcagtcactgaaagagatcaaggcgtgcagtggatcccggactggggccaggcgcgtatcgagtcgatgttgctaaccgtcctgactggtgtatctcccgtcagcgcacctggggtgaccgatgtcactgttcgtgcacaaagacacggaagagctgcatccgcgtcccttgaactgatggaagaagtggcaaacgcgttgaagtcgatggcatcaggcgtggtggggatcctctag

SEQ ID NO: 24462 - DNA, 3189 bp, Homo sapiens
  SIMILAR (643)..(1128): 931254mologous to Escherichia coli isoleucyl-tRNA ligase,accession number D10483,Smith-Waterman Score=826.
ttaaccaataatatgaagtgatgtcagcgggatatcgacacccaacgcgcgcgaaaataaccactctggctcgccgagatcgttaaaagattcctcaccatttagcagcaaatattcgtaagtatcttcggttacttgccgttggtagcccatggtaaaattatggacctcccatttggcatggttttgattttctactttttccagcatgtagacgggttcgatatttcccggttcttcgctgttaaaaaatcgctgccagcgtttttcctgccagtttaaggtcattgctcccatcgctttggcgttgatcgcctcgcgccagtgactctctttactgataccgtagctctcttcatagacaaagagcttgatatcatcaatgtcatcaatatcttcgccgccggtggtattgatttgcagaaactcatcgcctgaagtgtagtagcggaaaatctgactaccgccgcccagatcgatgtggctgacggcggctaccgtaaattcctcacccggcagcgcaatcagcaattcatcttccagcaaacgaaacgctaacgtgtcgagcgtaaagccactattgagatgaagtcccagcggaccacgagcgatagctggcttattatccttgccaaacagacgggcatcatccgtgcggctaaaaaaggcaaaaaaaccttcattctgcatgatggccctccttatgcgaatggcagcattcatattggtcactcggttaacaagattctgaaagacattatcgtgaagtccaaagggctttccggttatgactcgccgtatgtgcctggctgggactgccacggtctgccgatcgagctgaaagtcgagcaagaatacggtaagccgggtgagaaattcaccgccgccgagttccgcgccaagtgccgcgaatacgcggcgacccaggttgacggtcaacgcaaagactttatccgtctgggcgtgctgggcgactggtcgcacccgtacctgaccatggacttcaaaactgaagccaacatcatccgcgcgctgggcaaaatcatcggcaacggtcacctgcacaaaggcgcgaagccagttcactggtgcgttgactgccgttctgcgctggcggaagcggaagttgagtattactgacaaaacttctccgtccatcgacgttgccatccgtttatgggcttcgacgttccggcaatcctcggcgatcacgttaccctggatgccggtaccggtgccgttcacaccgcgcctggccacggcccggacgactatgtgatcggtcagaaatacggcctggaaaccgctaacccggttggcccggacggcacttatctgccgggcacttatccgacgctggatggcgtgaacgtcttcaaagcgaacgacatcgtcgttgcgctgctgcaggaaaaaggcgcgctgctgcacgttgagaaaatgcagcacagctatccgtgctgctggcgtcacaaaacgccgatcatcttccgcgcgacgccgcagtggttcgtcagcatggatcagaaaggttgcgacatcgggtttcacgccagtagtaatggcaaacgccgtgccgacgatagtaccgataatcacgttaggcggctgtgcgcccgccagcggggccagccccatccacaccagttccagcgtaccgccggttaaaattccggtatgcagatcgccaagtaccagcccgaccaacgggccgaggaccaccgggcggtgcatatgggttaggccgttaaacatatccaggccagcgataaaggcgataatgcccaacgcaaatgccccagcggttttcaggtcgttaaatgctgcgatatcgcccgcatccacagaaaccgttttggcgatttgttgtttgccattggcgtagtgcatattgccaacgttaatgcgattcaccggaacgccacctttcaccagcgtcaggaaatcggcgggtgttttacaaaccagcaggattttctgtcgatcggcggcgcgatgaatgttgtcgataactttttgcagcgtccagaaacgtacggcgatcccttctgccagtaccatttccatcaggttttgttgtaccggatcttcggcaacctcatcgttggctaccagcaccagatttgcccccgcaaatccgacccattgaacgccgacctgaccgtgaatcaagcgttcatcaatccggcttaaaacaatatttggcatagcgtgttcctctttgttttgcttattggccttcacaggctgtgtggtatgcgccaggatgtcctgaatatggttgataatgagttcccgtggcgttggctgcagctcgccggagcgaactttcacgtactgcagcggcagatactggctgatcagcggcagcggaattggtgaatccgccagattacgtaccagatgagcgaaagcgtcatcaatctggctgtccggccagtaatagcgcacgcgatccgagtagctataaccacgcgccagacgacgcgcgttgccgtcaccgtggtagtggctttgccagtattccgggcggtcgagcatcacgtcttccagcacctgacgcagaccagaacaggctttcgctggcaccagttcttcttcaatcgccgccagagagaacagagcttcacgcagggcgaaggtcagcgctgggccaactttcagaatggcaaagtggtcaatcaccagctggcgcagcgattgcggcgtttgataatcggtagagtgcgcttcgaaaatcagcgtttcgtagttttcgaccatctggggctccagcaatgtcataaaccgctcgtgggcatcgcgacagtgcataaataccggcatgtttaaatctgcgccaatgcgtagctgggcaacaaaagcgcgttcttgctcttccggcgtcgaaaagttgcggttaaagtcgagaccacattcaccaatcgccaccacttctggctgcgcggccagctcaataatcgcttcttcagtcgcagcttgccactggctgctgtcgtgagaatgtacgcccgccgttgaccaacaggacgaatactgacgcgccagcttttgcgcctgctggctttcacgcaggttagtgccggtgatgagtagcccattaactcccgcgtcaaaagcgcacgctacaacatcatcacggtctttcgcaaattgcgaactggtcaaattaacgccgatatcaaacat

SEQ ID NO: 24463 - DNA, 1374 bp, Homo sapiens
  SIMILAR (28)..(372): 971254mologous to Escherichia coli peptide methionine sulfoxide reductase,accession number M89992,Smith-Waterman Score= 609.
atgaccgattttcgggagagcgacaccatgagtttatttgataaaaagcatctggtttcccccgccgatgccctgcctggacgtaacaccccgatgcccgtagccacgctgcatgcggtcaacggtcactcaatgaccaatgtacctgacggaatggagattgccatttttgcgatgggttgtttctggggtgtggagcgtctgttctggcagttacccggcgtttacagcaccgccgcaggctataccggcggctatacgccaaatccgacttatcgggaagtgtgctccggtgatacgggtcatgccgaagcggtacgcattgtttacgatccttccgtcatcagctatgagcagttgctacgcaagtaccgttgtgttgccgttgcattgttgggctacttcaaatgcaaaccgatcctgctcaacccgagttataaatccatgcaggatgacttggcatttattgcgcgatttcactttaaagacctcaagtttcggcgctttagtttgaaagcggaccaaaaatcccgcatctatgagcgtgttttatcaattgctggagtcaacagctggaaagataagcaacatcaaccccggcttgttgaacatttgctggtctgcgctgaaagctgggtggcaccccgcgcactctttgacgcagcaatcgagtacctggcccaccagaagatcgccattcctgcctatttggttgcgtttttggttcttggtcccttagtgttgtctctcatcccttcgcagatgttgccgtcgttaacgtggtcaagcatcacgtattcaatagttgttatcgtcgaagctggctatcagtaccattctcgactgcgaagattcggtcgcgtcgaggttaacgaacagatcgaatacctgatccacaacccaatcaggacgcgcgccagggcggtcaactttgttgataacaacaatcggcttcaggccccacggatattacggcaggattcatggtggatcaccagacctttaccggggctgacgtgggcgataatcgggtcgccaggaatcctgccacaggtggtcaaatcggcgcgcgtcatgaaacaggcggtggcctacctcgaaccgtttattgaagccagcaaagagcagggcaaaaccaacggcaagatggtgatcgccaccgtgaagggcgacgtccacgacatcggtaaaaatatcgttggtgtggtgctgcaatgtaacaactacgaaattgtcgatctcggcgttatggtgcctgcggaaaaaattctccgtaccgctaaagaagcgatgctgatttgggtgtcgtgctgtttaccagtcgcgatgccagtcactatcaacaagggcaaggaacgcagttacttcacctga

SEQ ID NO: 24464 - DNA, 1827 bp, Homo sapiens
  SIMILAR (857)..(1147): 721254mologous to Escherichia coli hexosephosphate transport protein,accession number M89479,Smith-Waterman Score=312.
atggggattctcgtcagtccgttgctcgcaccgctaatcggcggtctgctggatacgatgtggaactggcgcgcctgttatctctttttgttggttctttgtgctggtgtgaccttcagtatggcccgctggatgccggaaacgcgtccggtcgatgcaccgcgcacgcgcctgcttaccagttataaaacgcttttcggtaacagcggttttaactgttatttgctgatgctgattggcggtctggccgggattgccgcctttgaagcctgctccggcgtgctgatgggcgcggtgttagggctgagcagtatgacggtcagtattttgtttattctgccgattccggcagcgttttttggcgcatggtttgccggacgtcccaataaacgcttctccacgttaatgtggcagtcggttatctgctgcctgctggctggcttgctgatgtggatccccgactggtttggcgtgatgaatgtctggacgctgctcgttcccgccgcgctgttctttttcggtgccgggatgctgtttccgctggcgaccagcggcgcgatggagccgttccccttcctggcgggcacggctggcgcgctggtcggcggtctgcaaaacattggttccggcgtgctggcgtcgctctctgcgatgttgccgcaaaccggtcagggcagcctggggttgttgatgaccttaatgggattgttgatcgtgctgtgctggctgccgctggcacgcgggtaccggctgtcgagctggaccagcaccactgcgtcagaggacatagattgtgaagagggcgatggtgagggcaatgagacccacggcctccagctggctgtggagccggagggtttgcaacccaattacatgggccggggaaaaattcggtttcgtgatacttgcctcctgttttgtactcagtctcggggctcccagtggggatttgcccggacggaacttgtcgcgcttttaccgccattcttgtctggcgctgccgattatcgcgctggcctggcactatggttggcaaggggcgctgattgcgacgttgatgaacgccatcgcgctgatcgccagtcaaacctggcgcgatcatccggtggatttattgctctcgctgctggtgcaaagtctgacaggcggttgcgtgaacttaaccagtcgctgcaaaaggaactggcgcgcaatcagcatctggctgaacggttgctggaaaccgaagagagcgtgcgccgtgatgtggcgcgtgagctgcatgatgatatcggtcagaccatcactgctattcgtactcaggcgggcattgttcagcggctggcggcagataacgccagcgtgaagcagagcgggcagctcatcgaacaactatcgctgggcgtttacgacgcggtgcgccgtttgttgggtcggttacgtccgcgccagttggatgatctcaccctggagcaggccatccgctcactgatgcgggaaatggagctggaagggcgcggtattgtcagccatctcgaatggcgaatcgatgaatcagcgttaagcgaaaaccagcgcgtgacgctgtttcgtgtctgccaggaagggctgaacaacattgtgaaacatgctgatgccagcgcggtcaccctgcaaggctggcagcaggatgaacggttgatgctggttattgaagacgatggcagcggtttgccgccgggttccgggcaacaaggttttggcctcaccggaatgcgcgagcgcgtaacggcgctgggtggcacattacacatttcctgtctgcacggcacgcgtgtcagcgtttctctacctcaacgctatgtctaa

SEQ ID NO: 24465 - DNA, 1755 bp, Homo sapiens; identical to SEQ ID NO: 14854
  SIMILAR (67)..(705): 991254mologous to Escherichia coli K12 diaminopimelate epimerase,accession number AE000457,Smith-Waterman Score=1097.

SEQ ID NO: 24466 - DNA, 702 bp, Homo sapiens
  SIMILAR (40)..(366): 941254mologous to Escherichia coli lambda-integrase,accession number M38257,Smith-Waterman Score=550.
atgcgcttcgtcatgtctgtgacgatgtatcacacgacgttggtggggttggatattaaacacctcaacctggagtctggtaaagtgtgggttatgggaaaagccagcaaagagccccgcctcccgattggtcgcaacgctgtggcgtggattgagcactggcttgatttgcgcgacctgtttggtagcaaagacgacgcgctttttctgtcgaaactgggcaagcgtatctccgcgcgtaatgtgcagaaacgctttgccgaatggggcataaaacaagggctgaataatcacgttcatccgcataaattacgtcactcgttcgccacgcatatgctggagtcgagcggcgatcttcgtggtcttttccgctttgtaagcgcaaaacggcacgcgaaaggttccaaagttgggtcgcccataatttacgcggaccagatcatcattggtgccggtcagaaccatccggcccggtggcggggcttaccccggaaatcacgcttattggtcagtccttcaaacgacaaacgcagaaaagcaggcgccgcacccgttgccgcactgcgccatttccctcccatcagcattgaaaatgcgatagtgaaaatccagttcaggatcattcggcggctcaaccaccagcagttggtcaaaccctacccccaggtgccgatcagccaggcgacgaatcagttccggtga

SEQ ID NO: 24467 - DNA, 5516 bp, Homo sapiens
  SIMILAR (1316)..(1945): 971254mologous to Escherichia coli K12 putative ATP-binding component of a transport system,accession number AE000399,Smith- Waterman Score=1034.
atgaatttccgccacctgctcgagcagcatcaactggcccgtcaattgttcaagaccatcaatcgctggctggccgaagcaggcgtcatgatgacccaaggcactttggtggatgccaccatcattgaggcacccagctctaccaagaacaaagagcagcaacgcgatccggagatgcatcagaccaagaaaggcaatcagtggcactttggcatgaaggcccacattggtgtcgatgccaagagtggcctgacccacagcctggtcaccaccgcggccaacgagcatgacctcaatcagctgggtaatctgcttcatggagagaagcaatttgtctcagccgatgccggctaccaaggagcgccacagcgcgaggagctggccgaggtggatgtggactggctgatcgccgagcgtcccggcaaggtaaaaaccttgaagcagaatccgcgcaagaacaaaacggccatcaacatcgaatacatgaaagccagcatccgtgccagggtggagcacccgtttcgcatcatcaagcggcagttcggcttcgtgaaagccagatacaaggggctgctgaaaaacgatagtgtgtgtcttactggctctaaggataatgtactgctggtgatccatcactacggtgatagtagtgtcgtcatcgtgcgaactgaccatcttgtcatcggcaaggtatttttctttggtatacgggtccgtcacctcctggtattccagtttgatgttatcggcaatacacagcgcattcatcaggggctggacggttttttcctgcatatccacgaggtagtagtaactgccatcctcgcagccatcgggcgactggcggtggaagagaacatggcgctgttgatggaacaggctatcgccaacgaaggcctgttttatcgcctactctacctgcagcgcagtctcaccgccgccagcagtctcgacgatatgctgatgcgctttcaccgctgggcgcgcgatctcggcctggcagagctgctggtggtgctaccggaagcgaaagcggtgggatcggtggcgatgtcgatgctgggaagcgatgctgatttgggtgtcgttgctgtttaccagtcgcgatgccagtcattatcaacaagggcaaggaacgcagttatttcatgaaattgcgctgatgttgccggagcttctggagcgttggattgaacgcgtatgcccgatttacacacagatggtcagcagaaggcgatcatcaattttgccagcgaagccggctgcaatctgcagcgggatcttgggtgtcttccagggctacgaggaatataacgtcaactccggggaaattgtcggtctgctggggccaaacggtgccggtaagaccaccactttctacatggttgtaggcattgtgccgcgcgatgcgggcaacatcattattgatgatgacgatatcagtctgctgcctctgcatgcacgcgcgcgccgcggtatcggctatctgccacaggaagcctccattttccgtcgcctcagcgtttacgataacctgatggcggtactgcaaattcgtgacgacttgtctgctgaacaacgtgaagaccgcgcgaacgagctgatggaagagtttcacattgagcacctgcgtgacagcatggggcagtcactctccgggggtgaacgtcgccgtgtagaaattgcccgcgcactggctgcgaatccgaaatttattctgctcgacgaaccgtttgccggggttgacccgatctcggttatcgacattaaacgcatcattgagcacctgcgcgacagcggcctgggcgtgctgatcactgaccacaacgtgcgtgaaacactggcggtttgtgaacgcgcttatatcgtcagtcaggggcatttgatcgcccacggcacgcctacagaaatcttacaagacgaacaccaggagagtacgattctgaacatgaagcaaggtttgcaactcaggcttagccaacaactggcgatgacgccacagctccaacaggcaattcgtctgttgcagttgtcgacgctggaacttcagcaggagctacagcaggcgctggagagtaatccgctgcttgagcaaatcgacactcatgaagaaatcgacacccgcgaaacgcaagacagtgaaacgctggacaccgccgacgcgctcgaacaaaaagagatgccggaagagctgccgctcgatgccagttgggacaccatttacaccgctggtacaccatccggcaccagcggtgaatacattgacgacgagctgccggtctaccagggcgaaacgacgcaggccttgcacgaagtcatcagtgggcaggttcagctgacacgggcagcgaaaagcagcacgagctacagttgcggattcagggggagcctgtctccgggcagcttaatctggcaggaagttttgatcgcaaagaagaacgctggaaggggaactcttagcaatacccgcttccagacgccggttggcccgtggtcgctgacccgcgatattgcgctggattaccgcaataaggagcaaaaaatcagcatcgggccacactgctggcttaacccgaatgcggaactgtgcgtgccgcaaactatcgatgcgggggccgaagggcgtgcggtggtgaatctcaaccgcttcgacctcgccatgctgaaaccgtttatgccagaaaccactcaggccagcggtatcttcacgggtaaagcggacgttgcctgggacaccacgaaagaggggctgccgcagggcagtatcaccctttcggggcgtaacgtgcaggtaacgcaaaccgtcaacgatgcggcgctgcccgtggcgtttcagacactgaatctgacggcggaattgcgtaacaaccgtgccgaattgggctggaccatccgcctgaccaataacggccagtttgatggacaggtgcaggtgaccgatccgcaaggccgccgtaatcttggtggcaacgtcaatatccgtaacttcaaccttgcgatgataaaccccatctttacccgtggggaaaaagcagcggggatggtgagtgccaacttgcgtctgggtggtgatgtgcaaagcccgcagttgtttggtcagcttcaggttacgggtgtggatatcgatggcaactttatgccgtttgatatgcaaccgagccagcttgcggtcaactttaacggtatgcgctcgacgcttgccggtacagtacggacccagcagggtgaaatctacctgaacggtgatgccgactggagccaaattgaaaactggcgggcgcgggtaacggcgaaaggcattcacttcgtgtcaaagcttgcttggcgtcgcctggttcctcctttctcgttcgtttgtaattatcacatcccaggtcccactttcaggctcagtgtatataccttcccttccttgcctaatcgtgcactgccatgtgggtcacgccagcctggtggggcgtctagtaaacggccgtcccagtcgtctcgtgctcgttttcgtgttggtacggcagccggcacgcacgtttctcccgaaccaacaagtggtggtcgctgggtagcaggcttaggtaatcccgtataccacaccccttgcgcccatgtccgggtgctaccggtcgctccgtgtggtttccgcgggtccgcacgccgttcccccgcctttcgcacgggccacggcgcaccgggtcctcctacttaccctatgctggggtatcctcctctgggccgaaatcggcgctatcgatggtgtagtagtagcagccggagcatcagctcggttggcgtgcacgaggccggggctacttcagctatcgctttcacgccgtatatggataacctcgtcgcgctgccgtcgggtatactggctattattcagtcgtttgtcgtccggccacgtcgcgcccgtttagttctaatcaactgtaaccggtaccctatcaacagccgcttctccttcgcccccctgcattttcccaagtcccctcccccatttctcccactgttgcacgtactagcccaaatccagttgcacgtgacaccctatcgtggctacgcctggtcacaaactacttcccactcctcgctaactcactctccaggccacgcttcgcgcaacactaatgttactaagcccacgacaccactacgtgactatctgctcctggctgccacgctgccggctacggcacaagctctgtctactagactttgcgttccgttatcgcaacacatcgggattagtgtgtacccacttcgcccggactcgcccccgccgggtcagcgcagcagcatcaacgcaaatctatgcgttttcaccgccctgatcaggtccaaatctctcgttgaacaactctcggtacatcccccccgcggtcccctagccggcctagcggcattttcgcgatcttgcgttttttctgagggaactacatcgcctcccgtcctcaacatttaccaattggcgcctgacaggatcgttgacgcgtccccgaggttttaccaaggaatcgcaaattacatgaatgtattgaacgtaatggcaatccaaaataagaaccaggaggagcagcagcatgaacacatgaccgcgcaccggaacgtgtggtgtctgaccggaaaatcggcgctatacgatggcatgccccttatccgccctaatggccataaccaaagcaaaccaccgtatatcaatttctattgggccaagccccacacaagttatagttcaatttcaaaatcggcgctatacgatggcagtaagcccagtaatatgccccgaggagttcatgtacgcacacgaggcaaccattatgggaacgccgtccgtaaggcctggggtccccgagccctcggtagtccgtgcagcctgacccaccggaaggatgtagggtggaattctagagtaagaccacctcgttgggaagttgtcaataatagggtacagggacctccaggtcctcgaggtccacctcgtcgacgtcgtccgcattgttttggaatacacggatgtaggcgtgaagggcatgtgccagttggaccaggagtgctgcatgaaataacaacagtaggaacagcagggacaatcggtcaagtgctctgtgattcagtgcgcaacgttatccgggcaccgagcgcatactgcattcttaaccaatcgtgtgcgcagctcccccatcgcccccctctattcaaaccgtcgttccagatttatccgggcttcttggtagatgcccgagtctcaattcgaacggtccgcgccgctccgtaccgaactgccaatttggggcctgatgggccacggaatgtgcttcttaatagggaaagcgatgttgcatgccgccatgcacgcacagtgccgtggctgatacacggcgtgcgatttcgtcaaggccgcgccacaaggcgatcggcaaatatcctgcatccgacggcgttggtcatcgctcagccacggcaaacgttcactggcaagacgagcagtaaacagtcacgttggggagtccgtcgtagag

SEQ ID NO: 24468 - DNA, 3761 bp, Homo sapiens
  SIMILAR (315)..(1001): 991254mologous to Escherichia coli lambda-integrase,accession number M38257,Smith-Waterman Score=1181.
gctggcgcttaggtgcgccgtcgaaccatactcatctggcattaagccgtcagtctttcgaaccgctgcgtattcagcgttaggggcaggaacagcactatcttgggccgcttaacggaccagagctgctggtggtgctaccggaagcgaaagcggtgggatcggtggcgatgtcgatgctgggaagcgatgctgatttgggtgtcgtgctgtttaccagtcccgatgccagtcactatcaacaagggcaaggaacgcagttacttcatgaaattgcgctgatgttgccggaccttctggagcgttggattgaacgccgtcagcttgaggcgatcatcaattttgccagcgaaaacggcctgcaaagctggcagcaatgtgatgtgacgatggtgcgcaattttgctgtacgcagtcgccgtaaagggctgggagcagcaagtctggcgttacggctttctgcgctacgtagcttttttgactggctggtcagccagaacgaactcaaagctaacccggcgaaaggtgtttcggcaccgaaagcgccgcgtcatctgccgaaaaacatcgacgtcgacgatatgaatcggctgctggatattgatatcaatgatcccctcgctgtacgcgaccgtgcaatgctggaagtgatgtacggcgcgggtctgcgtctttctgagctggtggggctggatattaaacacctcgacctggagtctggtgaagtgtgggttatggggaaaggcagcaaagagcgccgcctgccgattggtcgcaacgctgtggcgtggattgagcactggcttgatttgcgcgacctgtttggtagcgaagacgacgcgctttttctgtcgaaactgggcaagcgtatctccgcgcgtaatgtgcagaaacgctttgccgaatggggcataaaacaagggctgaataatcacgttcatccgcataaattacgtcactcgttcgccacgcatatgctggagtcgagcggcgatcttcgtgcgagaggcgcttacctttgtgccaaattattatccggggctgcgcaggttccagaatggagatctgcattcgcctggtttgcccgctgtgccgaacaggcaaggcaaaaccagtacttacaggtcagctcttgcgtacccgccctggaaggctgcgatgttaacggtgccagttttacccttgaacagatgctcgcctggcgggaccatccgcaggttaccggccttgcagaaatgatggactaccctggcgtaattagcgggcagaatgcgctgctcgataaactggatgcatttcgccacctgacgctggacggtcactgcccgggtttgggtggtaaagaacttaacgcctatattactgcgggtattgaaaactgccacgaaagttatcagctggaagaaggacgccggaaattacaactcggcatgtcgttgatgatccgcgaagggtccgctgcccgcaatctcaacgcgctggcaccgttgatcaacgaatttaacagcccgcaatgcatgctctgtaccgatgaccgtaacccgtgggagatcggccatgaaggacacatcgatgccttaattcgccggctgaaatgcattaccgagtttatcgagcaggataccgaagaagcccgccagcaggctacgcgcccgattgaagtgattgaaggcccgttgatggacggcatgaatgtggtcggcgacctgtttggcgaagggaaaatgttcctgccacaggtggtcaaatcggcgcgcgtcatgaaacaggcggtggcctacctcgaaccgtttattgaagccagcaaagagcagggcaaaaccaacggcaagatggtgatcgccaccgtgaagggcgacgtccacgacatcggtaaaaatatcgttggtgtggtgctgcaatgtaacaactacgaaattgtcgatctcggcgttatggtgcctgcggaaaaaattctccgtaccgctaaagaagtgaatgctgatctgattggcctttcggggcttatcacgccgtcgctggacgagatggttaacgtggcgaaagagatggagcgtcagggcttcactattccgttactgattggcggcgcgacgacctcaaaagcgcacacggcggtgaaaatcgagcagaactacagcggcccgacggtgtatgtgcagaatgcctcgcgtaccgttggtgtggtggcggcgctgctttccgatacccagcgtgatgattttgtcgctcgtacccgcaagagtcgaaacccaggcggtacagctaacgcacaatctaccttcgagcaaaaagcggcaaatccctttgataataacaatgatggtctgccggatttaggcatggctcccgaaaatcatgatggggaaaaacactttgctgaaattgtgaaagatttcggcgaaaccagtatgaatgataacgggctggatactggcgagcaggcaaaagctttcgcattgggaaaagtccgcgaatggtggtcgatgccggacaatgacattcgccgccgaagaaccgcaaggcattcacgcctgaaagagaatctgccgctgattacgctaatcgtgatgatggcaatcagctggggtctggagcagttcaatcatccgttcgggcaactggcgtttatcgcgaccacgctggttgggctgtacccgattgctcgtcaggcattacggttgatcaaatccggcagctacttcgccattgaaaccttaatgagcgtagccgctattggtgcactgtttattggcgcaacggctgaagctgcgatggtgttgctgctgtttttgattggtgaacgactggaaggctgggccgccagccgcgcgctgtggcgattaacagccatagcgccacccttgggacagcaactggttggcactctcgcacacgttccgccgttcttcctgatgatggcaggtctggcggtttacgcggtgctgtttgcgggctggtcaagtaacaacaaatactcgttgctgggtgcgatgcgtgcttctgcgcagaccctgagctacgaagtgttcctcgggctttccttgatgggcgtggtggcgcaggccggttcattcaacatgaccgacatcgtcaacagccaggcgcatgtgtggaacgttatcccgcaattctttggttttattacctttgccatcgcgggcgtggcggtatgtcaccgtcacccgtttgaccagccggaagccgagcaggaactggcggatggttaccacattgaatattccggtatgaagttcggtctgttcttcgtgggtgagtacatcgggattgtgaccatctctgcattgatggtgacgctgttcttcggtggctggcaaggcccgttgttaccgccattcatctggttcgcgctgaaaaccgcgttctttatgatgatgttcattttgattcgtaatgtccttcggctggaaaatctgcctgccgctgacgctgatcaacttgctggtaacggcggctgtcattctctggcaggcgcaataaggggcaataagaccatgaccttaaaagaattgttagtaggtttcggcacccaggttcgtagtatctggatgatcggcctgcacgcgttcgccaaacgcgaaacgcgaatgtacccggaagagccggtctatctgccgccccgttatcgtggtcgtatcgttctgacccgcgacccggacggcgaagagcgttgcgtagcctgtaacctctgcgcggtagcctgcccgtcggctgtatctcgatgcaaaagcagaggatag

SEQ ID NO: 24469 - DNA, 1116 bp, Homo sapiens
  SIMILAR (926)..(1021): 1001254mologous to Escherichia coli similar to drug resistance translocases,accession number L10328,Smith-Waterman Score=166.
atggcgcgcgatctcaacgtccgtgaaggggcggtgcagagcgtaatgggcgcttatctgctgacttacggtgtctcacagctgttttatggcccgatttccgaccgcgtgggccgccgaccggtgatcctcgtcggaatgtccatttttatgctggcaacgctggtcgcggtcacgacctccagtttgacggtgttgattgccgccagcgcgatgcaggggatgggcaccggcgttggcggcgtaatggcgcgtactttaccgcgagatttatatgaacggacacagttgcgccatgctaacagcctgttaaacatggggattctcgtcagtccgttgctcgcaccgctaatcggcggtctgctggatacgatgtggaactggcgcgcctgttatctctttttgttggttctttgtgctggtgtgaccttcagtatggcccgctggatgccggaaacgcgtccggtcgatgcaccgcgcacgcgcctgcttaccagttataaaacgcttttcggtaacagcggttttaactgttatttgctgatgctgattggcggtctggccgggattgccgcctttgaagcctgctccggcgtgctgatgggcgcgtcgttttttggcgcatggtttgccggacgtcccaataaacgcttctccacgttaatgtggcattcggttatctgctgcctgctggctggcttgctgatgtggatccccgactggtttggcgtgatgaatgtctggacgctgctcgttcccgccgcgctgttctttttcggtgccgggatgctgtttccgctggcgaccagcggcgcgatggagccgttccccttcatggcgggcacggctggcgcgctggtcggcggtctgcaaaacattggttccggcgtgctggcgtcgctctctgcgatgttgccgcaaaccgggcagcctggggttgttgatgaccttaatgggattgttgatcgtgctgtgctggctgccgctggcgacgcggatgtcgcatcaggggcagcccgtttaagcgcacgtcaccgcagcatcgtcatcagctccatgggagaacgatgctgctttatcagatcacgcatcacccgcatatgcggtgcggagtaa

SEQ ID NO: 24470 - DNA, 2532 bp, Homo sapiens
  SIMILAR (1)..(411): 921254mologous to Escherichia coli put. 16S rRNA methyltransferase (ksgA) (AA 1-273),accession number X04711,Smith- Waterman Score=644.
atgcactttatgttgcaaaaagaggtggtgaatcgtctggttgcaggaccgaacagcaaagcgtatggtcgattaagcgtcatggcgccacactattgcaatgtgatcccggtactggaagtaccgccgtcgtcggttacaccacaaaacacagtggatttttttgtcgtgcgcctggttcctcatgcaacgatgcctcacccggttaaagatgttcgtgtgttgagccgcatcaccaccgaagcctttaaccagcgtcgtaaaaccattcgtaacagcctcggcaacctgtttagcgtcgaggtgttaacgggaatggggatcgacccggcgatgcgagcggagaatatctctgtcgcgcaatattgccagatggcgaactatctggcggataacgcgcccttgcaggagatgtgtattcaggttcatagcgtctacattgaggctccatcttcacctgataatgaacgatttacccctggaagaatacccctgcgtacgggatcttgtccccggccggttcctgaaatttctccaagggatcctaagggaacgacgctcgtgctggcatccgatctccctgggcggattcccgtggatccccgctctatcattgttatgctcttcctggcggtacgctggttacaacggcaacttgccgggcaagaattgctggaaacccgggctactcgtatcttaaacggtgagcgtggctctaatgtgttgggaaccatctatgaatggccgcccagaaccagcagtgcgctggatacgctgcttcgtgaaattcagaacgcacgcgaacaacacagccgtcttgatacgctgatccgctcttatgccgcccaggacgtgaaaaccggcctcaataaccgactctttttcgataatcagttagcaacgttactggaagatcaggagaaagtaggtacccacgggatcgtgatgatgattcgtctgccggatttcaatatgttgagcgatacctgggggcacagccaggttgaagaacagttcttcactctgacgaatctgctgtcgacatttatgatgcgctaccctggcgcactgctggcgcgttaccaccgcagtgattttgctgcgctgttaccgcaccggacgttaaaagaggcagagagcatcgccgtgttccgagcactgtcaagactgccagacctctggcacaggtccataggtactctcacggaggcattgcctcagacagacaagagacaggaacaaattgcagttgctttgacatcttacagtggcctatacgggttgggatacggcagtaaggagattcagctgacgtattcagggactgcgggagacctaatctctccggggctttcggccattcacggaagatgtattctgaacacattagtattcatagttaaacttcgttggatggaaaatacccttcaccgctttggtactcaccatgggtgcagcgctgtccgctcttcacatttggacagtggatccccccgtcggtcgagttggcacatggcccgcgcacgtaatcatattcatgttctggaagagaacatggcgctgttgatggaacaggctatcgccaacgaaggcctgttttatcgcctactctacctgcagcgcagtctcaccgccgccagcagtctcgacgatatgctgatgcgctttcaccgctgggcgcgcgatctcggcctggcagagctgctggtggtgctaccggaagcgaaagcggtgggatcggtggcgatgtcgatgctgggaagcgatgctgattggggtgtcgtgctgtttaccagtcgcgatgccagtcactatcaacaagggcaaggaacgcagttacttcatgaaattgcgctgatgttgccggagcttctggagcgttggattgaacgcggctgggagcagcaagtctggcgttacggctttctgcgctacgtagcttttttgactggctggtcagcccagaacgaactcaaagctaacccggcgaaaggtgtttcggcaccgaaagcgccgcgtcatctgccgaaaaacatcgacgtcgacgatatgaatcggctgctggatattgatatcaatgatcccctcgctgtacgcgacctgatgtacggcgcgggtctgcgtctttctgagctggtggggctggatattaaacacctcgacctggagtctggtgaagtgtgggttatggggaaaggcagcaaagagcgccgcctgccgattggtcgcaacgctgtggcgtggattgagcactggcttgatttgcgcgacctgtttggtagcgaaagagagcgacgccagcacgccggaaccaatgttttgcagaccgccgaccagcgcgccagccgtgcccgccaggaaggggaacggctccatcgcgccgctggtcgccagcggaaacagcatcccggcaccgaaaaagaacagcgcggcgggaacgagcagcgtccagacattcatcacgccaaaccagtcggggatccacatcagcaagccagccagcaggcagcagataaccgactgccacattaa

SEQ ID NO: 24471 - DNA, 1752 bp, Homo sapiens
  SIMILAR (1)..(393): 991254mologous to Shigella dysenteriae phosphate regulatory protein phoB,accession number M31793,Smith-Waterman Score=669.
atggcgagacgtattctggtcgtagaagatgaagctccaattcgcgaaatggtctgcttcgtgctcgaacaaaatggctttcagccggtcgaagcggaagattatgacagtgctgtgaatcaactgaatgaaccctggccggatttaattctcctcgactggatgttacctggcggctccggtatccagttcatcaaacacctcaagcgcgagtcgatgacccgggatattccagtggtgatgttgaccgccagaggggaagaagaagatcgcgtgcgcggccttgaaaccggcgcggatgactatatcaccaagccgttttcgccgaaggagctggtggcgcgaatcaaagcggtaatgcgccgtatttcgccaatggcggtggaagagttgccaaccaactaccgcttaaaacaagtgaaacagctggccttgaaatgccattctgtaacccagaaaatcaccgatctctccgggggtaatcagcagaaagtcttgatctccaaatggctgtgctgttgcccgcaagtaatcattttcgatgaacctacccgcggcatcaacgttggcgcaaaagccgaaatttacaaagtgatgcgccaactggcggacgacggaaaagtcatcctgatggtgtcatcggaactacctgaaattatcaccgtctgcgaccgcatcgccgtgttctgcgaaggacgactgacgcaaatcctgacgaatcgcgatgacatgagcgaagaggagattatggcatgggctttaccacaagaccatatggctaacgatagctggagcgggcaggataaagctcaacactttatcgcctcggcgatgctttccgccgccggaaatgaattgctgaagttgtggctcatcttctggcaaaatcgggcggaacaagcagcgttcaccgtttttcaattctacccattcttccagctgatgcggataagggcgcactgccagccgactctcgttatcgccttcaaacggcgagatatccaatcgtcctgcgacttacgaatgcaggagccacctgtctggctggatatcgaaatcactactgatgagtatctgcatgatattcagcgcaaaatccaggcattaaccgaatcattgcctgtcgaagtattgctggtacgtcggagtcgtgaacagcgcgagcgtgtgttagccagccaacagcgtgaaaccctcagcgaactcagcgtcgaagaggtgttcaatcgccgtctggcactggaagaactggatgaatcgcagcagcaacgtctgcagcatcttttcaccacgacaacacgaagcatgaaaattctcagcctgcgcctgaaaaacctgaactcattaaaaggcgaatggaagattgatttcacccgcgagccgttcgccagcaacgggctgtttgctattaccggcccaacaggtgcggggaaaaccaccctgctggacgccatttgtctggcgctgtatcacgaaactccgcgtctctctaacgtttcacaatcgcaaaatgatctcatgacccgcgataccgccgaatgtctggcggaggtggagtttgaagtgaaagtaaatcagggcgtggttgaaaacctggccagcgagcaggccgcccgtatggtggcgatgaaagccgcgaccgacaatggcggcagcctgattaaagagctgcagttggtatacaacaaagctcgtcaggccagcattactcaggaactcaccgagatcgtctcgggggccgccgcggtttaa

SEQ ID NO: 24472 - DNA, 3125 bp, Homo sapiens
  SIMILAR (2441)..(2515): 761254mologous to Escherichia coli ATP synthase gamma subunit (atp-7),accession number J01594,Smith-Waterman Score=93.
atgaacatcgatgcaaaaatcctcaataaaatactggcaaaccgaatccagcagcacatcaaaaagcttatccaccacaatcaagttagcttcatccctgggatgcaaggctggttcaacatacacaaatcaatgaaagtaatccagcatataaacagaaccaaagacaaaaactacatgattatctcaatagatgcagaaaaggcctttgacaaaattcaacagcccttcatgctaaaaactctcaaaaaactagtggctggcatgatggcagtggctgctcctgacgacccgccaccgccatcggtatcatcttccaagccatcaacagtggcacctccgggccgcatctccccgtcggggcgcgccctctgcaccagcttacccagtgccttgagcagctcgtcgaaattctcgctgctgcgcatcttccaggtgccggcgaagttgggcatggtggcggtggcggcggcggcaggtgtgaacgccatgctgaggaaagtggccgtagcggctgcgtccaagccgcacgtggagatccgccaggacggggatcagttctacatcaagacatccaccacggtgcgcaccactgagatcaacttcaaggtcggagaaggctttgaggaggagaccgtggacggacgcaagtgcagggtgaggccccagagccactacagcgtccccgtgtccccgctcggtgcccatggcccactgctgctggaggaacctgtgtctccctttgcagcctgtggcgcgccttccttgcaggtgcctcaaggcgcgcagcgctgggcgcatagcgccagtctccgccttgcgagctcagagtgtgcccgctgcacctacgctgtcggtccctcacgcaacagcctctgcccccatgcccaatttcgtcggcacttgaataatgctcagcgagctgaaaatttctcctatctgctcaaggcactggggtacgaactggcaagaattcttccgcttcttaatgagcgcttttaccctgtgctttccattagaacccatactggggttagcttcgttttcattcagtgcctggcctctgtcctcgatatcagtttagccacttgggagaatgagaacaagatccgctgcacgcaaactcttcttgaaggggacggccccaaaacatactggacccgtgagctggccaacgatgaacttatcctgctgattgaatttggtgtggtcgccgcacctgagggccagcagtccacagctgtctaccactggtgcaataccgcggtgctggacccactggcatgtatgttactaattttgatgaatcttgccaaattgctttccacagagcttgggtaccgagctcgaagctttccctcaacccaaaaaaacctttttaaaaatacaagtcgacactgcatgttcactcagtgcggcagcgaaaatgacgtctactcaagcggtagcctcactcacggcacgcaggtgaataaactgctgcagaacatccgggagcgcgttaagacgaccattttcagccataacccgaatcaggttctgaccgttttcgtccagttgctcaccacaaactgcgataaacgactcggcgagcgtttctggcgcaagcgcgccagagagaagctctgccatttgttcgtttttggttacctcggcggcaaacgccagcatgtcctgccagcgttctacactttggtgttcgacggcaaagtcaaaagctgctttggcttcagcgacaagtttatccacgatgtcgctgttagcagcttcatccacggaacgttcgatgatcttctcggcgccagcaacagccaggatagcaacttgcttacgcagctcttcacgggcacgtttacgctcggcttcaatttccgcctgcgcctgggccacgattttactggtcggtcgcgctggcctttgcaaggtcaaggtccttatgtgctcgttctgcggaagcaaggccgtcagcaatttctttttgacgtttttcgatggctgccattaatggcggccatacgtacttcatgcagaacagaacgaacaggacaaacgcgatggcctggccgaggattgttgcgttcagattcaccacacaagggtctgagccaggagtcgtacccttatgcagaaaccatgcgcaaagtgattggtcaccttgcacacggtaatctggaatataagcacccttacctggaagaccgcgacgttaaacgcgtgggctacctggtggtgtcgaccgaccgtggtttgtgcggtggtttgaacattaacctgttcaaaaaactgctggcggaaatgaagacctggaccgacaaaggcgttcaatgcgacctcgcaatgatcggctcgaaaggcgtgtcgttcttcaactccgtgggcggcaatgttgttgcccaggtcaccggcatgggggataacccttccctgtccgaactgatcgggtcgggtaaaagtgatgttgcaggcctacgacgaagtccgtctggacaagctttacatttgcaaccaccaattttattacccccatgtctcaggttccgaccatcagccagctgctgccgttaccggcatcagatgatgatgatctgaaacataaatcctgggattacctgtacgaacccgatccgaaggcgttgctggataccctgctgcgtcgttatgtcgaatctcaggtttatcagggcgtggttgaaaacctggccagcgagcaggccgcccgtatggtggcgatgaaagccgcgaccgacaatggcggcagcctgattaaagagctgcagttggtatacaacaaagctcgtcaggccagcattactcaggaactcaccgagatcgtctcggggggccgccgcggtttaaacaggttatttcgtagaggatttaaagatggctacctggaaagattgtccaggtaatcggccgccgtagttgacgtccgaattccctcaggatgccgtaccgcgcgtgtacgatgctcttgaggtgcaaaatggtaatgagccgtctggggctggaagttcagcagcagcttcggcggcggtatcgtaccgtacctcgcaatggggttcctccgaacgtctgcgttcgcggtcttggatgtaaaagaaccttgaacaccccgattgaag

SEQ ID NO: 24473 - DNA, 757 bp, Homo sapiens
  SIMILAR (296)..(255): 851254mologous to Escherichia coli ribonuclease I,accession number M55687,Smith-Waterman Score=74.
cgaagctgtttgaaggtagcgagaacttcaaacaggattcgtctatgtgggcgacgtggctgatgtgaatctgtggttcctggaaaatggcgtttccggcatcttcaatctcggtactggtcgtgcggaatccttccaggcggtagctgcctgtacgctggcttatcacaagaaaggccagatcgaatccattccgttcccggataaactgaaaggcggctatcaggcgttcagtcaggcagatctgacaaatcgaagtatgcgtccggatcaaaccaaaagcaggcaccgtgttggcatattcgtagcgttccaggcaggaacgtccgccagctcctggcatgacttcacttagtttagcggccgtttccagtgataatccggtttccggcgatgaacacattcggctggcgcgcgcttctggtagattcgggattgggcgagtagcgcaaccgaagcgcatccagcggcgttcatcaacaccacgggcagcaaccgatttaggcaatcctggccacagaccatgtacggtcagaaaatcagctttgttggtcgtttcggtttgcaggcgacattcatctcgttcgttacgatttcgatcgtgttgactctggcaaaatccggtttgccaggagagggccaggacatagcgatcaaaatcgccatactgttttgcctgcaacgctaaggcgttggcagaagagaagggaagcagagaaaccgcgagcaacgcggcgttacgccagaatgctttcat

SEQ ID NO: 24474 - DNA, 3294 bp, Homo sapiens; identical to SEQ ID NO: 1142
  SIMILAR (691)..(1269): 1001254mologous to Escherichia coli K12 putative synthetase,accession number AE000181,Smith-Waterman Score=1014.

SEQ ID NO: 24475 - DNA, 2547 bp, Homo sapiens
  SIMILAR (2547)..(1777): 981254mologous to Escherichia coli ATP phosphoribosyltransferase,accession number U02070,Smith-Waterman Score=1284.
tcacgatgggtcgcttcgcctaaccgaacttgctccagcaactgttgctgagcggttggtgctgcctcgaccatcggcatgacggccagaccgagggaaagcgtgaatatgtttagtgtgaatttgcgcattcctggccccagtcaggtaataactcaccttttgtcgagaagcggaaacggtgttgatcccagccttgtccaaacagttgttgggtgctggggtggaggagtggttgtgtttgttgcgttggtggcgcgtagtgtgcttgtgggttcgggttggttcgttgagggtgtggtgcgttgctgcgtggtgctgtcgttgtctgttgttggtgtggtgtcttgtcggtgggacgcagaggggatgatgagggtatttgtcttctgcttttgggtgtgaccggtgttgtgcttgcctggctgtttgggtcgcggtggggccgtccccttgtgtatgcgtgtgcgtgtggtcgtgtgtgtcagtgcggttcgttggttccttcctggcgcgtttctggtgttgcgttcgtagcgagggggtgcggtggctgctgaagcgggcatgacgcataccgcgaacaaattcaggaatatcgagtgatttcgttgttgctgaacccgaacggaccatgttaacaaatgtcagtccactaacgacgcctacccgaccggtttccgtatcgcagtttactcttccctgattaagctggtagatgcgattaaccaactgcgtgaaggctttgaacgtaaagctgtcgaattccaggacatcctgaaaatgggtcgtacccagctgcaggacgcagtaccgatgaccctcggtcaggaattccgcgctttcagcatcctgctgaaagaagaagtgaaaaacatccaacgtaccgctgaactgctgctggaagttaaccttggtgcaacagcaatcggtactggtctgaacacgccgaaagagtactctccgctggcagtgaaaaaactggcgcttaaatcgctggcgttcgtaggaaatctcttccagtaaacgctccagaacagtgtgtaaacgacgagcaccgatgttttcggtagattcgttcacctgccatgccgcttccgcgatgcgtttaataccggagtcggtaaactcgatatttacgccttcagtcgccatcagtgctttgtactgcacggtgatagaggcattcggctcggtcagaatacgctcgaagtcgctggtggtcagcgcctgcagttcaacgcggattggcagacgaccttgcagttccgggatcaggtcagacggtttcgcaatctggaacgcgccagaagcgataaacagaatgtggtcagttttgaccatcccgtgtttggtggaaacggtgcaaccttctaccagcggcagcaggtcacgctgaacgccttcacgagaaacatccggaccggaagactcgccgcgtgcggcttgtttggcttgctgggccgcccacacggttgctgggaaccatgggagctggcacgctggtgctgggtgcatgctgcttgccatggccgcgggagggagcccataatgttgcaacggccgcatgcggtggctggcgggcaagatgcgatctgcgatttcgtttgtcatgcaagctgggcctgtcacgccagttttttggctggaatgcctgacgagcgagcgcacggttcctgtctgctgttcggtctgtccccagttgtttttagcaggtgggatcagcacgtcgagaatacgatcttctgccagttcttcagcgcgataacgtaattccgccagcggcagaatagttggccgttcggcacctggcagcagggcgatgacttcatccagacgttcggtcggtgcgtgcatcatgatgtattttgattcgcgcgcctggatcacaccctgaatacgggtcagcagtttgtcgatcagttgctgtttggattctgccatgtcgccatcgcgttgaatcaggcaggctttcgagcgatagataacttcgacttcgcgcaggccgttagcttccagcgtggcaccggtggaaaccagatcgcaaatcgcatccgccagtccggcacgcgggtcgacttcaacagaaccgttcagtaagcaggatttaaaagagatgcctttctggtcgagataacgcttgagcaggtgaggataagaggtggcgatacgtttaccgtttaaggagagcggaccgtcccaggcttcatcaaccggcgttgccagcgaaagacgacagccgccgaaatccagacgacgcagggtaaagtagcgtggatcttcaccctgggcgcggcggttaagcagctcttcttccagcacgttttcgccgataatcccaaggtctaccacgccatccattaccagaccgggaatgtcgtcgtcacgcacgcgcagaatatcaatcggcatgttttctgccatcgcgatcaggcgctgggtgtgaagattaattttaatgccacagcgcgccagcaattcgcgtgagtcatcacttaaacggccggatttctgcatagctatgcgtaaacgagtgttgtctgtcat

SEQ ID NO: 24476 - DNA, 1998 bp, Homo sapiens
  SIMILAR (799)..(1350): 981254mologous to Escherichia coli thioredoxin reductase,accession number J03762,Smith-Waterman Score=940.
atggagagacaaaaggatagcaatgctacagagagtaagagatatggagataaaatgagaattaaaatttcagaaggagaagagaaagagaatggtgcagcatcaatatttgaagagacaatagttgaaaaattcccaaattggttaagacacaggccaaaatctgaagccgtgactgtggcggaaattttaagccccctggttcccatctacgaggtgcacagcacaggggaaaataacgaggtttgcaacgggtgcccgaacggcgagctctttgctgtcccccaaggtcttcccaatgggtgtccgtgggacctggcccacaaacgctttggtttttcgccgtgtaacaatggcgtggccccggaatttccctgtgcttattgcccgtgtgggccctcgttccacttgttgcccgcccattacggtcgtaaccccggtgctccagggcaccctggtgccctgagaacaatggcgacagcggatttatgttctgccaaagatgactgtgtgcgactgaaaaatgcgctggtcaatctcggcaacagtaaagactgggacgcgctggtaaaacgcgccaacgccgggaagctcgatggcgtgaatgtgttattacttatcattagctcaagtcaggtaagaagcccagaattcagcgaaaggcccgcggggattccaagggttaaatccacgggccacgacaaattcagagacccggcacggatcacgacacaacacggcaacaccggaaacacacggactatacgatattcgctaaaaacggaacggataatgaaggacgatctgaccggtccgttattaatggagcgcatgcacgaacatgccaccaagtttgaaactgagatcatttttgatcatatcaacaaggtggatctgcaaaaccgtccgttccgtctgaatggcgataacggcgaatacacttgcgacgcgctgattattgccaccggagcttctgcacgctatctcggcctgccctctgaagaagcctttaaaggccgtggggtttctgcttgtgcaacctgcgacggtttcttctatcgcaaccagaaagttgcggtcatcggcggcggcaataccgcggttgaagaggcgctgtatctgtctaacatcgcttcggaagtgcatctgattcaccgccgtgacggtttccgcgcggaaaaaatcctcattaagcgcctgatggataaagtggagaacggcaacatcattctgcacaccaaccgtacgctggaagaagtgaccggcgatcaaatgggtgtcactggcgttcgtctgcgcgatacgcaaaacagcgataacatcgagtcactcgacgttgccgctttattcgggaaggcgaaagcaaagggcaactgttgttggatcagctgcatgctgcaggcgactctagaggacccctgccttcaagctaactatgcctgggtatatgacatcatatttgtaaagcaggtgtgcagcaagggcttcacagacctcagtgagcgtctcctctgggagcccacgtggctcaagccagcacaaagccagatctatttggtggctgctgttgttcactcttggcataccgtatgccacccattcttgtcctttacccagatcatcaagacaaagccctaccagttcagaagccctaccagaagcacaaaggcgacaccagaagtcaacagcagcccacagcgtggcaacaaacaaaggcattacacagggttcgtgcatccacaaagcaacgggccggcaccgccaagtcaccctgcgacccgcatcgcctcatcccaaggacaatctggcaacccccactgtgcaaatgccctcaatccaatcgacactaggccgcagcaaacaaccggcgaagcagaaaagcgcacgccaccacacccactacccacgggacgccggaccaaggcaccaagacaacaacagtattgcaatgacaccacgggcacaggagcgccacacaaggcaaagcccgagacatag

SEQ ID NO: 24477 - DNA, 2856 bp, Homo sapiens
  SIMILAR (55)..(720): 891254mologous to Escherichia coli Bacteriophage n4 adsorption inner membrane protein NfrB,accession number D90699,Smith-Waterman Score=1050.
atgcggactcgtggtgtcccggcttttcaagatgacgatcgtttaacgacaaacgcgataacgttagcggtcatcatgttcatcagcgggctggacgatttttttattgatgtcgtctactgggtacgccgcattaaacgcaagttgagtgtttatcgccgctacccgcgaatgagttaccgcgaactgtataaaccagatgaaaaaccgttagcgattatggttccggcgtggaatgaaacgggcgtcatcggcaatatggccgagctggcggcgaccacgctcgactacgaaaactatcatatctttgttggcacctaccccaacgaccccgatactcagcgtgatgttgacgaagtgtgcgctcgcttcccgaatgtgcataaggtagtctgcgcgcgtcctggccccaccagcaaagccgactgtctgaacaacgtgctggacgccatcacccaatttgagcgtagcgccaatttcgcttttgctggttttattctgcatgacgccgaagatgtgatttcaccgatggaattgcgtctgttcaactatctggtcgagcgtaaagatctgattcagatcccggtgtatccgttcgaacgcgaatggacgcacttcaccagcatgacttacattggaaacattcagcgactgcaccatgccgatcatcggaatgatgatgtcctgatccgccagggccaatgcttcctgcgtgatgcccgttttctcctgtcccatcaaaatgcaggtcgggcgagtgtaatcaatttcgcggaaatcgacagcgttatcagaaagatgggttgccagaatctgcatgccctggcctttgagatgagcgacggcatcgccaatggtgcggtgtgttttcacctgtacccagctgttactacccgccgctgccgaagccatgatgactgtgtgcgactgaaaaatgcgctggtcaatctcggcaacagtaaagactgggacgcgctggtaaaacgcgccaacgccgggaagctcgatggcgtgaatgtgttattacgcccggtgagtgcggaatcgctggataacctggtggcaacctccaccgcgccgtttatcacgcatgaaacggcgcgagcggcacaatcactaaacagtccggcccccggcggattcctgattgtcagcgacgaaggcagcgattttgttgatcagccctggccttcggcatcactttacgactacccgccgcaagaacagtggaacgctttccagaaactggcacaaatgctgatgcatacgccgtttaacgccgagggtatcgtcacaaaaatcttcactgacgccaatggtacgcagcatattggccttcatccgatcccggatcgttccggcctgtggcgctatctcagcaccacattgctgctactgacgatgctgggtagcgccatttacaatggcgtacatgcctggcgtcgttaccagcgtcatcgcactcgcatgatggagattcaggcctattatgaaagctgccgttcactggttatgttggcagccgtgagcctgccgctacaggcggcttcccccgttaaagtcggttcaaaaatcgataccgaaggtgcgctactcggcaatatcattttgcaggtgctggaaagccacggcgtaccgacggtgaataaagtgcaactcggaacgactcctgtggtgcgcggggcgattacttccggtgaactggatatctatccggaatataccggcaatggcgctttcttctttaaagatgaaaacgatgcagcgtggaaaaacgcgcagcaaggttacgagaaagtcaaaaagctcgattcggagcacaacaagttaatctggctgacgcccgcgcctgcaaataacacctggactatcgccgtgcgtcaggatgtggcagagaaaaataaactcacttcgcttgccgacctgagtcgttatctgcaagagggcggcaccttcaaactggcagcctcggcagagttttacccgcagagcgcgcggcctgcaaaatggaacagcgtgcgaacagcagttcagttccttccggggagcgttctgtacgcaggttgcgcacatagtcttctgcaccgagggcgataccgatcaaacgctcggaagcaacatcctgagcggtatcggttttcggcagacgcacaacgtccgcaccaccgcgaacgacggcttccagtaaatgattactcttgtattcataatggaccattaagcatggagcgaaaaatggcgactcactttgcccgagggattttaacggaaggacatctgatttctgttcgtctcccctcccagtgtcatcaagaagcccgaaacattccccctcatcgtcaaagccgttttctggcgtccagaggtttactcgcagaactgatgttcatgctgtatggcattggcgaattgccggaaatcgtcaccctgccgaaaggtaaaccggttttcagtgataaaaatttgccttcgttttccatttcctatgccgggaatatggttggcgtggcgttaacaaccgaaggtgaatgtggcctcgatatggaactacagcgtgcgacgcgcgggtttcatagcccacacgcgcccgataaccacaccttttccagcaatgaatcgctatggatcagtaaacaaaacgatcctaacgaagcgcgggcgcagctcatcacgctgcgccgaagcgtgctaaaactaaccggtgatgttttgaatgacgatccgcgcgatctgcagctgctgcccattgccggacgcctgaaatgtgctcatgtaaatcgggtaccgagatcgagtgtatcatgtcaacttctagagtccaggataaagatatggggattttgcccccaaatatag

SEQ ID NO: 24478 - DNA, 1758 bp, Homo sapiens
  SIMILAR (1142)..(1282): 251254mologous to Escherichia coli K12 putative dehydrogenase,accession number AE000415,Smith-Waterman Score=47.
atggctcattcatcatcactcggtattatcgacctggtctatcccgcacactggcagccatacattgctcaggatctcggtcaacaaaccgatatcgatatctatctcgaccgccatgtagtgcgtcagggacgatatctttcgctgcatgatgaagtaaaaaactttccgttacagcactggctgcgcagtacgattatcgctgcgggctcgctgctggtgctgtttatgctgttattctggatcccgctggatatgccgctgaaattcactctctcatggatgaaaggcgcgcagaccattgaagccaccagcgtaaaacaactggctgacgctggcgtgcgggtaggcgatacattgcgtattagcggtacgggaatgtgtaatattcgaacttccggaacctggagcgcgaaaaccaattcaccttttttaccgtttgactgctcgcagatcatctggaacgacgcccgctcattgccattaccagaatctgaactggtcaacaaagcgacggcattgactgaagcagttaatcgccagctgcaccctaaaccggaagatgaatctcgcgtcagtgcctcattacgaattactgatgcgtttgctggtcgggtactgtcgcgcaaactgattgaagagaaactgtatacctgggacgaagaggtcaccagtaatgccgttgaagtgcatgtgcatcatctgcgacgcaaactcggtagtgattttattcgtaccgtgcatggtattggttacacattaggatccaccctggcagtacagcgagtccgtagaactgaatgggaggtacagaatcgtatcccttctggaactatattaaaggccttgatggaaggtggtgaaaatgggccctggatgagatttatgagagcagaaataacagcagagggttttttacgagaatttgggagactttgctctgaaatgcgttttcggatcgtgctgtacatattgttacatgtccgccacggtatcgccttcgtcagacagttctacttctacgctaccgtcagggaagacgaacacgtcaaccgcttcggtatcaccgaacaggttgtgcatgttgccgaggatctcctgatatgcgccgaccataaagaaaccgagcatcggcggattctctggatcgtactccggcattggcattgtcgtggcaataccgtcaccatcaatatagtggtcgatagcaccgtcagagtcacaggtaatatccagcagcacagcgcgacgttccggcacttgatccagcccttccagcggcagaaccgggaacaactggtcgatcccccatgcgtccggcatcgactggaacagcgagaagttgacgtacattttgtccgccatacgttcctgcagctcgtcgataatcggacgatgagcacggttttgcggatccagctgcttttgcacttcatggcacatgctcatataaagctgctcagcccatgcacgttcttgcaggctaaaaaattccgggagatttgcccggaagatggaggggaagcctccttctcaagtgtcattggcacccccttctatgtgatggagtactgcccaggtctcatctacaaagacccttccctgccaggcttggagcccagccacagacgagccatatacactgccatgaacacagtcctgtgcaaaattcacagtgtggatctgcaggctgtgggacttgaagactatgggaagcaagcgaaggaacttgatcataatggatttgtctttttctga

SEQ ID NO: 24479 - DNA, 4023 bp, Homo sapiens
  SIMILAR (1038)..(130): 991254mologous to Escherichia coli flagellin,accession number M14358,Smith-Waterman Score=1490.
tcagcagacgtcttctgaacgtgaactggagatgtctaccgagattgcacgtctcaaacgccagctggcagaacgggatgaagagctggctatcctccaaaaggccgcgacatacttcgcgaagcgccttgtatctttaagcgcatatgtatcggtatcattacccttggaatcctgcagttttactaagctaacagcaccaaggttggcagttgcggaacctgcagtattatcaatctgaacaggtgtaccgcctgaagtgatagttgtagctttagtagtatttgcatcagttacagttgcatttgccgttgctccagtcgccattgtcactgtaccatcattagcaactgttactgcgtaatacttcccatcgttatcaccaccggtgattttcgcatagtaatcattaccattatcagtataaacaccctcaattgaagctgggttagttccgccagtatcagtggctgcttccgtagaaagggtaattccagtaagtttaatattgtttgtggtggtagcaccaaaagcagttactggagcactagtggtaactgtatcgttagttttaacgctaaaaccatcaaggccaagagttttagcatcaatctgcttcagatcgatagtgatagtctggttatcatttgcgccaacctggattttcatggagccattttttgccagcacgttcacgccgttgaactgggtctgaccagatacgcggtcaatttcatccagacgggatttaatttcgtcctggatagcagacagatcagactcagagttagtaccggtagtggcctgtaccgtcagttcacgcacacgctgtaagttgttgttgatttcggacagcgcgccttcggtggtctgcgcaacggagataccgtcgttggcgttacgggccgcctgagtcaggcctttaatgttagaggtgaaacggttagcaatcgactgacccgctgcgtcatccttcgcgctgttaatacgcaagccagaagacagacgctcgatagaactcgacagcgcagactggttcggatctttttctgttttatccatcggaagccaggactgtgttaactcacagaaacgatcgatattagcttcactcttagcactcatttttaaggtcagcgacttttgcttctggctatagttcgcctccattaactgcagttcagggtgttccagcagaagtgtttgtaaatgatagagcaacggcacagcttcaggatattgctgagcgagttgctgcttaaagtaaaaacgaaaattgtgggtgcgtttgatctgcgggaaataacgttgccaggtttcttgctgttgttgctgaagttgatcttcaatcttaagcgtatgccagagcgcgatgctccggctgccaacaaaagaaagaatggcgagaacgagacagcttactgccaggcgggcgagccattttcccgatttgcttacagttttctgtttacgaaaaataccatgcagcatgtcatagcgctggaatgcaatatcggcagaatacaaactcagtgatggtatttcaggatgctggataagtggattggccgctgcaacgccgtgaggtactacaccataacaaagcatattctcaggcggaaactgggcagcaagatgctgtaaccagtgttcatccagttcgttgaaggcatgtgcggcactgcgaatgagccagcttgtttgctggttaaccagagtccagctatctacttcccagggaagatagcagccatctggcaaaacccgcgtcacgttgagtccggcagtatgtaaacgctcaagatagcgactgagtttctccgactgaatgcctatcacctcgacaccactatatgccgtttgaagaggccgcccggggatatgagattttcgaaaaacgtgaagaggagtgccgtaaggtgattctggtacccggtgcacaaagcgcagaggcggcgcagaaggcggtttcaggtctggtgaatgcgatgccggggggaacaatatgatcgtcaggagtggttttcgaggtaaaggacagccatgacgataatcgccgccataatcagacatcctatcaggatgtaaaatgcttctgccatggttattcccacaaacgaaacggaataattttgcagcaaaagtgaacagtgagaaccaggaaaaattgctgattttgcgtaaagaggatgcgagtgcatcctctgggtgaggttgtggcaagaatgagtttgcagaaagcggagcgttgatggcgtcagctttgatcgagatctgaatttcagtcaaatacgcagggttaccctggcacgttagcttaactgctttcacgttctcttttccccagcttttggcaaaggcggcgtcaaagtcacggcggctcactgttttaccgtaattatccgcaaggaattttccgcgttcgctctctttaatttcttgattcaggcgtaccatcgtaccgaagtatgcgtccggatcaaaaccaaagcaggcaccgtgtttggcatattcgtagcgttccaggcaggaacgtccgccagctcctggcatgacttcacttagtttagcggccgtttccagtgataatccggtttccggcgatgaacacattcggctggcgcgcgcttctggtagattcgggattgggcgagtagcgcaaccgaagcgcatccagcggcgttcatcaacaccacgggcagcaaatgatgccgtcattctgggcaataaagttgtggcgctgtcgtgatcgaagttgatgaccccgttatcctggttccagaagaaggcattctgatcgccggcattattagcgctgactaccagtgacttcgcagaaacatcaatcgttccgtcattgataaaacgaccatttccgccccacatattaacggctccgttgtgggaagaattactgatgttcatgtgaccggtattataaagcgtaccggactggttgatgtgcacagcattcttgtcgttatcaagaataaactcgccgcggttattgaaagctgaattattattaacttccagcatcccggtgttgttaccctcactactacttccgaggttccaggttccttcgttatttgccactgcagtacctgtcagcgcagcacctctcataatcgccccgtcagtttgattattaaagaccccgccagccgacatcatccgccctgttacactgccactattattgaatacccccgcgttctgcacgattttattgatggttccggtgttgttcactaacgaactatcagcaccagcattcatggtaatttgcgcagtcatttctccggcattattgaggattccaccgctaacatcgacgttattcgtcatcaccccggcatttttaatgacggcacccttgtcaagttttactaagttattgatgatgccaccgctggtattttccagaagaccgcttgataccgtaatttgatcaccggaaagcgttccgctattaacaacattcccagccagcttatcagtcacagcagcagatttatttagcgttacagtttctccgcttcgtgtaatcgtatcgccaccggtatagatcagtgaggtgaaatcatctgtattattgtactcattccccgattggcacacgccgaaagtgcagattgtaccatagttaacaattgttctgtgcatcgttataaacgctgaccagtccacattgatattgatacaccgtctgttctccaactcgctggcaccggccattgttgccgcgtccatcaaagtactggagatgtcgaaagcgggcagcgaatgcgtgaccgtctgtgggcgaacgcgcgtcagttccgtgagcaaatgtcggcggcgggctttaccctggcgtgagccgatcacgccattattccggtcatgcttggtgatgcggtagtggcgcagaaatttgcccgtgagctgcaaaaagagggcatttacgttaccggtttcttctatccggtcgttccgaaaggtcaggcgcgtattcgtacccagatgtctgcggcgcat

SEQ ID NO: 24480 - DNA, 3959 bp, Homo sapiens
  SIMILAR (2805)..(2945): 711254mologous to Escherichia coli K12 putative dehydrogenase,accession number AE000415,Smith-Waterman Score=154.
atgaagcggtaccgccctcgagagattctcccgtggaaagtacccccaggaaattatacccctaaaatattcaaaattaaaggaaccggacataaccccatgagtgcaatagaaaatttcgacgcccatacgcccatgatgcagcagtatctcaggctgaaagcccagcatcccgagatcctgctgttttaccggatgggtgatttttatgaactgttttatgacgacgcaaaacgcgcgtcgcaactgctggatatttcactgaccaaacgcggtgcttcggcgggagagccgatcccgatggcggggattccctaccatgcggtggaaaactatctcgccaaactggtgaatcagggagagtccgttgccatctgcgaacaaattggcgatccggcgaccagcaaaggatgctgtagatctggaaatcgcaacggaggaagaaagatcgttgctgtaagcctgaaaaaagtatcgggtgctgctaaaccgtgtggacacttccgtagcaccagatatcgagtggcttattcaaccataataaacaataaagcaggaatatggagcgcatttgagggtgtatctgcaactcggccaaaccccactccgagggcaagtccggcagttcgcactctctcgcggggtacgcccgagcctcgaaaaatctcgacggacgcagacaatctcgctcagggttctttaaaagaacgtttgcccgcctggctgtggggcaagaaagagaacagtaagtgggaagtgctggacagcaattcggcctccgatggtgatgtctggatggcctggtcgttgctggaggcggggcgtttgtggaaagagcagcgttataccgacatcggcagcgcgttgctaaaacgtatcgcgcgggaggaagtggtgacggtgcctgggctgggttccatgttgttaccgggcaaagtgggttttgctgaggataacagctggcgttttaaccccagctacctgccgccgacgctggcgcagtatttcacccgctttggcgcgccgtggaccacgctgcgcgaaaccaatcaacgtttattgctggaaaccgccccgaaaggtttttcgccagactgggtgcgctatgagaaagacaaaggctggcagctaaaagccgaaaaaacattgatcagcagctacgacgctatccgcgtttacatgtgggtaggcatgatgcctgacagcgatccgcaaaaagcgcggatgctcaaccggtttaaaccgatggcgacattcactgagaaaaacggttatccgccggaaaaagtggatgtggctacggggaaagcgcagggtaaaggaccagtcggtttttctgccgccatgctgccctttttacaaaaccgcgatgcgcaggccgttcagcgccagcgcgtggccgataactttcccggcagcgatgcctattacaactatgtgctgaccctgtttggacaaggctgggatcaacaccgtttccgcttctcgacaaaaggaatgcgcaaattcacactaaacatattcacgctttccctcggtctggccgtcatgccgatggtcgaggcagcaccaaccgctcagcaacagttgctggagcaagttcggttaggcgaagcgacccatcgtgaagatctggtgcaacagtcgttatatcggctggaacttattgatccgaataacccggacgtcgttgccgcccgtttccgttctttgttacgtcagggcaatattgatggcgcggccatacgagtgactgctgtatgcacgttccctctagaggatccccatgaagaatatgcgctgagtcgtccgcgcgggctgcgtgaagcgttgctgatcgtcgcctccttcctgatgttctttttctgcctgattaccccggatgtatttgttccgtggctggcaggcggcgcgttactgctgctgggcgcaggtctgtgggggctattcgcgcccccggcaaaatcctccctgcgggaaattcatcgtgtgaaacgaaactccccgacgttggggattgtttggcgaaaacgatcaggaacagatcaacaatatttcactcggtattatcgacctggtctatcccgcacactggcagccatacattgctcaggatctcggtcaacaaaccgatatcgatatctatctcgaccgccatgtagtgccactggctgcgcagtacgattatcgctgcgggctcgctgctggtgctgtttatgctgtattctggatcccgctggatatgccgctgaaattcactctctcatggatgaaaggcgcgcagaccattgaagccaccagcgtaaaacaactggctgacgctggcgtgcgggtaggcgatacattgcgtattagcggtacgggaatgtgtaatattcgaacttccggaacctggagcgcgaaaaccaattcaccttttttaccgtttgactgctcgcagatcatctggaacgacgcccgctcattgccattaccagaatctgaactgggtcaacaaagcggcgggcattgactgaagcagttaatcgccagctgcaccctaaaccggaagatgaatctcgcgtcagtgcctcattacgttcagcaattcaaaaatccggcatggtattgcttgatgattttggcgacattgtactgaagacagcggatttatgttctgccaaagatgactgtgtgcgactgaaaaatgcgctggtcaatctcggcaacagtaaagactgggacgcgctggtaaaacgcgccaacgccgggaagctcgatggcgtgaatgtgttattacgcccggtgagtgcggaaatcgctggaataacctgggggcaacctccaccgcgcccgtttatcaacgccatgaaacggcgcgagcggcactatcactaaacagtccggcccccggcgaattcctgattgtcagcgacgaaggcggtaccgaccctagctggcccagcaatcgaatccggtgaaattacggcgttatagccttcctctagcaccgcctgtgttcgaacgagttcatctgcgagtcgtttctcatcaggtagttgcatctgagattcgcttgccagaacggtgttaggcaaacctgccagagcataatgcgcttctccggctcctttctctgcacagagaaccagaccgatgggcggattttcatccggtagcgtccagtgctctttggcgtagttgagatacatattcatctgtccggcatcgctatagctgaatttgcccacttttagatcgacgattagcaggcagcgtaaacggcggtggaaaaacagcagatcgacacgaaaccagttgtcatcaatgcgtaaccttcgctgccgaccaacaaaggcaaaatcatccccaagttccagcatgaaatccatcaggtggttgatcagcgcctcctcaaaatcggattctgaatattcatctttcaattccagaaattcgagcacaaagggatcgcgtatcgcctgttgcggaagaatatgcgtctcggcaggagcgtgttgttgcagcatggctgatttgtcatgtgacagtagtgtccgctcataaaactgggtcgcaatttgccgctctagctggcgaacagaccagccacagcggagcgtctctttttcataaaagctgcgggcgtcagcgtttttaacggaaagtaaacggacgtaggtggaccctgggtgatggggggatttacaaatccaggataaatagctagtagtggcaacaatttcttctggtttcagtaatcctttctcaattaacggtaataattctcccagccatgcgtgaacgtgggtctgtcccattttaaacgacaaccctttatcaaaggcgtcgccaaagcaggcaccgtgtttggcatattcgtagcgttccaggcaggaacgtccgccagctcctggcatgacttcacttagtttagcggccgtttccagtgataatccggtttccggcgatgaacacat

SEQ ID NO: 24481 - DNA, 1425 bp, Homo sapiens
  SIMILAR (1340)..(393): 1001254mologous to Homo sapiens Cyclin-dependent kinase-like protein PISSLRE,accession number W04870,Smith-Waterman Score=1655.
ggagtcctgccaggcccacctggggtccccacagccaacccatgcacgggacagccccgggcgactgagaggggatacgaaggtcttctgggccctctcatcccaggccagcgtccaccacaactcaaagacagcggggggactgcacccaccactcctcccaagaagcagtggttgcacatttccaacatagcgaggaggaccacatgagacccctgcagccacggatggagccgccagacctgcccttccagggtgcacgggctgggagccccccggtgtcacccggcctttttctgggggcagcagtgggttcagggcagacagtgggaggaagtcagtggaggatgttcccagccaaggggatgagctggatcccgggcgcctggtcagcctggctcgcggcacccttcacagacaccactgatcggaagacgtaggggcttctccttgaaataggagctctccaggcagtccccggccgtcgcccttttcttagggtcgtacatgaacaggaagtgcagcaggcgcagcccggcctccgacagccatgggaacttgtgcttcaggttgttgtagggctgcttccggaggctgtactggccgaccagtggcagcttggaaaagcccggccagatgttctcactgggcgtgcccagcagctgcacgatcaagtcgatctggtggatctcggaagtgccggggagaagaggcctgtgcgccagcagctcggccagtatgcagcccacagcccacatgtcgatgctggtggtctgcgtggtggttcccaacagcagttcaggggctcggtaccagagagtgaccaccttgggggtcattggctttactgggacaccataggcccgggccaggccgaaatccgctgtcttcacacaacccttgtcggtcatgagcaagttggaaaccttcaggtccctgtggataatgaagttcctgtgcagatactggaggccccggagcacctgcagcacgatgcacttgacctgagcctccgagaagggtgttggcatattctccaggaggctggccaggtcctgctcacagtaacccatcaccaggaagatgctctccaggtggttccccacaaccacctccttcagctccacgatgttcggatgacgcaggcggagcagcagcgtgatctcccgcaagctgctgatggggatgccatccttctccttgtccatccgcaccttcttcagtgcgacaatctcatctgtctgggtgtcccgggcccgatacacaatgccgtaggtaccctctccaatgcggttcagcttctcaaactccttcacactccggcatcgtcccaggaatacacttcagacggatctgctcgcactccagatctggctccgccatgccgagcgctggccccgcctctcttgcgcgcaggcgcagact

SEQ ID NO: 24482 - DNA, 2853 bp, Homo sapiens
  SIMILAR (2081)..(2152): 331254mologous to Escherichia coli No definition line found,accession number U00039,Smith-Waterman Score=44.
  misc_feature (1)...(2853): n = a,t,c or g
atggggaagaaacccacacccttacccaagccccaccccgcaccttggtgggaccaggccgcccaacgagaatttgatttagaaaacggtcaccggtcccaggatgccaaatggacctttagcccccggcggagagcagataccaggaatcgctatgctgcaggaaagctgggagccgaagtggcatacagtcggccccgatggatgaacgtgtgcgttgatgctgaaaaagtgattggtatttccggacatctgctggcacctgaggtgtgtattgttgttggcgcttctggcgcagcagcgttaatggcgggcgtacgcaatagcaagtttgtggtggcgattaatcatgacgccagcgctgcggtatttccacaggcagatgttggcgtggttgatgactggaaagtggtgctggaggcactggttgaaatccggaaacaagctttagaaaagttttggacccattttggcttttatacgcccttttctaaaataggaatcattttgccaggcacgtatcaggcgattggtatcctgatgatgagtaaagttggcaccgcccgcccaccagataaaacgaatatccgggaaatgtcggttcataccgttgtgttgatatgcgccaccagggttttccagtgcttcaacaatgcgggcaacaggatgtatatccaccgcatcggcagccacccggcaagctgccttgcatggaagagagcaccgcagaacgccgcgtggggtaccaccattggcaaaatgcatgatggtattttggtggaaaatagccgccagctcgcggattttccgtgcgccaacaccacaaatctctgctgcccattcggcggtttgcgctattccgtaatggaccgagacacgaccactcgaggctctaccattgtgcgcaaaggggggggcaaagaaacttctcaactgaacaaactggatgacccagactgttctaccagggaggcgaacaaggacccacaaacaagcctcacccggggggtcccagggggcagacccaccggggaggcccccaccaaaaaagaaggttgcgagttgtcagtatctcatggtatatcagaaactaaaaattaccagatgcatatccaagggcctcaaggaaagtatgagttcgacattactctaacaaggcttttggtggaagaagagaaaaaagagaaacctacacgaaaaatccgaacccttttctgcggtccccgcaacggtcttcaaggaaattaccacccgggaaacccatcatgggaccgctctgttttgcacatgggaaatccggggggaattccggttcttacccccgttaaccaactttggaaaaccgtggccaatcaatttcaggccgaagatcgtcgacgttttgtcgtcaaaattttatcgcctggaaacgttgacaagccgatcaaatcctcgaagacatcgaatttgcgttgccagctggtaaatgatgaagttccggtcgcagcacctgtggcctttacgggtcagactttatggaatcatcagggattttatttcgctgtttgtccaagcgtcggtggtcgccagttcgaagctgataatatcgatcagatggaagcggttgggcgttatttagggcgtatgcaccagacggggcgcaaacagctttttatccatcgcccgaccatcggtttgaacgaatatctcattgagccacgcaagctgtttgaggacgctacactgataccttccgggttgaaagcggcattcctgaaagcgacagatgagctgattgccgccgttacagcacactggcgagaagatttcaccgttctgcggctacatggagactgccacgccgggaatattctctggcgcgataaaccaatgtttgtttttctggatgatgcaccccatggtccagccgttcaggatttgtggatgttgctcaatggcgataaagccgagcagcggatgcaactggaaactattattgaagcttatgaagaatttagcgagttcgacaccgctgaaatcggactgattgaacctttacgcgccatgcgtttggtttattatcttgcctggctaatgcggcgttggcgtattcgcagctggccgttcgtcgtactggcgggtattaggttttgggcacggattcgtttgctggatatccagcagaagaaagtggagaggcggaccggcgtttatttgccgagttatggcggtgtcgtagcgaactcttatctgccatcaaacgggctttctgcgttggggctgtatgcctgggcgcgggtcgatgaatcttccgataataattcattgcttaatccggcgaagaaattcacttatcaggcaccgcaaaacgttgaggacacttatgtcgtgtttatcatcggtgaaaccacgcgttgggaccatatgggtattttcggctatgagcgtaataccacgccgaaactggcccaggagaaaaatctggcggcgttccgtggttactcctgtgataccgcaaccaaactcgtactgcgttgcatgtttgtacgtcaggggggcgcggaagataatccgcagcgcacattaaaagaacagancattaaaaaggttctgaagctgtttggattcagccccgccctctacgctatgcagagcgaaatgtggttctacagcaacacgatggcggacaacattgcttatcgtgagcagattggtgcggagccacgtaatcgtggcaagccggtagatgatatgttgctggtagacgaaatgcagcaatcgctagggcgcaacccggatggtaagcatctgatcattctgcataataagctgtgcctcccagagtacgataaaggtatgcggagattacgctag

SEQ ID NO: 24483 - DNA, 1725 bp, Homo sapiens
  SIMILAR (924)..(1019): 1001254mologous to Escherichia coli Outer membrane usher protein PmfC precursor,accession number D90710,Smith-Waterman Score =162.
atgaaagtggacctccagtgtttgtccggagtcccgcgtgtaaaaggtgcccggggcgcaagaggagaacgcggcaaacccccgggagaaccccgtacacagtccttgaccgccagcgagcgaaagcaggacactttaaccccggaaggcctgggaaaggtctcaacgcttgcgaaaaacctgggatgcttcagtggcaccttgcggggtaaagtacaaggccactggatggaattcaaaagggaccacacctggactcgcgacatcgatgtcataaaggacattggtttaaactttcctgacgtgcactttgtgcaagaaggaaaatgcatttggaaattccctgcgttgcctatatcctgtgacggtttggatgagataggtatgatatgttccttgactatttgggttggctatgacatgcaaaacagtagccacagcaccatacaccgcatgtcgtggaacgatacgctggatgaacgtaatagctggggcatgtctgccggactgcaatccgatcgtccggacaatggagcccaggtgagcggtaactatcagcacctgagttcagcgggtgagtgggatatttctggtacctatgccgccagtgattacagttccgtcagcagcagctggagcggttctttcaccgcaacccaatatggtgcagcatttcatcgccgcagctccaccaatgaaccacgcctgatggtcagcaccgatggcgtggcagatattccggttcagggcaatctcgactacaccaaccattttggcattgcggtggtgccgttgatttccagttaccagccttccaccgtggcggtgaacatgaatgacttacccgacggcgaaacagttgcagttttcgtcatcaaggaaacatggattgaaggcgcgataggttacaaatcactggcttccgatccggtaaagacgttaacgtcatcatacgcaacgccagcggtcagttccctcccctcggtgcggatatccgccaggatgacagcggcattagccgtattcgcagctggcggtcgtcgtactgccgggtttatggtttgggcaccgatccgtttctgggatatccagcagaagaaagtggagaggcgaccggcgttgattggccgagttatgccggtgttcgtagcgaactcttatctggccatcaaactgggctttctgcgttggggctgtatgccctgggcgcgagtcgatgaatcttccgataataattcattgcttaatccggcgaagaaattcacttatcaggcaccgcaaaacgttgatgacacttatgtcgtgtttatcatcggtgaaaccacgcgttgggaccatatgggtattttcggctatgagcgtaataccacgccgaaactggcccaggagaaaaatctggcggcgttccgtggttactcctgtgataccgcaaccaaactcatactgcgttgcatgtttgtacgtcaggggggcgcggaagataatccgcagcgcacattaaaagaacagaacattttcgcggttctgaagcagttaggattcagttctgacctctacgctatgcagagttttttgtggttctacagcaacacgatggcggacaacattgcttatcgtgagcagattggtgcggagccacgtaatcgtggcaagccggtagatgatatgttgctggtagacgaaatgcagcaatcgctagggcgcaacccggatggatttaaatga

SEQ ID NO: 24484 - DNA, 963 bp, Homo sapiens
  SIMILAR (184)..(363): 1001254mologous to Escherichia coli PepP (proline amino peptidaseII),accession number D90281,Smith-Waterman Score=302.
tcaaagatcagatggttgtaggtgtgtagtattatttctgagggctatggcgatgcccacgcccaccagtaccggtggacaggcgtttacggcgagggtggagatattttcgaagacgaatttcaccacgccttcgtagccttcttcttttcgtactagcgtgtcagggtcttcgccatcagatatgctgatgtaatcgtgaacagtgcgctggaaaaactgcgtaaaggttcgcggcaaaatctcaccgcaccggcaacgatgatcgactggcgtcctgttgttcatgaaatgcgcctgttcaaatcgccagaagagattgccgtactccgccgcgcgggagaaatcaccgccatggcacacaatggcataagccagctgatgcgagcgtgacggcgcgagcaggtgcgaaagcaggtcatagtgatccggtggttctgaatggaagggccatcgctcaacggataaaaggtactccggggataacaggctgataccgcccaagagttcatatcgacggcggtgtttggcacctcgatgtcggctcatcacatcctggggctgaagtaggtcccaagggtatggctgttcgccatttaaagtggtacgcgagctgggtttagaacgtcgtgagacagttcggtccctatctgccgtgggcgctggagaactgaggggggctgctcctgaccccatgccgaactcagaagtgaaacgccgtagcgccgatggtagtgtggggtctccccatgcgagagtagggaactgtggcagtatggccattttcacgatatgattcttcctatccatgaggatgaaatgtttttcctttagtttgtgtcctcttatttcattgagcagtggtttgtagttctccttgaagaagtccttcacgtcccttgttagctgtattcctaggtattttattctctttgtagcaattgtgaatgggagttcattcat

SEQ ID NO: 24485 - DNA, 1870 bp, Homo sapiens
  SIMILAR (1)..(747): 881254mologous to Homo sapiens cell matrix adhesion regulator variant,accession number AF034795,Smith-Waterman Score=1155.
atgaggctgcgctgcacgcggcgcgggagggacacacttccgtgcacactctcaacttcgagtacgccgtggagcgcgtcctcgcaggtccccayggctttcagctttgggaaagcagtgggttcctgccagaggagtgggggcagctgctgtgccagacactgcaaaacacacctggcttctctccgacagccctgcggggtcgagaggactggcgctgcctgtgtcttactgaaaatttattttcgtgtaacccatttaccttttatgtggaaatcgaaaagccttttgataatagtagcaaagcaggaaggactgagtgggaacccacaagcccagttgaaagaaaatacatgacgtacttgagtgctcaggacccacgagctgattcaagttgtacagaatggacacttacagatgtgtggaaaatctgagacaggaaatgaagcctcaccaggactgccaaaaagagcaagatcctgtccaaggaagaacagaaagtggttgcgtttcatgagtcgggccacgccttggmgggctggatgctggagcacacgaggccgtgatgaaggtctccataaccccctcggacaaaacgccgccctgggctttggtcagattgctccccaaagaccagcacctcttcacccaaggagcagctttgagcggaggttcattgccctgggaggacgggcctcgggaacacttttccctcaacgaggtcacttcctggggcacaggacgacctgaggaaggtcacccccatcgcctactccatggtgaagcaggttgggatggcacctggcatcgggcccatctccttccctgaggcgcaggagggcctcatgggcatcgggcggcgccccttcaaccaaggcctgcagcagatgatggaccatgaagcaagactgctggtggcccaaggcctacagacacaccgagaaggtgctgcaggacaacctggacaagttgcaggcgctggcaaacgcccttctggaaaaggaagtgataaactatgaggacattgaggctctcattggcccgccgccccatgggccgaagaaaatgatcgcaccgcagaggtggatcgacgcccaggaggagaaacaggacttgggcgaggaggagaccgaagagacccagcagcctccacttggaggcgaagagccgacttggcccaagtagttgggaggtgttggctgcacgtgcgggtggtccgggaagtgagggctcactcagccaccctgagttgcttttcagctgaggtttgcacttcctctcgcggccctcagtagtccctgcacagtgacttctgagatctgttgattgatgacccttttcatgattttaagtttctctgcagaaactactgacggagtcctgtgtttgtgagtcgtttcccctatggggaaggttatcagtgcttcccgagtgagcatggaacacttcgagttcccagggttatagacagtcgttcccagtgtggctgaggccacccagaggcagcagagcattcagactccaaacagacccctgttcatgccgacgcttgcacgaccgccccagttcctgtggctccctcggaatgctaaggggatcggacatgaaaggaccctgtgagccgattgtcctatctccagcggccctgtcatccagctcactcatcaatggggccacacagtcaggcccaggcactgggctccggaggactcaccactgccccctgctgccatgtggactggtgcaagttgaggacttcttgctggtctagtcacgcatgcagtgttggggatgccttggtttttactgctctgagaattgttgagatactttactaataaactgtgtagttggaaaatctaaaaaaaaa

SEQ ID NO: 24486 - DNA, 2496 bp, Homo sapiens
  SIMILAR (1018)..(1575): 901254mologous to Escherichia coli glutathione reductase (EC 1.6.4.2),accession number M13141,Smith-Waterman Score=858.
atggcagtcactctcggatcgcaactggcgctcaccactttggggcatcacttcgtttaccgactgcgtagtgaatttatcaagcggattctggatactcacgtcgagcgcattgaacaactcggtagcgcctcgttgctggcggggttaaccagcgatgtgcgcaatatcaccattgcttttgtgcgtctgccggaactggtgcaggggatcattctcactatcggttcagcggcgtatctgtggatgctgtcgggcaaaatgttgctggtaacggctatctggatggcgatcaccatctggggcggttttgtgctggtggcgcgggtgtacaaacatatggcgaccctgcgtgaaaccgaagacaagctgtacacggattttcaaactgtacttgaagggcgcaaagagctgactctgaaccgggaacgcgccgagtatgtgttaacaacctctacattcctggctcgctaccggggatctctagagtcaatccgcatggtttacgcgccgacccaggagcacggcaagcaggttaaaatcgaagaccgtgacatcttctcgctgaccaacgaagaagtgcaggaactggcaaaacaggccgtacaaattgagaaacactacggtcgcccgatggatatagagtgggcgaaagatggccacaccggtaaactgatcattgtgcaggcacgtcctgaaaccgtgcgctcaatcggtcaggtcatggagcgttatacgctgcattcaaaggattatcgccgaacgcgtgctatcggtcatcgcatcggtgcgggtacggtgaaagtcatccatgacatcagcgaaatgaaccgcatcgaacctgacgacgtgctggttactgacatgaccgacccggactgggaaccggtcatgaagaaagcatctgccatcgttaccaaccgtggcggtcgtacctgtaacgcggcgatcatcgctcgtgaactgggcattccggcggtagtgggctgtggagatgcaacagaacggatggaagacggtgagaccggcggtatcgcctccatcaaccgcgcggctatgtacggccagaaatgtgcgctgattgaagccaaagagctgggcggcacctgcgtaaatgttggctgtgtgccgaaaaaagtgatgtggcacgcggcgcaaatccgtgaagcgatccatatgtacggcccggattatggttttgataccactatcaataaattcaactgggaaacgttgatcgccagccgtaccgcctatatcgaccgtattcatacttcctatgaaaacgtgctcggtaaaaataacgttgatgtaatcaaaggctttgcccgcttcgttgatgccaaaacgctggaggtaaacggcgaaaccatcacggccgatcatattctgatcgcacaggggtcgtccgagccaccggatatttcgggcgttgaatacggtattgattctgatggcttctttggccttcctgctttgccagagcgcgtggcggttgttggcgcgggttacatcgccgttgaactcgcgggggttaataacgggcccgccgacagcagcgttctgtttaaccgcgttcgcgacctgacggcggagatctggtttggccgtcgcttaggccaggatgccgcgccagagaaactgggcgttgaccgcgcactggcattcagcgaaatcaatcagcaactttatcaactacttaacggcctggatgtggtttaccatgcccagggcgaatatgcatatgctgatgtaatcgtgaacagtgcgctggaaaaactgcgtaaagattgccgtactccgccgcgcggagaaatcaccgccatggcacatacacgggcgatggaaaaatgccgtccgggaatgttcgagtaccatctggaaggcgaaattcaccacgaatttaaccgccacggtgcgcgctatccgtcctataacaccattgtcggcagcggtgaaaacggctgcattctgcactacaccgaaaacgagtgtgaaatgcgcgacggcgacctggtgttgattggaattccagctcggtaccggggatctctagagtcaaccaatatcacgcagcagttttttcgccggattggtaccggaaaacagatcgcggaatccctgcataccagccagcatcaacgccgcactgtgcttgcggctaccgtcatagcgacgcagataaatgtactgcccgatgtctttcccctgacgatgcaaccgtttcagttcggcaatcagctctgcagcatccataaagccgagatttaccccctgccccgccagcgggtgaatggccagaatgccttcgccatggaaaacctgccgcgccaccgcatcatgcgtgtcttccgtgcgaatggtcgctaccagcgcgtgatgctgataaatccagaaagtcagcggaatatcggctttgttgcgaaccaggaatttagcgcgtcgcgcaataaccagacgcggcgttcgcccgcgcgcctgcatttcggcacttag

SEQ ID NO: 24487 - DNA, 1566 bp, Homo sapiens
  SIMILAR (721)..(1389): 951254mologous to Escherichia coli Nucleoside permease NupG (Nucleoside-transport system protein NupG),accession number D90848,Smith-Waterman Score=1122.
atggcggcctgccggccctgggcaatgatgggcttatcacccgggccatcggctgttgaaggtgtactgggtcccccagcattgccatcccgccggcgctgcgctcgatttctcaacgggccttatcttgctttccgcggggcatggctcgggaaacttctgaagtcatattcttgtgtggatgtacagaaatggcatcggagtcgcaaaagactatgcgctggtattttctggtacaaacttgctgcattacaaggccatagtgacgcgcaaaacaatctggccgatctttatgaagacggaaaaggcgttgctcaaaacaagacactcgccgcattctggtatttgaaaagcgcacagcagggtaatcggcacgcccagtttcaaattgcatgggattataacgctggcgaaggggtggaccaggactataagcaagcgatgtactggtatctgaaggctgccgctcaggggagcgtcggcgcttacgtcaacatcggttatatgtataaacacggacaaggcgttgagaaagattatcaggctgcctttgaatggtttacgaaagccgctgaatgcaatgacgccactgcctggtataacctggccattatgtatcactacggagaaggaagacctgtcgatctccgacaggctctcgacctgtatcgtaaagttcagtcatccggaaccagagatgtcagtcaggaaattcgtgccgccggcaattctgctctgctcggtgtgtttgcgtttttcctgcccgacacgccaccaaaaagcaccggcaaaatggatattaaagtcatgctcggcctggatgcgctgatcctgctgcgcgataaaaacttcctcgtctttttcttctgttcattcctgtttgcgatgccactagcgttctattacatctttgccaacggttatctgaccgaagttggcatgaaaaacgccagcggctggatgacgctcggccagttctctgaaatcttctttatgctggcattgccgtttttcactaaacgctttggtatcaaaaaggtattattgcttggtctggtcaccgctgcgatccgctatggcttctttatttacggtagtgcggatgaatatttcacctacgcgttactgttcctcggtattttgcttcacggcgtaagttacgatttttactacgttaccgcttacatctatgtcgataaaaaagcccccgtgcatatgcctacccctgcgcaggggctgattacgctctgctgccagggcttcggcagtttgctcggctatcgtcttggcggtgtgatgatggaaaagatgttcgcttatcaggaaccggtaaacggactgactttcaactggtccgggatgtggactttacggcggatcctgcaggcatgtgggatacacggctttatcgccccgagcatcaacattgaagagctgaacgagcaggctgcgggtctgaacatcgtgaccgaaacgaccgatcgcgaactgaccaccgttatgtctaacagcttcggcttcggcggcaccaacgccacgctggtaatgcgcaacgtgaaagattaa

SEQ ID NO: 24488 - DNA, 1863 bp, Homo sapiens
  SIMILAR (1743)..(664): 1001254mologous to Homo sapiens PISSLRE,accession number X78342,Smith-Waterman Score=1902.
ctgttaaaaaagcttttatccaacaagagcctatagcttcgctcagcatcagagccacggcctcctgttgggtcctccgtgtggggagcagggatccagctcagcctccagcccagggctctcctggtagctcggggtatcctcaattgtggctcccaccccataccttgtccctcttgtcctcatctggagtcctgccaggcccacctggggtccccacagccaacccatgcacgggacagccccgggcgactgagaggggatacgaaggtcttctgggccctctcatcccaggccagcggtccaccacaactcaaagacagcggggggactgcacccaccactcctcccaagaagcagtggttgcacatttccaacatagcgaggaggaccacatgagacccctgcagccacggatggagccgccagacctgcccttccagggtgcacgggctgggagcccccggtgtcacccggcctttttctgggggcagcagtgggttcagggcagacagtgggaggaagtcagtggaggatgttcccagccaaggggatgagctggatcccgggcgcctggtcagcctggctcgcggcacccttcacagacaccactgatcggaagacctggtgtgggaatacaggcgtgtgccaggcccaccgtcagggtttacagcgcttgctctggccctcggaggtggctggggcggcccgcttgttgcggtggtggggaaaggtcggcatgagctccggctcacagggtaggggcttctccttgaaataggagctctccaggcagtccccggccgtcgcccttttcttagggtcgtacatgaacaggaagtgcagcaggcgcagcccggcctccgacagccatgggaacttgtgcttcaggttgttgtagggctgcttccggaggctgtactggccgaccagtggcagcttggaaaagcccggccagatgttctcactgggcgtgcccagcagctgcacgatcaagtcgatctggtggatctcggaagtgccggggagaagaggcctgtgcgccagcagctcggccagtatgcagcccacagcccacatgtcgatgctggtggtctgcgtggtggttcccaacagcagttcaggggctcggtaccagagagtgaccaccttgggggtcattggctttactgggacaccataggcccgggccaggccgaaatccgctgtcttcacacaacccttgtcggtcatgagcaagttggaaaccttcaggtccctgtggataatgaagttcctgtgcagatactggaggccccggagcacctgcagcacgatgcacttgacctgagcctccgagaagggtgttggcatattctccaggaggctggccaggtcctgctcacagtaacccatcaccaggaagatgctctccaggtggttccccacaaccacctccttcagctccacgatgttcggatgacgcaggcggagcagcagcgtgatctcccgcaagctgctgatggggatgccatccttctccttgtccatccgcaccttcttcagtgcgacaatctcatctgtctgggtgtcccgggcccgatacacaatgccgtaggtaccctctccaatgcggttcagcttctcaaactccttcacactccggcatcgtcccagcctgtgttccggaggcaccgtgaagaagccctccttacgaatacacttcagacggatctgctcgcactccagatctggctccgccatgccgagcgctggatcctctgcttgtgctcttctcgacacgcttatttctgggtgtccaaatccttgtcacacttcctgaactcaaagaaatgccaggccaggctgggggcggtggctcac

SEQ ID NO: 24489 - DNA, 2474 bp, Homo sapiens; identical to SEQ ID NO: 6237
  SIMILAR (41)..(994): 1001254mologous to Homo sapiens PRSM1,accession number U58048,Smith-Waterman Score=1791.

SEQ ID NO: 24490 - DNA, 2794 bp, Homo sapiens
  SIMILAR (1751)..(2197): 861254mologous to Escherichia coli PepP (proline amino peptidaseII),accession number D90281,Smith-Waterman Score=645.
atgacgtacttgagtgctcaggaccacgagctgattcaagttgtacagaatggacacttacagatgtgtggaaaatctgagacaggaaatgaagcctcaccagtcaagtgcatcgtgctgcaggtgctccggggcctccagtatctgcacaggaacttcattatccacagccaggagcagaccatcccagaccccagcatctctgaccagcaggagacaccactgctggcgggagacatggctcagagagggcgtcgtggtggtttttactacgttaccgcttacatctatgtcgataaaaaagcccccgtgcatatgcgtaccgctgcgcaggggctgatcacgctctgctgccagggcttcggcagtttgctcggctatcgtcttggcggtgtgatgatggaaaagatgttcgcttatcaggaaccggtaaacggactgactttcaactggtccgggatgtggactttcggcgcggtgatgattgccattatcgccgtgctgttcatgatttttttccgcgaatccgacaacgaaattacggctatcaaggtgatggaggactccatgagctcggccaccaccctgaccacgccgcaggagcaggtggacagcctcatcatgcagatcgccgaggagaatggcctggaggtgctggaccagctcagccagctgcccgagggcgcctctgccgtgggcgagagctctgtgcgcagccaggaggaccagctgtcacggagctttatctgcctgatggcgatgatgtcagcgttttcgatcgggcgtgatgcattggcaggttgggtcaatcacttcctgcttggtcttggcgttacgcaaccgaagctggataaagtgaccggcgaaaccggtgaagctatcgacgatctgcgtaacattgcgcaactgggttacgacgaagacgaagatcaggaagagcttgaaatgtcgcttgaagagatcatcgaatacaagtacaaaaaccgactctacactaaaaacaaaaaacgtaaggagagtgttatgagtgagatatcccggcaagagtttcagcgtcgccgtcaggccctggtggagcaaatgcaacccggcagcgccgagctgatttttgctgcaccagaagtaacacgtagcgccgacagcgaatacccctatcgtcagaacagtgacttctggtacttcaccggctttaacgaaccggaagcggtgctggtgctgattaaaagcgatgacactcataaccacagcgttctgtttaaccgcgttcgcgacctgacggcggagatctggtttggccgtcgcttaggccaggatgccgcgccagagaaactgggcgttgaccgcgcactggcattcagcgaaatcaatcagcaactttatcaactacttaacggcctggatgtggtttaccatgcccagggcgaatatgcatatgctgatgtaatcgtgaacagtgcgctggaaaaactgcgtaaaggttcgcggcaaaatctcaccgcaccggcaacgatgatcgactggcgtcctgttgttcatgaaatgcgcctgttcaaatcgccagaagagattgccgtactccgccgcgcgggagaaatcaccgccatggcacatacacgggcgatggaaaaatgccgtccgggaatgttcgagtaccatctggaaggcgaaattcaccacgaatttaaccgccacggtgcgcgctatccgtcctataacaccattgtcggcagcggtgaaaacggctgcattctgcactacaccgaaaacgagtgtgaaatgcgcgtacggcgacctggtgttgattgacgcgggttgtgaatacaaaggttacgctggcgatattacccgcaccttcccggtcaacggcaaattcacccaggcccagcgtgaaatctacgacattgtgctggagtctctcgaaaccagcctgcgcctgtatcgtccgggaacttccattctggaagtcactggtgaagtggtgcgcatcatggttagcggcctggtaaaactcggcatcctgaaaggtgatgttgatgaactgatcgctcagaacgcccatcgtcctttctttatgcatggccttagccactggttaggactggatgtccatgacgtgggtgtttatggtcaggatcgctcgcgcaatctggaaccgggcatgaatgatcagatgcttaccatccgggttgcgccctatcgattgctgcatttcgtctaccagcaacatatcatctaccggcttgccacgattacgtggctccgcaccaatctgctcacgataagcaatgttgtccgccatcgtgttgctgtagaaccacatttcgctctgcatagcgtagagcctgccggaggtaatgttggcgatggtgttgatggtgatgattgtcactgcgttatcgggtttccagcgaacattaatgaacagtcttgccagcagaaaccagtaccaacagctctggcggcatggctggcagcaaacgcaactgcgcgcgatttcgccacctgccaactggcaggtcaaccgaatgcagacatcgcaggcgggatgtgtcagcatcagcgttacgctagtttcacccgggggcagagaaggcgagatgacccgcctgcattgcccgaatcgtcagtagtcaagagccgctatgttaagggtctaccattccaatcgtctggacgtgctggaagcgttgatggagtttattgtcgaacgcgaacggctggacgatcctttcgaaccagagatgattctggtgcaaagtaccggtttggcacaagaaatctgattccctcgtaa

SEQ ID NO: 24491 - DNA, 345 bp, Homo sapiens
  SIMILAR (103)..(225): 1001254mologous to Homo sapiens DC13,accession number AF201935,Smith-Waterman Score=233.
  misc_feature (1)...(345): n = a,t,c or g
gcgtcactgggtttcggcgtctggcaagcggttcagctgtctgctccctagcagccggccttcgggtcgggcgtctccgccggctactgccgcttcagttctcacactgaagaatgcaacgtcttgattaacttgcttaaggaatgtcacaaaaatcacaacattctgaaattttttggttattgtaatgatgttgatcgggagttgagaaaatgcctgaagaatnnnnnnnnnnnnnnnnnnnnnnnnnnnnnnnnnnnnnnnnnnnnnnnnnnnnnnnnnnnnnnnnnnnnnnnnnnnnnnnnnnnnnnnnnnnnnnnnnnnnnnnnnnnnnnnnnnnnntag

SEQ ID NO: 24492 - DNA, 804 bp, Homo sapiens; identical to SEQ ID NO: 16048
  SIMILAR (646)..(473): 811254mologous to Escherichia coli O157:H7 transcriptional regulatory protein,accession number AE005499,Smith-Waterman Score= 245.

SEQ ID NO: 24493 - DNA, 924 bp, Homo sapiens
  SIMILAR (1)..(669): 851254mologous to Escherichia coli K12 putative flavodoxin,accession number AE000355,Smith-Waterman Score=961.
atgatgacttacctgacaggcgacgcggtgctgttcagtaacgatgctttcggtcaacactactgcgacgagcatctgttcaacgatgaagtggatcagacggagcttttcgagcagtgccagcgttactacgccaatatcctgacgccgttcagccgcctggtaacaccgaaaattaccgagatcctgggctttaacttaccagtcgatatgatagccacttcccacggcgtggtatggcgcgataacccgacgcaaattgtcgagctgtacctgaaatgggcggctgattatcaggaagacagaatcaccattttctacgacaccatgtcgaataacacccgcatgatggctgacgctatcgcccaggggattgcggaaaccgacccacgcgtggcggtgaaaattttcaacgtcgcccgaagcgataaaaacgaaatcctgactaatgtcttccgctcaaaaggcgtgctggtcggcacttcgacgatgaataacgtgatgatgccgaaaatcgccgggctggtggaggagatgactggtttacgctggtcggaccgaacttttttagatcggtttcgcggaagttggcgatcacataccagtgacgagtgtcgattaggatgcagtttggtcagggcaatatccgcttcgaccgccgcacgctgggcaactaatgcatccacgccgctgacggcgctggcggctgactgcgcctgtaacaatacggcattaagatccgcttctgcggcgcgctgcgccgttcttgcacggtcaacatcttccgctgagacaaaaccttctttcagtaatggctcggtgcggcgtaatgtatctgtggcctgtttcgcggcggcacgggctttttctaccgtggcattaaccgagtcggcaccaaactgttgcgcgtcaacgctacgctgg

SEQ ID NO: 24494 - DNA, 556 bp, Homo sapiens
  SIMILAR (177)..(554): 1001254mologous to Escherichia coli topoisomerase IV subunit,accession number M58409,Smith-Waterman Score=653.
gggggaggaggtgctggattaccgccaggcgggggcgtactacgcttcctgccgccagactgtcatagaaggcggcaaccacgcattcacgggcttcgaagattatttcaacccgatcgtcgattttcttggtctgcaccatctctgacgatcaactcgaattactaacttaaaccatgacgcaaacttataacgctgatgccattgaggtactcaccgggcttgagccggttcgccgccgtccggggatgtataccgataccactcgccctaaccatttggggcaagaagtcattgataacagtgtggatgaagcactggcgggtcacgcaaaacgcgtggacgttattttacatgctgaccagtcgttagaagttattgacgatgggcgcgggatgccggtggatattcacccggaagagggtgtaccggcggttgaactgattctttgccgtctgcatgcaggcggtaaattctctaacaaaaattaccagttctctggcggcctgcatggcgtggggatttcggtggttaacgccctgtcgaagcgcgtaga

SEQ ID NO: 24495 - DNA, 1099 bp, Homo sapiens; identical to SEQ ID NO: 16214
  SIMILAR (626)..(1096): 971254mologous to Escherichia coli acriflavine resistance protein,accession number M94248,Smith-Waterman Score=757.

SEQ ID NO: 24496 - DNA, 1929 bp, Homo sapiens
  SIMILAR (1)..(558): 981254mologous to Escherichia coli similar to attaching and effacing protein,accession number U73857,Smith-Waterman Score=1000.
atggccacagctaaagctaaccaggaaatacaggagtggctcgggaaatatggtactgcgcgcgtcaaactgaatgtcgataaagatttctcgctgaaggattcttcgctggaaatgctttatccgatttatgatacgccgacaaatatgttgttcactcagggggcaatacatcgtacagacgatcgtactcagtcaaatattggttttggctggcgtcatttttcaggaaatgactggatggcggctgtgattacttttatcgatcatgatttatcccgtagtcatacccgcattggtgttggtgcggaatactggcgcgattatctgaaactgagcgccaatggttatattcgggcttctggctggaaaaaatcgccggatattgaggattatcaggaacgcccggcgaatggctgggatattcgtgctgagggctatttacccgcctggccgcagcttggcgcaagcctgatgtatgaacagtattatggcgatgaagtcgggctgtttggtaaagataagcgccagaaagacccgcatgctatttctgccgagcattcgcctgaatttcgcagtgaagccctgaagcttgtgaacgcatcggtgttactgccgcagcccgtgaactcagcctgtatgaatcacaactctacaactggcgcagtaaacagcaaaatcagcagacgtcttctgaacgtgaactggagatgtctaccgagattgcacgtctcaaacgccagctggcagaacgggatgaagagctggctatcctccaaaaggccgcgacatacttccgaagcgcctgaaatgaagtatgtctttattgaaaaacatcaggctgagttcagcatcaaagcaatgtgccgcgtgctccgggtggcccgcagcggctggtatacgtggtgtcagcggcggacaaggataaacattgctgtagtacgccgcgcagatggctccagaacttccttcgtctacaccagctacctggcgaaagtgaacgaagagtggaaaaacaacgttggtactggctctaccgtaaaatggccgatcggtctgggcggtaaaggtaacgacggtatcgccgcgttcgttcagcgtctgccgggtgcaattggttatgttgaatatgcttacgcgaagcagaacaacctggcgtacaccaaactgatctccgctgatggtaaaccggttagtccgaccgaagaaaacttcgctaatgcagcaaaaggtgcagactggagcaaaaccttcgctcaggatctgaccaaccagaaaggcgaagatgcatggcctattacctctaccacgttcattctgatccacaaagatcagaagaaaccagaacaaggcacagaagtgctgaaattcttcgactgggcgtacaaaaccggggctaaacaggcgaacgacctggattacgccagcctgccggatagtgtagttgaacaggttcgcgctgcgtggaagaccaatattaaagacagtagcgtcaatttcgatatggcgaacgtctttttcagagttacgcccggtaattttctggttaacagagaggctagccaccagcggcgcgtctttgctgtacgggctggtgtggatttcatttaccgcgccagtagcgacggattgcgaaggtgccgcgacaggcgcacgcgatttaagcgcatcaaccacgcgggcgcgccactcgctggcagcagcctggtattcaacatcggcatcgacacggtcgagcaggcgttcaccacccagttccgccagcttgctgtcgaaatctttcccggactggcagaaaaattcataagagctatcgccgaggctaaacacggcaaacgcggtgttttccagctttggcgcttttttggagaacaggaacttatgcagcgcgacggcttcttccggcggttccccttccccttgcgttga

SEQ ID NO: 24497 - DNA, 2965 bp, Homo sapiens
  SIMILAR (2107)..(1574): 311254mologous to Arabidopsis thaliana zinc finger protein,accession number AL132979,Smith-Waterman Score=190.
gaagttggagactgtgtgtggttccgcagaagtctgggtttctacagagctgaactgagactccatcgtgttccaggccagatcagccagaagaaagtcatccattgctgtctgagtttcgttgctggtgaagaacaagctccccagggtttcaaacccagaactcatggtctgtgtttctgtactgttcaactgaactttgctttctagagcaggtatatttttagcagtggagactccttcagtttgggtctctgtgtcagatgaatcagtactcacggaaaagctggagtgtttcagaatacttcccagaggcagatgagggctactgtctaagaaaaagtttaagtctgtctgtgtctgtgtgtcaaacatctcaaggcctaagaagttagaatttcccctacacccataggactgagcagaggtatctgcgagtaagaagtccgtttgagtctctatgtccagtgactccaagactggctcggtggtcatggtgctaagttcactctcttcagtttgagtctggatatttgaggccgaaaagaactcttcgatatcaaaatcgattccggggttctgggctgggccagatgggagctgggtgtcaggtccaggatttgtgtcagacaaaagactacgatgaaaccaatgtctgggcaggcagattacttgacaagatgttttccaaatcacttaataaatctatggtttgggtctgattatctgtcatgttctgtgaaggaagcatactattctgtgcactgaaatttataattggtgcagatttctcaatatcttgatttaaagtcttaggctcattctgaggtaacaaactatgagttactgtctctgctactaaactgttgcttataatgttacctgtagcaacattatatgatgaatgaacactctcaaaaatgtctccgcacattccagcttggtccatctgtacatggtcatccgttggactttctatcccactggtttgagtttctctggagaccccacctgactggaaacaggtgtccataaatgcatcagtctgagcagctatagatgaagttaccttagagctgggcaaaaatgtctgagtgtgaacactaatgggaagagacacttgagaatcaaacgacaaatcagtttgagaacaagacgacacagaggaatcagcagtggcccactgtgcagaaggtataaagttttgtgaggcataagacagatctgtctgcacgttgattgaagaaatgctattcttttgacacgtgttccctagttcttgtaaaggattagatggacttttaccaaagttcacttgaacaccagtacttattggctcaccagcaataggattagcaattttgaaaagaggtaggctctccttaagagagcaagcctctgaatctaggccgaggatcagggttcctactgacaagggcattaagtgcacagcccctgtggcagagccctgatcaacacctaacaccacaggctgggctgaggagtcggctgtaggcacaaagacaggcatgacagaaaactgcatcacgggtagtttaaccaaagccactttgggctttggtaaaagcaacttctgaggatatctcggtggtgttgtaagagtctgcttgtcagtgttagagccacaagagtcttcaaaagatggttctagctttatttctgaagcttctagttcttgagtgtctggtctagggattggttggttgttcaatgattcaatggtcttgttggataacttctggttttgtgcacagttttccattttccttttcttactaggtgggtccctgtgttctgcaggtatctcgtgcccagttcggtagatgtgagactgcagtgctgttctactggcgtagggacagccgcatgtgcaccggaaggtcttgccacagtcctctgcatgtcttttcaggtcccattctgtaccgtacgaattgctgcacttactacatttgtgcttcttctcagcatgcattttcataaagtgctgttttacgagagaaaactgagaaaacggtctctcagggcctctggggcagccttcaattggacagcagtagaatttcggtccagttttcaaatcttttcttattgttggattgactatgccatcctgcaaaaggaaaattactttaaattattatttcaaaaaaacaacacaacaggctggagtggaaacggaatgactgaaaacgagcacattttgtgaaatacttttaattaagagtttttccatctagtgtcagcagtaagagaaaaagagtatgagtagactaaacgaaatgtggtgagaatactaagcaagactctaaaattctgcattcatttgaccattattgaattcctcttagtcaatttacattccagggagatgccccccttgtatgttcctaggctgtgaaatgctccagaaaaccacggattaggatcactacaagattcctgctcatttcaaacacatcgtcagtgaagctcggtaatcctttcattatcttttccaacctccctcatgctcccctgtagtgtgtgctctcatcattgaatgccttttactatctcctgtcctcttctaagtgccccttcgttcaagtcctcctatttatgtggattttgtcattagcctcaatctaatttctagaccttcagtctctttttcactcatactttatcagattcacctttctcaagtatagcttcgatcatgtcattacctccctcaaacgttttcagcagcacccccgtactgttcaagtcccaactttttgagcctgggatactcaaagtcccttactccatagcttcaaactactttttcttctctcattacttcattacaccgaagagaacgccttctaatgccccccacaccttttcatgggcagagatttatttgtatcttctgttgcctttgggaatgttttgaacagaataaatgttcaataaa

SEQ ID NO: 24498 - DNA, 3435 bp, Homo sapiens
  SIMILAR (2402)..(2452): 521254mologous to Escherichia coli K12 putative flavodoxin,accession number AE000355,Smith-Waterman Score=45.
atgttgatggcagaatactttgccatccagatgtgtcgggaaatcaagctgcctctgttcccggggtttacggagcgcgccagagaaacattgctgaattatcgttggccgggaaatattcgtgaattgaaaaacgtggtggaacgttcagtgtatcgccacggcaccagcgattatccgcttgatgacatcattattgatccctttaacagcgtccgcctgaagatgtatcgccgtttcagaaaccacctcgcttccaacactgccgctggatttaccgcatcggcggcgcagtatgaagatggtaaacagtacactaccctggaaaaaccggtagctggcgcgccgcaagtgctggagtttttctctttcttctgcccgcactgctatcagtttgaagaagttctgcatatttctgataatgtgaagaaaattcttccggagggggtcaagatgtttgatcaggcaggcgccgatagcaagaaactgccttcacaatacattgctggagtacgccgtgcagatggctccgggacttccttcgtcttcaccagctacctggcgaaagtgaacgaagagtggaaaaacaacgttggtactggctctaccgtaaaatggccgatcggtctgggcggtaaaggtaacgacggtatcgccgcgttcgttcagcgtctgccgggtgcaattggttatgttgaatatgcttacgcgaagcagaacaacctggcgtacaccaaactgatctccgctgatggtaaaccggttagtccgaccgaagaaaacttcgctaatgcagcaaaaggtgcagactggagcaaaaccttcgctcaggatctgaccaaccagaaaggcgaagatgcatggcctattacctctaccacgttcattctgatccacaaagatcagaagaaaccagaacaaggcacagaagtgctgaaattcttcgactgggcgtacaaaaccggcaacgatcgtaaagtcatgcagattgacccgctggaagcgccggatttgatctggctgctgcaacagacgggagatgaagtgctggattaccgccaggcggtggcgtactacgcttcttgccgccagactgtcatagaaggcggcaaccacgcattcacgggcttcgaagattatttcaacccgatcgtcgattttcttgaagtcattgataacagtgtggatgaagcactggcgggtcacgcaaaacgcgtggacgttattttacatgctgaccagtcgttagaagttattgacgatgggcgcgggatgccggtggatattcacccggaagagacctgcaggcatgcaagagctgaaaacgatcctggtgaccaatcccacgctgcaattcgatgcgatattcgccagcacatcaacggaaaaactcatctttgcctcactgtcaatttgactatagatattgtcatatcgaccatttgattgatagtcattttgactactcattaatgggcataattttatttatagagtaaaaacaatcagataaaaaactggcacgcaatctgcaattagcaagacatctttttagaacacgctgaataaattgaggttgctatgtctattgtggtgaaaaataacattcattgggttggtcaacgtgactgggaagtgcgtgattttcacggcacggaatataaaacgttgcgcggcagcagctacaatagctacttcatccgcgaagaaaaaaacgtgctgatcgacaccgtcgaccataaattcagccgcgaatttgtgcagaacctgcgtaatgaaatcgatctggcggatatcgattacatcgtgattaaccatgcagaagaggaccacgctggggcgctgaccgaactgatggcacaaattcccgatacgccgatctactgtacagccaacgctatcgactcgataaatggtcatcaccatcatccggagtggaattttaatgtggtgaaaactggcgacacgctggatatcggcaacggcaaacagctcatttttgtcgaaacaccaatgctgcactggccggacagcatgatgacttacctgacaggcgacgcggtgctcttcaattacgatgctttcggtcaacactactgcgacgagcatctgttcaacgatgaagtggatcagacggagcttttcgagcagtgccagcgttactacgccaatatcctgacgccgttcagccgcctggtaacaccgaaaattaccgagatcctgggctttaacttaccagtcgatatgatagccacttcccacggcgtggtatggcgcgataacccgacgcaaattgtcgagctgtacctgaaatgggcggctgattatcaggaagacagaatcaccattttctacgacaccatggtgaataacacccccatgatggctgacgctatcgcccaggggattgccggaaaccggcccacgccttgcgggggaaaatttcaacgtcggcccgaaacgataaacacgaagatcctgacctattgtctttccgctcagaaaggggagcttgattggccgccctctagaggatccccggcggcttgcccgactcatgcgctgatttgtgtcgatcgtaataaacttgaacaactgagcgcagaaaaacgccgccgaattcccggaaatattcgtagaatacggagcgggcggtatcgccgacctgtgactgccggatgcgacgctgtcgtgtccggcagggcgggttacgcaattcatgatggcgggaataactcaatggcaaaaaacacatcttgcggtgtccaactgcgtattcgtggcaaagtgcagggcgttagttttcatccgtttgtctggcagctggcacagcaattaaatcttcacggcgatgtctgtaatgacggcgatggctgggccactgctgattcctctgtgtcgtcttgttctcaaactgatttgtcgtttgattctcaagtgtctcttcccattagtgttcacactcagacatttttgcccagctctaaggtaacttcatctatagctgctcagactgatgcatttatggacacctgtttccagtcaggtggggtctccagagaaactcaaaccagtgggatagaaagtccaacggatgaccatgtacagatggaccaagctggaatgtgcggagacatttttgagagtgttcattcatcatataatgttgctacaggcctgcgacagcctggtcttactggtccccatctcctgcggccgactggcggtaagaacgggcttgtcagaactctccgtcagggacctgagaaggaacaacggaacgcgttcggaacggcttggactcccaagactcacctgattagtggccacaccgggagaattgaagcggcagtagccggcggagacgcccgaccagaaggccggctgctagggagcagacagttgaaccgcttgccagacgccgaaacccagtga

SEQ ID NO: 24499 - DNA, 529 bp, Homo sapiens; identical to SEQ ID NO: 3741
  SIMILAR (12)..(359): 871254mologous to Homo sapiens p40,accession number U93566,Smith-Waterman Score=510.

SEQ ID NO: 24500 - DNA, 369 bp, Homo sapiens; identical to SEQ ID NO: 7968
  SIMILAR (2)..(364): 911254mologous to Homo sapiens p40,accession number U93569,Smith-Waterman Score=577.

SEQ ID NO: 24501 - DNA, 394 bp, Homo sapiens; identical to SEQ ID NO: 3743
  SIMILAR (319)..(23): 871254mologous to Homo sapiens p40,accession number U93569,Smith-Waterman Score=438.

SEQ ID NO: 24502 - DNA, 911 bp, Homo sapiens
  SIMILAR (424)..(909): 1001254mologous to Cloning vector pZC320 SopA,accession number U26464,Smith-Waterman Score=849.
  misc_feature (1)...(911): n = a,t,c or g
nataacccatatcttcatattcatgcagaagacactctcctgcctttctatcttgggcaaaaggacgatgtcacttatgcaataaagcccacttgctggccggggcttgacattattccttcctgtctggctctgcaccgtattgaaactgagttaatgggcaaatttgatgaaggtaaactgcccaccgatccacacctgatgctccgactggccattgaaactgttgctcatgactatgatgtcatagttattgacagcgcgcctaacctgggtatcggcacgattaatgtcgtatgtgctgctgatgtgctgattgttcccacgcctgctgagttgtttgactacacctccgcactgcagtttttcgatatgcttcgtgatctgctcaagaacgttgatcttaaagggttcgagcctgatgacgatgtcacttatgcaataaagcccacttgctggccggggcttgacattattccttcctgtctggctctgcaccgtattgaaactgagttaatgggcaaatttgatgaaggtaaactgcccaccgatccacacctgatgctccgactggccattgaaactgttgctcatgactatgatgtcatagttattgacagcgcgcctaacctgggtatcggcacgattaatgtcgtatgtgctgctgatgtgctgattgttcccacgcctgctgagttgtttgactacacctccgcactgcagtttttcgatatgcttcgtgatctgctcaagaacgttgatcttaaagggttcgagcctgatgtacgtattttgcttaccaaatacagcaatagtaatggctctcagtccccgtggatggaggagcaaattcgggatgcctggggaagcatggttctaaaaaatgttgtacgtgaaacggatgaagttgg

SEQ ID NO: 24503 - DNA, 3819 bp, Homo sapiens
  SIMILAR (2736)..(1360): 571254mologous to Mus musculus reverse transcriptase,accession number U15647,Smith-Waterman Score=1502.
ttacaatttggcatgtttttgcagtgactggttctggttgttcctttccatgtttagcgcgtccttcaggagctcttgtagggcaggcctggtggtgacaaaatctctcagcatttgcttgtctgtaaagtattttatttctcccacacttatgaagcttagtttggctggatatgacattctgtgttgaaaattcttttctttaagaatgttgaatattggcccccactctcttctggcttgtagagtttctgccaaggggtcagctgttagtctgatgggcttccctttgtgggtaacctgacctttctctctggctgcccttaacattttttccttcatttcaactttggtgaatctgatgattatgtgtcttggggttgctcttctcgaggagtatctttgtggtgttctctgtatttcctgaatttgaatgttggcctgccttgctaggttggggaagttctcctggataatatcctgcagagtgttttccaacttggttccattctccccatcactttcaggtacacagtcaaatgtaggtttggtcttttcacgtagtcccatatttcttggaggctttgttcgttccttttcatttttttctctaatcctgtcttcatgctttatttcattaagttgatcttcaatctctgatatcctttcttccgttgtgtatgcttcacgaagttcttgtgatgtgtttttcagctccatcaggtcatttatgttcttctctaaactggttattctagttagcaattcctctaaccttttttcaagcttcttagcttccttgcattgagttagaacatgctcctttagcttggagaagtttgttattacccaccttctgaagcctacttctgtcaattcgtcaaacgcattctccatccagttttgttccattgctggcgaggagttgtgatcctttggatggggttttggtgtggacgtcctttttgttgaagttgatactattcctttctgtctgttagttttccttctaacaggcccctctgctgcaggtctgctggagtttgctggcagtccactccggaccccatttgcctgggtatcaccagcagaggctgcagaacagcaaagactgctgcctattccttcctctggaagcttcatcccagagaggcacccgtcagatgctagccggagttctccagtatgaggtgtctgtcgacccctgctgggaggtttctcccagtcagggggcacggggttcagggacccacttgaggaggcagtctctcccttagcagagctcgagcgttgtgctgggagatctgctactcttttcagagctggcacgcaggaacgtttaagtctgccaaagctgcacccacagccaccccttcccccaggtgctctgttgtttcctgactttttaatgatcaccattctaattggtgtgagatggtatctcattgtggttttgatttgcatttctctgatggccagtgatgatgagcattttttcatgtgtcttttggctgcataaatgtcttcttttgagaagtgtctgttcatatcctttgcccactttttgatggggttgtttgtttttttcttgtaaatttgtttgagttcattgtagattctggatattagccctttgtccgatgagtaggttgcgaaaattttctcccattctgtaggttgcctgttcactctgatggtagtttcctttgctgtgcagaagctctttagtttaattacatcccatttgtcaattttggcttttgttgccactgcttttggtgttttagacatgaagtccttgcccatgcctatgtcctgaatggtattgcctaggttttcttctagggtttttatggttttaggtctaacatttaagtctttaatccatcttgaattgatttttgtataagatgtaaggaagggatccagtttcagctttctacatatggctagccagttttcccagcaccatttattaaatagggaatcatttccccattgcttgtttttgtcaggtttgtcaaagatcagatggttgtagatatgcagcattatttctgagggctctgttgtgttccattgatctatatctctgttttggtaccagtaccatgctgttttggttactgtagccttgtagtgtagtttgaagtcaggtagtgtgatgtctccagctttgttcttttggcttaggattgacttggcgatgtgggatcttttttgtttccatatgaactttaaagtagttttttccaattctgtgaagaaagtcattggtagcttgatggggatggcattgaatgtataaattaccttgggcagtatggccattttcacgatattgattcttcctatccatgagcatggaatgttcttccacttgtttgtatcctcttttatttcattgagcagtggtttgtagttctccttgaagaggtccttcacatcccttgtaagttggattcctaggtattttattctctttgaagcaattgtgaatgggagttcactcatgatttggctctccgtttgtctgttgttggtgtataagaatgcttgtgatttttgtacattgattttgtatcctgagactttgctgaagttgcttatcagcttaaggagattttgggctgagacagtggggttttctagatatacaatcatgtcatctgcaaacagggacaatttgacttcctcttttcctaattgaataccctttatttccttctcctgcctattgccctggccagaacttccaacacagccttgcatcccagggatgaagcccacttgatcatggtggataagctttttgatgtgctgctggatttggtttgccagtattttattgaggatttttgcatcaatgttcatcaaggatattggtctaaaattcccttttttggttgtgtctctgccaggttttggtatcaggatgatgctggcctcataaaatgagttagggaggattccctctttttctattggttggaatagtttcagaaggaatggtaccagctcctccttgtacctctggtagaattcggctgtgaatccatctggtcctggactttttttggttggtaagctattggttattgcctcaatttcagagcctgttattggtctattcacagattcaacttcttcctggtttagtcttgggagggtgtatgtgtcgaggaatttatccatctcttctagattttctagtttatttgcatagaggtgtttgtagtattctctgatggtaatttgtatttctgtgggatcggtggtgatatcccctttatcattttttattgtgtctatttgattcttctctcttttcttctttattagtcttgcttgtggtctatcgattttgttgatcttttcaaaaaaccagctctgtcttctggcttgtagagtttctgccgagagatccgcttttagtctgatgggcttccctttgtgggtaacttgacctttctctctggctgcccttaacattttttccttcatttcaactttggtgaatctgatgattatgtgtcttggagttgctcttctcgaggagtatctttgtggtgttctctgtatttcctgaatctgaatgttggcctgccttgctagattggggaagttctcctggataatatcctgcagagtgttttccaacttggttccattctccccgtcagtttcaggtacaccaatcagacgtagatttggtgttttcacatagtcccatatttcttggtggctttgttcatttctttttattcttttttctctaaacttcccttctcgcttcatttcattcatttcgtcttccat

SEQ ID NO: 24504 - DNA, 3288 bp, Homo sapiens; identical to SEQ ID NO: 14349
  SIMILAR (1)..(1083): 991254mologous to Cloning vector pZC320 SopA,accession number U26464,Smith-Waterman Score=1872.

SEQ ID NO: 24505 - DNA, 4371 bp, Homo sapiens; identical to SEQ ID NO: 7102
  SIMILAR (1)..(888): 1001254mologous to Cloning vector pZC320 SopA,accession number U26464,Smith-Waterman Score=1548.

SEQ ID NO: 24506 - DNA, 1042 bp, Homo sapiens
  SIMILAR (924)..(160): 981254mologous to Cloning vector pSacBII SacB,accession number U09128,Smith-Waterman Score=1355.
ttagttgactgtcagctgtccttgctccaggatgctgtttttgacaacggatgttttattgcctttgatgttcattaagaagcttggcgcaaatgttgcctttttatcctcgaagaagcctctgtttgtcatgtagcttgtgataaccacattgttgcctttggcttgcggcaggaagaagttcgtgccgccgccgtagtacgctttgttaaataaagattcttcgccttggtatccgttttctgttcccgtgttggcttcgaatacaaggtatttatggcctttgtcttcaacgtagtgagggtctctcagcgtatggttgtcgccggatgtataattgccttcatcgataaactgctgaacgttctgatatgtttttccgtctccgtcaaaaatcgttttgtgatcttccactccgttgattttgagtgtgtcatcagattttgacacatttacctgcgctgttgtcaggctttgtttgccgtaatgtttaccggaatagtcagtgtagaataaacggatttttccgtcagatgtaaaggttgcagaaccggaccattcttgcgtctgatctttcaggatcggatcgttggcgtcgaacttatcgctgtctttaaagacacggcccgcgtttttccagctgtcgattgagttgtcgccgaccttttgataaaacatgtagattgatgtgtcatcagcgtctttcgggcttcccgcaagagcaaacacaacgtgatagccgttgtattcagctactgttccgtcagcgttttgcagcggccagctgtcccacacatcaagtccttttgcagactcaatatttttaatcgttgattgatcgaattgaggcacttggtatttttcgttttgctgctgtttagggatctgcagcatatcatggcgtgtaatatgagagacgccgtacgctgatgaatccccgaacttggccgtaacctccacaaagagcgactcgctgtataccgttggcatgctagctttatctgttcgggcaatacgatgcccattgtacttgttgactggt

SEQ ID NO: 24507 - DNA, 2079 bp, Homo sapiens; identical to SEQ ID NO: 21802
  SIMILAR (1845)..(730): 941254mologous to Cloning vector pBACe3.6 levansucrase,accession number U80929,Smith-Waterman Score=1860.

SEQ ID NO: 24508 - DNA, 2253 bp, Homo sapiens; identical to SEQ ID NO: 4008
  SIMILAR (1555)..(2166): 981254mologous to Cloning vector pZC320 SopB,accession number U26464,Smith-Waterman Score=997.

SEQ ID NO: 24509 - DNA, 2484 bp, Homo sapiens
  SIMILAR (197)..(925): 981254mologous to Plasmid F Protein A,accession number M12987,Smith-Waterman Score=1259.
  misc_feature (1)...(2484): n = a,t,c or g
gcaagtccctccctaggtcgggtcccgggtcggggagcgcaatgatattagtgnctaagggtgtgctcctctatactccctttggagagttgtcttatattaacacaccctcgggtttttgaaactctgcgatttggtggtccctccacattaattcgcaagnttatataaaaacccgcaaaccattgattaaggtatgttcagaatgaacctcatggaaccccttacccagtgcataaacgctggtcatgaaatgacgaaggctatcgccattgcacagtttaatgatgacagcccggaagcgaggaaaataacccggcgctggagaataggtgaagcagcggatttagttggggtttcttctcaggctatcagagatgccgagaaagcagggcgactaccgcacccggatatggaaattcgaggacgggttgagcaacgtgttggttatacaattgaacaaattaatcatatgcgtgatgtgtttggtacgcgattgcgacgtgctgaagacgtatttccaccggtgatcggggttgctgcccataaaggtggcgtttacaaaacctcagtttctgttcatcttgctcaggatctggctctgaaggggctacgtgttttgctcgtggaaggtaacgacccccagggaacagcctcaatgtatcacggatgggtaccagatcttcatattcatgcagaagacactctcctgcctttctatcttggggaaaaggacgatgtcacttatgcaataaagcccacttgctggccggggcttgacattattccttcctgtctggctctgcaccgtattgaaactgagttaatgggcaaatttgatgaaggtaaactgcccaccgatccacacctgatgctccgactggccattgaaactgttgctcatgactatgatgtcatagttattggacagcgcgcctaacctgggtatcggcacgattaatgtcgtatgtgctgctgatgtgctgattgttcccacgcctgctgagttgtttgactacacctccgcactgcagtttttcgatatgcttcgtgatctgctcaagaacgttgatcttaaagggttcgagcctgatgtacgtattttgcttaccaaatacagcaatagtaatggctctcagtccccgtggatggaggagcaaattcgggatgcctggggaagcatggttaataaaaaatgttgtacgtgaaacgaatgaagttggtaaagctgccccgatggtggattcgttaattgcgcgcgtaggagtaatggctcgcggtaatgccattactttgcctgtatgtggtcgggatgtgaagtttactcttgaagtgctccggggtgatagtgttgagaagacctctcgggtatggtcaggtaatgaacgtgaccaggagctgcttactgaggacgcactggatgatctcatcccttcttttctactgactggtcaacagacaccggcgttcggtcgaagagtatctggtgtcatagaaattgccgatgggagtcgccgtcgtaaagctgctgcacttaccgaaagtgattatcgtgttctggttggcgagctggatgatgagcagatggctgcattatccagattgggtaacgattatcgcccaacaagtgcttatgaacgtggtcagcgttatgcaagccgattgcagaatgaatttgctggaaatatttctgcgctggctgatgcggaaaatatttcacgtaagattattacccgctgtatcaacaccgccaaattgcctaaatcagttgttgctcttttttctcaccccggtgaactatctgcccggtcaggtgatgcacttcaaaaagcctttacagataaagaggaattacttaagcagcaggcatctaaccttcatgagcagaaaaaagctggggtgatatttgaagctgaagaagttatcactcttttaacttctgtgcttaaaacgtcatctgcatcaagaactagtttaagctcacgacatcagtttgctcctggagcgacagtattgtataagggcgataaaatggtgcttaacctggacagcccacagtcattcagtcctggtgctggcgatcacgctaacagcccacagtcatccagtcctagtactggtgttcacattaacagcccacagttgtccagtcttagtgctggtgttcacactatcagcccacagtcttccaatcctagtgttggtgtaacagccctcagtcatccagacctagtgtgggtgttcacgctaacagcccacagtcggccagtcctagtgtgggtgttcacactaacagcccacagtcgtccagtcctagtgtgggtgttcacactaaaagcccacagttgtccagtcctagtgtgggtgttcacactaaaagcccacagtcatccagtcctagtgcaggtgatcacgttaacagcccacagtcatccagtcctagtaccagtgatcatgctaatagccacagccatccagtcttag

SEQ ID NO: 24510 - DNA, 1696 bp, Homo sapiens
  SIMILAR (857)..(618): 401254mologous to unidentified cloning vector 29kD protein essential for the replication of mini F plasmid,accession number AB015619,Smith-Waterman Score=97.
ttaaggcaattggccggtgttgatacagcgggtaataatcttacgtgaaatattttccgcatcagccagcgcagaaatatttccagcaaattcattctgcaatcggcttgcataacgctgaccacgttcataagcacttgttgggcgataatcgttacccaatctggataatgcagccatctgctcatcatccagctcgccaaccagaacacgataatcactttcggtaagtgcagcagctttacgacggcgactcccatcggtaatttctatgacaccagatactcctcgaccgaacgccggtgtctgttgaccagtcagtagaaaaccccgccccagatcatccagtgcgtcctcagaaaacagctccaggacacgttcattactggtcaacagacaccggcgttcggtcgaagagtatctggtgtcatagaaattgccgatgggagtcgccgtcgtaaagctgcgaaagtgattatcgtgttctggttggcgagctggatgatgagcagatggctgcattatccagattgggtaacgattatcgcccaacaagtgcttatgaacgtggtcagcgttatgcaagccgattgcagaatgaatttgctggaaatatttctgcgctgggttggtaactttgagggcagctggtaccgctcctatgacccagtcctttttcaaaagagacgaaggcttaacccatccggctttacgatactgacccaggctctcgtaataacgccagggcagacggatgggggatttcttttgtttcaaataagcagaatttgtgttagccggttctttaccccgataaagaagggaatgagatatggggggaatatgtccactgaaaagccctctggatggactgtgcgcacgtttgataaaccaaggaaaagattcatagcctttttcatcgccggcatcctcttcagggcgataaaaaaccacttccttccccgcgaaactcttcaatgcctgccgtatatccttactggcttccgcagaggtcaatccgaatatttcagcatatttagcaacatggatctcgcagataccgtcatgttcctgtagggtgccatcagattttctgatctggtcaacgaacagatacagcatacgtttttgatcccgggagagactatatgccgcctcagtgaggtcgtttgactggacgattcgcgggctatttttacgtttcttgtgattgataaccgcttgttccgccatgacagatccatgtgaaagtgtgacaagttttttagattgtcacactaaataaaaaagagtcaataaaccggggatacctttgggaaaaaaacagctttttctgaaggcaatttggtaccaggggtaaaggggaatttggtcacaagacaggactggtcatttggagggtgattttggcaccactggaagggggcaatttgtcacaacacctttctctaaaaacaacatggataaaggccttacaaggcgctctaaaaaagaagatctaaaaactattgaaaaaataattattaaaatatccccgtggataagggggttacccccaagggaagtttttttaggcatcgggtggaaagcgaaatttataagtgctgttccctggggcttctcgtcattaagggcttgcctggcgtcgatgcgggagcatattggtgaaaggaagaccaatagggttggggcatag

SEQ ID NO: 24511 - DNA, 8724 bp, Homo sapiens
  SIMILAR (3782)..(4012): 411254mologous to Cloning vector pSacBII SacB,accession number U09128,Smith-Waterman Score=107.
  misc_feature (1)...(8724): n = a,t,c or g
atgaaactcatggaaacacttaaccattgcataaacgctggtcatgaaatgacgaaggctgtcgccattgcacagtttaatgatgacagcccggaagcgaggaaaataacccggcgctggagaataggtgaagcagcggatttagttggggtttcttctcaggctatcagagatgccgagaaagcagggcgactaccgcacccggatatggaaattcgaggacgggttgagcaacgtgttggttatacaattgaacaaattaatcatatgcgtgatgtgtttggtacgcgattgcgacgtgctgaagacgtatttccaccggtgatcggggttgctgcccataaaggtggcgtttacaaaacctcagtttctgttcatcgtgctcaggatctggctctgaaggggctacgtgttttgctcgtggaaggtaacgccccccagggaacagcctcagtgtatcacggatgggtcccagatcttcatattcatgcagaagccgctctcctgcctttctatcttggggaaaaggacgatgtcacttatgcaataaagcccacttgttggccggggcttgacattattccttcctgtctggctctgccccgtattgaacctgagttaatgggcaaattgatgaaggcagatccttcatgcctgggcctccacccaccacccactggggcggtcaagccagtagcaggtcagcaactctctggacagagctgcgaagggcaactgaaagcctctctgccactgcccctgcagtggaactacccatgctaccctcagactaataaaggagcaaagaccctacgtgccttatgcacacctccaacaagctgtagtcgacccaaggagaggaggccacatggttcttattatgttgtacgtgtaacgggtgacgttggtaaaggtcagatccggatgagaactgttgttgaacaggccattgatcaacgctcttcaactggtgcctggagaaatgctctttctatttgggaacctgtctgcaatgaaattttctatcgtctgattaaaccacgctgggagattagatgggggaagcgtgcgcctgttattccaaaacatacgctcaatactcaaccggttgaagatacttcgttatcgacaccagctgccccgatggtggattcgttaattgcgcgcgtaggagtaatggctcgcggtaatgccattactttgcctgtatgtggtcgggatgtgaagtttactcttgaagtgctccggggtgatagtgttgagaagacctctcgggtatggtcaggtaatgaacgtgaccaggagctgcttactgaggacgcactggatgatctcatcccttcttttctactgactggtcaacagacaccggcgttcggtcgaagagtatctggtgtcatagaaattgccgatgggagtcgccgtcgtaaagctgctgcacttaccgaaagtgattatcgtgttctggttggcgagctggatgatgagcagatggctgcattatccagattgggtaacgattatcgcccaacaagtgcttatgaacgtggtcagcgttatgcaagccgattgcagaatgaatttgctggaaatatttctgcgctggctgatgcggaaaatatttcacgtaagattattacccgctgtatcaacaccgccaaattgcctaaatcagttgttgctcttttttctcacccccgtcaggcaccgtgtatgaaatctaacaatgcgctcatcgtcatcctcggcaccgtcaccctggatgctgtaggcataggcttggttatgccggatctggctctgaaggggctacgtgttttgctcgtggaaggtaacgacccccagggaacagcctcaatgtatcacggatgggtaccagatcttcatattcatgcagaagacactctcctgcctttctatcttggggaaaaggacgatgtcacttatgcaataaagcccacttgctggccggggcttgacattattccttcctgtctggctctgcaccgtattgaaactgagttaatgggcaaatttgatgaaggtaaactgcccaccgatccacacctgatgctccgactggccattgaaactgttgctcatgactatgatgtcatagttattgacagcgcgcctaacctgggtatcggcacgattaatgtcagatccccctatgatgtcatagttattgacagcgcgcctaacctgggtatcggcacgattaatgtcgtatgtgctgctgatgtgctgattgttcccacgcctgctgagttgtttgactacacctccgcactgcagtttttcgatatgcttcgtgatctgctcaagaacgttgatcttaaagggttcgagcctgatgtacgtattttgcttaccaaatacagcaatagtaatggctctcagtccccgtggatggaggagcaaattcgggatgcctggggaagcatggttctaaaaaatgttgtacgtgaaacggatgaagttggtaaaggtcagatccggatgagaactgtttttgaacaggccattgatcaacgctcttcaactgatacttcgttatcgacaccagctgccccgatggtggattcgttaattgcgcgcgtaggagtaatggctcgcggtaatgccattactttgcctgtatgtggtcgggatgtgaagtttactcttgaagtgctccggggtgatagtgttgagaagacctctcgggtatggtcaggtaatgaacgtgaccaggagctgcttactgaggacgcactggatgatctcatcccttcttttctactgactggtcaacagacaccggcgttcggtcgaagagtttccttgtaccctctggcaggaggagcgactcaagccttcgcgaaagaaaataaccaaaaagcatacaaagaaacgtacggcgtctctcatattacacgccatgatatgctgcagatccctaaacagcagcaaaacgaaaaataccaagtgcctcaattcgatcaatcaacgattaaaaatattgagtctgcaaaaggacttgatgtgtgggacagctggccgctgcaaaacgctgacggaacagtagctgaatacaacggctatcacgttgtgtttgctcttgcgggaagcccgaaagacgctgatgacacatcaatctacatgttttatcaaaaggtcggcgacaactcaatcgacagctggaaaaacgcgggccgtgtctttaaagacagcgataagttcgacgccaacgatccgatcctgaaagatcagacgcaagaatggtccggttctgcaacctttacatctgacggaaaaatccgtttattctacactgactattccggtaaacattacggcaaacaaagcctgacaacagcgcaggtaaatgtgtcaaaatctgatgacacactcaaaatcaacggagtggaagatcacaaaacgatttttgacggagacggaaaaacatatcagaacgttcagcagtttatcgatgaaggcaattatacatccggcgacaaccatacgctgagagaccctcactacgttgaagacaaaggccataaataccttgtattcgaagccaacacgggaacagaaaacggataccaaggcgaagaatctttatttaacaaagcgtactacggcggcggcacgaacttcttccgtaaagaaagccagaagcttcagcagagcgctaaaaaacgcgatgctgagttagcgaacggcgcccttcgtatcatagagttaaataatgattacacattgaaaaaagtaatgaagcccgtgatcacttttaaacacggtaacctggtgaaattgaaccgcgccaatgttttcaaaaatgaacggcaaatggtacgtgttccctgattcacgcggttcaacaatgacgatcgatggatgccagcctacgtgttctgaggctttgcagaactttcaacggtataccggcatacagcatgtgcatcgcataggaatggcggaacgtatgtggtgtgaccggaacagagaacgtcacaccgtcagcagcagcggcggcacccgcctccccaatccaggtcctgcccgttctgaacattttgaggcatttcagtcagttgctcaatgtacctataaccagaccgttcagctggatattacggcctttttaaagaccgtaaagaaaaataagcacaagttttatccggcctttattcacattcttgcccgcctgatgaatgctcatccggagttccgtatggcaatgaaagacggtgagctggtgatatgggatagtgttcacccttgttacaccgttttccatgagcaaactgaaacgttttcatcgctctggagtgaataccacgacgatttccggcagtttctacacatatattcgcaagatgtggcgtgttacggtgaaaacctggcctatttccctaaagggtttattgagaatatgtttttcgtctcagccaatccctggtcttccttagagctagcagtgatcatgggaccaattctggccaataagtgtgacaatctaaaaacttgtcacacttcacatggatctgtcatggcggaaacagcggttatcaatcacaagaaacgtaaaaatagcccgcgaattggccagttcaaacgacttcctttgaggcggcaaatagtctcttccggggatcaaaaacgtatgctgtattctgttcgttgaccagttcaaaaaatttgatggcaccctacaagaaccatgccggtatctgcgagatcccatgttgcttaaatatgttgaaatatttcggattgccctttgcggaagcccagtaaggatatccggcaggcattgaagagtttcgcgggaaaggaagtggttttttatcgccctgaagaggatgccggcgatgaaaaaggctatgaatcttttccttggtttatcaaacgtgcgcccagtccatccaaagggctttacagtgtacatatcaacccatatctcattcccttctttatcgggttacagacccggtttacgcagtttcggtttagtgaaacaaaagaaatccccaatccgtatgccatgcgcttatacgaatccctgtgtcagtatcgtaaagccggatggctcaggcttcgtctctctgaaaatcgacttgatcataaaaccgtaccagctgcctcaaagttaccagcgtatgcctgacttccgccgccgcttcctgcaggtctgtgttaatgagatcaacagcagaactccaatgcgcctctcatacattgagaaaaagaaaggccgccagacgactcatatcatcagaatatctgatggcaccctacaggaacatgacggtatctgcgagatccatgttgctaaatatgctgaaatattcggattgacctctgcggaagccagtaaggatatacggcaggcattgaagagtttcgcggggaaggaagtggttttttatcgccctgaagaggatgccggcgatgaaaaaggctatgaatcttttccttggtttatcaaacgtgcgcacagtccatccagagggctttacagtgtacatatcaacccatatctcattcccttctttatcgggttacagaaccggtttacgcagtttcggcttagtgaaacaaaagaaatcaccaatccgtatgccatgcgtttatacgaatccctgtgtcagtatcgtaagccggatggctcaggcatcgtctctctgaaaatcgactggatcatagagcgttaccagctgcctcagagttaccagcgtttgcctgacttccgccgccgcttnctgcagatcagaaaatctgatggcaccctacaggaacatgacggtatctgcgagatccatgttgctaaatatgctgaaatattcggattgacctctgcggaagccagtaaggatatacggcaggcattgaagagtttcgcggggaaggaagtggttttttatcgccctgaagaggatgccggcgatgaaaaaggctatgaatcttttccttggtttatcaaacggctgtcctgggtatttattggtatttatcagcgatgtggcctgattcctatctgtgaaacttacagtctagttatcagaatatctgatggcaccctacaggaacatgacggtatctgcgagatccatgttgctaaatatgctgaaatattcggattgacctctgcggaagccagtaaggatatacggcaggcattgaagagtttcgcggggaaggaagtggttttttatcgccctgaagaggatgccggcgatgaaaaaggctatgaatcttttccttggtttatcaaacgtgcgcacagtccatccagagggctttacagtgtacatatcaacccatatctcattcccttctttatcgggttacagaaccggtttacgcagtttcggcttagtgaaacaaaagaaatcaccaatccgtatgccatgcgtttatacgaatccctgtgtcagtatcgtaagccggatggctcaggcatcgtctctctgaaaatcgactggatcatagagcgttaccagctgcctcaaagttaccagcgtatgcctgacttccgccgccgcttcctgcaggtctgtgttaatgagatcaacagcagaactccaatgcgcctctcatacattgagaaaaagaaaggccgccagacgactcatatcatcagaatatctgatggcaccctacaggaacatgacggtatctgcgagatccatgttgctaaatatgctgaaatattcggattgacctctgcggaagccagtaaggatatacggcaggcattgaagagtttcgcggggaaggaagtggttttttatcgccctgaagaggatgccggcgatgaaaaaggctatgaatcttttccttggtttatcaaacgtgcgcacagtccatccagagggctttacagtgtacatatcaacccatatctcattcccttctttatcgggttacagaaccggtttacgcagtttcggcttagtgaaacaaaagaaatcaccaatccgtatgccatgcgtttatacgaatccctgtgtcagtatcgtaagccggatggctcaagcatcgtctctctgaaaatcgactggatcatagagcgttaccatgctgcctcaaagttaccagcgtatgcctgacttccgccgccgcttcctgcaggtctgtgttaatgagatcaacagcagaactccaatgcgcctctcatacattgagaaaaagaaaggccgccagacgactcatatctttttcgatatgcttcgtgatctgctcaagaacgttgatcttaaagggttcgagcctgatgtacgtattttgcttaccaaatacagcaatagtaatggctctcagtccccgtggatggaggagcaaattcgggatgcctggggaagcatggttctaaaaaatgttgtacgtgaaacggatgaagttggtaaagatacttcgttatcgacaccagctgccccgatggtggattcgttaattgcgcgcgtaggagtaatggctcgcggtaatgccattactttgcctgtatgtggtcgggatgtgaagtttactcttgaagtgctccggggtgatagtgttgagaagacctctcgggtatggtcaggtgctgtatcccagggaggtgagagttttatctatatgcccctgactggggctgctgcctttctttcagagatgccctgcccagagaggaggaatctaaagaagcagtgtggctacagtggctttgctgcatgcggttatcaatcacaagaacgtaaaaatagcccgcgaatcgtccagtcaaacgacctcactgaggcggcatatagtctctcccgggatcaaaaacgtatgctgtatctgttcgttgaccagatcagaaaatctgatggcaccctacaggaacatgacggtatctgcgagatccatgttgctaaatatgctgaaatattcggattgacctctgcggaagccagtaaggatatacggcaggcattgaagagtttcgcggggaaggaagtggttttttatcgccctgaagaggatgccggcgatgaaaaaggctatgaatcttttccttggtttatcaaacgtgcgcacagtccatccagagggctttacagtgtacatatcaacccatatctcattcccttctttatcgggttacagaaccggtttacgcagtttcggcttagtgaaacaaaagaaatcaccaatccgtatgccatgcgtttatacgaatccctgtgtcagtatcgtaagccggatggctcaggcatcgtctctctgaaaatcgactggatcatagagcgttaccagctgcctcaaagttaccagcgtatgcctgacttccgccgccgcttcctgcaggatcataactcttcaccagaaagggaacaaaactggatggagaatgagtttgacgaactgacagaagtaggcttcagaaggtgggtaataacaaactcctccgagctaaaggagcatgttctaacccaatgcaaggaagctaagaaccttgataaaaggttacaggaactgctaactagaataagcaatttagagaacatagatgacctgatggagctcaaaaacacagcacaagaacttcatgaaacatacacaagtatcaatagccaaactgatcaagcagaagaaaggatatcagagattggagatcaacttaatgaaataaacatgaagaccagattagaggagaaaaaaaaaggaaagggaacgaacaaaggcctccaagaaccactttggngatga

SEQ ID NO: 24512 - DNA, 4205 bp, Homo sapiens
  SIMILAR (2820)..(3695): 791254mologous to Cloning vector pZC320 SopB,accession number U26464,Smith-Waterman Score=1125.
atggagaaattgctactggaaaatgacagcttaagtaaggatgtaagccgcctagaaactgtgtttgtacctcctgagaaacatgaaaaagagataatagctctgaaatccaatattgttgaacttaagaaacagctgtctgaacttaagaaaaaatgtggtgaagaccaggagaaaatacacgctctcacatctgaaaacactaacttgaagaagatgatgagtaatcagtatgtgccagttaaaacccatgaagaggttaaaatgacactgaatgacacgttagccaaaactaacagagaattattagatgtgaagaaaaaatttgaagatataaatcaggaatttgtaaaaataaaagataagaatgaaatattaaaaagaaacctggaaaacactcagaaccaaataaaagctgagtacatcagcctggcagagcacgaggcaaagatgagctcgctaagtcagagcatgagaaaggtgcaggatagtaatgctgaaatcttggccaactacagaaaaggccaagaagagattgtgacactgcatgccgaaattaaagcacagaagaaggagctcgacacaatacaagaatgcattaagataatgaagcgtgcgcctgttattccaaaacatacgctcaatactcaaccggttgaagatacttcgttatcgacaccagctgccccgatggtggattcgttaattgcgcgcgtaggagtaatggctcgcggtaatgccattactttgcctgtatgtggtcgggatgtgaagtttactcttgaagtgctccggggtgatagtgttgagaagacctctcgggtatggtcaggtaatgaacgtgaccaggagctgcttactgaggacgcactggatgatctcatcccttcttttctactgactggtcaacagacaccggcgttcggtcgaagagtatctggtgtcatagaaattgccgatgggagtcgccgtcgtaaagctgctgcacttaccgaaagtgattatcgtgttctggttggcgagctggatgatgagcagatggctgcattatccagattgggtaacgattatcgcccaacaagtgcttatgaacgtggtcagcgttatgcaacccgaccgcagaatgaatttgctggaaatatttctgcgatggctgatgcggaaaatatttcacgtaagattattacccgctgtatcaacaccgccaaattgcctaaatcagttgttgctcttttttctcaccccggtgaactatctgcccggtcagttattgacagcgcgcctaacctgggtatcggcacgattaatgtcgtatgtgctgctgatgtgctgattgttcccacgcctgctgagttgtttgactacacctccgcactgcagtttttcgatatgcttcgtgatctgctcaagaacgttgatcttaaagggttcgagcctgatgtacgtattttgcttaccaaatacaccaatataaatgcttctcagtccccggtggatgagggagaaattcgggatggcctgggaaagcatggttctaaaaaatgttgtacgtgaaacggatgaagttggtaaaggtcagatccggatgagagctgattttgtgcacggccattgatcaacgctcttcaactggtgcctggagaaatgctctttctatttgggaacctgtctgcaatgaaattttcgatcgtctgattaaaccacgctctgagattacataatgaagcgggcgcctgttattccaaaacatacgctcaatactcaaccggttgaagatacttcgttatcgacaccagctgccccgatggtggattcgttaattgcgcgcgtaagaagtaatggctcgcggtaatgccattactttgcctgtatgtggtcgggatgtgaagtttactcttgaagtgctccggggtgatagtgttgagaagacctctcgggtatggtcaggtaatgaacgtgaccaggagctgcttactgaggacgcactggatgatctcatcccttcttttctactgactggtcaacagacaccggcgttcggtcgaagagtatctggtgtcatagaaattgccgatgggagtcgccgtcgtaaagctgctgcacttaccgaaagtgattatcgtgttctggttggcgagctggatgatgagcagatggctgcattatccagattgggtaacgattatcgcccaacaagtgcttatgaacgtggtcagcgttatgcaagccgattgcagaatgaatttgctggaaatatttcggcgctggctgatgcggaaaatatttcacgtaagattattatccgctggatcaacaccgccaaattggctaaatcagttgttgctcttttttctcacccggggaaatatctgcccggtcaagaagcttgcatgcctgcaggcatatggtgcaagctgttggtagatctaccattctggggtctggagcacagtggctcttctctcacagcttcactaggcagtggcccaagtggcactttgtgtgagggctccaaccccacgtttgccttctgcactgcccttgtagaagtttttcataagggctccattcctgcagtagacttctgcctggacatccaggtcgactctagaggatcccctttcgatatgcttcgtgatctgctcaagaacgttgatcttaaagggttcgagcctgatgtacgtattttgcttaccaaatacagcaatagtaatggctctcagtccccgtggatggaggagcaaattcgggatgcctggggaagcatggttctaaaaaatgttgtacgtgaaacggatgaagttggtaaaggtcagatccggatgagaactgtttttgaacaggccattgatcaacgctcttcaactgatacttcgttatcgacaccagctgccccgatggtggattcgttaattgcgcgcgtaggagtaatggctcgcggtaatgccattactttgcctgtatgtggtcgggatgtgaagtttactcttgaagtgctccggggtgatagtgttgagaagacctctcgggtatggtcaggtaatgaacgtgaccaggagctgcttactgaggacgcactggatgatctcatcccttcttttctactgactggtcaacagacaccggcgttcggtcgaagagtatctggtgtcatagaaattgccgatgggagtcgccgtcgtaaagctgctgcacttaccgaaagtgattatcgtgttctggttggcgagctggatgatgagcagatggctgcattatccagattgggtaacgattatcgcccaacaagtgcttatgaacgtggtcagcgttatgcaagccgattgcagaatgaatttgctggaaatatttctgcgctggctgatgcggaaaatatttcacgtaagattattacccgctgtatcaacaccgccaaattgcctaaatcagttgttgctcttttttctcaccccggtgaactatctgcccggtcaggtgatgcacttcaaaaagcctttacagataaagaggaattagttaagcagcaggcatctaacttacaaagcagaaaaaaatacagcaagatggccaggccactctatactgtattcaaggaaacccagagggcaactactcatctagtagaatcccacaccagtggcagaaacagccttcaaaacaataaagcaggccctagtacaagcgccagccttaagctttcccacaggacaaaacttctcttatttgtcatagagagagcaggagtagctcttgcactccttactcagacttgtgggacaaccccagaaccagtggcatatctaaattattacccgctgtatcaacaccgccaaaatgccctaaatcagttgtgcttcttttttctcacccccggtgaactatctgcccggtcaggtgatgcacttcaaaaagcctttacagataaagaggaattacttaagcagcaggcatctaaccttcatgagcagaaaaaagctggggtgatatttgaagctgaagaagttatcactcttttaacttctgtgcttaaaacgtcatctgcatcaagaactagtttaagctcacgacatcagtttgctcctggagcgacagtattgtataagggcgataaaatggtgcttaacctggacaggtctcgtgttccaactgagtgtatagagaaaattgaggccattcttaaggaacttgaaaagccagcaccctga

SEQ ID NO: 24513 - DNA, 4724 bp, Homo sapiens
  SIMILAR (3864)..(4718): 871254mologous to Cloning vector pZC320 SopB,accession number U26464,Smith-Waterman Score=1218.
  misc_feature (1)...(4724): n = a,t,c or g
atgaagcgtgcgcctgttattccaaaacatacgctcaatactcaaccggttgaagatacttcgttatcgacaccagctgccccgatggtggattcgttaattgcgcgcgtaggagtaatggctcgcggtaatgccattactttgcctgtatgtggtcgggatgtgaagtttactcttgaagtgctccggggtgatagtgttgagaagacctctcgggtatggtcaggtaatgaacgtgaccaggagctgcttactgaggacgcactggatgatctcatcccttcttttctactgactggtcaacagacaccggcgttcggtcgaagagtatctggtgtcatagaaattgccgatgggagtcgccgtcgtaaagctgctgcacttaccgaaagtgattatcgggttctgggtggcgagctggatgatgagcagatggctgctttatccagattggatacttcgttatcgacaccagctgccccgatggtggattcgttaattgcgcgcgtaggagtaatggctcgcggtaatgccattactttgcctgtatgtggtcgggaggtgaagtttactcttgaagtgctccggggtgatagtgttgagaagacctctcgggtatggtcaggtaatgaacgtgaccaggagctgcttactgaggacgcactggatgatctcatcccttcttttctactgactgggcaacagacaccggcgttcggtcgaagagtatctggtgtcatagaaattgccgatgggagtcgccgtcgtaaagctgctgcacttaccgaaagtgattattgtgttttggttggcgagctggatgataaacacatggctttattattcagaatggggtacgattatttgcccaacaaagtgcttatgaacgtggtcagcgttatgcaagccgattgcagaatgaatttgctggaaatatttctgcgctggctgatgcggaaaatatttcgcgttagattattacccgctgtaaaaacaccgccgaattgccagggtgcgggcttgtcaagttcgttaagaatggcgtcaaatgtcacgacacacgcagttggcacacgaggcctgtccaggttaagcaccatttcatcgccctcatacaaagcagtcgctccaggagcaaaccgatgtcgtgagcataaacgagttcttgaagcagatggcgttttaagcacagaagttaaaagagtgagaacttctgcagcttcagatatcaccccagctggcttctgctcatgcagggctatcaaagatgccgagaagccaggccgactcccgcacccggatagtggaatttcgagaccgggttgaccaaccgggttgtttctccatttggccaaattattctatatgcgtaatgtgtttggtccgcgattgccacgtgctaaagacgtatttccaccggtgatcggggttgctgcccataaaggtggcgtttacaaaacctcagtttctgttcatcttgctcaggatctggctctgaaggggctacgtgttttgctcgtggaaggtaaccgaccccccagggaacagcctcaatggtatcgcgggagggggacccagctcttcatatttaatcaagaagcccctttcctgcccttctatcttggggaaaaggacgatgtcacttatgcaataaagcccacttgctgcccggggcttaacattattccttcctgtctggctctgccccgtattgaaactgagttaatgggcaaatttgatgaaggtaaactgcccaccgatccacacctgatgctccgactggccattgaaactgttgctcatgctcatgactatgatgtcatagttattgacagcgcgcctaacctgggtatcggcacgattaatgtcgtatgtgctgctgatgtgcctgattgttctcacgcctgttgagatagtttgactacacctccgcacggcagtttttcgatatgcttcgtgatctgctcaagaacgcgtgatcttaaagggttcgagcctgaagtacgtattttgcttaccaaatacagcaatagtaatggctctcaattcccggtggatggaggagcaaattcgggatgcgtggggaagcatggttctaaaaaatgttgtacgtgaaaccggttgaagtgggtaaaggtgcagatccggatgagaacctgtttttgaacaggccattgatcaacgctcttcaactgatacttcgttatcgacaccagctgccccgatggtggattcgttaattgcgcgcgtaggagtaatggcctcccggtaatgccattactttgcctgtatgtggtcgggatgtgaagtttactcttgaagtgctccggggtgatagtgttgagaagacctctcgggtatggtcaggtaatgaacgtgaccaggagctgcttactgaggacgcactggatgatctcatcccttcttttctactgactggtcaacagacaccggcgttcggtcgaagagtatctggtgtcatagaaattgccgatgggagtcgccgtcgtaaagctgctgcacttaccgaaagtgattatcgtgttctggttggcgagctggatgatgagcagatggctgcattatccagattgggtaacgattatcgcccaacaagtgcttatgaacgtggtcagcgttatgcaagccgattgcagaatgaatttgctggaaatatttctgcgctggctgatgcggaaaatatttcacgtaagattattacccgctgtatcaacaccgccaaattgcctaaatcagttgttgctcttttttctcaccccggtgaagctatctgcccggtcaggatgttcagaatgaaactcatggaaacacttaaccagtgcataaacgctggtcatgaaatgacgaaggctatcgccattgcacagtttaatgatgacagcccggaagcgaggaaaataacccggcgctggagaataggtgaagcagcggatttagttggggtttcttctcaggctatcagagatgccgagaaagcagggcgnctaccgcacccggatatggaaattcgaggacgggttgagcaacgtgttggttatacaattgaacaaattaatcatatgcgtgatgtgtttggtacgcgattgcgacgtgctgaagacgtatttacaccggtgatcggggttgctgccataaagactgggaccacggtccatatcgtatcgtcgtccagtttattaggcggggaccatggtccatctcgtatcggcggtctattattagtctgtgactacgggcctctcgtatcgtcgtctgggatcagcggtcctactcgtatcgtcggtctgattattagtctgggaccaggataccacttgtgttttcggtctgattatcggactgggatcacggatccactttatattggtgatgcgactattcgcgtgagtctacgagtatattctttgccgtcaaggtcaaggattgaacatgtcgtcgctaactgtggaatgatccctaaacagcagcaaaacgaaaaataccaagtgcctcaattcgatcaatcaacgattaaaaatattgagtctgcaaaaggacttgatgtgtgggacagctggccgctgcaaaacgctgacggaacagtagctgaatacaacggctatcacgttgtgtttgctcttgcgggaagcccgaaagacgctgatgacacatcaatctacatgttttatcaaaaggtcggcgacaactcaatcgacagctggaaaaacgcgggccgtgtctttaaagacagcgataagttcgacgccaacgatccgatcctgaaagatcagacgcaagaatggtccggttctgcaacctttacatctgacggaaaaatccgtttattctacactgactattccggagtaatggctcgcggtaatgccattactttgcctgtatgtggtcgggatgtgaagtatactcttgaagtgctccggggtgatagtgttgagaagacctctcgggtatggtcaggtaatgaacgtgaccaggagctgcttactgaggacgcactggatgatctcatcccttcttttctactgactggtcaacagacaccggcgttcggtcgaagagtatctggtgtcatagaaattgccgatgggagtcgccgtcgtaaagctgctgcacttaccgaaagtgattatcgtgttctggttggcgagctggatgatgagcagatggctgcattatccagattgggtaacgattatcgcccaacaagtgcttatgaacgtggtcagcgttatgcaagccgattgcagaatgaatttgctggaaatatttctgcgctggctgatgcggaaaatatttcacgtaagattattacccgctgtatcaacaccgccaaattgcctaaatcagttgttgctcttttttctcaccccggtgaactatctgcccggtcaggtgatgcacttcaaaaagcctttacagataaagaggaattacttatgcagcaggcatctaaccttcatgagcagaaaaaagctggggtgatatttgaagctgaagaagttatcactcttttaacttctgtggctaaaacgtcatctgcatccagaactagtttaagctcacgacatcagtttggctcctggagcgacagtatttgtataagggcgataaaatggtgcttaacctggacatgtctcgtggttcaactggagtgtttagatcgcttgcatgcctgcaggtcgactctagaggatcccccatag

SEQ ID NO: 24514 - DNA, 3623 bp, Homo sapiens
  SIMILAR (1)..(888): 1001254mologous to Cloning vector pZC320 SopA,accession number U26464,Smith-Waterman Score=1548.
atgaaactcatggaaacacttaaccagtgcataaacgctggtcatgaaatgacgaaggctatcgccattgcacagtttaatgatgacagcccggaagcgaggaaaataacccggcgctggagaataggtgaagcagcggatttagttggggtttcttctcaggctatcagagatgccgagaaagcagggcgactaccgcacccggatatggaaattcgaggacgggttgagcaacgtgttggttatacaattgaacaaattaatcatatgcgtgatgtgtttggtacgcgattgcgacgtgctgaagacgtatttccaccggtgatcggggttgctgcccataaaggtggcgtttacaaaacctcagtttctgttcatcttgctcaggatctggctctgaaggggctacgtgttttgctcgtggaaggtaacgacccccagggaacagcctcaatgtatcacggatgggtaccagatcttcatattcatgcagaagacactctcctgcctttctatcttggggaaaaggacgatgtcacttatgcaataaagcccacttgctggccggggcttgacattattccttcctgtctggctctgcaccgtattgaaactgagttaatgggcaaatttgatgaaggtaaactgcccaccgatccacacctgatgctccgactggccattgaaactgttgctcatgactatgatgtcatagttattgacagcgcgcctaacctgggtatcggcacgattaatgtcgtatgtgctgctgatgtgctgattgttcccacgcctgctgagttgtttgactacacctccgcactgcagtttttcgatatgcttcgtgatctgctcaagaacgttgatcttaaagggttcgagcctgatgctgaaacaagccagggagctctgggcacactggcaaatgtagtgacctcccttgccaacctaagtgaatctttgaacaacggtgacacttcagaaatccagccagaggaccagtctgcaagtgagataactcgggcatttgataccttagctaaagcacttaataccacagacagctcctcttctccaagcttggcagatgggatagacaccagtggaggagggagcatccacgtcatcagcagagaccagtcgacacccatcattgaggttgaaggccccctcctttcagacacacacgtcacatttaagtcaattcgggaggatcgaaacggcagatcgcaaaaaacagtacatacagaaggagacatgaacatgaacatcaaaaaaattgttaatcaagcccccaggttcgtacttttacggctgccacttctggcaggagaagcgactcaagccttcgcggaaagaaattacccaaaggccatacaaagaaacgtacggcgtctctcatattacacgccatgatatgctgcagatcccttaaacagcagcaaaacgaaaaattccaagggcctcatttcgatccaatcaacgaattaaaaatattgagtctgcaaaaggactttatgtgtgggcaagctggccgctgcaaaacgctgacggaacagtagctgaatacaacggctatcacgttgtgtttgctcctgcgggaagcccgaaagacgctgatgacacatcaatctacatgttttatcaaaaggtcggcgacaactcaatcgacagctggaaaaacgcgggccgtgtctttaaagacagcgataagttcgacgccaacgatcccgatcctgaaagatcagacgcaagaatggtgccggttctgcaacctttacatctgacggaaaaaatccggtttattctacactgactattccggtaaacattacggcaaacaaagcctgcctccttgcgcatgtttatgtgtcaaaatctgatgacacactcaaaatcaacggagtggaagatcacaaaacgatttttgacggagacggaaaaacatatcagaacgttcagcagtttatcgatgaaggcaattatacatccggcgaccaccatacgctgagagaccctcactacgttgaagacaaaggccataaataccttggtattcgaaagcccacacggggaacagaaaacggattcccaaggcgaagaatctttatttaacaaagcgtactacggcggcggcacttacttctttcgtaaagaaagccagaagcttcagcagagcgctaaaaaacgcgatgctgagttagcgaacggcgccccttcgtatcatagagttaaataatgattacacatctgaaaaaagtaatgaagccgctgatcacttcaaacacggtaactgatgaaaatcgagcgcgcgaatgttttcaaaatgaacggcaaatggtacttgttcactgatttcacgcgggttcaaaaatgaccgatcgatgggatttaaactcaacggatatttacatgcttggttatgtatcaaactctttaaccggcccttacaagccgctgaacaacaacaggggcttgtgctgcaaatgggtcttgatccaaacgatgtgacattcacttactctcacttcgcaagcagtgtctcactggtaatttattacagcctgctgcatccaaaatccacagacatctggcagggctgcctaaggaagtcctgtggcattgcaggaggtgataaaacagagagaagagattctccccgggccacagatctagctgggaagagaaccgagagctcaggctcatgccaaggggcaagttatgaaccaaccattttagggaagccccctacccctgagcaggtccccccagaggctgggctggggacccaggttgctgtggaggactctttcctcagtcatcaccactggctgtgggtgaaacttgccctaaaaacaggaaatgtgtctaagatcaatgccgcctttggagataacagtcctgcctattgtccacctgcatgggggttgagtcaacaggactacctgcagagaaaggccttgtctgcccagcaagagctcccatcctcatcccgtgacccctcaaccttagagaacagctctgcgtttgaaggtgtccctaaagcagaggccgacccattggaaacctcaagttacgtatcttttgccagcgatcagcaggatgaagcacctacccagaacccagcagccacgcaggggggagggcacccaaaggaaggagctgacgctgtttctgggacacaggggaaggggacagtcaacaacagacccctgactgcagacgatgactccatcctctcgggagggacctgggggactcagcttgagaaaccagaaaagccacaaggaggctcctaccacatggtgctttgctttgccctcaaaggacagaaggacagagaaagcgcggatctgggaagtgacggacagaacggtcaggacctggattggggaggcggttgcgcgactgctgctgacggtgtgacgttctctgttccggtcacaccacatacgttccgccattcctatgcgatgcacatgctgtatgccggtataccgctgaaagttctgcaaagcctgatgggacataagtgcatcagttcaacggaagtctacacgaaggtttttgcgctggatgtggctgcccggcaccgggtgcacgtttgcgatgccggagtctga

SEQ ID NO: 24515 - DNA, 10734 bp, Homo sapiens
  SIMILAR (1207)..(1992): 641254mologous to Cloning vector pBACe3.6 levansucrase,accession number U80929,Smith-Waterman Score=782.
  misc_feature (1)...(10734): n = a,t,c or g
atgcccttgagagccttcaacccagtcagctccttccggtgggcgcggggcatgactatcgtcgccgcacttatgactgtcttctttatcatgcaactcgtaggacaggtgccggcagcgctctgggtcattttcggcgaggaccgctttcgctggagcgcgacgatgatcggcctgtcgcttgcggtattcggaatcttgcacgccctcgctcaagccttcgtcactggtcccgccaccaaacgtttcggcgagaagcaggccattatcgccggcatggcggccgacgcgctgggctacgtcttgctggcgttcgcgacgcgaggctggatggccttccccattatgattcttctcgcttccggcggcatcgggatgcccgcgttgcaggccatgctgtccaggcagcctaacttcgatcattggaccgctgatcgtcacggcgatttatgccgcctcggcgagcacatggaacgggttggcatggattgtaggcgccgccctataccttgtctgcctccccgcgttgcgtcgcggtgcatggagccgggccacctcgacctgaatggaagccggcggcacctcgctaacggattcaccactccaagaattggagccaatcaattcttgcggagaactgtgaatgcgcaaaccaacccttggcagaacatatccatcgcgtccgccatctccagcagccgcacgcggcgcatctcgggcagcgttgggtcctggccacggtctggaaacgcggaagtcagcgccctgcaccattatgttccggatctgcatcgcaggatgctgctggctaccctgtggaacacctacatctgtattaacgaagcgctggcattgaccctgagtgatttttctctggtcccgccgcatccataccgccagttgtttaccctcacaacgttccataaccgggcatgttcatcatcagtaacccgtatcgtgagcatcctctctcgtttcatcggtatcattacccccatgaacagaaatcccccttacacggaggcatcagtgaccaaacaggaaaaaaccgcccttaacatggcccgctttatcagaagccagacattaacgcttctggagaaactcaacgagctggacgcggatgaacaggcagacatctgtgaatcgcttcacgaccacgctgatgagctttaccgcagctgcctcgcgcgtttcggtgatgacggaggagcgactcaagccttcgcgaaagaaaataaccaaaaaggcatacaaagaaacgtacggcgtctctcatattacacgccatgatatgctgcagatccctaaacagcagcaaaacgaaaaaataccaagtggctcaatttggatcaatcaaggattaaaaatattaattttgcaaaaggacttgatgtgtgggacagctggccgctgcaaaacgctgacggaacagtagctgaatacacgggctatcacgttgtgtttgctcttgcggaaggcccgaaagacgctgatgacacatcaatctacatgttttatcaaaagggtcggcgccaactcaatcgacagctggaaaaacgcggggccgtgtctttaaagacagcgataagttcgacgccaacgatccgatcctgaaagatcagacgcaagaatggtccggttctgcaacctttacatctgacggaaaaatccgtttattctacactgactattccggtaaacattacggccaaacaaagcctgacaacagcgcaggtaaatgtgtcaaaatctgatgacacactcaaaatcaacggagtggaagatcacaaaacgatttttgacggagacggaaaaacatatcagaacgttcagcagtttatcgatgaaggcaattatacatccggcgacaaccatacgctgagagaccctcactacgttgaagacaaaggccataaataccttgtattcgaagccaacacgggaacagaaaacggataccaaggcgaagaatctttatttaacaaagccgtactacggcggcggcacgaacttcttccgtaaagaaagccagaagcttcagcagagcgctaaaaaacgcgatgctgagttagcgaacggcgccctcggtatcatagagttaaataatgattacacattgaaaaaagtaatgaagccgctgatcacttcaaacacggtaactgatgaaatcgagcgcgcgaatgttttcaaaatgaacggcaaatggtacttgttcactgattcacgcggttcaaaaatgacgatcgatggtattaactcaaacgatatttacatgcttggttatgtatcaggatcaactaagttaccgctgatggccactggggtcagtccttctggggaccttatgagagactgtgtaggacatacttcagaactgtcccaccaaggcccaaggaaactaggatgtttatccagcaactcttgtctgtccttggttgagagctgttctcagggcaacttacagcccacccctcatgttcctatggctggagagggatcttcaggcaaagagacacagtgccctcccttttcggccgcggcgcgtgactggtgtgacaatctaaaaacttgtcacacttcacatggatctgtcatggcggaaacagcgggttatcaatcacaagaaacgtaaaaatagcccgcgaatcgtccagtcaaacgacctcactgaggcggcatatagtctctcccgggatcaaaaacgtatgctgtatctgttcgttgaccagatcagaaaatctgatggcaccctacagggaacatgacggtatctgcgagatccatgttgctaaatatgctgaaatattcggattgacctctgcggaagccagtaaggatatacggcaggcattgaagagtttcgcggggaaggaagtggttttttatcgccctgaagaggatgccggcgatgaaaaaggctatgaatcttttccttggtttatcaaacgcgcgcacaggtccattccagagggcgctttacagttgtaccatatgcaacccataaatcctcattcccttctttatcgggttacagaaccggtttacgcagtttcggcttagtgaaacaaaagaaatcaccaatccgtatgccatgcgtttatacgaatccctgtttcagtctagtaagactaatgggtcaggcatcgtctctctgaaaatcgactggatcatagagcgttaccagctgcctcaaagttaccagcgtatgcctgacttccgccgccgcttcctgcaggtctgtgttaatgagatcaacagcagaactccaatgcgcctctcatacattgagaaaaagaaaggccgccagacgactcatatcgctatcagagatgccgagaaagcagggcgactaccgcacccggatatggaaattcgaggacgggttgagcaacgtgttggttatacaattgaacaaattaatcatatgcgtgatgtgtttggtacgcgattgcgacgtgctgaagacgtatttccaccggtgatcggggttgctgcccataaaggtggcgtttacaaaacctcagtttctgttcatcttgctcaggatctggctctgaaggggctacgtgttttgctcgtggaaggtaacgacccccagggaacagccctcaatgtatcacgaatgggtccagaatcttcatattcatgcagaagacactctcctgcctttctatcttgggaaaaaggacgatgtcacttatgcaataaagcccacttgctggccggggcttgacattattccttcctgtctggctctgcaccgtattgaaactgagttaatgggcaaatttgatgaaggtaagctgcccaccgatccacacctgatgctccgactggccattgaaactgttgctcatgactatgatgtcatagttattgacagcgcgcctaacctgggtatcggcacgattaatgtcgtatgtgctgctgatgtgctgattgttcccacgcctgctgagttgtttgactacacctccgcactgcagtttttcgatatgcttcgtgatctgctcaagaacgttgatcttaaagggttcgagcctgatgtacgtattttgcttaccaaatacagcaatggggatcctctagcgaggaccggcattgcatcaccgagtggcattttattttttttttttatcagtttcacaagactggcgctcggtggcccccgagaagcataccatactaaaccaggccagaaccctgctgagaacagcagcacagaagctggaaacgatgaacctccagcacgctgtcccaagcaacaggaaactctagattggacatgggtgaagctggaaaccatcattctgagcaaactattgcaagaacagaaaaccaaacaccgcatgttctcactcaaagacggttttttcgcccttggacgtggaagtccacgttctttaatagtggactcttgttccaaactggaacaacactcaaccctatctcgggctattcttttgatttataagggattttgccgatttcggaaccaccatcaaacaggattttcgcctgctggggcaaaccagcgtggaccgcttgctgcaactctctcagggccaggcggtgaagggcaatcagctgttgcccgtctcactggtgaaaagaaaaaccaccctggcgcccaatacgcaaaccgcctctccccgcgcgttggccgattcattaatgcagctggcacgacaggtttcccgactggaaagcgggcagtgagcgcaacgcaattaataaaaaatttaagaaggggatcctctaccgacgggccgcgattcatgtctgagtgcgatgaaattcatctcaagccatatagaatgacattagccaaaacccaaaaggtaacaaatgctgacatcttcagtcaaccagacaacgggagccaattacaaacgcaaacagcttccgctcggagcgaccacataaagataacatccgggccacaacgtgaacgcacgcaagataacgcagccagacaggcagagacgaaatgctggaacggcgacagccaagacaaaggccataaaaaccaagatgcgaagccaaacacgggaacagaaagcggacaccaaggcgaagaatctttattaaacaaagcgcactacggcggcggcacgaacttcttccgtaaagaaagccagaagcttcagcagagcgctaaaaaacgcgatgctgagttagcgaacggcgccctcggtatcatagagttaaataatgattacacattgaaaaaagtaatgaagccgctgatcacttcaaacacggtaactgatgaaatcgagcgcgcgaatgttttcaaaatgaacggcaaatggtacttgttcactgattcacgccgttcaaaaatgacgatcgatggtattaactcaaacgatatttacatgcttggttatgtatcaaactctttaaccggcccttacaagccgctgaacaaaacagggcttgtgctgcaaatgggtcttgatccaaacgatgtgacattcacttactctcacttcgcagtgccgcaagccaaaggaaacaatgtggttatcacaagctacatgacaaacagaggcttcttcgaggataaaaaggcaacatttgcgccaagcttcttaatgaacatcaaaggcaataaaacatccgttgtcaaaaacagcatcctggagcaaggacagctgacagtcgggggccaaccccttcgcccagtgaaaaaccgcggccgggtctttaaaaacagcgatagttcgacgcccaacgatccgatcctgaaagatcagacgcaagaatggtccggttctgcaacctttacctctgagggaaaaatccgtttattctacactgactattccggtaaacattccggcaaacaaagcttgacaacagcgcaggtaaatgtgtcaaaatctgatgacacactcaaaatcaacggagtggaagatcacaaaacgatttttgacggagacggaaaaacatatcagaacgttcagcagtttatcgatgaaggcaattatacatccggcgacaaccatacgctgagagaccctcactacgttgaagacaaaggccataaataccttgtattcgaagccaacacgggaacagaaaacggataccaaggcgaagaatctttatttaacaaagcgtactacggcggcggcacgaacttcttccgtaaagaaagccagaagcttcagcagagcgctaaaaaacgcgatgctgagttagcgaacggcgccctcggtatcatagagttaaataatgattacacattgaaaaaagtaatgaagccgctgatcacttcaaacacggtaactgatgaaatcgagcgcgcgaatgttttcaaaatgaacggcaaatgcagtggcagtgtggacgtgtgtggactgtggcaaggtgctagccagcgccggggtgccagcctccatgcaggcatttgcagcagctgggtggcagcatggctggaggagggcagggggtccctgcaaggaatagaattgggcactcatgggggcagtctgctgttctccatgcttagttttgggcaggcagcagtgtcggcggcaggggctggtggtctcattgctgccagtgctcctatgacagtggtggtttactctagaggatccccgatcctgaaagatcagacgcaagaatggtccggttctgcaacctttacatctgacggaaaaatccgtttattctacactgactattccggtaaacattacggcaaacaaagcctgacaacagcgcaggtaaatgtgtcaaaatctgatgacacactcaaaatcaacggagtggaagatcacaaaacgatttttgacggagacggaaaaacatatcagaacgttcagcagtttatcgatgaaggcaattatacatccggcgacaaccatacgctgagagaccctcactacgttgaagacaaaggccataaataccttgtattcgaagccaacacgggaacagaaaacggataccaaggcgaagaatctttatttaacaaagcgtactacggcggcggcacgaacttcttccgtaaagaaagccagaagcttcagcagagcgctaaaaaacgcgatgctgagttagcgaacggcgccctcggtatcatagagttaaataatgattacacattgaaaaaagtaatgaagccgctgatcacttcaaacacggtaactgatgaaatcgagcgcgcgaatgttttcaaaatgaacggcaaatggtacttgttcactgattcacgcggttcaaaaatgacgatcgatgatcttcatattcatgcagaagacactctcctgcctttctatcttggggaaaaggacgatgtcacttatgcaataaagcccacttgctggccggggcttgacattattccttcctgtctggctctgcaccgtattgaaactgagttaatgggcaaatttgatgaaggtaaactgcccaccgatccacacctgatgctccgactggccattgaaactgttgctcatgactatgatgtcatagttattgacagcgcgcctaacctgggtatcggcacgattaatgtcgtatgtgctgctgatgtgctgattgttcccacgcctgctgagttgtttgactacacctccgcactgcagtttttcgatatgcttcgtgatctgctcaagaacgttgatcttaaagggttcgagcctgatgtacgtattttgcttaccaaatacagcaatagtaatggctctcagtccccgtggatggaggagcaaatttcggatgcctggggaagcatggttctaaaaaatgttgtacgtgaaacggatgaagttggtaaaggcatcccgaatttgctcctccatccacggggactgagagccattactattgctgtatttggtaagcaaaatacgtacatcaggctcgaaccctttaagatcaacgttcttgagcagatcacgaagcatatcgaaaaactgcagtgcggaggtgtagtcaaacaactcagcaggcgtgggaacaatcagcacatcagcagcacatacgacattaatcgtgccgatacccaggttaggcgcgctgtcaataactatgacatcatagtcatgagcaacagtttcaatggccagtcggagcatcaggctatcaagaattcccgagaaaacagggcggccttcggccacccggtatatgaaatttgaagaccggggtgaagcaccggtgtggtttatcaaattgaacaaattattcataggcgtaatgtgtttggtacgcgattgcgacgtgctgaagacgtatttccaccggtgatcggggttgctgcccataaaggtggcgtttacaaaacctcagtttctgttcatcttgctcaggatctggctctgaaggggctacgtgttttgctcgtggaaggtaacgacccccagggaacagcctcaatgtatcacggatgggtaccagatcttcatattcatgcagaagacactctcctgcctttctatcttggggaaaaggacgatgtcacttatgcaataaagcccacttgctggccggggcttgacattattccttcctgtctggctctgcaccgtattgaaactgagttaatgggcaaatttgatgaaggtaaactgcccaccgatccacacctgatgctccgactggccattgaaactgttgctcatgactatgatgtcatagttattgacagcgcgcctaacctgggtatcggcacgattaatgtccgaatactcttcctaccttactggtctgaagattcctattcatcttataagggagaggcctcttggaagcttgtgcctcatttcccctggacttcacccaatactcctttaccctttgctgattttgctttgtatccttttgctgtgaccgatcatagctgcnacaatgaatgcctgcaggtcgactctagaggatccccccatgataaagtgagagtcaatgaggtgacaaagctgtggaagtcctggggcactggatcagtcaaggtcctgtcactcaaggcagaaccagatggcaagggagcctattggtatagaccacataaggcaacctcttggatctcggagcagagtggagaagtctggagagtgcagctgaaggagccaacagtgaatatcccacagacttgttcagaattacaactccagggtccaaacctattagaaggcaatgttctcaagtttttcgatatgcttcgtgatctgctcaagaacgttgatcttaaagggttcgagcctgatgtacgtattttgcttaccaaatacagcaatagtaatggctctcagtccccgtggatggaggagcaaattcgggatgcctggggaagcatggttctaaaaaatgttgtacgtgaaacggatgaagttggtaaagatacttcgttatcgacaccagctgccccgatggtggattcgttaattgcgcgcgtaggagtaatggctcgcggtaatgccattactttgcctgtatgtggtcgggatgtgaagtttactcttgaagtgctccggggtgatagtgttgagaagacctctcgggtatggtcaggtaatgaacgtgaccaggagctgcttactgaggacgcactggatgatctcatcccttcttttctactgactggtcaacagacaccggcgttcggtcgaagagtatctggtgtcatagaaattgccgatgggagtcgccgtcgtaaagctgctgcacttaccgaaagtgattatcgtgttctggttggcgagctggatgatgagcagatggctgcattattcagattgggtaacgattatcgcccaacaagtgcttatgaacgtgttgcttcaaagagaataaaatacctaggaatccaacttacaagggacatgaaggacctcttcaaggagaactacaaactactgctcaatgaaataaaagaggatacaaacaaatggaagaccattccatgctcatgggtaggaagaatcaatatcgtgaaaatggccatactgcccaaggtaatttatagattcagtgccatccccctcaagctaccaatgactttcttcacagaattggaaaaaactactttaacgttcatatggaaccaaaaaagagcccgtattgccaagtcaatcctaagccaaaagaacaaagctggaggcatcaggctacctgacttcaaactatactacaagactacagtaaccaaaacagcatggtactggtaccacagcagagatagaggccaatggaacagaacagagccttcagaaataatgctgcgtatctacaaccatctgatctttgacaaaccctgggaaaaaccaagcaatgggggaaagggttcccctgtttaataaatggtgctgggaaaactggctagccatatgtagaaagctgaaactggatccccttcccttacaccttatacaaaaaatcaaattcaagatggattaaagactttaaatgttagatctaaaaccattaaaaaccctagaaggaaaacctaggcaatacccatttcaggacataggcatgggcaaggacttcatggctaaaacaccaaaagcaatggcaacaaaagccaaaattgacaaatgggatctaattaaactaaagagcttctgcacagcaaaagaaactaccatcagagtgaacaggcaacctacagaatgggagaaaatttttgcaatctatccatctgacaaagggctaatatccagaatctacaaagaacctaaacaaatttgcaaaaaaaaaaaaaagtcgacc

SEQ ID NO: 24516 - DNA, 3380 bp, Homo sapiens
  SIMILAR (1)..(1098): 781254mologous to Leishmania major probable levansucrase precursor,accession number AL160371,Smith-Waterman Score=1433.
  misc_feature (1)...(3380): n = a,t,c or g
atgaacatgaacatcaaaaaaattgtaaaacaagccacagttctgacttttacgactgcacttctggcaggaggagcgactcaagccttcgcgaaagaaaataaccaaaaagcatacaaagaaacgtacggcgtctctcatattacacgccatgatatgctgcagatccctaaacagcagcaaaacgaaaaataccaagtgcctcaattcgatcaatcaacgattaaaaatattgagtctgcaaaaggacttgatgtgtgggacagctggccgctgcaaaacgctgacggaacagtagctgaatacaacggctatcacgttgtgtttgctcttgcgggaagcccgaaagacgctgatgacacatcaatctacatgttttatcaaaaggtcggcgacaactcaatcgacagctggaaaaacgcgggccgtgtctttaaagacagcgataagttcgacgccaacgatccgatcctgaaagatcagacgcaagaacggtccggttctgcaacctttacatctgacggaaaaatccgtttattctacactgactattccggtaaacattacggcaaacaaagcctgacaacagcgcaggtaaatgtgtcaaaatctgatgacacactcaaaatcaacggagtggaagatcacaaaacgatttttgacggagacggaaaaacatatcagaacgttcagcagtttatcgatgaaggcaattatacatccggcgacaaccatacgttgagagaccctcactacgttgaagacaaaggccataaataccttgtattcgaagccaacacgggaacagaagaacggatacgacaggcgaagaactctttatttaccnagcgtgggcacactttgtcaactcgcgggtcactttgggagaactcaaaggtcggcgacaactcaatcgacagttggaaaaacgcgggccgcgtctttaaagacagcgataagttcgacgccaacgatccgatcctgaaagatcagacgcaagaatggtccggttctgcaacctttacatctgacggaaaaatccgtttattctacactgactattccggaaacattacgtctataaagcctgacaacagcgcagtggaagatcacaaaacgatttttgacggagacggaaaaacatatcagaacgttcagcagtttatcgatgaaggcaattatacatccggcgacaaccatacgctgagagaccctcactacgttgaagacaaaggccataaataccttgtattcgaagccaacacgggaacagaaaacggataccaaggcgaagaatctttatttaacaaagcgtactacggcggcggcacgaacttcttccgtaaagaaagccagaagcttcagcagagcgctaaaaaacgcgatgctgagttagcgaacggcgccctcggtatcatagagttaaataatgattacacattgaaaaaagtaatgaagccgctgatcacttcaaacacggtaactgatgaaatcgagcgcgcgaatgttttcaaaatgaacggcaaatggtacttgttcactgattcacgcggttcaaaaatgacgatcgatggtattaactcaaacgatatttacatgcttggttggcccagggcttcccggtatcaacagggacaccaggatttatttattctgcgaagtgatcttccgtcacaggtatttattcgcgataagctcatggagcggcgtaaccgtcgcacaggaaggacagagaaagcgcggatctgggaagtgacggacagaacggtcaggacctggattggggaggcggttgccgccgctgctgctgacggtgtgacgttctctgttccggtcacaccacatacgttccgccattcctatgcgatgcacatgctgtatgccgacttttttcatgctgcttctcgcctcttctctctggtgttcaaactgctaatctctcaggcccttgagtatgcaggtttctcttatctcaaagcctttgcaattgccggtccctctgcttataaatcccttcctgagtctttggatgctcaggggagactctgttctcaggctccacatgggcagtacctgaactgcaggcgcctcccctcacccaacaggtgcaatgctgcaggactccagatccgaggtctcacagattcaaataagcagaaaatcaccaagaacatattgcttaatgatattatccaggataacttccccaatctagcaaggcaggccaacattcaaattcaggaaatacagagaatgccacaaagatactcctcgagaagagcaactccaagacacataattgtcagattcaccaaagttgaaatgaaggaaaaaatattaagggcagacagagagaaaggtcaggttacccacaaagggaagcccatcagactaccagcggatctctcagcagaaactctacaagccagaagagagtgggggccaatattcaacattctttccttcatttcaactttggtgaatctgacaattatgtgtcttggtgtaccttaaagtgacggggagaatggaaccaagttggaaaacactctgcaggatattatccaggagaacttccccaatctagcaaggcaggccaaccgttcagattcaggaaataccagagaacgccacaaagatactccttgagaagagcaactccaagacacataattagtgtgggttcaccaaagttgaaatgaagggaaaaaatattaagggcagcccagagagaaaggtcggggttacccacaaagggaagcccatcagactaacaacagctgatctctcagcagaaacttctacaagcccagaagacagagtggggggccgatattcaacattctctaaagaaaagaattttccaacccagaatttccatatccagccaaacctaagcttcataagtgaaggagaaataaaatactttacagacaagccaaatgctgagagatttttgtcaccgccagcctcccgcctgccctaaaagagcaccaggcctgccctaaaagagctcctgaaggaagaagcacttaaacatgggaaagggaaccaaccagttacccagcttgcttgccaaaattcattgcccaaaattgttaaaggacccttcgagggcttagggaagggaacttgcatcaactaatggacaaaataaccagctaacattcataatgacaggatcaaattcacacataacaatattaactttaaatgtaaatgggctaaatgctcccatttaaaagacacagactgggcaaattggataaagagtcaagacccatcaatgtgctgtattcaggaaacccatctcacgtgcagagacacacataggctcaaaataaaaggatggaggaagatctaccaagcaaatggaaaac

SEQ ID NO: 24517 - DNA, 3641 bp, Homo sapiens
  SIMILAR (2979)..(3191): 841254mologous to Cloning vector pZC320 SopA,accession number U26464,Smith-Waterman Score=310.
atggacgatatcccgcaagaggcccggcagtaccggcataaccaagcctatgcctacagcatccagggtgacggtgccgaggatgacgatgagcgcattgttagatttcatacacgggtcaccgtcgacagcgacacacttgcatcggatgcagcccggttaacgtgccggcacggcctgggtaaccagtgtgacaatctaaaaacttgtcacacttcacatggatctgtcatggcggaaacagcggttatcaatcacaagaaacggtaaaaatagcccgcgatcggtccagtcaaccgacctcactgaggcgggcatatagtctctcccagggatcaaaaacgtatgctgtatctgttcgttgaccagatcagaaaatctgatggcaccctaccaggaacatgacggtatctgcgagatccatgttgctaaatatgctgaaatattcgggattggccctctccgaaagccagtaaggatatagcggcaggcattgaagagtttcgcggggaaggaaagtggttttttatcgccctaaagaggatgccggcgataaaaaaggctatgaatctttttccttggtttatcaaacatgaaaacgtaattgtcacccatttcagtgaagaagtgaaaacagtggttgaaagttaccagcagagcatgaatatgagagcttctagtgaagtaacagaaccaggctacgccacaaggaactcaagaggtgtgctgcacaggctgcccagccatccatcaaagcggacctatgacggtatctgcgagatccatgttgctaaatatgctgaaatattcggattgacctctgcggaagccagtaaggatatacggcaggcattgaagagtttcgcggggaaggaagtggttttttatcgccctgaagaggatgccggcgatgaaaaaggctatgaatcttttccttggtttatcaaacggatgaagaatggtgcctggtatattgatctggctctgaaggggctacgtgttttgctcgtggaaggtaacgacccccaaggaaccagccccaatgttccccggatgggtgccagatcttcataattagtgcaaaacacagctcttctgcctttttatcttgttgaaaaggacgatgtcacttatgcaataaagcccacttgctggccggggcttgacattattccttcctgtctggctctgcaccgtattgaaactgagttaaatgggcaaatttgatgaagggaaactgcccaccgatccacacctgatgctccgactggccattgaaactgttgctcatgactatgatgtcatagttattgacagcgcgcctaacctgggtatcggcacgattaatgtcgtatgtgctgctgatgtgctgattgttcccacgcctgttgagctatgtttgattacgcctccgcactgcagttttttgatatgcttcgtgatctgctcaagaacgttgatcttaaagggttcgagcctgatgtacgtattttgcttaccaaatacagcaatagtaatggctctcagtccccgtggatggaggagcaaattcgggatgcctcccgaagcatggttctaaaaaatgttgtacgtaaaacggatgaagttggtaaagctgccccgatggtggattcgttaattgcgcgcgtaggagtaatggctcgcggtaatgccattactttgcctgtatgtggtcgggatgtgaagtttactctttgaattgttccgggggtgatagtgttaaaaagacctctcgggtatggtcaggtaatgaacgtgaccaggagcttgtttctagaggacgcactgaatgatctcatcccctcttttctactgactggtcaacaaacaccgggcgttcgttcgaaaagaatttggtgtcatagaaattcccgatgggagttcgccgtcgtaaagctgctgcacttcccgaaaagtaattatggtgttctggttgccgagctggatgatgagcagatgcctgcatatcccagattgggtaacgatttatcgcccaacaaagtgcttatgaaacgtggtcagcgttatgcaagccgaattgcagaatgaatttgctcggaaatatttctgcgctggctgatgcggaaaatatttcacgtaagattattacccgctgtatcaacaccgccaaatttgcttaaatcagttgttggtcttttttctccaccccggtgaactatctgcccggtcaggtgatgcacttcaaaaagcctttattgataaaggaggatttacttaagcagcaggcatctaaccttcatggagcagaaaaaagctggggtgatatttggaagctgaagaagttatcactctttttaccttctgtgcttaaaacgtcatctgcaatcaagaactagtttacagctcacgacatcagtttgctcctggagcgacagtattgtataagggcgataaaatggtgcttaacctggacaggtctcgtgttccaactgagtacagatacggtgtcttcttaaatgttcttcttccggcaacaaagtattttcagttgcacgatccaagcctacgtaacatggaacttaattactctctggcttcagaggatctggttttgaaggggctacgtgttttgctcgtggaaggtaacgacccccagggaacagcctcaatgtatcacggatgggtaccagatcttcatattcatgcagaagacactctcctgcctttctatcttggggaaaaggacgatgtcacttatgcaataaagcccacttgctggccggggcttgacattattccttcctgtctggctctgcaccgtattgaaactcacctaatgggcaaatttgatgaaggtaaactgcccaccgatccacacctgatgctccgactggccattgaaactgttgctcatgactatgatgtcatagttattgacagcgcgcctaacctgggtatcggcacgattaatgtcgtatgtgctgctgatgtgctgattgttcccacgcctgttgagcatgtttgattacgcttccgcacggcagtttttccatatgcttcgtcctctgctcaagaacgttgatcttaaagggttcgagcctgatgtacgtattttgcttaccaaatacagcaatagtaatggctctcagtccccgtggatggaggagcaaattcgggatgcctggggaagcatggttctaaaaaatgttaaagaatttgctggaaatatttctgcgctggctgatgcggaaaatatttcacgtaagattattacccgctgtatcaacaccgccaaattgcctaaatcagttgttgtcttttttctcaccccggtgaactatctgcccggtgatgcacttcaaaaagcctttacagataaagaggaattacttaagcagcaggcatctaaccttcatgagcagaaaaaagctggggtgatatttgaagctgaagaagttatcactcttttaacttctgtgcttaaaacgtcatctgcatcaagaactagtttaagctcacgacatcagtttgctcctggagcgacagtattgtataagggcgataaaatggtgcttaacctggacaggtctcgtgttccaactgagtgtatagagaaaattgaggccattcttaaggaacttgaaaagccagcaccctga

SEQ ID NO: 24518 - DNA, 1962 bp, Homo sapiens
  SIMILAR (595)..(470): 921254mologous to Cloning vector pSacBII SacB,accession number U09128,Smith-Waterman Score=213.
  misc_feature (1)...(1962): n = a,t,c or g
ctaaacgtagtgagggtctctcagcgtatggttgtcgccggatgtataattgccttcatcgataaactgctgaacgttctgatatgtttttccgtctccgtcaaaaatcgttttgtgatcttccactccgttgattttgagtgtgtttctattttgtgacacatttacctgcgctgttgtcaggctttgtttgccgtaatgtttaccggaatagtcagtgtagaataaacggatttttccgtcagatgtaaaggttgcagaaccggaccattcttgcgtctgatctttcaggatcggatcgttggcgtcgaacttatcgctgtctttaaagacacggcccgcgtttttccagctgtcgattgagttgtcgccgaccttttgataaaacatgtagattgatgtgtcatcagcgtctttcgggcttcccgcaagagcaaacacaacgtgatagccgntgtattcagctactggttccgtcagcggtttgcagcggccagctgttccacacatcaagtccttttgcagactcaatatttttaatcgttgattgatcgaattgaggcacttggtatttttcgctttgctgctgtttaggatagcatttgagactgacaggtatcgatcatagctgatgaggacaatgttatatacagatgctgtacataacagatagtcagtagtgagccaaaatacacagatttcctttccaaaatcccattcgaacagcgtgtgagggatgtacaaaggaatggagatcacaccgagggcgccgttcgctaactcagcatcgcgttttttagcgctctgctgaagcttctggctttctttacggaagaagttcgtgccgccgccgtagtacgctttgttaaataaagattcttcgccttggtattttttttctgttcccgtgttggcttcgaatacaaggtatttatggcctttgtcttcaacgtagtgagggtctctcagcgtatggttgtcgccggatgtataattgccttcatcgataaactgctgaacgttctgatatgtttttccgtctccgtcaaaaatcgttttgtgatcttccactccgttgattttgagtgtgtcatcagattttgacacatttacctgcgctgttgtcaggctttgtttgccgtaatgtttaccggaatagtcagtgtagaataaacggatttttccgtcagatgtaaaggttgcagaaccggaccattcttgcgtctgatctttcaggatcggatcgttggcgtcgaacttatcgctgtctttaaagacacggcccgcgtttttccagctgtcgattgagttgtcgccgaccgcgtttgaagtgatcagcggcttcattacttttttcaatgtgtaatcattatttaactctatgataccgagggcgccgttcgctaactcagcatcgcgttttttagcgctctgctgaagcttctggctttctttacggaagaagttcgtgccgccgccgtagtacgctttgttaaataaagattcttcgccttggtatccgttttctgttcccgtgttggcttcgaatacaaggtatttatggcctttgtcttcaacgtagtgagggtctctcagcgtatggttgtcgccggatgtataattgccttcatcgataaactgctgaacgttctgatatgtttttccgtctccgtcaaaaatcgttttgtgatcttccactccgttgattttgagtgtgtcatcagattttgacacatttacctgcgctgttgtcaggctttgtttgccgtaatgtttaccggaatagtcagtgtagaataaacggatttttccgtcagatgtaaaggttgcagaaccggaccattcttgcgtctgatctttcaggatcggatcgttggcgtcgaacttatcgctgtctttaaagacacggcccgcgtttttccagctgtcgattgagttgtcgccgaccttttgataaaacat

SEQ ID NO: 24519 - DNA, 1086 bp, Homo sapiens; identical to SEQ ID NO: 21664
  SIMILAR (631)..(1080): 921254mologous to Cloning vector pZC320 SopB,accession number U26464,Smith-Waterman Score=682.

SEQ ID NO: 24520 - DNA, 1494 bp, Homo sapiens; identical to SEQ ID NO: 13428
  SIMILAR (1)..(657): 991254mologous to synthetic construct chloramphenicol acetyltransferase,accession number A02739,Smith-Waterman Score= 1193.

SEQ ID NO: 24521 - DNA, 1611 bp, Homo sapiens
  SIMILAR (286)..(1158): 921254mologous to Cloning vector pZC320 SopA,accession number U26464,Smith-Waterman Score=1372.
atggcggaaacagcggttatcaatcacaagaaacgtaaaaatagcccgcgaatcgtccagtcaaacgacctcactgaggcggcatatagtctctcccgggatcaaaaacgtatgctgtatctgttcgttgaccagatcagaaaatctgatggcaccctactgtacatgacgtatcgtaagccggatggctcaggcatcgtctctctgaaaatcgactggatcatagagcgttaccagctgcctcaaagttaccagcgtatgcctgacttccgccgccgcttcctgcagtgcataaacgctggtcatgaaatgacgaaggctatcgccattgcacagtttaatgatgacagcccggaagcgaggaaaataacccggcgctggagaataggtgaagcagcggatttacttggggtttcttctcaggctatcagagatgccgagaaagcagggccactaccgcacccggatatggaaaatcgaggacgggttgagcaacggggtggttataccattgaaccaaataatcatatgcgtgatggtgttggtacgcgatggcgacgtgctgaagacgtattttccaccgctgatcgggggttgctggccataaaggggggcggttacaaaacctcagtttctgttcatcttgctcaggatctggctctgaaggggctacgtgttttgctcgtggaaggtaacgacccccagggaacagcctcaatgtatcacggatgggtaccagatcttcatattcatgcagaagacactctcctgcctttctatcttggggaaaaggacgatgtcacttatgcaataaagcccacttgctggccggggcttgacattattccttcctgtctggctctgcaccgtattgaaactgagttaatgggcaaatttgatgaaggtaaactgcccaccgatccacacctgatgctccgactggccattgaaactgttgctcatgactatgatgtcatagttattgacagcgcgcctaacctgggtatcggcacgattaatgtcgtatgtgctgctgatgtgctgattgttcccacgcctgctgagttgtttgactacacctccgcactgcagtttttcgatatgcttccggatctggtcaagaaccgcgatcttaaaggggtcgagcctgatatgagaaaacagaggcacaggaaagctaaggatttacttgcacaggaccctacagctatgaccacagatgaactcttaaaagaagcaaccagatgtcccatctgcacagcttacttagaaaagccaatgtccttggagtgtgaatgtgtcttctgcctcagctgcaccaattcactgcagaaggagccccaaggggaaggtgtcttgtgtcccttctgcctggaggcttctcagaaaaacaacatcaggctcaatcggcagctggggaggctggtttcgcacattaaggaactggagcccaagctgaaaaagattctgaagatgaacttcaaggatgcggaagttccaagattctccagccccaaaccctgctcctccttcttctccacctgttacctgtccaaaaactgctcaaaccacccatgctattctccctatcctggaagtggctggggctga

SEQ ID NO: 24522 - DNA, 1131 bp, Homo sapiens
  SIMILAR (295)..(1011): 911254mologous to Cloning vector pSacBII SacB,accession number U09128,Smith-Waterman Score=1142.
atgctccgactggccattgaaactgttgctcatgactatgatgtcatagttattgacagcgcgcctaacctgggtatcggcacgattaatgtcgtatgtgctgctgatgtgctgattgttcccacgcctgctgagttgtttgactacacctccgcactgcagtttttcgatatgcttcgtgatctgctcaagaacgttgatcttaaagggttcgagcctgatgtacgtattttgcttaccaaatacagcaatagtaatggctctcagtccccgtggatggaggagcaaattcgggatgcctggggaagcatggttctaaaaaatgttgtacgtgaaacggatgaagttggtaaagtagctgaatacaacggctatcactttgtgtttgctcttgcgggaagcccgaaagacgctgttgacacatcaatctacatgttttatcaaaaggtcggtgacaactcaatcgacagctggaaaaacgcgggccgtgtctttaaagacagcgataagttcgtcgccaacgatccgatcctgaaagatcagacgcaagaatggtccggttctgcaacctttacatctgacggaaaaatccgtttattctacactggctatgccggtaaacattacggcaaacaaagcctgacaacagcgcaggtaaatgtgtcaaaatctgatgacacactcaaaatcaacggagtggaagatcacaaaacgatttttgacggagacggaaaaacatatcagaacgttcagcagattatcgatgaaggcaattatacatccggcgacaaccatacactgagagaccctcactacgttgaagacaaaggccataaataccttgtattcgaagccaacacgggaacagaaaacggataccaaggcgaagaatctttatttaacaaagcgtactacggcggcggcacgaacttcttccgtaaagaaagccagaagcttcagcagagcgctaaaaaacgcgatgctgagttagcgaacggcgccctcggtgtgacgcacccagtccaatttcgactactgacggtgaccattcactccttcgactcctcggttgtgctacagaggacgcgtaggctactaatcgggatggacaatagtatcacgtatctatga

SEQ ID NO: 24523 - DNA, 1257 bp, Homo sapiens; identical to SEQ ID NO: 23147
  SIMILAR (1251)..(616): 991254mologous to Cloning vector pBACe3.6 levansucrase,accession number U80929,Smith-Waterman Score=1108.

SEQ ID NO: 24524 - DNA, 1974 bp, Homo sapiens; identical to SEQ ID NO: 13192
  SIMILAR (1)..(552): 1001254mologous to Cloning vector pZC320 SopA,accession number U26464,Smith-Waterman Score=971.

SEQ ID NO: 24525 - DNA, 1704 bp, Homo sapiens
  SIMILAR (1704)..(1105): 991254mologous to Cloning vector pSacBII SacB,accession number U09128,Smith-Waterman Score=1065.
ttagtctgggaccacggtcccactcgtatcgtcggtctgataatcagactgggaccacggtcccactcgtatcgtcggtctgattattagtactgggaccatggtcccactcgtatcgtcggtctgattattagtctgggaccacggtcccactcgtatcgtcggtctgattattagtctgtccaggttaagcaccattttatcgcccttatacaatactgtcgctccaggagcaaactgatgtcgtgagcttaaactagttcttgatgcagatgacgttttaagcacagaagttaaaagagtgataacttcttcagcttcaaatatcaccccagcttttttctgctcatgaaggttagatgcctgctgcttaagtaattcctctttatctgtaaaggctttttgaagtgcatcacctgaccgggcagatagttcaccggggtgagaaaaaagagcaacaactgatttaggcaatttggcggtgttgatacagcgggtaataatcttacgtgaaatattttccgcatcagccagcgcagaaatatttccagcaaattcattctgcaataggcttgcataacgctgaccacgttcataagcacttgttgggcgataatcgttacccaatctggataatgcagccatctgctcatcacccagctcgccaaccagaacacgatatcgctttcggtaagtgcagcagctcagtttctgttcatcttgctcaggatctggctctgaaggggctacgtgttttgctcgtggaaggtaacgacccccagggaacagcctcaatgtatcacggatgggtaccagatcttcatattcatgcagaagacactctcctgcctttctatcgatccacacctgatgctccgactggccattgaaactgttgctcatgactatgatgtcatagttattgacagcgcgcctaacctgggtatcggcacgattaatgtcgtatgtgctgctgatgtgctgattgttcccacgcctgctgagttgtttgactacacctccgcactgcagtttttcgatatgcttcgtgatctgctcaagaacgttgatcttaaagggttcgagcctgatgtacgtattttggtagtgagggtctctcagcgtatggttgtcgccggatgtataattgccttcatcgataaactgctgaacgttctgatatgttttccgttctccgtcaaaaatcgttttgtgatcttccactccgttgattttgagtgtgtcatcagattttgacacatttacctgcgctgttgtcaggctttgtttgccgtaatgtttaccggaatagtcagtgtagaataaacggatttttccgtcagatgtaaaggttgcagaaccggaccattcttgcgtctgatctttcaggatcggatcgttggcgtcgaacttatcgctgtctttaaagacacggcccgcgtttttccagctgtcgattgagttgtcgccgaccttttgataaaacatgtagattgatgtgtcatcagcgtctttcgggcttcccgcaagagcaaacacaacgtgatagccgttgtattcagctactgttccgtcagcgttttgcagcggccagctgtcccacacatcaagtccttttgcagactcaatatttttaatcgttgattgatcgaattgaggcacttggtatttttcgttttgctgctgtttagggatctgcagcat

SEQ ID NO: 24526 - DNA, 3216 bp, Homo sapiens; identical to SEQ ID NO: 7108
  SIMILAR (2212)..(2727): 981254mologous to synthetic construct chloramphenicol acetyltransferase,accession number A02739,Smith-Waterman Score=939.

SEQ ID NO: 24527 - DNA, 1446 bp, Homo sapiens
  SIMILAR (121)..(657): 961254mologous to unidentified cloning vector 29kD protein essential for the replication of mini F plasmid,accession number AB015619,Smith-Waterman Score=915.
atgagttcttcagataaggatttcgatttcagcgtggccaatatggtcaacttcttcgcccccgttttccccatgggcaaatattatacgcaagccgacaaggtgctcatccccctggcgattcaggaacatgacggtatctgcgagatccatgttgctaaatatgctgaaatattcggattgacttctgcggaagccagtaaggatatacggcaggcattgaagagtttcgcggggaaggaagtggttttttatcgccctgaagaggatgccggcgatgaaaaaggctatgaatcttttccttggtttatcaaacgtgcgcacagtccatccagagggctttacagtgtacatatcaacccatatctcattcccttctttatcgggttacagaaccggtttacgcagtttcggcttagtgaaacaaaagaaatcaccaatccgtatgccatgcgtttatacgaatccctgtgtcagtatcgtaagccggatggctcaggcatcgtctctctgaaaatcccctggatcatagagcgttaccagctgcctcaaagttaccagcgtatgcatgacttccgccgccgcttcctgcaggtctgtgttaatgagatcaacagcagaactccaatgcgcctctcatacaccccaaaaagaaaggccgccagacgactcatagcggtgaggacacagccttcaaggcaccatcttagaaggagagacctggccctaaccaggcaccaagccctccggcaccttcatcttcgacttcccagcgtccaggactgtgagaaatcaatttctgctgttgataaattatccagtctcagtggtcgggatgtgaagtttactcttaaagtgttcgggggtgatagtgttgagaagacctctcgggtatggtcaggtaatgaacgtgaccaggagctgcttactgaggacgcactggatgatctcatcccttcttttctactgactggtcaacagacaccggcgttcggtcgaagagtatctggtgtcatagaaattgccgatgggagtcgccgtcgtaaagctgctgcacttaccgaaagtgattatcgtgttctggttggcgagctggatgatgagcagatggctgcattatccagattgggtaacgattatcgcccaacaagtgcttatgaacgtggtcagcgttatgcaagccgattgcagaatgaatttgctggaaatatttctgcgctggctgatgcggaaaatatttcacgtaagattattacccgctgtatcaacaccgccaaattgcctaaatcagttgttgctcttttttctcaccccggtgaactatctgcccggtcaggtgatgcacttcaaaaagcctttacagataaagaggaattacttaagcagcaggcatctaacttcatgagcagaaaaaaggtcaataagtttttccattattttccataa

SEQ ID NO: 24528 - DNA, 2601 bp, Homo sapiens
  SIMILAR (508)..(1137): 971254mologous to Cloning vector pZC320 SopA,accession number U26464,Smith-Waterman Score=1068.
atggggacaggcaagaagcaagctgcaaacctcagctttgtgatgagtgctcagagacatatgagcactcatcacagtagaggagcaaaaatggcagctagggtcctgcgtggacagtcaggaaaggcccctctgccaagtccttgtgatgccccttcatcagaatatgttccttcaagggacccaggctttagtggttctcctcagagaggtgtggtcaaaacactggcaagacacacccttctcaggcatctccagaatggccccctgctcctgcccagtgtgcgctggcgagtttatgggaaggtgcctggagaggacactctgggaactggggctctgggaaagagaaagtggaaaaataaggcaacttctggaagcatgggcagcagggaggctaacgatagagcagggcttctcaacttcggctctgctgatattcagggcagggccactccttgctggggggactgcagctgtcgagcagcatccctaatctccaatcaggagtgcataaacgctggtcatgaaatgacgaaggctatcgccattgcacagtttaatgatgacagcccggaagcgaggaaaataaccgggcgctggagaataggtgaagcagcggatttagttggggtttcttctcaggctatcagagatgccgagaaagcagggcgactaccgcacccggatatggaaattcgaggacgggttgagcaacgtgttggttatacaattgaacaaattaatcatatgcgtgatgtgtttggtacgcgattgcgacgtgctgaagacgtatttccaccggtgatcggggttgctgcccataaaggtggcgtttacaaaacctcagtttctgttcatcttgctcaggatctggctctgaaggggctacgtgttttgctcgtggaaggtaacgacccccagggaacagcctcaatgtatcacggatgggtaccagatcttcatattcatgcagaagacactctcctgcctttctatcttggggaaaaggacgatgtcaattatgcaataaagcccacttgctggccggggcttgacattattccttcctgtctggctctgcaccgtattgaaactgagttaatgggcaaatttgatgaagagtggctgtgcacccccattgtgaataagacaccggcgttcggtcgaagagtatctggtgtcatagaaattgccgatgggagtcgccgtcgtaaagctgctgcacttaccgaaagtgattatcgtgttctggttggcgagctggatgatgagcagatggctgcattatccagattgggtaacgattatcgcccaacaagtgcttatgaacgtggtcagcgttatgcaagccgattgcagaatgaatttgctggaaatatttctgcgctggctgatgcggaaaatatttcacgtaagattattacccgctgtatcaacaccgccaaattgcctaaatcagttgttgctcttttttcttcaccccgaggtgtagtgagagaagcagctttcaaggtgatttctctgcatggaggttatgtccagatctggaaagcacccagccaggattccgtttctggatcaggtagtgcaatgtcaagagcagaaagaatccagtccaaaccctatgagatgagtaatgttatattcactttacagatggataaattgaggagcagagatgaaacggctgtcgcaagatcactcaggtcggcgccaactcaattgacagttggaaaaaacccgggccgtgtttttaaagacagcgataagttcgacgccaacgatccgatcctgaaagatcagacgcaagaatggtccggttctgcaacctttacatctgacggaaaaatccgtttattctacactgactattccggtaaacattacggcaaacaaagcctgacaacagcgcaggtaaatgtgtcaaaatctgatgacacactcaaaatcaacggagtggaagatcacaaaacgatttttgacggagacggaaaaacatatcagaacgttcagcagtttatcgatgaaggcaattatacatccggcgacaaccatacgctgagagaccctcactacgttgaagacaaaggccataaataccttgtattcgaagccaacacgggaacagaaaacggataccaaggcgaagaatctttatttaacaaagcgtactacggcggcggcacgaacttcttccgtaaagaaagccagaagcttcagcagagcgctaaaaaacgcgatgctgagttagcgaacggcgccctcggtatcatagagttaaataatgattacacattgaaaaaagtaatgaagccgctgatcacttcaaacacgggattttgccgatttcggaaccaccatcaaacaggattttcgcctgctggggcaaaccagcgtggaccgcttgctgcaactctctcagggccaggcggtgaagggcaatcagctgttgcccgtctcactggtgaaaagaaaaaccaccctggcgcccaatacgcaaaccgcctctccccgcgcgttggccgattcattaatgcagctggcacgacaggtttcccgactggaaagcgggcagtgagcgcaacgcaattaatgtga

SEQ ID NO: 24529 - DNA, 3069 bp, Homo sapiens; identical to SEQ ID NO: 7110
  SIMILAR (2293)..(3036): 961254mologous to Cloning vector pZC320 SopB,accession number U26464,Smith-Waterman Score=1172.

SEQ ID NO: 24530 - DNA, 1515 bp, Homo sapiens; identical to SEQ ID NO: 5202
  SIMILAR (535)..(1074): 931254mologous to unidentified cloning vector 29kD protein essential for the replication of mini F plasmid,accession number AB015619,Smith-Waterman Score=861.

SEQ ID NO: 24531 - DNA, 1206 bp, Homo sapiens
  SIMILAR (616)..(1197): 991254mologous to Cloning vector pZC320 SopA,accession number U26464,Smith-Waterman Score=1017.
atgatagagcgtaagaccaaggatctggctctgaaggggctacgtgttttgctcgtggaaggtaacgacccccagggaacagcctcaatgtatcacggatgggtaccagatcttcatattcatgcagaagacactctcctgcctttctatcttggggaaaaggacgatgtcacttatgcaataaagcccacttgctggccggggcttgacattattccttcctgtctggctctgcaccgtattgaaactgagttaatgggcaaatttgatgaaggtaaactgcccaccgatccacacctgatgctccgactggccattgaaactgttgctcatgactatgatgtcatagttattgacagcgcgcctaacctgggtctcggcacgattaatgtcggattttgccgatttcggaaccaccatcaaacaggattttcgcctgctggggcaaaccagcgtggaccgcttgctgcaactctctcagggccaggcggtgaagggcaatcagctgttgcccgtctcactggtgaaaagaaaaaccaccctggcgcccaatacgcaaaccgcctctccccgcgcgttggccgattcattaatgcagctggcacgacaggatcggctctgaaggggctacgtgttttgctcgtggaaggtaacgacccccagggaacagcctcaatgtatcacggatgggtaccagatcttcatattcatgcagaagacactctcctgcctttctatcttggggaaaaggacgatgtcacttatgcaataaagcccacttgctggccggggcttgacattattccttcctgtctggctctgcaccgtattgaaactgagttaatgggcaaatttgatgaaggtaaactgcccaccgatccacacctgatgctccgactggccattgaaactgttgctcatgactatgatgtcatagttattgacagcgcgcctaacctgggtatcggcacgattaatgtcgtatgtgctgctgatgtgctgattgttcccacgcctgctgagttgtttgactacacctccgcactgcagtttttcgatatgcttcgtgatctgctcaagaacgttgatcttaaagggttcgagcctgatgtacgtattttgcttaccaaatacagcaatagtaatggctctcagtccccgtggatggaggagcaaattcgggatgctgagggaagcaggttctaa

SEQ ID NO: 24532 - DNA, 939 bp, Homo sapiens
  SIMILAR (7)..(489): 991254mologous to Cloning vector pZC320 SopA,accession number U26464,Smith-Waterman Score=840.
atgttcacttatgcaataaagcccacttgctggccggggcttgacattattccttcctgtctggttctgcaccgtattgaaactgagttaatgggcaaatttgatgaaggtaaactgcccaccgatccacacctgatgctccgactggccattgaaactgttgctcatgactatgatgtcatagttattgacagcgcgcctaacctgggtatcggcacgattaatgtcgtatgtgctgctgatgtgctgattgttcccacgcctgctgagttgtttgactacacctccgcactgcagtttttcgatatgcttcgtgatctgctcaagaacgttgatcttaaagggttcgagcctgatgtacgtattttgcttaccaaatacagcaatagtaatggctctcagtccccgtggatggaggagcaaattcgggatgcctggggaagcatggttctaaaaaatgttgtacgtgagacggatgaagttggtaaagcaaccagggagcctaactggggtatcggcacgattaatgtcgtatgtgctgctgatgtgctgattgttcccacgcctgctgagttgtttgactacacctccgcaatgcagtttttcgatatgcttcgtgatgaactcaagaacgttgatcttaaagggttcgagcctgatgtacgtattttgcttaccaaatacagcaatagtaatggctctcagtccccgtggatggaggagcaaattcgggatgcctggggaagcatggttctaaaaaatgttgtacgtgaaacggatgaagttggtaaaggtcagatccggatgagaactgtttttgaacaggccattgatcaacgctcttcaactggtgcctggagaaatgctctttctatttgggaacctgtctgcaatgaaattttcgatcgtctgattaaaccacgctgggagattagataa

SEQ ID NO: 24533 - DNA, 1410 bp, Homo sapiens
  SIMILAR (756)..(4): 1001254mologous to unidentified cloning vector 29kD protein essential for the replication of mini F plasmid,accession number AB015619,Smith-Waterman Score=1309.
  misc_feature (1)...(1410): n = a,t,c or g
ctatcctgtcgtcatggaagtgatatcgcggaaggaaaatacgatatgagtcgtctggcggcctttctttttctcaatgtatgagaggcgcattggagttctgctgttgatctcattaacacagacctgcaggaagcggcggcggaagtcaggcatacgctggtaactttgaggcagctggtaacgctctatgatccagtcgattttcagagagacgatgcctgagccatccggcttacgatactgacacagggattcgtataaacgcatggcatacggattggtgatttcttttgtttcactaagccgaaactgcgtaaaccggttctgtaacccgataaagaagggaatgagatatgggttgatatgtacactgtaaagccctctggatggactgtgcgcacgtttgataaaccaaggaaaagattcatagcctttttcatcgccggcatcctcttcagggcgataaaaaaccacttccttccccgcgaaactcttcaatgcctgccgtatatccttactggcttccgcagaggtcaatccgaatatttcagcatatttagcaacatggatctcgcagataccgtcatgttcctgtagggtgccatcagattttctgatctggtcaacgaacagatacagcatacgtttttgatcccgggagagactatatgccgcctcagtgaggtcgtttgactggacgattcgcgggctatttttacgtttcttgtgattgataaccgctgtttccgccatgacagatccatgtgaagtgtgacaagtttttagattgtcacanccagaagcctcatgaccggcagacagcgctttcacaccgcacacaaacgtttcacggtccgaccccagcaccaccgctcgctcatccagcgccgaccgtgtcaacgccagcgagtacccaacatccagcgaggagacatcaggtcgctcgtccagataggtcatcaacgccgttgcctgcgcggatagcgcttcgggtgttttgcccgacaccatccacggcaccaccggaacatccacgacagaacccgaacccggccccgcagactgactcggcactcccgggggctgttcgaggatgacgtgcgcgttagtaccactgatcccgaacgacgacacccccacccgacgaacacgaccactcctgggccagggcgtgttctccgtaaggagttgaaccgtccccgccgaccaatccacctccggcgacggcgattccacgtgcaacgtgcgtggcagctgcccgtgccgcatcgccatcaccatcttgatcacaccagccacacccgccgccgcttgcgtatgaccgatgttcgacttgaccgaccccaaccacaacggccggccaggatcacgatcacggccgtaggtggcgatcagcgccagcgcgac

SEQ ID NO: 24534 - DNA, 1215 bp, Homo sapiens
  SIMILAR (325)..(1056): 1001254mologous to Cloning vector pZC320 SopA,accession number U26464,Smith-Waterman Score=1282.
atgggtctctctctcaagggccctgaatctgctcccattcctaagacaccgcaatttaataaaatcctctttaagcccatcgcagtgtacaaccggtttacgcagtttcggcttagtgaaacaaaagaaatcaccaatccgtatgccatgcgtttatacgaatccctgtgtcagtatcagcgttaccagctgcctcaaagttaccagcgtatgcctgacttccgccgccgcttcctgcaggtctgtgttaatgagatcaacagcagaactccaatgcgcctctcatacattgagaaaaagaaaggccgccagacgactcatatcgctatcagagatgccgagaaagcagggcgactaccgcacccggatatggaaattcgaggacgggttgagcaacgtgttggttatacaattgaacaaattaatcatatgcgtgatgtgtttggtacgcgattgcgacgtgctgaagacgtatttccaccggtgatcggggttgctgcccataaaggtggcgtttacaaaacctcagtttctgttcatcttgctcaggatctggctctgaaggggctacgtgttttgctcgtggaaggtaacgacccccagggaacagcctcaatgtatcacggatgggtaccagatcttcatattcatgcagaagacactctcctgcctttctatcttggggaaaaggacgatgtcacttatgcaataaagcccacttgctggccggggcttgacattattccttcctgtctggctctgcaccgtattgaaactgagttaatgggcaaatttgatgaaggtaaactgcccaccgatccacacctgatgctccgactggccattgaaactgttgctcatgactatgatgtcatagttattgacagcgcgcctaacctgggtatcggcacgattaatgtcgtatgtgctgctgatgtgctgattgttcccacgcctgctgagttgtttgactacacctccgcactgcagtttttcgatatgcttcgtgatctgctcaagaacgttgatcttaaagggttcgagcctgatgtacgaacgggtctgtcctggtgtgaccagatgcctcgcacgtgtcagtccctgaggattcaaagacgaagtagatgctggtatgcacagctgggagacctgaagatggatcacatcacaggactctttgcagacattcaccagcaccagcctggagcccagtag

SEQ ID NO: 24535 - DNA, 3384 bp, Homo sapiens; identical to SEQ ID NO: 13434
  SIMILAR (2590)..(3207): 991254mologous to unidentified cloning vector 29kD protein essential for the replication of mini F plasmid,accession number AB015619,Smith-Waterman Score=1076.

SEQ ID NO: 24536 - DNA, 1464 bp, Homo sapiens
  SIMILAR (34)..(735): 961254mologous to Cloning vector pZC320 SopA,accession number U26464,Smith-Waterman Score=1194.
  misc_feature (1)...(1464): n = a,t,c or g
atggttggatgtcntgcaaaatngcntctnaggaggggcttgctcggtacgcgattgcgactttctgaagacgtatttccaccggtgctcggggttgctgcccataaaggtggcgtggacaaaacctcagtttctgttcatcttgctcaggatctggctctgaaggggctacgtgttttgctcgtggaaggtaacgacccccagggaacagcctcaatgtatcacggatgggtaccagagcttcatattcatgcagaagacactctcctgcctttctatcttggggaaaaggacgatgtcacttatgcaataaagcccacttgctggccggggcttgacattattccttcctgtctggctctgcaccgtattgaaactgagttaatgggcaaatttgatgaaggtaaactgcccaccgatccacacctgatgctccgactggccattgaaactgttgctcatgactatgatgtcatagttattgacagcgcgcctaacctgggtatcggcacgattaatgtcgtatgtgctgctgatgtgctgattgttcccacgcctgctgagttgtttgactacacctccgcactgcagtttttcgatatgcttcgtgatctgctcaagaacgttgatcttaaagggttcgagcctgatgtacgtattttgcttaccaaatacagcaatagtaatggctctcagtccccgtggatggaggagcaaattcgggatgcctgggggaagcatggttctaaaaaatgttgtggcgtttcaaaacctggagtttctgttcatcttgctcaggatctggctctgaaggggctacgtgttttgctcgtggaaggtaacgacccccagggaacagcctcaatgtatcacggatgggtaccagatcttcatattggtgcagaagacactctcctgcctttctatcttggggaaaaggacgatgtcacttatgcaataaagcccacttgctggccggggcttgacattattccttcctgtctggctctgcaccgtattgaaactgagttaatgggcaaatttgatgaagcgcctaacctgggtatcggcacgattaatgtcgtatgtgctgctgatgtgctgattgttcccacgcctgctgagttgtttgactacacctccgcactgcagtttttcgatatgcttcgtgatctgctcaagaacgttgatcttaaagggttcgagcctgatccgctgaacaaaacagggcttgtgctgttaatgggtcttgatccaaacgatgtgacattcagttggtgtcacttcgcagtgccgcaagccaaaggcaacaatgtggttatgacaagctacatgacaaacagaggcttcttcgaggataaaaaggcaacatttgcgccaagcttcttaatgaacatcaaaggcaataaaacatccgttgtcaaaaacagcatcctggagcaaggacagctgacagtcaactaa

SEQ ID NO: 24537 - DNA, 1248 bp, Homo sapiens
  SIMILAR (427)..(930): 891254mologous to Leishmania major probable levansucrase precursor,accession number AL160371,Smith-Waterman Score=782.
atgaagaacaagaggggagtggaagatcacaaaccgatttttgacggagacgaaaaaacatatcagaacgttcagcagtttatcgatgaaggcaattatacatccggcgacaaccatacgttgagagaccctcactacgttgaagacaaagcccataaataccttgtattcgaagccaacacgggaacagaaaacggataccaaggcgaagaatctttatttaacaaagcgtactacggcggcggcacgaacttctcccgtaaagaaagccagaagcttcagcagagcgctaaaaaaaaagatgctgagttagcgaacggcgccctcggtatcatagagttaaataatgattacacattgaaaaaagtaatgaagccgctgatcacttcaaacacgatgggtcggtttctccacctttacttgggaggaaaaaaccgtttattctacactgactattccggtaatcattccggcaaaaaaagcctgccaccagcgcaggtaaatgggtcaaattctgatgccacactcaaatccaccggaggggaagatcacaaaccgatttttgccggagacggaaaaacatatcagaacgttcagcagtttatcgatgaaggcaattatacatccggcgacaaccatacgttgagagaccctcactacgttgaagacaaaggccataaataccttgtattcgaagccaacacgggaacagaaaacggataccaaggcgaagaatctttatttaacaaagcgtactacggcggcggcacgaacttcttccgtaaagaaagccagaagcttcagcagagcgctaaaaaacgcccccctgagttagcgaacggcgccctcggtatcatagagttaaataatgattacacattgaaaaaagtaatgaagccgctgatcacttcaaacacggtaactgataaatcgagcgcgcgaatgtttcaaaatgaacggcaaatggactgttcacggatcttcggttcaaaaattcgtataatggattttgccgatttcggaacccccatcaaacaggattttcgcctgctggggcaaaccagcgtggaccgcttgctgcaactctctcagggccaggcggtgaagggcaatcagctgttgcccgtctcactggtgaaaagaaaaaccaccctggcgcccaatacgcaaaccgcctctccccgcgcgttggccgattcattaatgcagctggcacgacaggtttcccgactggaaagcgggcagtga

SEQ ID NO: 24538 - DNA, 1428 bp, Homo sapiens; identical to SEQ ID NO: 21811
  SIMILAR (238)..(849): 951254mologous to Cloning vector pSacBII SacB,accession number U09128,Smith-Waterman Score=1040.

SEQ ID NO: 24539 - DNA, 933 bp, Homo sapiens
  SIMILAR (34)..(633): 941254mologous to Cloning vector pBACe3.6 levansucrase,accession number U80929,Smith-Waterman Score=990.
gctttgcagaactttcagcggtataccggcatacagcatgtgcatcgcataggaatggcggaacgcaattatacatcgggcgacaaccatacgctgagagaccctcactacgttgaagacaaaggccataaatactttgtattcgaagccaacacgggaacagaaaacggataccaaggcgaagaatctttatttaacaaagcgtactacggcggcggcacgaacttcttctgtaaagaaagccagaagcttcagcagagcgctaaaaaacgcgatgctgagttagcgaacggcgccctcggtatcatagagttaaataatgattacacattgaaaaaagtaatgaagccgctgatcacttcaaacacggtaactgatgaaatcgagcgcgcgaatgttttcaaaatgaacggcaaatggtacttgttcactgattcacgcggttcaaaaatcacgatcgatggtattaactcaaacgatatttacatgcttggttatgtatcaaactctttaaccggcccttacaagccgctgaacaaaacagggcttgtgctgcaaatgggtcttgatccaaacgatgtgacattcacttactctcacttcgcagtgccgcaagccaaaggcaacaatgtatgtgacaatctaaaaacttgtcacacttcacatggatctgtcatggcggaaacagcggttatcaatcacaagaaacgtaaaaatagcccgcgaatcgtccagtcccacgacctcactgaggcggcatatagtctctcccgggatcaaaaacgtatgctgtatctgttcgttgaccagatcagaaaatctgatggcaccctacaggaacatgacggtatctgcgagatccatgttgctaaatatgctgaaacactcggagtgacctctgcggaagccacgtcagttgctgctctcctttaa

SEQ ID NO: 24540 - DNA, 2787 bp, Homo sapiens; identical to SEQ ID NO: 13435
  SIMILAR (325)..(1296): 981254mologous to Cloning vector pBACe3.6 levansucrase,accession number U80929,Smith-Waterman Score=1684.

SEQ ID NO: 24541 - DNA, 1812 bp, Homo sapiens; identical to SEQ ID NO: 5673
  SIMILAR (1368)..(673): 971254mologous to Cloning vector pZC320 SopB,accession number U26464,Smith-Waterman Score=1122.

SEQ ID NO: 24542 - DNA, 855 bp, Homo sapiens
  SIMILAR (603)..(4): 991254mologous to unidentified cloning vector 29kD protein essential for the replication of mini F plasmid,accession number AB015619,Smith-Waterman Score=1046.
ctatcctgtcgtcatggaagtgatatcgcggaaggaaaatacgatatgagtcgtctggcggcctttctttttctcaatgtatgagaggcgcattggagttctgctgttgatctcattaacacagacctgcaggaagcggcggcggaagtcaggcatacgctggtaactttgaggcagctggtaacgctctatgatccagtcgattttcagagagacgatgcctgagccatccggcttacgatactgacacagggattcgtataaacgcatggcatacggattggtgatttcttttgtttcactaagccgaaactgcgtaaaccggttctgtaacccgataaagaagggaatgagatatgggttgatatgtacactgtaaagccctctggatggactgtgcgcacgtttgataaaccaaggaaaagattcatagcctttttcatcgccggcatcctcttcagggcgataaaaaaccacttccttccccgcgaaactcttcaatgcctgccgtatatccttactggcttccgcagaggtcaatccgaatattttagcatatttagcaacatggatctcgcagataccgtcatgttcctggtaggtggccataagattttcgtctttcattgccatacggaactccggatgagcattcatcaggcgggcaagaatgtgaataaaggccggataaaacttgtgcttatttttctttacggtctttaaaaaggccgtaatatccagctgaacggtctggttataggtacattgagcaactgactgaaatgcctcaaaatgttctttacgatgccattgggatatatcaacggtggtatatccagtgatttttttctccat

SEQ ID NO: 24543 - DNA, 1470 bp, Homo sapiens; identical to SEQ ID NO: 13436
  SIMILAR (715)..(1467): 991254mologous to unidentified cloning vector 29kD protein essential for the replication of mini F plasmid,accession number AB015619,Smith-Waterman Score=1305.
  misc_feature (1)...(1470): n = a,t,c or g

SEQ ID NO: 24544 - DNA, 927 bp, Homo sapiens
  SIMILAR (217)..(792): 961254mologous to Cloning vector pSacBII SacB,accession number U09128,Smith-Waterman Score=996.
  misc_feature (1)...(927): n = a,t,c or g
atggcggaaacagcggttatcaatcacaagaaacgtaaaaatagcccgcgaatcgtccagtcaaacgacctcactgaggcggcatatagtctctcccgggatcaaaaacgtatgctgtatctgttcgttgaccagatcagaaaatctgatggcaccctacaggaacatgacggtatctgcgagatccatgttgctaaatatgctgaaatattcggattgacctctgcggaagccatagctgaatacaacggctatcacgttgtgtttgctcttgcgggaagcccgaaagacgctgatgacacatcaatctacatgttttatcaaaaggtcggcgacaactcaatcgacagctggaaaaacgcgggccgtgtctttaaagacagcgataagttcgacgccaacgatccgatcctgaaagatcagacgcaagaatggtccggttctgcaacctttacatctgacggaaaaatccgtttattctacactgactattccggtaaacattacggcaaacaaagcctgacaacagcgcaggtaaatgtgtcaaaatctgatgacacactcaaaatcaacggagtggaagatcacaaaacgatttttgacggagacggaaaaacatatcagaacgttcagcagtttatcgatgaaggcaattatacatccggcgacaaccatacgctgagagaccctcactacgttgaagacaaaggccataaataccttgtattcgaagccaacacgggaacagaaaacggataccaaggcgaagaatctttatttaacanagcatatctaagaacgcaacagaaaggagttatatcggattctgcttctatgcagaatgacttgtatacttgggctgaaaagctttttaaacaccaggacaaaaattctgtgggccatttgagtgtaaaggctttgtcctaa

SEQ ID NO: 24545 - DNA, 1887 bp, Homo sapiens
  SIMILAR (1)..(975): 921254mologous to Cloning vector pZC320 SopA,accession number U26464,Smith-Waterman Score=1554.
atgaaactcatggaaacacttaaccagtgcataaacgctggtcatgaaatgacgaaggctatcgccattgcacagtttaatgatgacagcccggaagcgaggaaaataacccggcgctggagaataggtgaagcagcggatttagttggggtttcttctcaggctatcagagatgccgagaaagcagggcgactaccgcacccggatatggaaattcgaggacgggttgagcaacgtgttggttatacaattgaacaaattaatcatatgcgtgatgtgtttggtacgcgattgcgacgtgctgaagacgtatttccaccggtgatcggggttgctgcccataaaggtggcgtttacaaaacctcagtttctgttcatcttgctcaggatctggctctgaaggggctacgtgttttgctcgtggaaggtaacgacccccagggaacagcctcaatgtatcacggatgggtaccagatcttcatattcatgcagaagacactctcctgcctttctatcttggggaaaaggacgatgtcacttatgcaataaagcccacttgctggccggggcttgacattattccttcctgtctggctctgcaccgtattgaaactgagttaatgggcaaatttgatgaaggtaaactgcccaccgatccacacctgatgctccgactggccattgaaactgttgctcatgactatgatgtcatagttattgacagcgcgcctaacctgggtatcggcacgattaatgtcgtatgtgctgctgatgtgctgattgttcccacgcctgctgagttgtttgactacacctccgcactgcagtttttcgatatgcttcgtgatctgctcaagaacgttgatcttaaagggttcgagcctgatcacgagaacttcatgaagcatacacaagtatcaatagctgaatcaagtggaagaaagatatcacagattgaagatcaacttaatgaaataaagcatgaagacaaaattaaagaaaaaagaataaaaaggaatgaacaaagcctccaagaaatatgggactatatgaaaagaccaaatctatgtctgattggcatacctgaaagtgatggggagaataaaaccaagttggaaaacactcttcaggatattatccaggagaactcccccaacctagcaagacaggccaacattcaaattcaggaaatacagagaacaccacaagatactcttcaagaagagcaacccccaagacatataattgtcagattcaccaaggttgaaatgaaggaaaaaatcttaagggcagccagagagaaagaaatacaaactaccatcagagaatactttaaacacctctatgcaaataaactagaaaatctagaagaaatggataaattcctggacacatataccctcccaagtctacaccaggaagaagttgaatccctgaatagaccaataacaagttctgcaattcaggcagtaattaatagcctaccaaccaaaaaaattcaaggactagatggattcacagccaaattctaccagaggaacaaggaggtgcttgtactgttccttctgaaactattccaaacaaaagaaaaagaaggactcctccctaagtcattttatgaggccagcatcatcctgataccaaaacctggcagagacacaaccaaaaacgaaaatttcagcccaatatctctgatgaatattgatgtgaaaatcctcagtaaaacactggcaaaccaaatccagcagcacatcaaaaagcttttccaccatgatcaagctggcttcatccctgggatgcaaggctggttcaacacatgcaaatcaataaacataatccatcacataaacagaaccaatgacaaaaccacaggattatctcaatag

SEQ ID NO: 24546 - DNA, 1134 bp, Homo sapiens; identical to SEQ ID NO: 21674
  SIMILAR (1)..(687): 921254mologous to Cloning vector pZC320 SopA,accession number U26464,Smith-Waterman Score=1093.

SEQ ID NO: 24547 - DNA, 3300 bp, Homo sapiens; identical to SEQ ID NO: 21675
  SIMILAR (482)..(562): 741254mologous to Cloning vector pZC320 SopB,accession number U26464,Smith-Waterman Score=91.
  misc_feature (1)...(3300): n = a,t,c or g

SEQ ID NO: 24548 - DNA, 1794 bp, Homo sapiens
  SIMILAR (865)..(1791): 991254mologous to Cloning vector pBACe3.6 levansucrase,accession number U80929,Smith-Waterman Score=1610.
atgcctgcaagcggtaacgaaaacgatttgaatatgccttcaggaacaatagaaatcttcgtgcggtgttacgttgaagtggagcggattatgtcagcatggacagaacaacctaatgaacacagaaccatgatgtggtctgtccttttacagccatgtgacaatctaaaaacttgtcacacttcacatggatctgtcatggcggaaacagcggttatcaatcacaagaaacgtaaaaatagcccgcgaatcgtccagtcaaacgacctcactgaggcggcatatagtctctcccgggatcaaaaacgtatgctgtatctgttcgttgaccagatcagaaaatctgatggcaccctacaggaacatgacggtatctgcgagatccatgttgctaaatatgctgaaatattcggattgacctctgcggaagccagtaaggatatacggcaggcattgaagagtttcgcggggaaggaagtggttttttatcgccctgaagaggatgccggcgatgaaaaaggctatgaatcttttccttggtttatcaaacgtgcgcacagtccatccagagggcttacagtgtacatatcaacccatatctcattcccttctttatcgggttacagaaccggtttacgcagtttcggcttagtgaaacaaaagaaatcaccaatccgtatgccatgcgtttatacgaatccctgtgtcagtatcgtaagtcttgaatcaaattatgttaatgttaaattgaggaacatggcagttaatttgcattatttagatgatacagaatgtttgcatttaatgtttgtggtaagggtaatggcttatacagtccatgctccacaatcagatgaagttaggtccggttactgcacctttacatctgacggaaaaatccgtttattctacactgactattccggtaaacattacggcaaacaaagcctgacaacagcgcaggtaaatgtgtcaaaatctgatgacacactcaaaatcaacggagtggaagatcacaaaacgatttttgacggagacggaaaaacatatcagaacgttcagcagtttatcgatgaaggcaattatacatccggcgacaaccatacgctgagagaccctcactacgttgaagacaaaggccataaataccttgtattcgaagccaacacgggaacagaaaacggataccaaggcgaagaatctttatttaacaaagcgtactacggcggcggcacgaacttcttccgtaaagaaagccagaagcttcagcagagcgctaaaaaacgcgatgctgagttagcgaacggcgccctcggtatcatagagttaaataatgattacacattgaaaaaagtaatgaagccgctgatcacttcaaacacggtaactgatgaaatcgagcgcgcgaatgttttcaaaatgaacggcaaatggtacttgttcactgattcacgcggttcaaaaatgacgatcgatggtattaactcaaacgatatttacatgcttggttatgtatcaaactctttaaccggcccttacaagccgctgaacaaaacagggcttgtgctgcaaatgggtcttgatccaaacgatgtgacattcacttactctcacttcgcagtgccgcaagccaaaggcaacaatgtggttatcacaagctacatgacaaacagaggcttcttcgaggataaaaaggcaacatttgcgccaagcttcttaatgaacatcaaaggcaataaaacatccgttgtcaaaaacagcatcctggagcaaggacagctgacagtcaactaa

SEQ ID NO: 24549 - DNA, 898 bp, Homo sapiens; identical to SEQ ID NO: 21676
  SIMILAR (412)..(897): 921254mologous to Cloning vector pZC320 SopB,accession number U26464,Smith-Waterman Score=752.

SEQ ID NO: 24550 - DNA, 3288 bp, Homo sapiens; identical to SEQ ID NO: 13199
  SIMILAR (1419)..(4): 991254mologous to Cloning vector pBACe3.6 levansucrase,accession number U80929,Smith-Waterman Score=2463.

SEQ ID NO: 24551 - DNA, 1257 bp, Homo sapiens
  SIMILAR (400)..(1008): 991254mologous to Cloning vector pSacBII SacB,accession number U09128,Smith-Waterman Score=1066.
atgacgcaactcaatcaagaaacagtcaaaatcactcagcaaaacaggctgaatgcaaaatccagcagtggggtttaccttctgcctggagcgaaaacaccggcaagactggaaagccagatcggtactttacgtatgtcgctggtgaatattacgcctgatgcagatggcaccacccttacactacgtattcagggtgagtcgaatgatcccttgcccgcattcagcggaactgttgaatatgggcaaattcagggaacaatagacaactttcaggaaatcaatgtgcagaatcaattgattaatgcccctgccagcgtcctcgcccccagcgatgttgatattccgttacagttaaaggggatttctgtggatcagttaggctttgtacaggatacccgtttattctacactgactattcctgtaaacattacggcaaacaaagcctcacaacagcgcaggtaaatgtgtcaaaatctgatgacacactcaaaatcaacggagtggaagatcacaaaacgatttttgacggagacggaaaaacatatcagaacgttcagcagtttatcgatgaaggcaattatacatccggcgacaaccatacgctgagagaccctcactacgttgaagacaaaggccataaataccttgtattcgaagccaacacgggaacagaaaacggataccaaggcgaagaatctttatttaacaaagcgtactacggcggcggcacgaacttcttccgtaaagaaagccagaagcttcagcagagcgctaaaaaacgcgatgctgagttagcgaacggcgccctcggtatcatagagttaaataatgattacacattgaaaaaagtaatgaagccgctgatcacttcaaacacggtaactgatgaaatcgagcgcgcgaatgttttcaaaatgaacggcaaatggtacttgttcactgattcacgcggttcaaaaatgacgatcgatggtattaactcaaacgatatttacatgcttggacgcgatatgttcgacgccaacgatccgatcctgaaagatcagacgcaagaatggtccggttctgcaacctttacatctgacggaaaaatccgtttattctacactgactattccggtaaacattacggcaaacaaagcctgacaccagcgccggtaaaatggtgtcaaaatctggtgacccccctcaaaaattgggggggagggaagaatccaaaacgatttttggccgggaccggaaaaactttttga

SEQ ID NO: 24552 - DNA, 1116 bp, Homo sapiens; identical to SEQ ID NO: 7376
  SIMILAR (1)..(852): 951254mologous to Cloning vector pZC320 SopA,accession number U26464,Smith-Waterman Score=1388.
  misc_feature (1)...(1116): n = a,t,c or g

SEQ ID NO: 24553 - DNA, 1176 bp, Homo sapiens; identical to SEQ ID NO: 7113
  SIMILAR (565)..(1161): 831254mologous to Cloning vector pZC320 SopA,accession number U26464,Smith-Waterman Score=842.

SEQ ID NO: 24554 - DNA, 1980 bp, Homo sapiens; identical to SEQ ID NO: 5204
  SIMILAR (190)..(786): 951254mologous to Cloning vector pZC320 SopB,accession number U26464,Smith-Waterman Score=932.
  misc_feature (1)...(1980): n = a,t,c or g

SEQ ID NO: 24555 - DNA, 1932 bp, Homo sapiens; identical to SEQ ID NO: 5205
  SIMILAR (418)..(1038): 911254mologous to unidentified cloning vector 29kD protein essential for the replication of mini F plasmid,accession number AB015619,Smith-Waterman Score=970.
  misc_feature (1)...(1932): n = a,t,c or g

SEQ ID NO: 24556 - DNA, 837 bp, Homo sapiens
  SIMILAR (277)..(735): 871254mologous to Cloning vector pZC320 SopB,accession number U26464,Smith-Waterman Score=645.
  misc_feature (1)...(837): n = a,t,c or g
atgggcaaatttgatgaaggtaaactgcccaccgatccacacctgatgctccgactggccattgaaactgttgctcatgactatgatgtcatagttattgacagcgcgcctaacctgggtatcggcacgattaatgtcgtatgtgctgctgatgtgctgattgttcccacgcctgctgagttgtttgactacacctccgcactgcagtttttcgatatgcttcgtgatctgctcaagaacgttgatcttaaagggttcgagcctgatgtacgtatggtgctccggggtgatagtgttgagaagacctctcgggtatggtcaggtaatgaacgtgaccaggagctgcttactgaggacgcactggatgatctcatcccttcttttctactgactggtcaacagacaccggcgttcggtcgaagagtatctggtgtcatagaaattgccgatgggagtcgccgtcgtaaagctgctgcacttaccgaaagtgattatcgtgttctggttggcgagctggatgatgagcagatggctgcattatccagattgggtaacgattatcgcccaacaagtgcttatgaacgtggtcagcgttatgcaagccgattgcagaatgaatttgctggaaatatttctgcgctggctgatgcggaaaatatttcacnagaatacctcttcatcgccggcatcctcttcagggcgataaaaaaccacttccttccccgcgaaactcttcaatgcctgccgtatatccttactggcttccgcagaggtcaatccgaatatttcagcatatttagcaacatggatctcgcagataccgtcatgttcctgtag

SEQ ID NO: 24557 - DNA, 1767 bp, Homo sapiens
  SIMILAR (253)..(489): 981254mologous to unidentified cloning vector 29kD protein essential for the replication of mini F plasmid,accession number AB015619,Smith-Waterman Score=395.
  misc_feature (1)...(1767): n = a,t,c or g
atgggaaaaccgcatctggtngctacgtctnactcgggtcntanagnaacccccaatccgtatgccatgcgtttatacgaatccctgtgtcagtatcgtaagccggatggctcaggcatcgtctctctgaaaatcgactggatcatagagcgttaccagctgcctcaaagttaccagcgtatgcctgacttccgccgccgcttcctgcagtgtgacaatctaaaaacttgtcacacttcacatggatctgtcatggcggaaacagcggttatcaatcacaagaaacgtaaaaatagcccgcgaatcgtccagtcaaacgacctcactgaggcggcatatagtctctcccgggatcaaaaacgtatgctgtatctgttcgttgaccagatcagaaaatctgatggcaccctacaggaacatgacggtatctgcgagatccatgttgctaaatatgctgaaatattcggattgacctctgcggaagccactgctgtacttaccgaaagtgattatcgtgttctggttggcgagctggatgatgagcagatggctgcattatccagattgggtaacgattatcgcccaacaagtgcttatgaacgtggtcagcgttatgcaagccgattgcagaatgaatttgctggaaatatttctgcgctggctgatgcggaaaatatttcacaacattttgaggcatttcagtcagttgctcaatgtacctataaccagaccgttcagctggatattacggcctttttaaagaccgtaaagaaaaataagcacaagttttatccggcctttattcacattcttgcccgcctgatgaatgctcatccggagttccgtatggcaatgaaagacgggtttattgagaatatgtttttcgtctcagccaatccctgggtgagtttcaccagttttgatttaaacgtggccaatatggacaacttcttcgcccccgttttcaccatgggcaaatattatacgcaaggcgacaaggtgctgatgccgctggcgattcannagaaaccccctcctcgatatagggtcaccgtcgacagcgacacacttgcatcggatgcagcccggttaacgtgccggcacggcctgggtaaccagnagaaaaacatcaccaatccgtatgccatgcgtttatacgaatccctgtgtcagtatcgtaagccggatggctcaggcatcgtctctctgaaaatcgactggatcatagagcgttaccagctgcctcaaagttaccagcgtatgcctgacttccgccgccgcttcctgcagacaccggcgttcggtcgaagagtatctggtgtcatagaaattgccgatgggagtcgccgtcgtaaagctgctgcacttaccgaaagtgattatcgtgttctggttggcgagctggatgatgagcagatggctgcattatccagattgggtaacgattatcgcccaacaagtgcttatgaacgtggtcagcgttatgcaagccgattgcagaatgaatttgctggaaatatttctgcgctggctgatgcggaaaatatttcacgtaagattattacccgctgtatcaacaccgccaaattgcctaaatcagttgttgctcttttttctcaccccggtgaactatctgcccggtcagaccgacgatacgagtgggaccgtggtcccagtctgattatcagaccgacgatacgagtgggaccgtggtcccagactaataatcagaccgacgatacgagtgggaccgtggtcccagactaa

SEQ ID NO: 24558 - DNA, 1774 bp, Homo sapiens
  SIMILAR (239)..(931): 851254mologous to Cloning vector pSacBII SacB,accession number U09128,Smith-Waterman Score=1007.
ggattttgccgatttcggaaccaccatcaaacaggattttcgcctgctggggcaaaccagcgtggaccgcttgctgcaactctctcagggccaggcggtgaagggcaatcagctgttgcccgtctcactggtgaaaagaaaaaccaccctggcgcccaatacgcaaaccgcctctccccgcgcgttggccgattcattaatgcagctggcacgacaggtttcccgactggaaagcgggcagttgggggacaaattcaattgccagtgggaaaaacccgggccgtgttctttaaagccagccgataagtttgacgcccaacgatccggatctgaaaagatcagacgcaagaatggtccggtttctgcaacttttacatctgacggaaaaatcggtttattttacactgactatcccggtaaacattacggcaaacaaagcctgacaacagcgcaggtaaatgtgtcaaaatctgatgacacactcaaaatcaacggagtggaagatcacaaaacgatttttgacggagacggaaaaacatatcagaacgttcagcagtttatcgatgaaggcaattatacatccggcgacaaccatacgctgagagaccctcactacgttgaagacaaaggccataaataccttgtattcgaagccaacacgggaacagaaaacggataccaaggcgaagaatctttatttaacaaagcgtactacggcggcggcacgaacttcttccgtaaagaaagccagaagcttcagcagagcgctaaaaaacgcgatgctgagttagcgaacggcgccctcggtatcatagagttaaataatgattacacattgaaaaaagtaatgaagccgctgatcacttcaaacacggtaactgatgaaatcgagcgcgcgaatgttttcaaaatgaacggcaaatggttgttcaaatactgcatgctgctgctatttttcaaaattccttttgaatccatagatcccccttctgagttttcttgcagttcattgttaaaccaggttgcttgtgctgtacatcaatgcttcacacactttagcatagaaaagaaccccctgacaccggcgttcggtcgaagagtatctggtgtcatagaaattgccgatgggagtcgccgtcgtaaagctgctgcacttaccgaaagtgattatcgtgttctggttggcgagctggatgatgagcagatggctgcattatccagattgggtaacgattatcgcccaacaagtgcttatgaacgtggtcagcgttatgcaagccgattgcagaatgaatttgctggaaatatttctgcgctggctgatgcggaaaatatttcacgtaagattattacccgctgtatcaacaccgccaaattgcttaaatcagttgttgctcttttttctcaccccggtgaactatctgcccggtcaggtgatgcacttcaaaaagcctttacagataaagaggaattacttaagcagcaggcatctaaccttcatgagcagaaaaaagctggggtgatatttgaagctgaagaagttatcactcttttaacttctgtgcttaaaacgtcatctgcatcaagaactagtttaagctcacgacatcagtttgctcctggagcgacagtattgtataagggcgataaaatggtgcttaacctggacagttgctcatactatcctatgtatatcaccaatgtaacaacagctgtttttattgctgctgtcattgtgctggaaaagcgcaaacatgtttgtacagctttctaa

SEQ ID NO: 24559 - DNA, 1341 bp, Homo sapiens; identical to SEQ ID NO: 4994
  SIMILAR (814)..(1338): 981254mologous to unidentified cloning vector 29kD protein essential for the replication of mini F plasmid,accession number AB015619,Smith-Waterman Score=916.

SEQ ID NO: 24560 - DNA, 4289 bp, Homo sapiens; identical to SEQ ID NO: 21816
  SIMILAR (3499)..(3534): 1001254mologous to Cloning vector pSacBII SacB,accession number U09128,Smith-Waterman Score=69.
  misc_feature (1)...(4289): n = a,t,c or g

SEQ ID NO: 24561 - DNA, 2034 bp, Homo sapiens
  SIMILAR (682)..(1224): 1001254mologous to Cloning vector pBACe3.6 levansucrase,accession number U80929,Smith-Waterman Score=954.
  misc_feature (1)...(2034): n = a,t,c or g
atgaaactcatggaaacacttaaccagtgcataaacgctggtcatgaaatgacgaaggctatcgccattgcacagtttaatgatgacagcccggaagcgaggaaaataacccggcgctggagaataggtgaagcagcggatttagttggggtttcttctcaggctatcagagatgccgagaaagcagggcgactaccgcacccggatatggaaattcgaggacgggttgagcaacgtgttggttatacaattgaacaaattaatcatatgcgtgatgtgtttggtacgcgattgcgacgtgctgaagacgtatttccaccggtgatcggggttgctgcccataaagaaaacactctcctgcctttctatcttggggaaaagggcgatgtcacttatgccataaagccacttgctgggcggggcttgacatatttcttcctgtctggctctgcccggattgaaaatgagttaatgggcaaatttgttgaaaggaaactggccacccatacaaccttaagcttcgactggccattggaaacgaccccgcagctactcccaccgcacatcctctcgccggtcttcgcgtctgcgtctccctcccgctgttggcgcgttgcttcgggcaagtactgcaaggtgttccggggctctggattccaagcccagnagatcccccaacctacgctgagagaccctcactacgttgaagacaaaggccataaataccttgtattcgaagccaacacgggaacagaaaacggataccaaggcgaagaatctttatttaacaaagcgtactacggcggcggcacgaacttcttccgtaaagaaagccagaagcttcagcagagcgctaaaaaacgcgatgctgagttagcgaacggcgccctcggtatcatagagttaaataatgattacacattgaaaaaagtaatgaagccgctgatcacttcaaacacggtaactgatgaaatcgagcgcgcgaatgttttcaaaatgaacggcaaatggtacttgttcactgattcacgcggttcaaaaatgacgatcgatggtattaactcaaacgatatttacatgcttggttatgtatcaaactctttaaccggcccttacaagccgctgaacaaaacagggcttgtgctgcaaatgggtcttgatccaaacgatgtgacattcacttactctcacttcgcagtgccgcaagccaaaggcaacaatgtgaaccggtttacgcagtttcggcttagtgaaacaaaagaaatcaccaatccgtatgccatgcgtttatacgaatccctgtgtcagtatcgtaagccggatggctcaggcatcgtctctctgaaaatcgactggatcatagagcgttaccagctgcctcaaagttaccagcgtatgcctgacttccgccgccgcttcctgcagggccagtttgaccatgcggcgtcccctgtggaacggggtcacctccggaagatccccttcagaggaggaacaagagagtctcgggaaagaggactctcagaagcaggatacttgccacgtgaggcaggccaagcacaaaaacgcagaccttggactaaagggccgctggaaaaaatagggcttgaaaccttgcactgcgactctagaagatacccctgtcgttctaattgggtttggatttgcaccgttaaggaggggggaagagaaggaagaggcgggcgaggaaggcgagtccagctagcggctgttgcggggaccgtagccccagctgcagctccgaagaatcccccgccacggtttcggtggagcgtctgggcacgggatggagtgaaagagcgagtgcctctccaagcgggggtgggagggggtcaggctgtgcagaggagagagacagcgagaagaagccgcggctggctactgcgaatttgggattcgattgggagggaccgctcactcgggggaaatggattctttaccacggctgaccagcgttttgactttgctgttctctggcttgtggcatttaggattaacagcgacaaactgtga

SEQ ID NO: 24562 - DNA, 1041 bp, Homo sapiens; identical to SEQ ID NO: 7116
  SIMILAR (1)..(930): 951254mologous to Cloning vector pZC320 SopA,accession number U26464,Smith-Waterman Score=1553.

SEQ ID NO: 24563 - DNA, 1290 bp, Homo sapiens
  SIMILAR (1254)..(1289): 751254mologous to Cloning vector pBACe3.6 levansucrase,accession number U80929,Smith-Waterman Score=47.
  misc_feature (1)...(1290): n = a,t,c or g
atgcctgacttccgccgccgcttcctgcaggtctgtgttaatgagatcaacagcagaactccaatgcgcctctcatacattgagaaaaagaaaggccgccagacgactcatatcagttctggtgtcatagaaattgccgatgggagtcgccgtcgtaaagctgctgcacttaccgaaagtgattatcgtgttctggttggcgagctggatgatgagcagatggctgcattatccagattgggtaacgattatcgcccaacaagtgcttatgagcgtggtcagcgttatgcaagccgattgcagaatgaatttgctggaaatatttctgcgctggctgatgcggaaaatatttcacgtaagattattacccgctgtatcaacaccgccaaattgcctaaatcagttgttgctcttttttctcaccccggtgaactatctgcccggtcaggtgatgcacttcaaaaagcctttacagataaagaggaattacttaagcagcaggcatctaaccttcatgagcagaaaaaagctgggaatctctttgttccttgcatgctgcagagaattcggttttatgatccaatctggaagtcctttaaaaagtgggagaaacatgctaacaccaaacgaatgtgtaaaggaaccacagatgaaagaagtgaggtgggcaaaggcaagaacgttcagcagtgtatcgatgaaggcaattatacatccggcgacaaccatacgctgagagaccctcactacgttgaagacaaaggccataaataccttgtattcgaagccaacacgggaacagaaaacggataccaaggcgaagaatctttatttaacaaagcgtactacggcggcggcacgaacttcttccgtaaagaaagccagaagcttcagcagagcgctaaaaaacgcgatgctgagttagcgaacggcgccctcggtatcatagagttaaataatgattacacattgaaaaaagtaatgaagccgctgatcacttcaaacacggtaactgatgaaatcgagcgcgcgaatgttttcaaaatgaacggcaaatggtacttgttcactgattcacgcggttcaaaaatgacgatcgatggtattaactcaaacgatatttacatgcttggttatgtatcaaactctntaaccggcccttacaagccgctgaacaaaacagggcttgtgctgcaaatgggtcttgatccaaacgatgtgacattcacttactctcacttcgcagtgccgcaagccaaagcaacaatgtggttatcacaagctacatga

SEQ ID NO: 24564 - DNA, 1009 bp, Homo sapiens; identical to SEQ ID NO: 13444
  SIMILAR (371)..(1003): 941254mologous to unidentified cloning vector 29kD protein essential for the replication of mini F plasmid,accession number AB015619,Smith-Waterman Score=1051.

SEQ ID NO: 24565 - DNA, 1206 bp, Homo sapiens
  SIMILAR (529)..(1188): 941254mologous to Cloning vector pBACe3.6 levansucrase,accession number U80929,Smith-Waterman Score=1103.
  misc_feature (1)...(1206): n = a,t,c or g
atgccgatggggagtcgccgtcgtanagctgctgcacttacngaaagtgattatcgtgttctggttggcgagctggatgatgagcagatggctgcattatccagattgggtaacgattatcgcccaacaagtgcttatgaacgtggtcagcgttatgcaagccgattgcagaatgaatttgctggaaatatttctgcgctggctgatgcggaaaatatttcacgtaagattattacccgctgtatcaacaccgccaaattgcctaaatcagttgttgctcttttttctcaccccggtgaactatctgcccggtcaggtgatgcacttcaaaaagcctttacagataaagaggaattacttaagcagcaggcatctaaccttcatgagcagaaaaaagctggggtgatatttgaagctgaagaagttatcactcttttaacttctgtgcttaaaacgtcatctgcatcaagaactagtttaagctcacgacatcagtttgctcctggagcgacagtattgtataagggcgatacaatggtgcttaacctggacagatcacaaacgatttttgacggagacggaaaaacatatcagaacgttcagcagtttatcgatgaaggcaattatacatccggcgacaaccatacgctgagagaccctcactacgttgaagacaaaggccataaataccttgtattcgaagccaacacgggaacagaaaacggataccaaggcgaagaatctttatttaacaaagcgtactacggcggcggcacgaacttcttccgtaaagaaagccagaagcttcagcagagcgctaaaaaacgcgatgctgagttagcgaacggcgccctcggtatcatagagttaaataatgattacacattgaaaaaagtaatgaagccgctgatcacttcaaacacggtaactgatgaaatcgagcgcgcgaatgttttcaaaatgaacggcaaatggtacttgttcactgattcacgcggttcaacaaccccgatcgatggtattaactcaaacgatatttacatgcttggttatgtatcaaactctttaaccggcccttacaagccgctgaacaaaacagggcttgtgctgcaaatgggtcttgatccaaacgatgtgacattcacttactctcacttcgcagtgccgcaagccaaaggcaacaatgtaaaatcacaagctacatga

SEQ ID NO: 24566 - DNA, 1477 bp, Homo sapiens; identical to SEQ ID NO: 21594
  SIMILAR (230)..(1195): 741254mologous to Cloning vector pSacBII SacB,accession number U09128,Smith-Waterman Score=1249.
  misc_feature (1)...(1477): n = a,t,c or g

SEQ ID NO: 24567 - DNA, 1389 bp, Homo sapiens
  SIMILAR (775)..(1368): 941254mologous to Cloning vector pZC320 SopA,accession number U26464,Smith-Waterman Score=986.
  misc_feature (1)...(1389): n = a,t,c or g
atggaggaaataactgaagaagatgaaggagagaaagaaggagatgatngcttcttcgaggataaaaaggcaacatttgcgccaagcttctctatgaacatcaaaggcaataaaacatccgttgtcaaaacagcatcctggagcaaggacagcgggtaccgagctcgaattcgtaatcatgtctgggaccacgatcccactcgtgttgtcggtctgattctcggtctgggaccacggtccctcttgtcttgttcgtctgactgtccggcgtgggactgcggattccgtcagtggcctgtcctggtgcggggtgttggcgtggtcgtcggctccgtgttgaccgtgggttcccctcggtgtggcccgcccagcccgaaagacgctgatgacacatcaatctacatgttttatcaaaaggtcggcgacaactcaatcgacagctggaaaaacgcgggccgtgtctttaaagacagcgataagttttttgccaacttttcttttctgaaagatcagacgcaagagtggggggggtctgcaacctttacatctgacggaaaaatccgtttattctacactgactattccggtaaacattacggcaaacaaagcctgacaacagcgcaggtaaatgtgtcaaaatctgatgacacactcaaaatcaacggagtggaagatcacaaaacgatttttgacggagacggaaaaacatatcagaacgttcagcagtttatcgatgaaggcaattatacatccggcgacaaccatacgctgagagaccctcactacgacagcctcaatgcccacggatgggtaccagatcttcatattcatgcagaagacactctcctgcctttctatcttggggaaaaggacgatgtcacttatgcaataaagcccacttgctggccggggcttgacattattcctttctgtctggctctgcaccgtattgaaacggagttaatgggcaaatttgatgaaggtaaactgcccaccgatccacacctgatgctccgactggccattgaaactgttgctcatgactatgatgtcatagttattgacagcgcgcctaacctgggtatcggcacgattaatgtcgtatgtgctgctgatgtgctgattgttcccacgcctgctgagttgtttgactacacctccgcactgcagtttttcgatatgcttcgtgatctgctcaagaacgttgatcttaaagggttcgagcctgatgtacgtattttgcttaccaaatacagcaatagtaatggctctcagtccccggggatggaggagcaaattcgggatgcctggggaagcatggttctaaaaaatgttgtacgtgaaacggatgaagttggtaaaggcaaatccgatgagaactgtttttga

SEQ ID NO: 24568 - DNA, 2040 bp, Homo sapiens; identical to SEQ ID NO: 13445
  SIMILAR (148)..(762): 971254mologous to unidentified cloning vector 29kD protein essential for the replication of mini F plasmid,accession number AB015619,Smith-Waterman Score=1049.
  misc_feature (1)...(2040): n = a,t,c or g

SEQ ID NO: 24569 - DNA, 777 bp, Homo sapiens
  SIMILAR (292)..(759): 961254mologous to Cloning vector pZC320 SopA,accession number U26464,Smith-Waterman Score=788.
atgcgtgttgagattacctctcgggtatggtcaggtaatgaacgtgaccaggagctgcttactgaggacgcactggatgatctcatcccttcttttctactgactggtcaacagacaccggcgctcggtcgaagaggatctgttgtcataaaaattgccgatgggagtcgccgtcgtcaagctgctgcacttaccgaaagtgattatcgtgatctggttggcgagctgcatgatgagccagatggctgcattatccagatcgggctacgatcatcgcccatcacaagacctctcctgcctttctatcttggggaaaaggacgatgtcacttatgcaataaagcccacttgctggccggggcttgacattattccttcctgtctggctctgcaccgtattgaaactgagttaatgggcaaatttgatgaaggtatactgcccaccgatccacacctgatgctccgactggccattgaaactgttgctcatgactatgatgtcatagttattgacagcgcgcctaacctgggtatcggcacgattaatgtcgtatgtgctgctgatgtgctgattgttcccacgcctgctgagttgtttgactacacctccgcactgcagtttttcgatatgcttcgtgatctgctcaaaaacgttgatcttgaaaggttcgagcctgatgtacgtattttgcttaccaaatacagcaatagtaatggctctcagtccccgtggatggacgaacatattcggtatgcctgggtgaaagcatggttctaa

SEQ ID NO: 24570 - DNA, 1947 bp, Homo sapiens
  SIMILAR (985)..(1482): 991254mologous to Cloning vector pZC320 SopB,accession number U26464,Smith-Waterman Score=811.
acggaaaaacaaattcagaacgttcagcagtttatcgatgaaggcaattatacatccggggacaaccaaacgttgagagaccctcactacgttgaagacaaaggccataaataccttgtattcgaagccaacacgggaacagaaaacggataccaaggcgaagaatctttatttaacaaagcgtactacggcggcggcacgaacttcttccgtaaagaaagccagaagcttcagcagagcgctaaaaaacgcgatgctgagttagcgaacggcgccctcggtatcatagagttaaataatgattacacattgaaaaaagtaatgaagccgctgatcacttcaaacacggtaactgatgaaatcgagcgcgcgaatgttttcaaaatgaacggcaaatgggattttgccgatttcggaaccaccatcaaacaggattttcgcctgctggggcaaaccagcgtggaccgcttgctgcaactctctcagggccaggcggtgaagggcaatcagctgttgcccgtctcactggtgaaaagaaaaaccaccctggcgcccaatacgcaaaccgcctctccccgcgcgttggccgattcattaatgcagctggcacgacaggtttcccgactggaaagcgggcaggattttgccgatttcggaaccaccatcaaacaggattttcgcctgctggggcaaaccagcgtggaccgcttgctgcaactctctcagggccaggcggtgaagggcaatcagctgttgcccgtctcactggtgaaaagaaaaaccaccctggcgcccaatacgcaaaccgcctctccccgcgcgttggccgattcattaatgcagctggcacgacaggtttcccgactggaaagcgggcagactgggcaacaaacaccggcgttgggtcgaagagaatgtggggtcatagcaaatgccgatggaagtacccgtcgtaaagatgctgcgctcaccgaaagtgataatcggacaccggcgttcggtcgaagagtatctggtgtcatagaaattgccgatgggagtcgccgtcgtaaagctgctgcacttaccgaaagtgattatcgtgttctggttggcgagctggatgatgagcagatggctgcattatccagattgggtaacgattatcgcccaacaagtgcttatgaacgtggtcagcgttatgcaagccgattgcagaatgaatttgctggaaatatttctgcgctggctgatgcggaaaatatttcacgtaagattattacccgctgtatcaacaccgccaaattgcctaaatcagttgttgctcttttttctcaccccggtgaactatctgcccggtcaggtgatgcacttcaaaaagcctttacagataaagaggaattacttaagcagcaggcatctaaccttcatgagcagaaaaaagctggggtgatatttgaagctgaagaagttatcactcttttaacttctgtgcttaaaacgctttttgccgatttcggaaccaccatcaaacaggattttcgcctgctggggcaaaccagcgtggaccgcttgctgcaactctctcagggccaggcggtgaagggcaatcagctgttgcccgtctcactggtgaaaagaaaaaccaccctggcgcccaatacgcaaaccgcctctccccgcgcgttggccgattcattaatgcagctggcacgacaggtttcccgactggaaagcgggcacgctctgctgaagcttctggctttcttccgggaagaagttcgtgccgccgccgtagtacgctttgttacacaaagattcttcgccttggtatccgttttctgttcccgtgttggcttcgaatacaaggtatacacggggggggaactaaccccaaaaacaaccacaaaaaaccaacaaaggccccagcgcgccagcggacaaccgcccggcacccaaccacgctag

SEQ ID NO: 24571 - DNA, 1137 bp, Homo sapiens
  SIMILAR (517)..(1134): 981254mologous to unidentified cloning vector 29kD protein essential for the replication of mini F plasmid,accession number AB015619,Smith-Waterman Score=1065.
  misc_feature (1)...(1137): n = a,t,c or g
atgaaactcatggaaacacttaaccagtgcataaacgctggtcatgaaatgacgaaggctatcgccattgcacagtttaatgatgacagcccggaagcgaggaaaataacccggcgctggagaataggtgaagcagcggatttagttggggtttcttctcaggctatcagagatgccgagaaagcagggcgactaccgcacccggatatggaaattcgaggacgggttgagcaacgtgttggttatacaattgaacaaattaatcatatgcgtnatggattttgccgatttcggaaccaccatcaaacaggattttcgcctgctggggcaaaccagcgtggaccgcttgctgcaactctctcagggccaggcggtgaagggcaatcagctgttgcccgtctcactggtgaaaagaaaaaccaccctggcgcccaatacgcaaaccgcctctccccgcgcgttggccgattcattaatgcagctggcacgacaggtttcccgactggaaagcgggcaatcagaaaatctgatggcacctacagggaacatgacggtatctgcgagatccatgttgctaaatatgctgaaatattcggattgacctctgcggaagccagtaaggatatacggcaggcattgaagagtttcgcggggaaggaagtggttttttatcgccctgaagaggatgccggcgatganaaaggctatgaatcttttccttggtttatcaaacgtgcgcacagtccatccagagggctttacagtgtacatatcaacccatatctcattcccttctttatcgggttacagaaccggtttacgcagtttcggcttagtgaaacaaaagaaatcaccaatccgtatgccatgcgtttatacgaatccctgtgtcagtatcgtaagccggatggctcaggcatcgtctctctgaaaatcgactggatcatagagcgttaccagctgcctcaaagttaccagcgtatgcctgacttccgccgccgcttcctgcaggtctgtgttaatgagatcaacagcagaactccaatgcgcctctcatacattgagaaaaacaaaggccgccagacgactcatatcgtattttccttccgcgatatcacttccatgacgacaggatag

SEQ ID NO: 24572 - DNA, 1776 bp, Homo sapiens; identical to SEQ ID NO: 15755
  SIMILAR (1)..(555): 1001254mologous to Cloning vector pZC320 SopA,accession number U26464,Smith-Waterman Score=981.

SEQ ID NO: 24573 - DNA, 1512 bp, Homo sapiens
  SIMILAR (559)..(1227): 951254mologous to Cloning vector pSacBII SacB,accession number U09128,Smith-Waterman Score=1110.
atggaagatgaaatgaatgaaatgaagcaagaagggaagtttagagaaaaaagaataaaaagaaatgagcaaagcctccaagaaatatgggactatgtgaaaagaccaaatctacgtctgattggtgtacctgaaagtgatggggagaatggaaccaagttggaaaacactctgcaggatgttatccaggagaacttccccaatctagcaaggcaggccaacgttcagattcaggaaacacagagaacgccacaaagatactcctcgagaagagcaactccaagacatataattgtcagattcaccaaagttgaaatgaaggaaaaaatgttaagggcagccagagagaaaggaggagcgactcaagccttcgcgaaagaaaataaccaaaaagcatacaaagaaacgtacggcgtctctcatattacacgccatgatatgctgcagatccctaaacagcagcaaaacgaaaaataccaagtgcctcaattcgatcaatcaacgattaaaaatattgagtctgcaaaaggacttgatgtgtgggacagctggccgctgcaaaacgctgacggaacagtagctgaatacaacggctatcacgtcggcgacaactcaatcgacagctggaaaaacgcgggccgtgtctttaaagacagcgataagttcgacgccaacgatccgatcctgaaagatcagacgcaagaatggtccggttctgcaacctttacatgtgacggaaaaatccgtttattctacactgactattccggtaaacattacggcaaacaaagcctgacaacagcgcaggtaaatgtgtcaaaatctgatgacacactcaaaatcaacggagtggaagatcacaaaacgatttttgacggagacggaaaaacatatcagaacgttcagcagtttatcgatgaaggcaattatacatccggcgacaaccatacgctgagagaccctcactacgttgaagacaaaggccataaataccttgtattcgaagccaacacgggaacagaaaacggataccaaggcgaagaatctttatttaacaaagcgtactacggcggcggcacgaacttcttccgtaaagaaagccagaagcttcagcagagcgctaaaaaacgcgatgctgagttagcgaacggcgccctcggtatcatagagttaaataatgattacacattgaaaaaagtaatgaagccgctgatcacttcaaacacgaatttacaaagccaaagacttgataacagcttcttagatgctaacgaattcacttcaaagaaactcagcagctcacagtcagaagataccaaaaatcaaggcttcttccaggaagaaagtatagtaacacaagaattagactctgaagatttacctaaggctctgaagacagcagcggacctcctagcacagtgctcgagctctgctaagggacagactgcctcctcaagtggatccctgacccctgtgcctcctgactgggagacacctcctagcagcagttga

SEQ ID NO: 24574 - DNA, 894 bp, Homo sapiens; identical to SEQ ID NO: 13448
  SIMILAR (1)..(561): 991254mologous to Cloning vector pZC320 SopB,accession number U26464,Smith-Waterman Score=931.

SEQ ID NO: 24575 - DNA, 1077 bp, Homo sapiens
  SIMILAR (172)..(621): 981254mologous to Cloning vector pZC320 SopB,accession number U26464,Smith-Waterman Score=726.
atggacaacttcttcgcccccgttttcaccatgggcaaatattatacgcaaggcgacaaggtgctgatgccgctggcgattcaggttcatcatgccgtttgtgatggcttccatgtcggcagaatgcttaatgaattacaacagtactgcgatgagtggcagggcggggcattgggtaccgattatcgcccaacaagggtttatgaacgtggtcagcgttatgcaagccgattgcagaatgaatttgctggaaatatttctgcgctggctgatgcggaaaatatttcacgtaagattattacccgctgtatcaacaccgccaaattgcctaaatcagttgttgctcttttttctcaccccggtgaactatctgcccggtcaggtgatgcacttcaaaaagcctttacagataaagaggaattacttaagcagcaggcatctaaccttcatgagcagaaaaaagctggggtgatatttgaagctgaagaagttatcactcttttaacttctgtgcttaaaacgtcatctgcatcaagaactagtttaagctcacgacatcagtttgctcctggagcgacagtattgtataagggcgataaaatggtgcttaacctggacagaatgaatttgttgaaaaatatttctgcgctggctgatgcggaaaatatttcacgtaagattattacccgctgtatcaacaccgccaaattgcataaatcagttgttgctcttttttctcaccccggtgaactatctgcccggtcaggtgatgcacttcaaaaagcctttacagataaagaggaattacttaagcagcaggcatctaaccttcatgagcagaaaaaagctggggtgatatttgaagctgaagaagttatcactcttttaacttctgtgcttaaaacgtcatctgcatcaagaactagtttaagctcacgacatcagtttgctcctggagcgacagtattgtataagggcgataaaatggtgcttaacctggacaggtctcgtgttccaactgagtgtatagagaaaattgaggccattcttaaggaacttgaaaagccagcaccctga

SEQ ID NO: 24576 - DNA, 1869 bp, Homo sapiens; identical to SEQ ID NO: 13450
  SIMILAR (1)..(603): 991254mologous to unidentified cloning vector 29kD protein essential for the replication of mini F plasmid,accession number AB015619,Smith-Waterman Score=1045.
  misc_feature (1)...(1869): n = a,t,c or g

SEQ ID NO: 24577 - DNA, 1101 bp, Homo sapiens; identical to SEQ ID NO: 13451
  SIMILAR (670)..(1098): 891254mologous to unidentified cloning vector 29kD protein essential for the replication of mini F plasmid,accession number AB015619,Smith-Waterman Score=664.

SEQ ID NO: 24578 - DNA, 1992 bp, Homo sapiens; identical to SEQ ID NO: 7126
  SIMILAR (1)..(438): 981254mologous to Cloning vector pZC320 SopA,accession number U26464,Smith-Waterman Score=733.

SEQ ID NO: 24579 - DNA, 848 bp, Homo sapiens; identical to SEQ ID NO: 21688
  SIMILAR (393)..(842): 921254mologous to Cloning vector pZC320 SopB,accession number U26464,Smith-Waterman Score=682.

SEQ ID NO: 24580 - DNA, 708 bp, Homo sapiens
  SIMILAR (97)..(693): 831254mologous to Cloning vector pZC320 SopA,accession number U26464,Smith-Waterman Score=842.
aaccgctttacgcagtttcggcttagtgaaacaaaagaaatcaccaatccgtatgccatgcgtttatacgaatccctgtgtcagtatcgtaagccggatggctcaggcatcgtctctctgaaaatcgactggatcatagagcgttaccagctgcctcaggaggaccagcgtatgcctgacttccgccgccgcttcctgcaggacgatgtcacttatgcaataaagcccacttgctggccggggcttgacattattgggggctgtctggctctgcaccgtattgaaactgagttaatgggcaaattggatgaaggtaaactgcccaccgatccacacctgatgctccgactggccattgaaactgttgctcatgactatgatgtcatagttattgacagcgcgcctaacctgggtatcggcacgattaatgtcgtatgtgctgctgatgtgctgattgttcccacgcctgctgagttgtttgactacacctccgcactgcagtttttcgatatgcttcgtgatctgctcaagaacgttgatcttaaagggttcgagcctgatgtacgtattttgcttaccaaatacagcaatagtaatggctctcagtccccgtggatggaggagcaaattctggatgcctggggaagcatggttctaaaaaatgttgtacctgaaacggatgaagttggtaaggtcaaatccggatga

SEQ ID NO: 24581 - DNA, 542 bp, Homo sapiens
  SIMILAR (217)..(540): 1001254mologous to Cloning vector pZC320 SopB,accession number U26464,Smith-Waterman Score=528.
atcagaaaatctgatcgcaccctacaggaccatgacggtatctgcgagatccatgttgctaaatatgctgaaatattcgcattgacctctgcggaagccagtaaggatatacggcaggcattgaagagtttcgcggggaaggaagtggttttttatcgccctgaagaggatgccggcgatgaaaaaggctatgatcttttccttggtttatcaaacattattacccgctgtatcaacaccgccaaattgcctaaatcagttgttgctcttttttctcaccccggtgaactatctgcccggtcaggtgatgcacttcaaaaagcctttacagataaagaggaattacttaagcagcaggcatctaaccttcatgagcagaaaaaagctggggtgatatttgaagctgaagaagttatcactcttttaacttctgtgcttaaaacgtcatctgcatcaagaactagtttaagctcacgacatcagtttgctcctggagcgacagtattgtataagggcgataaaatggtgcttaacctggacag

SEQ ID NO: 24582 - DNA, 678 bp, Homo sapiens
  SIMILAR (334)..(675): 971254mologous to unidentified cloning vector 29kD protein essential for the replication of mini F plasmid,accession number AB015619,Smith-Waterman Score=576.
atggcggaaacagcggttatcaatcacaagaaacgtaaaaatagcccgcgaatcgtccagtcaaacgacctcactgaggcggcatatagtctctcccgggatcaaaaacgtatgctgtatctgttcgttgaccagatcagaaaatctgatggcaccctacaggaacatgacggtatctgcgagatccatgttgctaaatatgctgaaatattcggattgacctctgcggaagccagtaaggatatacggcaggcattgaagagtttcgcggggaaggaagtggttttttatcgccctgatcctatgccggcgatgaaaaaggctatgaatcttttccttggtttatcaaacaaccggtttacgcagtttcggcttagtgaaacaaaagaaatcaccaatccgtatgccatgcgtttatacgaatccctgtgtcagtatcgtaagccggatggctcaggcatcgtctctctgaaaatcgactggatcatagagcgttaccagctgcctcaaagttaccagcgtatgcctgacttccgccgccgcttcctgcaggtctgtgttaatgagatcaacagcagaactccaatgcgcctctcatacattgagaaaaagaaaggccgccagacgactcatatcgtattttccttccgcgatatcacttccatgacgacaggatag

SEQ ID NO: 24583 - DNA, 1212 bp, Homo sapiens
  SIMILAR (295)..(1209): 811254mologous to Cloning vector pZC320 SopA,accession number U26464,Smith-Waterman Score=1255.
  misc_feature (1)...(1212): n = a,t,c or g
atgaagatgccagaaaaacatgacctgttggccgccattctcgcggcaaaggaacaaggcatcggggcaatccttgcgtttgcaatggcgtaccttcgcggcagatataatggcgttctagaggctcgaagtctgaaatcaagatgtcagcagagccatgctcttgctgaaggctctaggggagggccacctgttactggtcgatttaagtcaacctttaccgctgattcgtggaacagatactctcttccatccttaaccggaggtgggaatatcctgcattcccgaacccatcgacgaactgtttcaaggcttcttggacgtcgctggcaggaactcctgcgtgatgtgtttggtacgcgattgcgacgtgctgaagacgtattcccaccggtgatcggggttgctgcccataaaggtggcgtttacaaaacctcagtttctgttcatcttgctcaggatctggctctgaaggggctacgtgttttgctcgtggaaggtaacgacccccagggaacagcctcaatgtatcacggatgggtaccagatcttcatattcatgcagaagacactctcctgcctttctatcttggggaaaaggacgatgtcacttatgcaataaagcccacttgctggccggngcttgacattattccttcctgtctggctctgcaccgtattgaaactgagttaatgggcaaatttgatgaaggtaaactgcccaccgatccacacctgatgctccgactggccattgaaactgttgctcatgactatgatgtcatagttattgacagcgcgcctaacctgggtatcggcacgattaatgtcgtatgtgctgctgatgtgctgattgttcccacgcctgctgagttgtttgactacacctncgcactgcagtttttcgatatgcttcgtgatctgctcaagaacgttgatcttaaagggttcgagcctgatgtacgtattttgcttaccaatacagcaatagtaatggctctcagtccccgtggatggaggagcaaaatccgggatgcctggggaagcatgggtctaaaaaatgttgacgtgaaacggatgaaattgggtaaaggtcaaatccggatgagaactgtttttgaaacagccatggataaacgccttttaactggtgcctgggaaaaagcttttttttttttggaacctggcttcgaagaaaaatccaaccgctga

SEQ ID NO: 24584 - DNA, 1044 bp, Homo sapiens; identical to SEQ ID NO: 13457
  SIMILAR (292)..(1041): 971254mologous to unidentified cloning vector 29kD protein essential for the replication of mini F plasmid,accession number AB015619,Smith-Waterman Score=1267.
  misc_feature (1)...(1044): n = a,t,c or g

SEQ ID NO: 24585 - DNA, 1560 bp, Homo sapiens
  SIMILAR (756)..(4): 1001254mologous to unidentified cloning vector 29kD protein essential for the replication of mini F plasmid,accession number AB015619,Smith-Waterman Score=1309.
ctatcctgtcgtcatggaagtgatatcgcggaaggaaaatacgatatgagtcgtctggcggcctttctttttctcaatgtatgagaggcgcattggagttctgctgttgatctcattaacacagacctgcaggaagcggcggcggaagtcaggcatacgctggtaactttgaggcagctggtaacgctctatgatccagtcgattttcagagagacgatgcctgagccatccggcttacgatactgacacagggattcgtataaacgcatggcatacggattggtgatttcttttgtttcactaagccgaaactgcgtaaaccggttctgtaacccgataaagaagggaatgagatatgggttgatatgtacactgtaaagccctctggatggactgtgcgcacgtttgataaaccaaggaaaagattcatagcctttttcatcgccggcatcctcttcagggcgataaaaaaccacttccttccccgcgaaactcttcaatgcctgccgtatatccttactggcttccgcagaggtcaatccgaatatttcagcatatttagcaacatggatctcgcagataccgtcatgttcctgtagggtgccatcagattttctgatctggtcaacgaacagatacagcatacgtttttgatcccgggagagactatatgccgcctcagtgaggtcgtttgactggacgattcgcgggctatttttacgtttcttgtgattgataaccgctgtttccgccatgacagatccatgtgaagtgtgacaagtttttagattgtcacactggcttgcagccccttccttcatcttcaaagccagcagtatagcaacttcatatttctctctgactctgacttcctgcctacctcttccgcatttaaaggaccatcgtgattgcgttgcacccacatagatagtccaggataatccttgacatcgccagaaactttccccagacttggcgtccatttgcaggagatgcccccgcaagtcccagaggtgggtgggtcctggggaggcctccaggaagggcggcccctcgggccctgagcggagaatggcgaggccgcatgcactggggccacatgggccaggtccaaagaccggggtcccagtaggagccccacgcgccagcgggtgacagccctggggggcggggggaggcggcccagggctcccgggaccgcctaggcgttggggccccgcccgcaggactgtccggcaggccgcgaggatgtggagggacccgtggtccccgccccgcagggcggcggctgccgggccgggagcgaggtggcggaacggggactgtggcccgggatgcatgcgggggatgcggccgaggtgggagagggcggggtcggcggggcggtgcggggtcggcgctgtcccggagggatatactaagcccgtgccatcctcggccgtccagaggcacccagagacaacgcggtagctggcaacgtcccctgcttgggtggccgtagggaagggtgtgctagtttcgagagctgccgtgtactgtaccggctgttcggcgcgcat

SEQ ID NO: 24586 - DNA, 1125 bp, Homo sapiens; identical to SEQ ID NO: 13464
  SIMILAR (370)..(1122): 991254mologous to unidentified cloning vector 29kD protein essential for the replication of mini F plasmid,accession number AB015619,Smith-Waterman Score=1301.

SEQ ID NO: 24587 - DNA, 1218 bp, Homo sapiens
  SIMILAR (768)..(4): 871254mologous to Cloning vector pBACe3.6 levansucrase,accession number U80929,Smith-Waterman Score=1127.
ttagttgactgttagctgtccttgctccaggatgctgtttttgacaacggatgttttattgcctttgatgttcattaagaagcttggcgcaaatgttgcctttttatcctcgaagaagcctctgtttgtcatgtagcttgtgataaccacattgttgcctttggcttgcggcactgcgaagtgagagttagttaatgtcacatcgtttggatcaagacccatttgcagcacaagccctgttttgttcagcggcttgtaagggccggttaaagagtttgatacataaccaagcatgttaatatcgtttgagttaataccatcgatcgtcatttttgaaccgcgtgaatcagtgaacaagtaccatttgccgttcattttgaaaacattcgcgcgctcgatttcatcagttaccgtgtttgaagtgatcagcggcttcattacttttttcaatgtgtaatcattatttaactctatgataccgagggcgccgttcgctaactcagcatcgcgttttttagcgctctgctgaagcttctggctttctttacggaagaagttcgtgccgccgccgtagtacgctttgttaaataaagattcttcgccttggtatccgttttctgttcccgtgttggcttcgaatacaaggtatttatggcctttgtcggaatagtcagtgtagaataaacggatttttccgtcagatgtaaaggttgcagaaccggaccattcttgcgtctgatctttcaggatcggatcgttggcgtcgaacttatcgctgtctttaaagacacggcccgcgtttttccagctgtcgattgagttgtcgccgaccttttgataaaacatgtagattgatgtgtcatcagcgtctttcgggcttcccgcaagagcaaacacaacgtgatagccgttgtattcagctactgttccgtcagcgttttgcagcggccagctgtcccacacatcaagtccttttgcagactcaatatttttaatcgttgattgatcgaattgaggcacttggtatttttcgttttgctgctgtttagggatctgcagcatatcatggcgtgtaatatgagagacgccgtacgtttctttgtatgctttttggttattttctttcgcgaaggcttgagtcgctcctcctgccagaagtgcagtcgtaaaagtcagaactgtggcttgttttacaatttttttgatgttcatgttcat

SEQ ID NO: 24588 - DNA, 1746 bp, Homo sapiens; identical to SEQ ID NO: 7106
  SIMILAR (784)..(1743): 911254mologous to Cloning vector pZC320 SopB,accession number U26464,Smith-Waterman Score=1425.

SEQ ID NO: 24589 - DNA, 2694 bp, Homo sapiens
  SIMILAR (1)..(915): 971254mologous to Cloning vector pZC320 SopA,accession number U26464,Smith-Waterman Score=1549.
  misc_feature (1)...(2694): n = a,t,c or g
atgaaactcatggaaacacttaaccagtgcataaacgctggtcatgaaatgacgaaggctatcgccattgcacagtttaatgatgacagcccggaagcgaggaaaataacccggcgctggagaataggtgaagcagcggatttagttggggtttcttctcaggctatcagagatgccgagaaagcagggcgactaccgcacccggatatggaaattcgaggacgggttgagcaacgtgttggttatacaattgaacaaattaatcatatgcgtgatgtgtttggtacgcgattgcgacgtgctgaagacgtatttccaccggtgatcggggttgctgcccataaaggtggcgtttacaaaacctcagtttctgttcatcttgctcaggatctggctctgaaggggctacgtgttttgctcgtggaaggtaacgacccccagggaacagcctcaatgtatcacggatgggtaccagatcttcatattcatgcagaagacactctcctgcctttctatcttggggaaaaggacgatgtcacttatgcaataaagcccacttgctggccggggcttgacattattccttcctgtctggctctgcaccgtattgaaactgagttaatgggcaaatttgatgaaggtaaactgcccaccgatccacacctgatgctccgactggccattgaaactgttgctcatgactatgatgtcatagttattgacagcgcgcctaacctgggtatcggcacgattaatgtcgtatgtgctgctgatgtgctgattgttcccacgcctgctgagttgtttgactacacctccgcactgcagtttttcgatatgcttcgtgatctgctcaagaacgttgatcttaaagggttcgagcctgatgctttgcagaactttcagcggtataccggcatacagcatgtgcatcgcataggaatggcggaacgtatgtggtgtgaccggaacagagaacgtcacaccgtcagcagcagcggcggcaaccgcctccccaatccagaacattttgaggcatttcagtcagttgctcaatgtacctataaccagaccgttcagctggatattacggcctttttaaagaccgtaaagaaaaataagcacaagttttatccggcctttattcacattcttgcccgcctgatgaatgctcatccggagttccgtatggcaatgaaagacggtgagctggtgatatgggatagtgttcacccttgttacaccgttttccatgagcaaactgaaacgttttcatcgctctggagtgaataccacgacgatttccggcagtttctacacatatattcgcaagatgtggcgtgttacggtgaaaacctggcctatttccctaaagggtttattgagaatatgtttttcgtctcagccaatccctgggtgagtttcaccagttttgatttaaacgtggccaatatggacaacttcttcgcccccgttttcaccatgggcaaatattatacgcaaggcgacaaggtgctgatgccgctggcgattcaggttcatcatgccgtttgtgatggcttccatgtcggcagaatgcttaatgaattacaacagtactgcgatgagtggcagggcggggggtnaaaacatacgctcaatactcaaccggttgaagatacttcgttatcgacaccagctgccccgatggtggattcgttaattgcgcgcgtaggagtaatggctcgcggtaatgccattactttgcctgtatgtggtcgggatgtgaagtttactcttgaagtgctccggggtgatagtgttgagaagacctctcgggtatggtcaggtaatgaacgtgaccaggagctgcttactgaggacgcactggatgatctcatcccttcttttctactgactggtcaacagacaccggcgttcggtcgaagagtatctggtgtcatagaaattgccgatgggagtcgccgtcgtaaagctgctgcacttaccgaaagtgattatcgtgttctggttggcgagctggatgatgagcagatggctgcattatccagattgggtaacgattatcgcccaacaagtgcttatgaacgtggtcagcgttatgcaagccgattgcagaatgaatttgctggaaatatttctgcgctggctgatgcggaaaatatttcacgtaagattattacccgctgtatcaacaccgccaaattgcctaaatcagttgttgctcttttttctcaccccggtgaactatctgcccggtcaggtgatgcacttcaaaaagcctttacagataaagaggaattacttaagcagcaggcatctaaccttcatgagcagaaaaaagctggggtgatatttgaagctgaagaaggtccccggtcaggtgatgcacttcaaaaagcctttacagataaagaggaattatttaagcagcaggcatctaaccttcatgagcagaaaaaagctggggtgatatttgaagctgaagaagttatcactcttttaacttctgtgcttaaaacgtcatctgcatcaagaactagtttaagctcacgacatcagtttgctcctggagcgacagtattgtataagggcgataaaatggtgcttaacctggacaggtctcgtgttccaactgagtgtatagagaaaattgaggccattcttaaggaacttgaaaagccagcaccctga

SEQ ID NO: 24590 - DNA, 1866 bp, Homo sapiens
  SIMILAR (1270)..(1863): 981254mologous to unidentified cloning vector 29kD protein essential for the replication of mini F plasmid,accession number AB015619,Smith-Waterman Score=1021.
atggcggaaacagcggttatcaatcacaagaaacgtaaaaatagcccgcgaatcgtccagtcaaacgacctcactgaggcggcatatagtctctcccgggatcaaaaacgtatgctggatctgttcgttggccagatcaagaaatccttgcatagttgtatccctgcagattctgttcatcttgctcaagatctggctctgaaggggctacgtgttttgctcgtggaaggtaacgacccccagggaacagcctcaatgtatcacggatgggtaccagatcttcatattcatgcagaagacactctcctgcctttctatcttggggaaaaggacgatgtcacttatgcaataaagcccacttgctggccggggcttgacattattccttcctgtctggctctgcaccgtattgaaactgagttaatgggcaaatttgatgaaggtaaactgcccaccgatccacacctgatgctccgactggccattgaaactgttgctcatgactatgatgtcatagttattgacagcgcgcctaacctgggtatcggcacgattaatgtcgtatgtgctgctgatgtgctgattgttcccacgcctgctgagttgtttgactacacctccgcactgcagtttttcgatatgcttcgtgatctgctcaagaacgttgatcttaaagggttcgagcctgatgtacgtattttgcttaccaaatacagcaatagtaatggctctcagtccccgtggattgaggagcaaatatcggatgcctggggaagcatggttctaaaaaatgttcacgccatagtgactggcgatgctgtcggaatggacgatatcccgcaagaggcccggcagtaccggcataaccaagcctatgcctacagcatccagggtgacggtgccgaggatgacgatgagcgcattgttagatttcatacacgggtcaccgtcgacagcgacacacttgcatcggatgcagcccggttaacgtgccggcacggcctgggtaaccagcggaatggtggtgtcctgattgaagacaaattcgagtgcttcttctccctcactgcggtctttgctacaagagcctactatgctgtctatcatttgacgggtgccagacactcagacatcgtggtcgcacacgggtacgctggttgcaatgtcaggtttgttgcacttctgggcacaaataccaccttggagacctacttatctaatcaaggttctaatggcttttcttgtctgcattttggagaggatgtgggacaggagaggatccccatctgcgagatccatgttgctaaatatgctgaaatattcggattgacctctgcggaagccagtaaggatatacggcaggcattgaagagtttcgcggggaaggaagtggttttttatcgccctgaagaggatgccggcgatgaaaaaggctatgaatcttttccttggtttatcaaacgtgcgcacagtccatccagagggctttacagtgtacatatcaacccatatctcattcccttctttatcgggttacagaaccggtttacgcagtttcggcttagtgaaacaaaagaaatcaccaatccgtatgccatgcgtttatacgaatccctgtgtcagtatcgtaagccggatggctcaggcatcgtctctctgaaaatcgactggatcatagagcgttaccagctgcctcaaagttaccagcgtatgcctgacttccgccgccgcttcctgcaggtctgtgttaatgagatcaacagcagaactccaatgcgcctctcatacattgagaaaaagaaaggccgccagacgactcatatcgtattttccttccgcgatatcacttccatgacgacaggatag

SEQ ID NO: 24591 - DNA, 2625 bp, Homo sapiens
  SIMILAR (2522)..(2614): 521254mologous to Cloning vector pBACe3.6 levansucrase,accession number U80929,Smith-Waterman Score=73.
atgcagggcatgcaagccctagctaggacagttgatggtaaggaagaaagcctcaaccttgatcaagcttttcaatgggctggaaaaagttcttcttttgggacctgtcccaataaatttcgatcgtcgattaaccccgctggagatagaatattaagcggggcctgttatccaaaactacgtcaatactcaaccggtggagaaacttcgtattcgacaccagctgccccgatggtggattcgttaattgcgcgcgtaggagtaatggctcccggtaatgccattactttgcctgtatgtggtcgggatgtgaagtttactcttgaagtgctccggggtgatagtgttaagaagacctctcgggtatggtcaggtaatgaacgtgaccaggagctgcttactgaggacgcactggatgatctcatcccttcttttctactgactggtcaacagacaccggcgttcggtcgaagagtatctggtgtcatagaaattgccgatgggagtcgccgtcgtaaagctgctgcacttaccgaaagtgattatcgtgttctggttggcgagctggatgatgagcagatggctgcattatccagattgggtaacgattatcgcccaacaagtgcttatgaacgtggtcagcgttatgcaagccgattgcagaatgaatttgctggaaatatttctgcgctggctgatgcggaaaatatttcacgtaagattattacccgctgtatcaacaccgccaaattgcctaaatcagttgttgctcttttttctcaccccggtgaactatctgcccggtcaggtgatgcacttcaaaaagcctttacagataaagaggaattacttaagcagcaggggggatcctctagagtcggcgacaactcaatcgacagctggaaaacgcggggccgtgtctttaaagacagcgataagttcgacgccaacgatccgatcctgaaagatcagacgcaagaatggtccggttctgcaacctttacatctgacggaaaaatccgtttattctacactgactattccggtaaacattacggcaaacaaagcctgacaacagcgcaggtaaatgtgtcaaaatctgatgacacactcaaaatcaacggagtggaagatcacaaaacgatttttgacggagacggaaaaacatatcagaacgttcagcagtttatcgatgaaggcaattatacatccggcgacaaccatacgctgagagaccctcactacgttgaagacaaaggccataaataccttgtattcgaagccaacacgggaacagaaaacggataccaaggcgaagaatctttatttaacaaagcgtactacggcggcggcacgaacttcttccgtaaagaaagccagaagcttcagcagagcgctaaaaaacgcgatgctgagttagcgaacggcgccctcggtatcatagagttaaataatgattacacattgaaaaaagtaatgaagccgctgatgacttcaaacacggatctggctctgaaggggctacgtgttttgctcgtggaaggtaacgacccccagggaacagcctcaatgtatcacggatgggtaccagatcttcatattcatgcagaagacactctcctgcctttctatcttggggaaaaggacgatgtcacttatgcaataaagcccacttgctggccggggcttgacattattccttcctgtctggctctgcaccgtattgaaactgagttaatgggcaaatttgatgaaggtaaactgcccaccgatccacacctgatgctccgactggccattgaaactgttgctcatgactatgatgtcatagttattgacagcgcgcctaacctgggtatcggcacgattaatgtcgtatgtgctgctgatgtgctgattgttcccacgcctgctgagttgtttgactacacctccgcactgcagtttttcgatatgcttcgtgatctgctcaagaacaacgttcagcagtttatcgatgaaggcaattatacatccggcgacaaccatacgctgagagaccctcactacgttgaagacaaaggccataaataccttgtgtgcgaagccaacacgggaacagaaaacggataccaaggcgaagaatctttatttaacaaagcgtactacggcggcggcacgaacttcttccgtaaagaaagccagaagcttcagcagagcgctaaaaaacgcgatgctgagttagcgaacggcgccctcggtatcatagagttaaataatgattacacattgaaaaaagtaatgaagccgctgatcacttcaaacacggtaactgatgaaatcgagcgcgcgaatgttttcaaaatgaacggcaaatggtacttgttcactgattcacgcggttcaaaaatgacgatcgatggtattaactcaaacgatatttacatgcttggttatgtatcaaactctttaaccggcccttacaagccgctgaacaaaacagggcttgtgctgcaaatgggtcttgatccaaacgatgtgacattcacttactctcacttcgcagtggcgcaagccaaaggcaaacatggtggttatcacaagctacatgacaaacagaagcttctttcgagaagactttggtga

SEQ ID NO: 24592 - DNA, 1341 bp, Homo sapiens; identical to SEQ ID NO: 21692
  SIMILAR (116)..(142): 881254mologous to Leishmania major probable levansucrase precursor,accession number AL160371,Smith-Waterman Score=43.

SEQ ID NO: 24593 - DNA, 2124 bp, Homo sapiens
  SIMILAR (1)..(1017): 1001254mologous to Leishmania major probable levansucrase precursor,accession number AL160371,Smith-Waterman Score=1789.
atgaacatgaacatcaaaaaaattgtaaaacaagccacagttctgacttttacgactgcacttctggcaggaggagcgactcaagccttcgcgaaagaaaataaccaaaaagcatacaaagaaacgtacggcgtctctcatattacacgccatgatatgctgcagatccctaaacagcagcaaaacgaaaaataccaagtgcctcaattcgatcaatcaacgattaaaaatattgagtctgcaaaaggacttgatgtgtgggacagctggccgctgcaaaacgctgacggaacagtagctgaatacaacggctatcacgttgtgtttgctcttgcgggaagcccgaaagacgctgatgacacatcaatctacatgttttatcaaaaggtcggcgacaactcaatcgacagctggaaaaacgcgggccgtgtctttaaagacagcgataagttcgacgccaacgatccgatcctgaaagatcagacgcaagaatggtccggttctgcaacctttacatctgacggaaaaatccgtttattctacactgactattccggtaaacattacggcaaacaaagcctgacaacagcgcaggtaaatgtgtcaaaatctgatgacacactcaaaatcaacggagtggaagatcacaaaacgatttttgacggagacggaaaaacatatcagaacgttcagcagtttatcgatgaaggcaattatacatccggcgacaaccatacgctgagagaccctcactacgttgaagacaaaggccataaataccttgtattcgaagccaacacgggaacagaaaacggataccaaggcgaagaatctttatttaacaaagcgtactacggcggcggcacgaacttcttccgtaaagaaagccagaagcttcagcagagcgctaaaaaacgcgatgctgagttagcgaacggcgccctcggtatcatagagttaaataatgattacacattgaaaaaagtaatgaagccgctgatcacttcaaacacggtatttattcgcgataagctcatggagcggcgtaaccgtcgcacaggaaggacagagaaagcgcggatctgggaagtgacggacagaacggtcaggacctggattggggaggcggttgccgccgctgctgctgacggtgtgacgttctctgttccggtcacaccacatacgttccgccattcctatgcgatgcacatgctgtatgccggtataccgctgaaagttctgcaaagcctgatgggacataagtccatcagttcaacggaagtctacacgaaggtttttgcgctggatgtggctgcccggcaccggtgtgacaatctaaaaacttgtcacacttcacatggatctgtcatggcggaaacagcggttatcaatcacaagaaacgtaaaaatagcccgcgaatcgtccagtcaaacgacctcactgaggcggcatatagtctctcccgggatcaaaaacgtatgctgtatctgttcgttgaccagatcagaaaatctgatggcaccctacaggaacatgacggtatctgcgagatccatgttgctaaatatgctgaaatattcggattgacctctgcggaagccagtaaggatatacggcaggcattgaagagtttcgcggggaaggaagtggttttttatcgccctgaagaggatgccggcgatgaaaaaggctatgaatcttttccttggtttatcaaacgtgcgcacagtccatccagagggctttacagtgtacatatcaacccatatctcattcccttctttatcgggttacagaaccggtttacgcagtttcggcttagtgaaacaaaagaaatcaccaatccgtatgccatgcgtttatacgaatccctgtgtcagtatcgtaagccggatggctcaggcatcgtctctctgaaaatcgactggatcatagagcgttaccagctgcctcaaagttaccagcgtatgcctgacttccgccgccgcttcgtgcaggtctgtgttaatgagatcaacagcagaactccaatgcgcctctcatacattgagaaaaagaaaggccgccagacgagtcatatcgtattttccttccgcgatatcacttccatgacgacaggatag

SEQ ID NO: 24594 - DNA, 2222 bp, Homo sapiens
  SIMILAR (1626)..(2219): 941254mologous to Cloning vector pZC320 SopA,accession number U26464,Smith-Waterman Score=964.
atggtggattcgttaattgcgcgcgtaggagtaatggctcgcggtaatgccattactttgcctgtatgtggtcgggatgtgaagtttactcttgaagtgctccggggtgatagtgttgagaagacctctcgggtatggtcaggtaatgaacgtgaccaggagctgcttactgaggacgcactggatgatctcatcccttcttttctactgactggtcaacagacaccggcgttcggtcgaagagtatctggtgtcatagaaattgccgatgggagtcgccgtcgtaaagctgctgcacttaccgaaagtgattatcgtgttctggttggcgagctgcatgatgagcagatggctgcattatacagattgggtaacgattatcgcccaacaagtgcttatgaacgtggtcagcgttatgcaagccgattgcagaatgaatttgctggaaatatttctgcgctggctgatgcggaaaatatttcacatcttcatattcatgcagaagacactttcttgcctttctatcttgggaaaaaggacgatgtcacttatgcaataaagcccacttgttggccggggcttgacattattccttcttgtctggctctgcacggtattgaaattgagttaatgggcaaatttgatgaaggtaaactgcccaccgatccacacctgatgctcggactggccattgaaactgttgctcatgactatgatgtcatagttattgacagcgcgcctaacctgggtatcggcacgattaatgtcgtatgtgctgctgatgtgctgattgttcccacgcctgctgagttgtttgactacacctccgcactgcagtttttcgatatgcttcgtgatctgctcaagaacgttgatattaaagggttcgagcctgatgtacgtattttgcttaccaaatacagcaatagtaatggctctcagtccccgtggatggaggagcaaattcgggatgcctggggaagcatggttctaaaaaatgtggtacgtgaaacggatgaagttggtaaagcggttatcaatcacaagaaacgtaaaaatagcccgcgaatcgtccagtcaaacgacctcactgaggcggcatatagtctctcccgggatcaaaaacgtatgctgtatctgttcgttgaccagatcagaaaatctgatggcaccctacaggaacatgacggtatctgcgagatccatgttgctaaatatgctgaaatattcggattgacctctgcggaagccagtaaggatatacggcaggcattgaagagtttcgcggggaaggaagtggtttttcctcgccctgaagaggatgccggcgatgaaaaaggctatgaatcccttcacccgtttatcaaacgtgcgcacagtccatccagaggaatttacagtgtacatatcaacccatatctcattcccttctttatcgggttacagaaccggtttacgcagtttcggcttagtgacaaccaaagaaatcaccaatccgtatgccatgcgttctctacgaatccctgtgtcagtataataaaccggatggcacaggcatcgtctctctgaaaatcgactggatcatagagcgttaccagctgcctcaaagttaccagcgtatgcctgacttccccccccgcttcctgcaggctctgcaccgtattgaaactgagttaatgggcaaatttgatgaaggtaaactgcccaccgatccacacatgatgctccgactggccattgaaactgttgctcatgactatgatgtcatagttattgacagcgcgcctaacctgggtatcggcacgattaatgtcgtatgtgctgctgatgtgctgattgttcccacgcctgctgagttgtttgactacacctccgcactgcagtttttcgatatgcttcgtgatctgctcaagaacgttgatcttaaagggttcgagcctgatgtacgtattttgcttaccaaatacagcaatagtaatggctctcagtccgcgtggatggaggagcaaattcgggatgcctggggaagcatggttctaaaaaatgttgtacgtgaaacggatgaagttggtaaaggtcagacccggatgagaactgtttttgaacagaacaatgatcaacgctcttcaactggtgcctggagaaatgctctttctatttgggaacctgtctgcaatgaaattttcgatcgtctgattaaaccacgctgggagattagataa

SEQ ID NO: 24595 - DNA, 1702 bp, Homo sapiens
  SIMILAR (1641)..(1679): 1001254mologous to Cloning vector pZC320 SopB,accession number U26464,Smith-Waterman Score=62.
atgagggtagggagaaaggctgttggtgccatatggtggtcaagcaagcaagagctctttcagcagctcttcctcaggactgaacttgaggatattggtccaggtattgtgaagagagagctgggaagggaaggatctaaggatactgggtcatcagatgactgggagcaacttccagactggaagaccaagagagtaggtaatgaacgtgaccaggagctgcttattgaggacgcactggatgatctcatcccttcttttctactgactggtcaacagacaccggcgttcggtcgaagagtatctggtgtcatagaaattgccgatgggagtcgccgtcgtaaagctgctgcacttaccgaaagtgattatcgtgttctggttggcgagctggatgatgagcagatggctgcattatccagattgggtaacgattatcgcccaacaagtgcttatgaacgtggtcagcgttatgcaagccgattgcagaatgaatttgctggaaatatttctgcgctggctgatgcggaaaatatttcacgtaagattattacccgctgtatcaacaccgccaaattgcctaaatcagttgttgctcttttttctcaccccggtgaactatctgcccggtcaggtgatgcacttcaaaaagcctttacagataaagaggaattacttaagcagcaggcatctaaccttcatgagcagaaaaaagctggggtgatatttgaagctgaagaagttatcactcttttaacttctgtgcttaaaactgtgcaatctaaaaacttgtcacacttcacatggatctgtcatgcggaaacagcggttatcaatcacaagaaacgtaagaatagcccgcgaatcgtccagtcaaacgacctcactgaggcggcatatagtctctcccgggatcaaaaacgtatgctgtatctgttcgttgaccagatcagaaaatctgatggcaccctacaggaacatgacggtatctgcgagatccatgttgctaaatatgctgaaatattcggattgacctctgcggaagccagtaaggatatacggcaggcattgaagagtttcgcggggaaggaagtggttttttatcgccctgaagaggatgccggcgatgaaaaaggctatgaatcttttccttggtttatcaaacattgggtaacgatatcgccccaaacaagtgcttatgaacgtggtcagcgttatgcaagccgatgcaagaatgaatttgctggaaatatttctgcgctggctgatgcggaaaatatttcacgtaagattattacccgctgtatcaacaccgccaaattgcctaaatcagttgttgctcttttttctcaccccggtgaactatctgcccggtcaggtgatgcacttcaaaaagcctttacagataaagaggaattacttaagcagcaggcatctaaccttcatgagcagaaaaaagctggggtgatatttgaagctgaagaagttatcactcttttaacttctgtgcttaaaacgtcatctgcatcaagaactagtttaagctcacgacatcagtttgctcctggagcgacagtattgtataagggcgataaaatggtgcttaacctggacaggtctcgtgttccaactgagtgtaagagaaaattgaggccattcttaaggaacttgaaaagccaggggggtcctttagagtccacag

SEQ ID NO: 24596 - DNA, 2503 bp, Homo sapiens
  SIMILAR (2404)..(2490): 461254mologous to Shigella dysenteriae RepE,accession number AF239690,Smith-Waterman Score=61.
ggattttgccgatttcggaaccaccatcaaacaggattttcgcctgctggggcaaaccagcgtggaccgcttgctgcaactctctcagggccaggcggtgaagggcaatcagctgttgcccgtctcactggtgaaaagaaaaaccaccctggcgcccaatacgcaaaccgcctctccccgcgcgttggccgattcattaatgcagctggcacgacaggtttcccgactggaaagcgggcaactagcgatatctggtagaatactctttctcccaatgctgaatagcatcaacaagctcgcagcacccagtcagccatgcacggagccgttctttagacgggatccgaccctacatccgaagtccgaggttcggttacccccaaaggtgacaacaattacggtcatttccaatcccattttaataactccacaagaaaagtcagttgctcaatgtacctataaccagaccgttcagctggatattacggcctttttaaagaccgtaaagaaaaataagcacaagttttatccggcctttattcacattcttgcccgcctgatgaatgctcatccggagttccgtatggcaatgaaagacggtgagctggtgatatgggatagtgttcacccttgttacaccgttttccatgagcaaactgaaacgttttcatcgctctggagtgaataccacgacgatttccggcagtttctacacatatattcgcaagatgtggcgtgttacggtgaaaacctggcctatttccctaaagggtttattgagaatatgtttttcgtctcagccaatccctgggtgagtttcaccagttttgatttaaacgtggccaatatggacaacttcttcgcccccgttttcaccatgggcaaatattatacgcaaggcgacaaggtgctgatgccgctggcgattcagatcagaaaatctgatggcaccctacaggaacatgacggtatctgcgagatccatgttgctaaatatgctgaaatattcggattgacctctgcggaagccagtaaggatatacggcaggcattgaagagtttcgcggggaaggaagtggttttttatcgccctgaagaggatgccggcgatgaaaaaggctatgaatcttttccttggtttatcaaacgtgcgcacagtccatccagagggctttacagtgtacatatcaacccatatctcattcccttctttatcgggttacagaaccggtttacgcagtttcggcttagtgaaacaaaagaaatcaccaatccgtatgccatgcgtttatacgaatccctgtgtcagtatcgtaagccggatggctcaggcatcgtctctctcccaatcgactggatcatagagcgttaccaactgcctcaaagttaccagcgtatgcctgacttccgccgccgcttcctgcaggtctgtgttaatgagatcaacagcagaactccaatgcgcctctcatacattgagaaaaagaaaggccgccagacgactcatatcatcagaatatctgatggcaccctacaggaacatgacggtatctgcgagatccatgttgctaaatatgctgaaatattcggattgacctctgcggaagccagtaaggatatacggcaggcattgaagagtttcgcggggaaggaagtggttttttatcgccctgaagaggatgccggcgatgaaagggggtatgaatcttttccttggtttatcaaacgtgcgcacagtccatccagagggctttacagtgtacatatcaacccatatctcattcccttctttatcgggttacagaaccggtttacgcagtttcggcttagtgaaacaaaagaaatcaccaatccgtatgccatgcgtttatacgaatccctgtgtcagtatcatttgtgtggcactttaagaaactcacggttctgcgagatccatgttgctaaatatgctgaaatattcggattgacctctgcggaagccagtaaggatatacggcaggcattgaagagtttcgcggggaaggaagtggttttttatcgccctgaagaggatgccggcgatgaaaaaggctatgaatcttttccttggtttatcaaacgtgcgcacagtccatccagagggctttacagtgtacatatcaacccatatctcattcccttctttatcgggttacagaaccggtttacgcagtttcggcttagtgaaacaaaagaaatcaccaatccgtatgccatgcgtttatacgaatccctgtgtcagtatcgtaagccggatggctcaggcatcgtctctctgaaaatcgactggatcatagagcgttaccagctgcctcaaagttaccagcgtatgcctgacttccgccgccgcttcctgcaggtctgtgttaatgagatcaacagcagaactccaatgcgcctctcatacattgagaaaaagaaaggccgccagacgactcatatcgtattttccttccgcgatatcacttccatgacgacaggatag

SEQ ID NO: 24597 - DNA, 2289 bp, Homo sapiens
  SIMILAR (1054)..(1929): 921254mologous to Cloning vector pZC320 SopA,accession number U26464,Smith-Waterman Score=1371.
atgttaactttgattttgctggacttgcaattcatggctcagcttgctgggtaccagatgagctttaacagcaccaagtcaaagcagacaaagaataactttgcagtgggctacaggactggggacttccagctgcacactaatgtcaatgatggggcagaatttggaggatcagtttatcaaaaagtttgtgaagaacttgatgctttaataaacctggcttggacatcaagtaccagctgcactcgttttggccttgcagctaaatttcaattgaaacccattgctttcatttctaccaaagtcaaccactggttgactggggtcagctacactccaccccttgaggctggtgtgaagctcaacctgtctgctctgtgtgacaatctaaaaacttgtcacacttcacatggatctgtcatggcggaaacagcggttatcaatcacaagaaacgtaaaaatagcccgcgaatcgtccagtcaaacgacctcactgaggcggcatatagtctctcccgggatcaaaaacgtatgctgtatctgttcgttgaccagatcagaaaatctgatggcaccctacaggaacatgacggtatctgcgagatccatgttgctaaatatgctgaaatattcggattgacctctgcggaagccagtaaggatatacggcaggcattgaagagtttcgcggggaaggaagtggttttttatcgccctgaagaggatgccggcgatgaaaaaggctatgaatcttttccttggtttatcaaacgtgcgcacagtccatccagagggctttacagtgtacatatcaacccatatctcattcccttctttatcgggttacagaaccggtttacgcagtttcggcttagtgaaacaaaagaaatcaccaatccgtatgccatgcgtttatacgaaatccctgttgtcagtatccgtaagcccgggatgggctcaggcatcgtctctctgaaaatcgactggatcatagagcgttaccagctgcctcaaagttaccagcgtatgcctgacttccgccgccgcttcctgcagtgcataaacgctggtcatgaaatgacgaaggctatcgccattgcacagtttaatgatgacagcccggaagcgaggaaaataacccggcgctggagaataggtgaagcagcggatttacttggggtttcttctcaggctatcagagatgccgagaaagcagggccactaccgcacccggatatggaaaatcgaggacgggttgagcaacggggtggttataccattgaaccaaataatcatatgcgtgatggtgttggtacgcgatggcgacgtgctgaagacgtattttccaccgctgatcgggggttgctggccataaaggggggcggttacaaaacctcagtttctgttcatcttgctcaggatctggctctgaaggggctacgtgttttgctcgtggaaggtaacgacccccagggaacagcctcaatgtatcacggatgggtaccagatcttcatattcatgcagaagacactctcctgcctttctatcttggggaaaaggacgatgtcacttatgcaataaagcccacttgctggccggggcttgacattattccttcctgtctggctctgcaccgtattgaaactgagttaatgggcaaatttgatgaaggtaaactgcccaccgatccacacctgatgctccgactggccattgaaactgttgctcatgactatgatgtcatagttattgacagcgcgcctaacctgggtatcggcacgattaatgtcgtatgtgctgctgatgtgctgattgttcccacgcctgctgagttgtttgactacacctccgcactgcagtttttcgatatgcttccggatctggtcaagaaccgcgatcttaaaggggtcgagcctgatgtatttattcgcgataagctcatggagcggcgtaaccgtcgcacaggaaggacagagaaagcgcggatctgggaagtgacggacagaacggtcaggacctggattggggaggcggttgccgccgctgctgctgacggtgtgacgttctctgttccggtcacaccacatacgttccgccattcctatgcgatgcacatgctgtatgccggtataccgctgaaagttctgcaaagcctgatgggacataagtccatcagttcaacggaagtctacacgaaggtttttgcgctggatgtggctgcccggcaccgggtgcagtttgcgatgccggagtctgatgcggttgcgatgctgaaacaattatcctga

SEQ ID NO: 24598 - DNA, 2442 bp, Homo sapiens
  SIMILAR (1666)..(2409): 961254mologous to Cloning vector pZC320 SopB,accession number U26464,Smith-Waterman Score=1172.
atggatgccaagatgcattcaggtggaacagctccccccgggacattgagtcagcgtcagccaagtagtaattccaaaaccaacggctcaaaactcaacccgttgaaagatactttgttatcgacaccaagctgccccgaaggggaattggttaatgcggcgcgtaggagtaatggttccggtaatgccattactttgcctgtatggggtcgggatgtaaagtttactcttgaagtgctccggggtgatagtgttgagaagacctctcgggtatggtcaggtaatgaacgtgaccaggagctgcttactgaggacgcactggatgatctcatcccttcttttctactgactggtcaacagacaccggcgttcggtcgaagagtatctggtgtcatagaaattgccgatgggagtcgccgtcgtaaagctgctgcacttaccgaaagtgattatcgtgttctggttggcgagctggatgatgagcagatggctgcattatccagattgggtaacgattatcgcccaacaagtgcttatgaacgtggtcagcgttatgcaagccgattgcagaatgaatttgctggaaatatttctgcgctggctgatgcggaaaatatttcacgtaagattattacccgctgtatcaacaccgccaaattgcctaaatcagttgttgctcttttttctcaccccggtgaactatctgcccggtcaggtgatgcacttcaaaaagcctttacagataaagaggaattacttaagcagcaggcatctaaccttcatgagcagaaaaaagctgggtgtgacaatctaaaaacttgtcacacttcacatggatctgtcatggcggaaacagcggttatcaatcacaagaaacgtaaaaatagcccgcgaatcgtccagtcaaacgacctcactgaggcggcatatagtctctcccgggatcaaaaacgtatgctgtatctgttcgttgaccagatcagaaaatctgatggcaccctacaggaacatgacggtatctgcgagatccatgttgctaaatatgctgaaatattcggattgacctctgcggaagccagtaaggatatacggcaggcattgaagagtttcgcggggaaagaagtggttttttatcgccctgaagaagatgccggcgatgaaaaaagctatgaacaacccagtaaggatatacggcaggcattgaagagtttcgcggggaaggaagtggttttttatcgccctgaagaggatgccggcgatgaaaaaggctatgaatcttttccttggtttatcaaacgtgcgcacagtccatccagagggctttacagtgtacatatcaacccatatctcattcccttctttatcgggttacagaaccggtttacgcagtttcggcttagtgaaacaaaagaaatcaccaatccgtatgccatgcgtttatacgaatccctgtgtcagtatcgtaagccggatggctcaggcatcgtctctctgaaaatcgactggatcatagagcgttaccagctgcctcaaagttaccagcgtatgcctgacttccgccgccgcttcctgcaggtctgtgttaatgagatcaacagcagaactccaatgcgcctctcatacattgagaaaaagaaaggccgccagacgactcatatctcccggaagtttactctgaagtggtccgggggtgatagtgttgagaagacttctcgggtatggtcaggtaatgaacgtgcccaggagctgcttactgaggacgcactgaatgatctcatcccttcttttctactgactggtcaacagacaccggcgttcggtcgaagagtatctggtgtcatagaaattgccgatgggagtcgccgtcgtaaagctgctgcacttaccgaaagtgattatcgtgttctggttggcgagctggatgatgagcagatggctgcattatccagattgggtaacgattatcgcccaacaagtgcttatgaacgtggtcagcgttatgcaagccgattgcagaatgaatttgctggacatatttctgcgctggctgatgcggaaaatatttcacgtaagattattacccgctgtatcaacaccgccaaattgcctaaatcagttgttgctcttttttctcaccccggtgaactatctgcccggtcaggtgatgcacttcaaaaagcctttacagataaagaggaattacttaagcagcaggcatctaaccttcatgagcagaaaaaagctggggtgatatttcaagctgaagaagttatcactcttttaacttctgtgcttaaaacgtcatctgcatcaagaactagtttaagctcacgacatcagtttgctcctggagcgacagtattgtataagggcgataaaatggtgcttaacctggacagttctcgtgtccaactgagttatagagaaaatgaggccaaataa

SEQ ID NO: 24599 - DNA, 2853 bp, Homo sapiens
  SIMILAR (415)..(1128): 991254mologous to unidentified cloning vector 29kD protein essential for the replication of mini F plasmid,accession number AB015619,Smith-Waterman Score=1235.
atgctccacatcactaatgatcagggaaatgcaagtcaaaaccacaatgcaatgccaccttactcctgcaaaaatggacataatctaaaaacagtagatggtggcatggatgcagtgaacggggaacacttctacactgctggtctttctcaaggcccactgaagggctcttttcttctcttcttcaacattcttatcctcgtgtgtccacccattttcagagtgtcaggaaatgaggtatttattcgcgataagctcatggagcggcgtaaccgtcgcacaggaaggacagagaaagcgcggatctgggaagtgacggacagaacggtcaggacctggattggggaggcggttgcgccgctgctgctgacgtgtgacaatctaaaaacttgtcacacttcacatggatctgtcatggcggaaacagcggttatcaatcacaagaaacgtaagtttagcccgcgaatcgtccagtcaaacgacctcactgaggcggcatatagtctctcccgggatcaaaaacgtatgctgtatctgttcgttgaccagatcagaaaatctgatggcaccctacaggaacatgacggtatctgcgagatccatgttgctaaatatgctgaaatattcggattgacctctgcggaagccagtaaggatatacggcaggcattgaagagtttcgcggggaaggaagtggttttttatcgccctgaagaggatgccggcgatgaaaaaggctatgaatcttttccttggtttatcaaacgtgcgcacagtccatccagagggctttacagtgtacatatcaacccatatctcattcccttctttatcgggttacagaaccggtttacgcagtttcggcttagtgaaacaaaagaaatcaccaatccgtatgccatgcgtttatacgaatccctgtgtcagtatcgtaagccggatggctcaggcatcgtctctctgaaaatcgactggatcatagagcgttaccagctgcctcaaagttaccagcgtatgcctgacttccgccgccgcttcctgcaggtctgtgttaatgagatcaacagcagaactccaatgcgcctctcatacattgagaaaaagaaaggccgccagacgactcatatctgtgacaatctaaaaacttgtcacacttcacatggatctgtcatggcggaaacagcggttatcaatcacaagaaacgtaaaaatagcccgcgaatcgtccagtcaaacgacctcactgaggcggcatatagtctctcccgggatcaaaaacgtatgctgtatctgttcgttgaccagatcagaaaatctgatggcaccctacaggaacatgacggtatctgcgagatccatgttgctaaatatgctgaaatattcggattgacctctgcggaagccagtaaggatatacggcaggcattgaaaagtttcgcggggaaagaagtggttttttatcgccctgaagaggatgccggcgatgaaaaaggctatgaatcttttccttggtttatcaaacgtgcgcacagtccatccagagggctttacagtgtacatatcaacccatatctcattcccttctttatcgggttacagaaccggtttacacaatttcggcttattgaaacaaaagaaatcaccaatccgtatgccatgcgtttatacaaatccctgtgtcaatatcgtaaaccggatggctcaaggcatctctctttgaaaatcgactggatcatagagcggttccagctgccctcaaattaccaaccgatgcctgactttccccgccgtttcctgcagacaccggcgttcggtcgaagagtatctggtgtcatagaaattgccgatgggagtcgccgtcgtaaagctgctgcacttaccgaaagtgattatcgtgttctggttggcgagctggatgatgagcagatggctgcattatccagattgggtaacgattatcgcccaacaagtgcttatgaacgtggtcagcgttatgcaagccgattgcagaatgaatttgctggaaatatttctgcgctggctgatgcggaaaatatttcacgtaagattattacccgctgtatcaacaccgccaaattgcataaatcagttgttgctcttttttctcaccccggtgaactatctgcccggtcaggtgatgcacttcaaaaagcctttacagataaagaggaattacttaagcagcaggcatctaaccttcatgagcagaaaaaagctggggtgatatttgaagctaaagaagttatcactcttttaacttctgtgcttaaaacgtcatctgcatcaagaactagtttaaagctcaccacatcaaattggctccctggagcgacagtattgtataagggcgataaaatggtgcttaacctggacagaatgaatttgttgaaaaatatttctgcgctggctgatgcggaaaatatttcacgtaagattattacccgctgtatcaacaccgccaaattgcataaatcagttgttgctcttttttctcaccccggtgaactatctgcccggtcaggtgatgcacttcaaaaagcctttacagataaagaggaattacttaagcagcaggcatctaaccttcatgagcagaaaaaagctggggtgatatttgaagctgaagaagttatcactcttttaacttctgtgcttaaaacgtcatctgcatcaagaactagtttaagctcacgacatcagtttgctcctggagcgacagtattgtataagggcgataaaatggtgcttaacctggacaggtctcgtgttccaactgagtgtatagagaaaattgaggccattcttaaggaacttgaaaagccagcaccctga

SEQ ID NO: 24600 - DNA, 4126 bp, Homo sapiens
  SIMILAR (862)..(1341): 1001254mologous to unidentified cloning vector 29kD protein essential for the replication of mini F plasmid,accession number AB015619,Smith-Waterman Score=849.
atggtggattcgttaattgcgcgcgtaggagtaatggctcgcggtaatgccattactttgcctgtatgtggtcgggatgtgaagtttactcttgaagtgctccggggtgatagtgttgagaagacctctcgggtatggtcaggtaatgaacgtgaccaggagctgcttactgaggacgcactggatgatctcatcccttcttttctactgactggtcaacagacaccggcgttcggtcgaagagtatctggtgtcatagaaattgccgatgggagtcgccgtcgtaaagctgctgcacttaccgaaagtgattatcgtgttctggttggcgagctggatgatgagcaaatggctgcattatccagattgggtaacgattatcgccccacaagtgcttatgaacgtgcgtctatgcaagccgattgcagaatgaatttgctggaaatatttctgcgctggctgatgcggaaaatatttcacaatgaatttgctggaaatatttctgcgctggctgatgcggaaaatatttcacgtaagattattacccgctgtatcaacaccgccaaattgcctaaatcagttgttgctcttttttctcaccccggtgaactatctgcccggtcaggcgataaaaaagactcccttccccgcgaaactcttcaatgcctgccgtatatccttactggcttccgcagaggtcaatccgaatatttcagcatatttagcaacatggatctcgcagataccgtcatgtttctactaataatcagaccgacgatacgagtgggaccgtggtcccagtctgattatcagaccgacgggtaccgagctcgaattcttaatcatggtcatagctgtttgatcagaaaatctgatggcaccctacaggaacatgacggtatctgcgagatccatgttgctaaatatgctgaaatattcggattgacctctgcggaagccagtaaggatatacggcaggcattgaagagtttcgcggggaaggaagtggttttttatcgccctgaagaggatgccggcgatgaaaaaggctatgaatcttttccttggtttatcaaacgtgcgcacagtccatccagagggctttacagtgtacatatcaacccatatctcattcccttctttatcgggttacagaaccggtttacgcagtttcggcttagtgaaacaaaagaaatcaccaatccgtatgccatgcgtttatacgaatccctgtgtcagtatcgtaagccggatggctcaggcatcgtctctctgaaaatcgactggatcatagagcgttaccagctgcctcaaagttaccagcgtatgcctgacttccggccgccgcttcctgcagatcagaatatctgatggcaccctacaggaacatgacggtatctgcgagatccatgttgctaaatatgctgaaatattcggattgacctctgcggaagccagtaaggatatacggcaggcattgaagagtttcgcggggaaggaagtggttttttatcgccctgaagaggatgccggcgatgaaaaaggctatgaatcttttccttggtttatcaaacgtgcgcacagtccatccagagggctttacagtgtacatatcaacccatatctcattcccttctttatcgggttacagaaccggtttacgcagtttcggcttagtgaaacaaaagaaatcaccaatccgtatgccatgcgtttatacgaatccctgtgtcagtatcgtaagccggatggctcaggcatcgtctctctgaaaatcgcctgggtcatagagcgttaccagctgcctcaaagttaccagcgtatgcctgacttccgccgtcgcttcctgcaggtatcagattttctgatggcaccctacaggaacatcgacggtatctgcgagatccatgttgctaaatatgctgaaatattcggattgacctctgcggaagccagtaaggatatacggcaggcattgaagagtttcgcggggaaggaagtggttttttatcgccctgaagaggatgccggcgatgaaaaaggctatgaatcttttccttggtttatcaaacgtgcgcacagtccatccagagggctttacagtgtacatatcaacccatatctcattcccttctttatcgggttacagaaccggtttacgcagtttcggcttagtgaaacaaaagaaatcaccaatccgtatgccatgcgtttatacgaatccctgtgtcagtatcgtaagccggatggctcaggcatcgtctctctgaaaatcgactggatcatagagcgttaccagctgcctcaaagttaccagcgtatgcctgacttccgccgccgcttcctgcaggtctgtgttaatgagatcaacagcagaactccaatgcgcctctcatacattgagaaaaagaaaggccgccagacgactcatatcgaacatgacggtatctgcgagatccatgttgctaaatatgctgaaatattcggattgacctctgcggaagccagtaaggatatacggcaggcattgaagagtttcgcggggaaggaagtggttttttatcgccctgaagaggatgccggcgatgaaagaggctatgaatcttttccttggtttatcaaacgtgcgcacagtccatccagagggctttacagtgtacatatcaacccatatctcattcccttctttatcgggttacagaaccggtttacgcagtttcggcttagtgaaacaaaagaaatcaccaatccgtatgccatgcgtttataccaatccctgtgtcagtatcgtaagccggatggctcaggcatcgtctctctgaaaatcgactggatcatagagcgttaccagctgcctcaaagttaccagcgtatgcctgacttccgccgccgcttcctgcagatcagaaaatctgatggcaccctacaggaacatgacggtatctgcgagatccatgttgctaaatatgctgaaatattcggattgacctctgcggaagccagtaaggatatacggcaggcattgaagagtttcgcggggaaggaagtggttttttatcgccctgaagaggatgccggcgatgaagaaggctatgaatcttttccttggtttatcaaacgtgcgcacagtccatccagagggctttacagtgtacatatcaacccatatctcattcccttctttatcgggttacagaaccggtttacgcagtttcggcttagtgaaacaaaagaaatcaccaatccgtatgccatgcgtttatacgaatccctgtgtcagtatcgtaagccggatggctcatgcatcgtctctctgaaaatcgactggatcatagagcgttaccagctgcctccacgttaccagcgtatgcctgacttccgccgccgcttcctgcgggtctgggttcaggagatcaacagcagaacccccatgccgcctcttctgccttgggaaaaagagaggccggcggacgactcatatgaagaacccctgttcgttgaccagatcagattatctgatggcaccctacaggaacatgacggtatctgcgagatccatgttgctaaatatgctgaaatattcggattgacctctgcggaagccagtaaggatatacggcaggcattgaagagtttcgcggggaaggaagtggttttttatcgccctgaagaggatgccggcgatgaaaaaggctatgaatcttttccttggtttatcaaacgtgcgcacagtccatccagagggctttacagtgtacatatcaacccatatctcattcccttctttatcgggttacagaaccggtttacgcagtttcggcttagtgaaacaaaagaaatcaccaatccgtatgccatgcgtttatacgaatccctgtgtcagtatcgtaagccggatggctcaggcatcgtctctctgaaaatcgactggatcatagagcgttaccagctgcctcaaagttaccagcgtatgcctgacttccgccgccgcttcctgcaggtctgtgttaatgagatcaacagcagaactccaatgcgcctctcatacattgagaaaaagaaaggccgccagacgactcatatcgtattttccttccgcgatatcacttccatgacgacaggatag

SEQ ID NO: 24601 - DNA, 3270 bp, Homo sapiens
  SIMILAR (2545)..(3219): 861254mologous to Cloning vector pZC320 SopB,accession number U26464,Smith-Waterman Score=971.
atgaaactcatggaaacacttaacaagtgcataaacgctgttcatgaaatgacgaaggctatcgccattgcacagtttaatgatgacagcccggaagcgaggaaaataacccggcgctggagaataggtgaagcagcggatttagttggggtttcttctcaggctatcagagatgccgagaaagcagggcgactaccgcacccggatatggaaattcgaggacgggttgagcaacgtgttggttatacaattgaacaaattaatcatatgcgtgatgtgtttggtacgcgattgcgacgtgctgaagacgtatttccaccggtgatcggggttgctgcccataaaggtggcgtttacaaaacctcagtttctgttcatcttgctcaggatctggctctgaaggggctacgtcccccgctcgtggaagtggactcttgttccaaactggaacaacactcaaccctatctcgggctattcttttgatttataagggattttgccgatttcggaaccaccatcaaacaggattttcgcctgctggggcaaaccagcgtggaccgcttgctgcaactctctcagggccaggcggtgaagggcaatcagctgttgcccgtctcactggtgaaaagaaaaaccaccctggcgcccaatacgcaaaccgcctctccccgcgcgttggccgattcattaatgcagctggcacgacaggtttcccgactggaaagcgggcaatcctaaaacagcagcaaaacgaaaaataccaagtgcctcaattcgatcaatcaacgattaaaaatattgagtctgcaaaaggacttgatgtgtgggacagctggccgctgcaaaacgctgacggaacagtagctgaatacaacggctatcacgttgtgtttgctcttgcgggaagcccgaaagacgctgatgacacatcaatctacatgttttatcaaaaggtcggcgacaactcaatcgacagctggaaaaacgcgggccgtgtctttaaagacagcgataagttcgacgccaacgatccgatcctgaaagatcagacgcaagaatggtccggttctgcaacctttacatctgacggaaaaatccgtttattctacactgactattccggtacacattacggcaaacaaagcctgacaacagcgcagaacgttcagcagtttatcgatgaaggcaattatacatccggcgacaaccatacgctgagagaccctcactacgttgaagacaaaggccataaataccttgtattcgaagccaacacgggaacagaaaacggataccaaggcgaagaatctttatttaacaaagcgtactacggcggcggcacgaacttcttccgtaaagaaagccagaagcttcagcagagcgctaaaaaacgcgatgctgagttagcgaacggcgccctcggtatcatagagttaaataatgattacacattgaaaaaagtaatgaagccgctgatcacttcaaacacgtgtgacaatctaaaaacttgtcacacttcacatggatctgtcatggcggaaacagcggttatcaatcacaagaaacgtaaaaatagcccgcgaatcgtccagtcaaacgacctcactgaggcggcatatagtctctcccgggatcaaaaacgtatgctgtatctgttcgttgaccagatcagaaaatctgatggcaccctacaggaacatgacggtatctgcgagatccatgttgctaaatatgctgaaatattcggattgacctctgcggaagccagtaaggatatacggcaggcattgaagagtttcgcggggaaggaagtggttttttatcgccctgaagaggatgccggcgatgaaaaaggctatgaatcttttccttggtttatcaaacgtgcgcacagtccatccagagggctttacagtgtacatatcaacccatatctcattcccttctttatcgggttacagaacccggttaacgcagtttcggcttagtgaaacaaaagaaatcaccgatccgtatgccatgcgctatatacaaataccctgtgtcagtatcgggctttcgtaaatggggggggagaagaaaaggctcgcggaaagcccatactttgccggtatggggtcgggatgtgaagttaactctgaaagtgctccggggtgatagtgttgagaagacttttcgggtagggtcaggtaatgaacgtgcccagaagctgcttactgaggacgcactggatgatctcatcccttcttttctactgactggtcaacagacaccggcgttcggtcgaagagtatctggtgtcatagaaattgccgatgggagtcgccgtcgtaaagctgctgcacttaccgaaagtgattatcgtgttctggttggcgagctggatgatgagcagatggctgcattatccagattgggtaacgattatcgcccaacaagtgcttatgaacgtggtcagcgttatgcaagccgattgcagaatgaatttgctggaaatactctctgcgctggctgatgcggaaaatataatcacgtgcgcctttattccaaaacatacgcccaatatcaaccggttgaaagatatttcgttaacgacaccagttgccccgatggtggattcgttatttgcgcgcgtaggagtaatggctcgcggtaatgccaatactttgcctgtatgtggtcgggatgtgaagtttactcttaaagtgctccggggtgatagtgttgagaagacctctcgggtatggtcaggtaatgaacgtgaccaggagctgcttactgaggacgcactggatgatctcatcccttcttttctactgactggtcaacagacaccggcgttcggtcgaagagtatctggtgtcatagaaattgccgatgggagtcgccgtcgtaaagctgctgcacttaccgaaagtgattatcgtgttctggttggcgagctggatgatgagcagatggctgcattatccagattgggtaacgattatcgcccaacaagtgcttatgcacgtggtcagcgttatgcaagccgattgcagaatgaattcgccccccacatttctgcgctggctgatgcggaaaataaaaaacgtaaaaaaattacccgctgtatcaacaccgccaaattgcctaaatcagttgttgctcttttttctcaccccggtgaactatctgccccgtcaggaacgggaaaggaagtaattcttgaagtgcagctgattcacaatgtattccaatacaccttgcttgcttgttttgggacctga

SEQ ID NO: 24602 - DNA, 1767 bp, Homo sapiens
  SIMILAR (1000)..(1746): 1001254mologous to Cloning vector pZC320 SopB,accession number U26464,Smith-Waterman Score=1229.
atggtggattcgttaattgcgcgcgtaggagtaatggctcgcggtaatgccattactttgcctgtatgtggtcgggatgtgaagtttactcttcaagtgctccggggtgatagtgttgagaagacctctcgggtaccgccaggtaatgaacgtgaccaggagatgcttactgaggacgcactggatgatctcatcccttcttttctactgactggtcaacagacaccggcgttcggtcgaagagtatctggtgtcatacacactgccgatgggagtcgccgtcgtaaagctgctgcacttaccgaaaaattttgtatcgttgataaccccccgggggagattagaaaaagagcgtgcctttttattccaacacatgcgctcaatctcaaccggtttgaagatatttgttatgcacaccagctgcccgatggtggtttgttaagtgcgcgcgtaggagtaatggctcgcggtaaccccattctttcccctgtatgtggtcggaatgtaaagttcactcttaaagtgctccggggtgatagtgttgagaacccctctcgggtatggtcgggtaatgaacgtgcccaggagctgcttactgagcacgcactggatgatctcaccctttcttttctactgactggtcaacagacaccggcgttcggtcgaagagtatctggtgtcatagaaattgccgatgggagtcgccgtcgtaaagctgctgcacttaccgaaagtgattatcgtgttctggttggcgagctggatgatgagcagatggctgcattatccagattgggtaacgattatcgcccaacaagcccttatgaacgtggtcagcgttatgcaagccgattgcagaatgaatttgctggaaatatttctgcgctggctgatgcggaaaatatttcacgtaagattattacccgctgtatcaacaccgccaaattgcctaaatcagttgttgctcttttttctcaccccggtgaactatctgcccggtcaggtaatgaacgtgaccaggagctgcttactgaggacgcactggatgatctcatcccttcttttctactgactggtcaacagacaccggcgttcggtcgaagagtatctggtgtcatagaaattgccgatgggagtcgccgtcgtaaagctgctgcacttaccgaaagtgattatcgtgttctggttggcgagctggatgatgagcagatggctgcattatccagattgggtaacgattatcgcccaacaagtgcttatgaacgtggtcagcgttatgcaagccgattgcagaatgaatttgctggaaatatttctgcgctggctgatgcggaaaatatttcacgtaagattattacccgctgtatcaacaccgccaaattgcctaaatcagttgttgctcttttttctcaccccggtgaactatctgcccggtcaggtgatgcacttcaaaaagcctttacagataaagaggaattacttaagcagcaggcatctaaccttcatgagcagaaaaaagctggggtgatatttgaagctgaagaagttatcactcttttaacttctgtgcttaaaacgtcatctgcatcaagaactagtttaagctcacgacatcagtttgctcctggagcgacagtattgtataagggcgataaaatggtgcttaacctggacaggtctcgtgttccaactgagtgtatagagaaaattgaggccattcttaaagaacttgaaaagccagcaccctggttgcgaacacccctttaa

SEQ ID NO: 24603 - DNA, 3942 bp, Homo sapiens
  SIMILAR (565)..(1446): 981254mologous to Cloning vector pBACe3.6 levansucrase,accession number U80929,Smith-Waterman Score=1542.
  misc_feature (1)...(3942): n = a,t,c or g
atgaacatgaacatcaaaaaaattgtaaaacaagccacagttctgacttttacgactgcacttctggcaggaggagcgactcaagccttcgcgaaagaaaataaccaaaaagcatacaaagaaacgtacggcgtctctcatattacacgccatgatatgctgcagatccctaaacagcagcaaaacgaaaaataccaagtgcctcaattcgatcaatcaacgattaaaaatattgagtctgcaaaaggacttgatgtgtgggacagctggccgctgcaaaacgctgacggaacagtagctgaatacaacggctatcacgttgtgtttgctcttgcgggaagcccgaaagacgctgatgacacatcaatctacatgttttatcaaaaggtcggcgacaactcaatcgacagctggaaaaacgcgggccgtgtctttaaagacagcgataagttcgacgccaacgatccgatcctgaaagatcagacgcaagaatggtccggttctgcaacctttacatctgacggaaaaatccgtttattctacacgggatccctaaacagcagcaaaacggaaaaataccaagtgcctcatatcgatcaatcaacgattaaaaatattgagtctgcaaaaggacttgatgtgtgggacagctggccgctgcaaaacgctgacggaacagtagctgaatacaacggctatcacgttgtgtttgctcttgcgggaagcccgaaagacgctgatgacacatcaatctacatgttttatcaaaaggtcggcgacaactcaatcgacagctggaaaaacgcgggccgtgtctttaaagacagcgataagttcgacgccaacgatccgatcctgaaagatcagacgcaagaatggtccggttctgcaacctttacatctgacggaaaaatccgtttattctacactgactattccggtaaacattacggcaaacaaagcctgacaacagcgcaggtaaatgtgtcaaaatctgatgacacactcaaaatcaacggagtggaagatcacaaaacgatttttgacggagacggaaaaacatatcagaacgttcagcagtttatcgatgaaggcaattatacatccggcgacaaccatacgctgagagaccctcactacgttgaagacaaaggccataaataccttgtattcgaagccaacacgggaacagaaaacggataccaaggcgaagaatctttatttaacaaagcgtactacggcggcggcacgaacttcttccgtaaagaaagccagaagcttcagcagagcgctaaaaaacgcgatgctgagttagcgaacggcgccctcggtatcatagagttaaataatgattacacattgaaaaaagtaatgaagccgctgatcacttcaaacacggtaactgatgaaatcgagcgcgcgaatgttttcaaaatgaacggcaaatgnaggaaccccctgcagatccctaaacagcagcaaaacgaaaaataccaagtgcctcaattcgatcaatcaacgattaaaaatattgagtctgcaaaaggacttgatgtgtgggacagctggccgctgcaaaacgctgacggaacagtagctgaatacaacggctatcacgttgtgtttgctcttgcgggaagcccgaaagacgctgatgacacatcaatctacatgttttatcaaaaggtcggcgacaactcaatcgacagctggaaaaacgcgggccgtgtctttaaagacagcgataagttcgacgccaacgatccgatcctgaaagatcagacgcaagaatggtccggttctgcaacctttacatctgacggaaaaatccgtttattctacactgactattccggtaaacattacggcaaacaaagcctgacaacagcgcagatattccagatgattacagtttttattaccagcctctgcaacactacctccagccacatctgtctccacatcagctgggtcaccacaatgcacggcgccatgcctcatcccggccacatccccacagcccctgcttctttacctgccaaggtgaaaggttccgggaaggtctgctggctggccttccctttatcagaactcaccccccccagtgccttacaggtaaatgtgtcaaaatctgatgacacactcaaaatcaacggagtggaagatcacaaaacgatttttgacggagacggaaaaacatatcagaacgttcagcattttatcgatgaaggcaattatacatgcggcgacaaccatacgctgagagaccctcactacgttgaagacaaaggccataaataccttgtattcgaagccaacacgggaacagaaaacggataccaaggcgaagaatctttatttaacaaagcgtactacggcggcggcacgaacttcttccgtaaagaaagccagaagcttcagcagagcgctaaaaaacgcgatgctgagttagcgaacggcgccctcggtatcatagagttaaataatgattacacattgaaaaaagtaatgaagccgctgatcacttcaaacacggtaactgatgaaatcgagcgcgcgaatgttttcaaaatgaacggcaaatggtacttgttcactgattcacgcggttcaaaaatgacgatcgatgtgccgcaagccaaaagcaccaatgtggttatcacaagctacatgacaaacagaggcttcttcgagcctgagggcagcaagggcagtatcactgcagcagtaatggcaaaagggctctcagttgcctctgggaactccaccccagagagacgcagagccactgccaatgagaatgttcagccaagggctatcagagatgccgagaaagcagggcgactaccgcacccggatatggaaattcgaggacgggttgagcaacgtgttggttatacaattgaacaaattaatcatatgcgtgatgtgtttggtacgcgattgcgacgtgctgaagacgtatttccaccggtgatcggggttgctgcccataaaggtggcgtttacaaaacctcagtttctgttcatcttgctcaggatctggctctgaaggggctacgtgttttgctcgtggaaggtaacgacccccagggaacagcctcaatgtatcacggatgggtaccagatcttcatattcatgcagaagacactctcctgcctttctatcttggggaaaaggacgatgtcacttatgcaataaagcccacttgctggccggggcttgacattattccttcctgtctggctctgcaccgtattgaaactgagttaatgcgcaaatttgatgaaggtaacctgcccaccgatccacacctgatgctccgactggccattgaaactgttgctcatgactatgatgtcatagttattgacagcgcgcctaacctgggtatcggcacgattaatgtcgtatgtgctgctgatgtgctgattgttcccacgcctgctgagcagttagatataagctgcgtcacgccagttttttgactattcttcgtgatctgctcaagaacgttgatcttaaagggttcgagcctgatgtacgtattttgcttaccaaatacagcaatagtaatggctctcagtccccgtggatggaggagcaaattcgggatgcctgggggaagcatggttctaaaaaatgttgtggcgtttcaaaacctggagtttctgttcatcttgctcaggatctggctctgaaggggctacgtgttttgctcgtggaaggtaacgacccccagggaacagcctcaatgtatcacggatgggtaccagatcttcatattggtgcagaagacactctcctgcctttctatcttggggaaaaggacgatgtcacttatgcaataaagcccacttgctggccggggcttgacattattccttcctgtctggctctgcaccgtattgaaactgagttaatgggcaaatttgatgaag

SEQ ID NO: 24604 - DNA, 3901 bp, Homo sapiens
  SIMILAR (682)..(1080): 841254mologous to Cloning vector pZC320 SopA,accession number U26464,Smith-Waterman Score=562.
atggtggattcgttaattgcgcccgtaggagtaatggctcgcggtaatgccattactttgcctgtacgcgccacgaatgtgaagtttactcttgaagagctccggggtgatagtgttgagaagacctctcgggtatggtcagaaaaaaaggatagaggagggcaggaggcagaagtgagcggggaagggtcgtcgcagaccaaatcactgcaaaagcggcaacactcaaatgggtcagatttcacagccaggggcttccacacgggccaggctttggtaagaagcaaagggacatactggaatccaacagggttgggactctcgcatgggacagaagaccctaacttgattggtgaggagttggatgctggggagtgggacaagaacacacgaaaggagttggcggttttaaatgtcagacgggattttgccgatttcggaaccaccatcaaacaggattttcgcctgctggggcaaaccagcgtggaccgcttgctgcaactctctcagggccaggcggtgaagggcaatcagctgttgcccgtctcactggtgaaaagaaaaaccaccctggcgcccaatacgcaaaccgcctctccccgcgcgttggccgattcattaatgcagctggcacgacaggtttcccgactggaaagcgggcagttttgggtttttgaagggggattacgtgttttggttcgtgaaagggtaaccacccccaagggaacaggcctcaatgtatcagggatggggtaccagatctttaatattcatgcagaagacactctcctgcttttctatcttggggaaaaggacgatgtcacttatgcaataaagcccacttgctggccggggcttgacattattccttcctgtctggctttgcaccgtattgaaactgagttaatgggcaaatttgatgaaggtaaactgcccaccgatccacacctgatgctccgactggccattgaaactgttgctcatgactatgatgtcatagttattgacagcgcgcctaacctgggtatcggcacgattaatgtcgtatgtgctgctgatgtcctgattgttcccacgcctggctgagttgtttgactacacctccgcactgcagtttttcgatatgcttcgtgatctgctcaagaccgttgatcttaaagggttcgagcctgatgtacgtattttgcttcccaaatacagcaatagtaatggctctcagtccccgtggatggaggagcaaattcgggatgcctggggaagcatggttctaaaaaatgttgtacgtgaaacggatgaagttggtaaaggtcagatccggatgagaactgtttttgaacaggcccccgatcccccctcttcaactggtgcctggagaaatgctcttgcagcgaaccggtttacgcagtttcggcttagtgaaacaaaagaaatcaccaatccgtatgccatgcgtttatacgaatccctgtgtcagtatcgtaagccggatggctcaggcatcgtctctctgaaaatcgactggatcatagagcgttaccagctgcctcaaagttaccagcgtatgcctgacttccgccgccgcttcctgcaggattttcgcctgttggggcaaaccagcgtggaccgcttgctccaactctctcagggccagtcggtgaagggcaatcagctgttgcccgtctcactggtgaaaagaaaaaccaccctggcgcccaatacgcaaaccgcctctccccgcgcgttggccgattcattaatgcagctggcacgacaggtttcccgactggaaagcgggcaggattttgccgatttcggaaccaccatcaaacaggattttcgcctgctggggcaaaccagcgtggaccgcttgctgcaactctctcagggccaggcggtgaagggcaatcagctgttgcccgtctcactggtgaaaagaaaaaccaccctggcgcccaatacgcaaaccgcctctccccgcgcgttggccgattcattaatgcagctggcacgacaggtttcccgactggaaagcgggcaggattttgccgatttcggaaccaccatcaaacaggattttcgcctgctggggcaaaccagcgtggaccgcttgctgcaactctctcagggccaggcggtgaagggcaatcagctgttgcccgtctcactggtgaaaagaaaaaccaccctggcgcccaatacgcaaaccgcctctccccgcgcgttggccgattcattaatgcagctggcacgacaggtttcccgactggaaagcgggcagtttcccatgaaatataagcctttcaagggcttcaaggaatccaaggtttgcacttccaggcatttccaggcttattctgctggaactctaattcctccatcctttcctaactgccacatctgggattttgccgatttcggaaccaccatcaaacaggattttcgcctgctggggcaaaccagcgtggaccgcttgctgcaactctctcagggccaggcggtgaagggcaatcagctgttgcccgtctcactggtgaaaagaaaaaccaccctggcgcccaatacgcaaaccgcctctccccgcgcgttggccgattcattaatgcagctggcacgacaggtttcccgactggaaagcgggcaaaaatttcgtaacggacaccagtgcgcccgaaggggggattggttaattgcgcgcgagggagaaaaggctcgcggaaaggccaatacttggctggtacgtggcggggatgtgaagtttactcttgaagtgctccggggtgaaagtgttaagaagacctttcgggtaaggccaggtaatgaacgtgaccaggagctgcttactgaggacgcactggatgatctcatcccttcttttctactgactggtcatcagacaccggcgttcggtcgaagagtatctggtgtcatagaaattgccgatgggagtcgccgtcgtaaagctgctgcacttaccgaaagtgattatcgtgttctggttggcgagctggatgatgagcagatggctgcattatccagattgggtaacgattatcgcccaacaagtgcttatgaacgtggtcagcgttatgcaagccgattgcagaatgaatttgctggaaatatttctgcgctggctgatgcggaaaatatttcacgtaagattattacccgctgtatcaacaccgccaaattgcctaaatcagttgttgctcttttttctcaccccggtgaactatctgcccggtcagggatttgccggatttcggaacccaccatcaaacaggattttcgcctgctggggcaaaccagcgtggaccgcttgctgcaactctctcagggccaggcggtgaagggcaatcagctgttgcccgtctcactggtgaaaagaaaaaccaccctggcgcccaatacgcaaaccgcctctccccgcgcgttggccgattcattaatgcagctggcacgacaggtttcccgactggaaagcgggcaggattttgccgatttcggaaccaccatcaaacaggattttcgcctgctggggcaaaccagcgtggaccgcttgctgcaactctctcagggccaggcggtgaagggcaatcagctgttgcccgtctcactgtcgctcctacgcgacgtcccgaccacccccccgtcctctggtcaccgccactcacaccatgggctccagttccgacaaccagaaattgacatgggcccccagctccccccgactcgtcacccgcttcgagcacgcctggggaagcaaagaaaaaaccacatgttgttcgtcacacggatcaagttggtaaagctgggcaggaagccacctgccacagcaacggtcactgctggggtcatactcttcgtgtgcattacatttccagatctgatttctgcgtga

SEQ ID NO: 24605 - DNA, 2618 bp, Homo sapiens
  SIMILAR (271)..(300): 1001254mologous to Plasmid F Protein A,accession number M12987,Smith-Waterman Score=49.
cccgggatatttcttctcggtgaggtagagcttctgcagacagtttcttgcttcctcggccaggtcgcctcgttaagctcgcgttacacggcctgcggcgagcgctagtgataataagtgactgaggtatgtgctcctcttatctcctttagtagtgttgctcttatattaaacaactttgcgggtttttgaaagacttgcggattttgttggtgctttccagtaaatggcaagatttaataaaaaaaccgcaaagcaaatgattaaaggatgttcagaatgaaactcatggaaaccctttacccagtgcataaacgctggtcatgaaatgacgaaggctatcgccattgcacagtttaatgatgacagcccggaagcgaggaaaataacccggcgctggagaataggtgaagcagcggatttagttggggtttcttctcaggctatcagagatgccgagaaagcagggcgactaccgcacccggatatggaaatttcaggacggggttaagcacggtgttggttataccattgaacaaatttatcttagcgcgtgatgtgtttggtacgcgattgccacgtgctgaagactgtatttccaccggtgatcggggttgctgcccataaaggtggcgtttacaaaacctcagtttctgttcatcttgctcaggatctggctctgaaggggctacgtgttttgctcgtggaaggtaacgacccccagggaacagcctcaatgtatcacggatgggtgccagatcttcatattcatgcagaagacactctcctgcctttctatcttggggaaaaggacgatgtcacttatgcaataaagcccacttgctggcctggggcttgacattattccttcctgtctggctctgcaccgtattgaaactgagttaatgggcaaatttgatgaaggtaaactgcccaccgatccacacctgatgctccgactggccattgaaactgttgctcatgactatgatgtcatagttattgacagcgcgcctaacctgggtatcggcacgattaatgtcgtatgtgctgctgatgtgctgattgttcccacgcctgctgagttgtttgactacacctccgcactgcagtttttcgatatgcttcgtgatctgctcaaaaccgttgatcttaaagggttcgagcctgatgtacgtattttgcttaccaaatacagcaatagtaatggctctcagtccccgtggatggaggagcaaattcgggatgcctggggaagcatggttctaaaaaatgttgtacgtgaaacggatgaagttggtaaaggtcagatccggatgagaactgtttttgaacaggccattgatcaacgctcttcaactgatacttcgttatcgacaccagctgccccgatggtggattcgttaattgcgcgcgtaggagtaatggctcgcggtaatgccattactttgcctgtatgtggtcgggatgtgaagtttactcttgaagtgctccggggtgatagtgttgagaagacctctcgggtatggtcaggtaatgaacgtgaccaggagctgcttactgaggacgcactggatgatctcatcccttcttttctactgactggtcaacagacaccggcgttcggtcgaagagtatctggtgtcatagaaattgccgatgggagtcgccgtcgtaaagctgctgcacttaccgaaagtgattatcgtgttctggttggcgagctggatgatgagcagatggctgcattatccagattgggtaacgattatcgcccaacaagtgcttatgaacgtggtcagcgttatgcaagccgattgcagaatgaatttgctggaaatatttctgcgctggctgatgcggaaaatatttcacgtaagattattacccgctgtatcaacaccgccaaattgcctaaatcagttgttgctcttttttctcaccccggtgaactatctgcccggtcaggtgatgcacttcaaaaagcctttacagataaagaggaattacttaagcagcaggcatctaaccttcatgagcagaaaaaagctggggtgatatttgaagctgaagaagttatcactcttttaacttctgtgcttaaaacgtcatctgcatcaagaactagtttaagctcacgacatcagtttgctcctggagcgacagtattgtataagggcgataaaatggcccttaacctggacaggtctcgtgttccagcatacattatacgaagttatattcgatgcggccgcaaggggttcgcgtcagcgggtgttggcgggtgtcggggctggcttaactatgcggcatcagagcagattgtactgagagtgcaccatatgcggtgtgaaataccgcacagatgcgtaaggagaaaataccgcatcaggcgccattcgccattcaggctgcgcaactgttgggaagggcgatcggtgcgggcctcttcgctattacgccagctggcgaaagggggatgtgctgcaaggcgattaagttgggtgaacattaaacaagaagtcagtcagtgtgcaactcagaagataagagaatcctcatcagaaataaacaatgctggcatcctgattcccaacttgcagacttcagaactgtga

SEQ ID NO: 24606 - DNA, 2626 bp, Homo sapiens
  SIMILAR (304)..(1338): 541254mologous to Plasmid F Protein A,accession number M12987,Smith-Waterman Score=832.
atgactccacagaagagaggttacctttgcaaagctggtgctaggaacctagatgtcttacttgagggctgtgaaatctttctcctgattcccatggggatgagaagtgaatcaggagtgtctgatgcagatactgtgtctgctccccggaaaaagcactcactggagcaggggatttttagagcccaagtcgaggctagtaaacctagttccgttcccgcttgtatagtggttggaaatgtaagcggttaccaatttcccccaggaaccagctatggccctgattccgaatccgagctcggttaccgggagaagttcatgtcctttgtagggaccatgaatgaagctggaaaccctccattctcagcaaactattcaaaggccaaaaaaccaaaaccccgcatgttctcactcatagagagaatgtctccttcccccagggtggggtcacaatcagttcaatcttcatgcttcagagacatcccctttgaacaagatcagatgtttccccacccctccctggtgctccgctcaaaggagcagcagccccttctcactcagagtattggcgtcaactcagccagaaaggcaatggcaaaaagaaggagacaccggcgtcgtcgaagagtatctggtgtcctaccaattgccgatgggagtcccgtcgtaaagtgtgcacttaccgaaagtattatcgtgttctggtgcgagctggatatagcagagctgcatatccagattgggacgattatcgcccacaaggcttatgaacgtggcagcgtaacgacccccagggaacagcctcaatgtatcacggatgggtacagattcttcatattcatgcagaagacactctcctgctttctatctggggaaaaggacgatgtcacttatgcaataaagcccacttgctggccggggcttgacattattccttcctgtctggctctgcaccgtattgaaactgagttaatgggcaaatttgatgaaggtaaactgcccaccgatccacacctgatgctccgactggccattgaaactgttgctcatgactatgatgtcatagttattgacagcgcgcctaacctgggtatcggcacgattaatgtcgtatgtgctgctgatgtgctgattgttcccacgcctgctgagttgtttgactacacctccgcactgcagtttttcgatatgcttcgtgatctgctcaagaacgttgatcttaaagggttcgagcctgatgtacgtattttgcttaccaaatacagcaatagtaatggctctcagtccccgtggatggaggagcaaattcgggatgcctgggcaagcatggtctaaaaaaaataatgtgcgtaacgccaatgaagttggtaaagacaccttaaaaggcttttacagtttaaaagagcggcctttggggaatcactttttaggacccaacaacagaccttttggcaaaataatgaagcacaagacaccggcgttcggtcgaagagtatctggtgtcatagaaattgccgatgggagtcgccgtcgtaaagctgctgcacttaccgaaagtgattatcgtgttctggttggcgagctggatgatgagcagatggctgcattatccagattgggtaacgattatcgcccaacaagtgcttatgaacgtggtcagcgttatgcaagccgattgcagaatgaatttgctggaaatatttctgcgctggctgatgcggaaaatatttcacgtaagattattacccgctgtatcaacaccgccaaattgcctaaatcagttgttgctcttttttctcaccccggtgaactatctgcccggtcaggtgatgcacttcaaaaagcctttacagataaagaggaattacttaagcagcaggcatctaaccttcatgagcagaaaaaagctgggggattttgccgatttcggaaccaccatcaaacaggattttcgcctgctggggcaaaccagcgtggaccgcttgctgcaactctctcagggccaggcggtgaagggcaatcagctgttgcccgtctcactggtgaaaagaaaaaccaccctggcgcccaatacgcaaaccgcctctccccgcgcgttggccgattcattaatgcagctggcacgacaggaaacagctatgaccatgattacgaattcgagctcggtaccctcccgcaagaggcccggcagtaccggcataaccaagcctatgcctacagcatccagggtgacggtgccgaggatgacgatgagcgcattgttagatttcatacacgggtcaccgtcgacagcgacacacttgcatcggatgcagcccggttaacgtgccggcacggcctgggtaaccaggtattttgtccacataaccgtgcgcaaaatgttgtggataagcaggacacagcagcaatccacagcaggcatacaaccgcacaccgaggttactccggtctacagtgtctttcagatgcagggatggtgctcaggataggccaagcctgtgtgaaaaccctgcagacagccattctcagggcagttgggctgccctgcactgccaaggtggtcttcccggggccttatgtccacaactgtatgggctccagggctcgcctagtttcatctggttga

SEQ ID NO: 24607 - DNA, 993 bp, Homo sapiens
  SIMILAR (310)..(804): 931254mologous to Escherichia coli No definition line found,accession number U00039,Smith-Waterman Score=795.
atgtggcaggcaatcagtcgtcttttgagcgagcagttaggtgaaggcgaaatcgaactgcgtaatgaactgcctggcggagaagtccatgccgcatggcatttgcgctatgcaggacatgattttttcgtcaaatgtgatgaaagggaactgcttcccggttttaccgccgaagccgaccaactggagttactgtcgcgtagtaaaaccgtcaccgtgcctaagcgcatttattcttggtcagcaaattgcgcgtttacatcaatggagcgaccatgcagtcttgaagatagttaccaccggcgttttataaggggcttatgtgggggccccatcgatatggaaatgtccggaacgaataactttgccgggttatcaccagtgatgaacttgcttgatgtccatttcctgttccgcgataccgctcacgcgcataaaacgctcgacggcaaagtcggtgatgatctgaaagcctcacttgaaggtaaaggactgaaagtactggcctactgggaaaacggctggcgcgatgtcaccaactcgcgcgcaccggttaaaacccccgccgacctgaaagggctgaaaatccgcaccaacaatagcccgatgaatatcgccgcattcaaagtctttggcgctaacccgatcccgatgccgtttgccgaagtctataccgggctggaaacccgcactatcgacgctcaggaacacccgatcaacgtcgtctggtcagcaaaatttttcgaagtgcagaagttcctttctcggccgcacttcgcctattccgcctgtctggtggtgatcaaaatagggctgctgcaagaattatgccgccaagtgatcaaacaccgccgttacatccggcgggaagacgctctgatgcccttccccccctttcactgccgggttggcccaccacaagaaatgacgcggcgtggcgttcccgttatagacgcggctggcgatttccagcgcccccggtcagggcgcagg

SEQ ID NO: 24608 - DNA, 1209 bp, Homo sapiens
  SIMILAR (679)..(1209): 981254mologous to Escherichia coli similar to,accession number D90883,Smith-Waterman Score=908.
atgtggcaggcaatcagtcgtcttttgagcgagcagttaggtgaaggcgaaatcgaactgcgtaatgaactgcctggcggagaagtccatgccgcatggcatttgcgctatgcaggacatgattttttcgtcaaatgtgatgaaagggaactgcttcccggttttaccgccgaagccgaccaactggagttactgtcgcgtagtaaactgcagatgggcgaccagattgaaattatcacccagaaacagccgaaccccagccgtgactggttaaacccaaacctcggttacgtcacaaccagccgtgggcgttcgaaaattcacgcctggttccgtaaacaggaccgtgacaaaaacattctggctgggcggcaaatccttgacgacgagctggaacatctggggatcagcctgaaagaagcagaaaaacatctgctgccgcgttacaacttcaatgatgtcgacgagttgctggcggcgattggtggcggggatatccgtctcaatcagatggtgaacttcctgcaatcgcaatttaataagccgagtgccgaagagcaggacgccgccgcgctgaagcaacttcagcaaaaaagctacacgccgcaaaaccgcagtaaagataacggtcgcgtggtagtcgaagtatggcgaaaacgggtgttttcttcgtcgcgcagaatatgcgatccttcccgcctgatttccgccttgcgcgtgctggcactgctgacacttctctttgctgtcgccttctgggcgggggcgcacgtagcgtggctgatgctggtgatgattggctttaacctctttttctcaccactggtaccgttgaccgatgcactggcgaatacgtggcaaaagcagttcccgcttgattacggcaaagtgcgactgtggggctcggtggcgtttgtcattggctcggcgctgacgggcaaactggtcactatgtttgattatcgggtgatcctcgcgctgttgacgttgggcgtggcatccatgctgctcggctttctcatccgtccgacgattcagccacaaggggcaagtcgccagcaggagagcaccggttggtctgcgtggttggcgctggttcgccagaactggcgctttctggcctgcgtttgtttattgcagggggcacatgcggcctattacggttttagcgccatttactggcaggcagctggctactcggcctcggcg

SEQ ID NO: 24609 - DNA, 1023 bp, Homo sapiens
atgcatgcctgcaggtccgagctgttaggtgaaggcgaaatcgaactgcgtaatgaactgcctggcggagaagtccatgccgcatggcatttgcgctatgcaggacatgattttttcgtcaaatgtgatgaaagggaactgcttcccggttttaccgccgaagccgaccaactggagttactgtcgcgtagtaaaaccgtcaaccgtgccctaaaggtttgggcaagttggcgctgaccgtgaactaacagttttcctggtgaatggattatctcccacctcgtccgctggatgcgcatagcgcatttattcttggtcagcaaattgcgcgtttacatcaatggagcgaccaaccacaatttggccttgatttcgataacgcgctctccacaactccacagcccaacacctggcaacgtcgctggtcaacgttttttgctgaacaacggattggctggcagttggaactggctgcagaaaaagggatcgctttcggcaatatcgacgccatcgtcgagcatattcagcagcgtctggcctcacatcaaccgcagccttctctgttgcacggcgatttatggtccggcaactgtgcactgggtccggatggcccgtacattttcgacccggcctgctactggggtgaccgagagtgcgacctggcgatgttaccgctgcatactgaacagccgccacaaatctatgacggctatcagtcagtatccccgctacctgccgatttccttgaacgtcaaccggtttaccaactctacacgctgttaaatcgtgcaaggttatttggcggtcagcatttggttattgctcagcagtcattggatagattattagcagcatgatatgggttgaggataatggccgctccgtgcggccttttgattaaataaacccaagcagagaaaagaacacataacctgcagcaatacaaataaccggcaggatatacagtgagaaaaactgcaggaaaatagtatggtgcggaacaacaatacgggtctcatgtgg

SEQ ID NO: 24610 - DNA, 2097 bp, Homo sapiens
  SIMILAR (457)..(1422): 961254mologous to Escherichia coli IS5 39.3kDa protein,accession number U70214,Smith-Waterman Score=1624.
atgtttggtggtgatctcacccgtcgttatgggcaaaaggtgcataagctgacgctgcacggcggttttagctgccctaaccgtgacggtaccatcgggcgtggtggctgcacattctgtaatgttgcctcgtttgccgatgaagcgcagcagcatcgttccattgccgagcaactggcgcaccaggcgaatttagttaaccgcgctaaacgctatctggcctactttcaggcgtataccagcacctttgcggaagttcaggtgctgcgttctatgtatcagcaggcggtgagccaggccaatattgtcggtttgtgtgtgggtacccgcccggactgcgtgccggatgcggtgctggatctgctttgcgaatataaggaccagggttacgaagtgtggctggagctggggctacaaaccgcccacgacaaaacactgcatcgcatcaaccgcggccatgattttgcctacagtgatattactgaattcagcagtaagcgccgtcagaccagaaaagagattttcttgtcccgcatggagcagattctgccatggcaaaacatggtggaagtcatcgagccgttttaccccaaggctggtaatggccggcgaccttatccgctggaaaccatgctacgcattcactgcatgcagcattggtacaacctgagcgatggcgcgatggaagatgctctgtacgaaatcgcctccatgcgtctgtttgcccggttatccctggatagcgccttgccggaccgcaccaccatcatgaatttccgccacctgctggagcagcatcaactggcccgccaattgttcaagaccatcaatcgctggctggccgaagcaggcgtcatgatgactcaaggcaccttggtcgatgccaccatcattgaggcacccagctcgaccaagaacaaagagcagcaacgcgatccggagatgcatcagaccaagaaaggcaatcagtggcactttggcatgaaggcccacattggtgtcgatgccaagagtggcctgacccacagcctggtcaccaccgcggccaacgagcatgacctcaatcagctgggtaatctgctgcatggagaggagcaatttgtctcagccgatgccggctaccaaggggcgccacagcgcgaggagctgtccgaggtggatgtggactggctgatcgccgagcgccccggcaaggtaagaaccttgaaacagcatccacgcaagaacaaaacggccatcaacatcgaatacatgaaagccagcatccgggccagggtggagcacccatttcgcatcatcaagcgacagttcggcttcgtgaaagccagatacaaggggttgctgaaaaacgataaccaactggcgatgttattcacgctggccaacctgtttcgggcggaccaaatgatacgtcaccgggagccccagctgcagaattctcaacccaccgtcaatggattaccggcccgaactatggtcggaactgctgccagccccacgcagcccaaacgccaccagcaggctggtgtgcgcattctgctcaataatgccattgaacatgtggtcgatggtgaaaaagtagaactgacgctgcaaagtggggaaacgcttcaggctgatgtggtgatttacggtattggtatcagcgccaacgagcaactggctcgcgaggccaaccttgatactgccaatggcattgtcattgatgaggcttgccgcacctgcgatcccgcgatctttgccggtggcgatgtggcaatcactcgtcttgataatggtgcactacaccgctgcgaaagctgggaaaacgccaataaccaggcgcaaattgccgctgccgcaatgttagggctaccgctaccgctactgccgccgccgtggttctggagcgatcagtacagtgataacttacagtttattggcgatatgcgtggcgatgactggctttgtcgtggcaacccggaaactcagaaggcgatttggtttaatctgcaaaacggcgtgcttatcggtgcggtcacgctgaatcaggggcgtgagattcgcccaattcgcaaatggatccagagcggcaaacgtttgatgcgaaactgctga

SEQ ID NO: 24611 - DNA, 1730 bp, Homo sapiens
  SIMILAR (1084)..(1722): 951254mologous to Escherichia coli arcB,accession number X53315,Smith-Waterman Score=985.
atggtacgggaagatctatacacttattattcttgtaatacttcgcgagagcaacaacaacttgaaaatccgatggaaagccccctgtgctctaaagagattaatcagggcggcgtttttatgctggccgggaaagccagtgatacgttgcttgctggtggcaccatgaataatctcggtggtgaagactctgacactattgttgagaatggatccatttatcgtctggggacggatggccttcagctctacagttccggtaagacgcaaaacctgtccgtgaatgtgggtggtcgggctgaagtgcatgccggtacgctggaaaacgcggtaatacaaggtgggacagtgatcctgttgtcacccaccagcgcggacgaaaattttgtcgtagaggaagatcgcgcaccggttgaactgaccgggagtgttgcattactggacggcgcttcaatgattattggttatggcgcagagctgcaacaatcaacgattactgtacagcagggcgcgccacccgtgaagttgcgctttgctttatacgggagaccagggtttacgaagtgtggctggatgctggggtacaaacccgcccacgacaaaaccttgcttcgcatcacccgcggccatgattttgcttgttatcagcgtacaacccagctggcacgtcagcgcgggctgaaggtgtgttcccacttaattgtcggcctgcctggcgaagggcaggctgaatgtttgcaaacgctggagcgagtggttgaaaccggcgtggacggcataaagctgcatccgctgcatattgtgaaaggcagcattatggcgaaagcctgggaagcggggcgtttgaacggtattgaactggaggattacacgctcactgccggagaaatgattcgccatacgccaccggaagtgatctaccaccgcatttccgccagcgcccgtcgcccgacgctgcttgctccgctgtggtgcgaaaatcgatggacgggaatggtcgagctggatcgctatctgaatgaacatggcgtacagggatcggcgctgggacgtccgtggctacctccaacggagaattccctaatgaagcaaattcgtctgctggcgcagtattatgttgacctgatgatgaagttaggtctggtgcgcttctcaatgttgctggcgctggccctcgtcgttcttgccattgtggtacaaatggcggtaaccatggtgctgcatggtcaggtcgaaagcattgatgttattcgttctatcttctttggtttgctgattacgccgtgggcggtctactttctatcggtggtcgtcgagcaactggaggagtcacgacaacgtctgtcacggctggtgcaaaaactggaggagatgcgcgagcgcgatttgagcctcaacgttcagttaaaagataatattgcccagctaaatcaggaaattgccgttcgtgaaaaagcggaagcagaactgcaggaaaccttcggccaactgaaaattgaaatcaaagagcgcgaagagacacaaattcagctcgagcagcaatcctcattcttacgttccttccttgatgcttcacccgacctggttttttatcgtaacgaagataaagagttttccggctgtaaccgcgcgatggagctgctgaccggaaaaagcgaaaaaaaactgcttcaccttgaacctgctgatgttactcacccgagccgacgcaaagtcattgaaccgatgaa

SEQ ID NO: 24612 - DNA, 2286 bp, Homo sapiens
  SIMILAR (1387)..(2127): 761254mologous to Escherichia coli similar to glucose transport proteins,accession number L10328,Smith-Waterman Score= 886.
atggcagtgtatgacatcgagggccctgtgtgcgtgctgcgcggccgttgtgcggtcagtactagccacagagagtcgcacctatatgtcgtgctagtgcaataccgtcaccagatgaggaaggagaacattaccgcatctggcacctttgcgccatctcagccagcgacccctgtttcgaatacgggcgatgcgatgacggcccttcttacgactattagcgccatctgggcaattatctccccaacaagtctccactgttccctacgcgtgcccacgaaccagtggcccgtcctctctgtatgcttaaaacttggcgcggaattgtatgcttgcgtctaccgcgccaacgcaatacccattcgtgttcaccacacgccgtcaaaatctggtatagtgtcattgactatgacggtgaccgctttacatcatctgccgcatgagcacgcaaatgcacccataccagatgccagtatcaaagatatcgagctcgagttgatactggcctgccgaattaataaacgagaaattcatccgcctatccgcttcttggcctgcgccactagcgtttccagttcagacactttcttcattgccgcttctgcatcaaacttatcttgcgatatcaggttattaatttcctggtaccggctgtggacttgggctacaaaccgccacgacaaaacactgcatcgcatcaaccgcggccatgattttgcctgttatcagcgtacaacccagctggcacgtcagcgcgggcgtgaagggcaggctgaatgtttgcaaacgctggagcgagtggttgaaaccggcgtggacggcataaagctgcatccgctgcatattgtgaaaggcagcattatggcgaaagcctgggaagcggggcgtttgaacggtattgaactggaggattacacgctcactgccggagaaatgattcgccatacgccaccggaagtgatctaccaccgcatttccgccagcgcccgtcgcccgacgctgcttgctccgctgtggtgcgaaaatcgatggacgggaatggtcgagctggatcgctatctgaatgaacatggctattatgttgacctgatgatgaagttaggtctggtgcgcttctcaatgttgctggcgctggccctcgtcgttcttgccattgtggtacaaatggcggtaaccatggtgctgcatggtcaggtcgaaagcattgatgttattcgttctatcttctttggtttgctgattacgccgtgggcggtctactttctatcggtggtcgtcgagcaactggaggagtcacgacaacgtctgtcacggctggtgcaaaaactggaggagatgcgcgagcgcgatttgagcctcaacgttcagttaaaagataatattgcccagctaaatcagccagataccggatcgcaacaaggctattttcttgccggacgttcactaaaagcgccggttattgccgcttcgttaatgctaaccaacctttccacggaacaactggtcggcctttccgggcaggcctacaaaagcggcatgtcggtgatgggctgggaagtgacttcagcggtgacgctgatcttcctcgcgctaatctttttaccgcgctatctgaagcgcggcattgccaccatccccgattttctggaggaacgttatgataaaacgacgcgtattatcatcgacttctgcttcctaattgccaccggcgtctgctttctgccgattgttctctactccggcgcgttggcgctcaacagcctgtttcacgtcggggaatcgctacagatttctcacggtgcggctatctggctactggtaattttgcttggtctggcgggaattttgtatgcggtgatcggcggactgcgcgcaatggcagtggcggactccatcaacggtattgggctggttatcggcgggttgatggtgcggtgttttccccgggggaagaaccccaataggggtgtatatcgcgttactagcgccaaccagtttccaggaggcaaagccttcatcggcttaggaccaccctcttgcgtcttaaaccggaggtttatcccccttttcggggccccttcttttggcggtgaaattgcccactggttttatcgcctttcgaatcaatctgccgattattgggacgcagaaatgtccgactctaacagtcgtctacgccctgagacgagcgtagcaaagaggtgtctgcgcaccgaagcgttgagtacatcagggctgagaggccagggtccaaggcggtctcaaaggcaagacacaatggtgtaa

SEQ ID NO: 24613 - DNA, 4401 bp, Homo sapiens; identical to SEQ ID NO: 18166
  SIMILAR (1477)..(1400): 731254mologous to Escherichia coli phenylacetaldehyde dehydrogenase,accession number X97453,Smith-Waterman Score=76.

SEQ ID NO: 24614 - DNA, 2203 bp, Homo sapiens
  SIMILAR (1075)..(1287): 901254mologous to Escherichia coli yejA,accession number U00008,Smith-Waterman Score=349.
atgtttggtggtgatctcacccgtcgttatgggcaaaaggtgcataagctgacgctgcacggcggttttagctgccctaaccgtgacggtacttttgggcgtggtggctgcacattctgtaatgttgcctcgtttgccgatgaagcgcagcagcatcgttccattgccgagcaactggcgcaccaggcgaatttagttaaccgcgctaaacgctatctggcctactttcaggcgtataccagcacctttgcggaagttcaggtgctgcgttctatgtatcagcaggcggtgagccaggccaatattgtcggtttgtgtgtgggtacccgcccggactgcgtgccggatgcggtgctggatctgctttgcgaatataaggaccagggttacgaagtgtggctggagctggggctacaaaccgcccacgacaaaacactgcatcgcatcaaccgcggccatgattttgcctgttatcagcgtacaacccagctggcacgtcagcgcgggctgaaggtgtgttcccacttaattgtcggcctgcctggcgaagggcaggctgaatgtttgcaaacgctggagcgagtggttgaaaccggcgtggacggcataaagctgcatccgctgcatattgtgaaaggcagcattatggcgaaagcctgggaagcggggcgtttgaacggtattgaactggaggattacacgctcactgccggagaaatgatatcgccatacgccaccggaagtgatctaccaccgcatttccgccagcgcccgtcgcccgacgctgcttgctccgctgtggaacgcgaagctgaaaaatacgcgaatcccatccctagtcgggaatttatcctcgaacatttaactaaacgtgaaaaaccggccagccgtgatgagctggcggtagaactgcacattgaaggcgaagagcagcttgaaggcctgcgtcgccgcctgcgcgcgatggagcgcgatggtcaactggtcttcactcgtcgtacagtgctatgcgctgccggaacgcctcgacctgtgcggaagattcacaacttagcgaccgctcgccaggcttcggttgccagtggtccgtaccgcgttacgtcttggaaattggggcaaaatattgtctattgccgtgtgaaagattactggccagcaaccttaacggtaaaccgtggacgctggaatttcgacaccattcgttccgattattacctcgatgataatgtcgcctttgaagcgtttaaagcaggtgcctttgatttgcgtatggaaaacgacgccaaaaaactgggccacgcgttataccgcgatcgccgggtccgggaagctatcactctcgcctttgactttgaatggatgaacaaggcgttgttttacaatgcctggagtcgcacgaacagttattttcagaataccgaatacgcggccagaaattcccccccacccccggaacttggtgcttctgcccccaataaaaaaagttctcccgtcagaagtcttccccacaaatctaccagccgccggtatccaaaggcgatggttacgatcgtgacaacctgttaaaagccgacaaacttctcaacgaagcgggctgggtgctgaagggtcagcaacgcgttaatgccacaacgggtcagccactcagctttgaattattgcttcccgcaagcagcaatagtcagtgggtattgccgttccagcacagcctgcaacggctgggtatcaacatggacattcgcaaggtggataactcgcaaatcactaaccgcatgcgcagtcgcgactatgacatgatgccgcgcgtatggcgggcgatgccgtggcccagttccgatttacagatttcctggtcatcggaatatatcaattccacttataatgcccccggcgtgcaaagcccggttatcgactcgctgatcaaccaaattattgccgcgcagggaaataaagaaaaattcctgccgttggggcgagcactggatcgcgtattaacgtggaattattacatgctgccaatgtggtacatggcggaagaccgtctcgcctggtgggataaattctcccagccggccgtgcgccccatctatagcctcggtatcgatacctggtggtatgacgtcaataaaacggccaaactgccgtccgccagcaaacagggagagtagatgggcgcatacctgattcgccgtctgttgctggt

SEQ ID NO: 24615 - DNA, 450 bp, Homo sapiens
  SIMILAR (293)..(442): 981254mologous to Escherichia coli similar to E. coli yhaE,accession number U82664,Smith-Waterman Score=246.
gcattatgggtacaccgatggccattaatctggcgcgtgccggtcatcaattacatgtcacgaccattggaccggttgctgatgaattactgtcactgggtgccgtcagtgttgaaactgctcgccaggtaacggaagcatcggacatcatttttattatggtgccggacacacctcaggttgaagaagttctgttcggtgaaaatggttgtaccaaagcctcgctgaagggcaaaaccattgttgatatgagctccatttccccgattgaaactaagcgtttcgctcgtcagcgccagtctccggcggtgaaatcggtgcgcgtgaagggacgttgtcgattatggttggcggtcatgaagcggtatttgaacgtgttaaaccgctgtttgaactgctcggtaaaaatatcaccctcgtgggcggtaacggcgatggtcaacctgcaaa

SEQ ID NO: 24616 - DNA, 698 bp, Homo sapiens
  SIMILAR (207)..(698): 981254mologous to Cloning vector pZEO-SG1 cytosine deaminase:uracil phosphoribosyltransferase fusion protein,accession number L37432,Smith-Waterman Score=799.
tccattgccagacgcagctaggtacctacgccgtcagtgccagaaaccagcacgggttcacgatatttttgcggcaatgcacacagcgcaccgaagccgcccagaccgcccatcactaccggacgacgcgttttcttcactacgcctttgattcttccaaccagagcattacccgcgtcaatatcaacaccggcatctttgtagctaagagagatatcagcaccaagcgctttcgcgaactcgcttccgaagtgggtagcctgctgacttacgaagcgaccgccgacctcgaaacggaaaaagtaactatcgaaggctggaacggcccggtagaaatcgaccagatcaaaggtaagaaaattaccgttgtgccaattctgcgtgcgggtcttggtatgatggacggtgtgctggaaaacgttccgagcgcgcgcatcagcgttgtcggtatgtaccgtaatgaagacacgctggagccggtaccgtacttccagaaactggtttctaacatcgatgagcgtatggcgctgatcgttgacccaatgctggcaaccggtggttccgttatcgcgaccatcgacctgctgaaaaaagcgggctgcagcagcatcaaagttctggtgctggtagctgcgccagaaggtatcgctgcgctggaaaaagcgcacccggacgtcgaactgtataccgcatcgatt

SEQ ID NO: 24617 - DNA, 1440 bp, Homo sapiens
  SIMILAR (1006)..(1437): 961254mologous to Cloning vector pZC320 SopB,accession number U26464,Smith-Waterman Score=678.
atggagaaaaaaatcactggatataccaccgttgatatatcccaatggcatcgtaaagaacattttgaggcattgcagtcagttgctcaatgtacctataaccagaccgttcagctggatattacggtcttgttaaagaccgctaagaaaaataagcacaagttctatccggcctttattcacattcttgcccgactgatgaatgctcatccggagttccgcatggcaatgaaagacaattttgtcaccggcatcgccgaggcccggaataatgtatccgtgctcgttcagtccctgatcaatcgatgcggtatacagttcgacgtccgggtgcgctttttccagcgcagcgataccttctggcgcagctaccagcaccagaactttgatgctgctgcagcccgcttttttcagcaggtcgatggtcgcgataacggaaccaccggttgccagcattgggtcaacgatcagcgccatacgctcatcgatgttagaaaccagtttctggaaaacgttttccagcacaccgtccatcataccaagacccgcacgcagaagttgcacaacggtaatggtcttacctttgatctggtcgatttctaccgggccgatccagccttcgatagttacgttttccgtttcgaggtcggcggtcgcttccccgctatccagcgcaacgacgctggcgcgtttgcccggtttaagcgatcccagaacaccatcaacacccagcattcgcgccggatgcagcgacgccatatggatggcttccgcaggcgttacgcccgtcaactcgaccatattgcgcactgccgcatcaacagacagcgtactgcccgccagcccaccagacgcgccaccgtatactcctatgcttgggtccctgccgttgatttctttatgggtgatcttcatctgatcgccatgctgcacaggtgcaaaccaacagatctgcagaatgaatacatctggggaaccctgactggtgtgagagtatactggacgagcattttgactgattcggaaaatatttcacgtaagattattacccgctgtatcaacaccgccaaattgcctaaatcatttgttgctcttttttctcaccccggtgaactatctgcccggtcaggtgatgcacttcaaaaagcctttacagataaagaggaattacttaagcagcaggcatctaaccttcatgagcagaaaaaagctggggtgatatttgaagctgaagaagttatcactcttttaacttctgtgcttaaaacgtcatctgcatcaagaactagtttaagctcacgacatcagtttgctcctggagcgacagtattgtataagggcgataaaatggtgcttaacctgtacaggtctcgtgttccaactgagtgtatagagaaaattgaagccattcttaaagaacttgaaaagccagcaccctga

SEQ ID NO: 24618 - DNA, 2529 bp, Homo sapiens
  SIMILAR (1698)..(853): 991254mologous to Escherichia coli DNA polymerase II,accession number X54847,Smith-Waterman Score=1508.
ctactggttttcatcaatcaggaagaagctgacttccacacccagcgaggcggcccagttttccagcaggctacatttacgttgtagcaattggcgctcttcgctatcgagccaggattgatgacagacccagatatccaggtcagaggaacaactttgccctacggacgaggtgctgcccatggtgtatacaccagtaattggaagctcacctttcggcggatcctgtactgacattccacgatacagttcaagctcgttcaggtagtggcgttgagtttcatcaggcgtgtaaaggcaaatgcctttgggaacgttaccatcaaggtaacccggcattagcggatggtgatagtgcaacaatgtcggcagtagactgtagacctgttggaatgcaggccccatagcagcaagcgcgcgatccacacgcaattgatttatggcatccagtctctgtttcagagtctcaatatagaggtacaagacgtatcgcctggccaggtgtcgatgacccgagtaaatcggacagcgtttaatgttagaatggagcaaccattgctggcggcctatcccaccgtttggcacggcgataaggtaggaccgcggtattacgggcacggagactgcagcaaaatcggtccccggaccagcatcacatttaccgcccggcgggccaatccagtacagcgtattgccgcgcggatcttgctgcgggatcacctgatctgccggatgtcgtgtaccgcagcgcgtcacgcgaatacctttgatttgatccaagggtacatccggaacgttaatattaagaatacgcccggtgcgcagcggctcgccgaaagtagggcatttcgtcattcgatcccacgggttatcgatagattttccttcgcctaatagctcctgagcgacagtttccagcgagaatgaagagaaattccagaacgcggatttcagcgcctcgataccgtcgataattagccgacctttagcctgggcaaaaaagacgccgtttttaaagccgtgctcgcgccactccagctcgctattatcgcgcccaagacgcagcggaagacggtaacgctcggcatgtttttgcagcattcgcagatcgaactgcaccacgttccaaccgatgatcacatcaggatcgtagttggcaaaccaggcgttgagtttttccagcaactgcgggcggctggcgacgtattccagttcgaaatcaagcgaggaggcgtcgccattctccggccccagcatataaacgatgcgctgcccgcagccttccaggccgatgcagtacagctcaccgtggcgggtggtttcaatatctatagaaacccacttgagcggcggacgatagtcgggatgcggtttcagacgggcattaacgatagtgccattgtgcatatcaccctcgacccacaccggtgaggtgataaaccgctccatcagatagcgttctggcggacgcacatcggcctcgtagacggtaacgccaccttcacgcaggcgcttttcgtaattcatcaattggcgatgggcgcgacagtaaaggccatacaccggctggcggtgaaaatcctttaacgccagcggtgtcaggcgaaagccttgttcaccctgcaaaatatgctgagcgcggggaacctgatcggcgggaataaacgccacggactcttgcggtgcaagcgtaacccgatactttttccatgcttccagcaacgagatttcttcctccgttgcaatttccagatctgcagcatcctgaagcggcgcaatatgctcactggctacctgcatcaggttgttttttgtttcttccgcctcccggatccggaacagtttttctgcttccgtatccttcacccaggctgtgccgttccacttctgaaactccccttccggcgataaccaggtaacattttccggtaacggaccgagttcagaaataaataacgcgtcgccggaagccacgtcataaaccgttttaccccgatgatcttcaacgagatgcacgatgaccctctggaaaccctgcgtaccactattgctgtgaatccctctcattggtaagaaagcgccgatgctccaatcggcaatggagggaccgatactcccacagtcacaggacgcaccctcgtagccccacaccggttgtatccacgagaaggttaaaactttctctctggctgcccttaacattttttccttcatttcaactttggtgaatctgacaagtatgtgtcttggagttgcttttctcgaggagtatctttgtggcattgtctgtatttcctgaatttgaatgttggcctgccttgctagattggggaagttctcctggataatatcctgcagagtgttttccaagttgcttccattatctccatcactttcaggtacaccaattagacgtagatttggtctttttacatagtcccatatttcttggaggctttgttcgtttctttttattcttttttctctaaacttctcttcacacttcatttctttcatttcgtcttccat

SEQ ID NO: 24619 - DNA, 1951 bp, Homo sapiens
  SIMILAR (1201)..(1860): 961254mologous to Escherichia coli hexose phosphate transport protein UhpT,accession number M17102,Smith-Waterman Score=1072.
atggatttgtcaaccccggagcgaggttctccctacccgaggctgctgccgtgtggagatcccctgggtgaaaccattgtcgccattgaccaggaggcaaaaccttcaactgaggacttagggaataagaaggaaacaaaatacattaaactcaaagtcattagatgggataacagtgacttcaatttcctgtattctaattatgagaggattcgggcacgcacaacaaagaaagaggactctgcgactaatgtcccggtgacgtttgaaaaacacggttcccacgccgtcgtatatgcacggcgcagcgccacggtgctgaccgaccggaacaaggaggccccaagagtgccccaaggcggttatatggtttcttttgtggatatccctgaagcgttgacccagggcgaaactgtcgctgaagcgatggaagcggcaaaagatgctttactgaccgcatttgatttttattttgaagataacgagcttatccctttaccttcgccattaaatagtcacgatcactttattgaagtacctttgagcgtcgcctctaaggtattgctgttaaatgcttttttacagtcagaaatcactcagcaagagttagccaggcgaattggcaaacctaaacaggagattactcgcctatttaacttgcatcatgcgacaaaaatcgacgccgtccagctcgcggcaaaggcgcttggcaaagagttatcgctggagtgccttatggacattctcaatcttaataaacatatttccggacagttcaacgccgaactggaaagtatccgcacgcaggtgatgaccctgggcggcatggtggacaagcagctttctgatgcaatcaccgcgatacataaccaggacagcgatctggcgaagcgcgtcatcgaaggccacaagaacctcaacatgatggaagtggcgatcgatgaagcccgcgttgagccatcatcgccaaacatcagtcagacggcgagcgacactgagactggttatggtgatcataaaaccatcgccgagatggagcgtattggtcgacgtaggtcggaacaaaatctgccgtacagcgctggagaaattatcccaacagcatcagccgtaggtggtaagtgctggagtacgttggaccgtcataccatccagatgctgcacgacgtagtgaaagcgttcgcgcggatggacattgacgaaacggccaagtgccagatctttgttgagtatgtgctgaagcccaaagtgatctggctgctgtgcttcgccaacattttcctctatgtggtacgtattggtatcgaccagtggtcaaccgtatacgcgttccaggaactgaaactctttaaagcggtggcgattcagggctttacgctgtttgaagctggtgcgctggtcggtacgctgctgtggggctggctctctgacctggcgaacggtcgccgtggcctggtggcctgcatcgcgctggcgctgattatcgccacgctcggtgtgtatcaacatgccagtaacgaatatatctatctggcttctctctttgcgttgggtttcctggtctttggcccgcaattgttgattggtgtggctgctgttggctttgtacctaaaaaagcgattggcgctgccgatggtattaaaggcacctttgcttacctgattggtgacagctttgccaagttaggtctgggaatgattgccgatgggacgccggtattcggccttaccggctgggcaggcaccttcgccgcgctggatatcgccgcgattggttgtatctgcctgatggcgatagtggcggtaatggaagaacgcaaaatccgccgggagaaaaaaattcaccagttgacagtggcataaacggaactggtgacttttgccccggaatgacgcccggctttttttaatatatcggggacttccagcgtagtggagggaaactttttgc

SEQ ID NO: 24620 - DNA, 3102 bp, Homo sapiens
  SIMILAR (1836)..(1213): 1001254mologous to Escherichia coli K12 putative oxidoreductase,accession number AE000303,Smith-Waterman Score=1064.
tcaacatgatttcgcctccagatacgttgttaaccagtcaggaatgcgtgactccagccacatttgcggatgaagtaatgtaccgccaataaagccaacatgaccgccatgttcagtcagttgatactccacctgcggggggagactttccggtttcgggatcacctgatgatccataaacggatcgtctttggcgtgaataatcagcgtcggtttggcgatccggttcagcatcggcatggcgctacactgacgataatagtcgatagcgtcggcgtagccgtgaattctggcggtgatgagatcgtcaaattcacggatgcgacgtaccgattttaactgcgcgagattaatcggcagcgttccggggtaggctgccagcttgcgcgcggcattgttttgccaacttgcggatacttgcaatctgcactggaacctattctggcagacaagtacttccccgtacttccgctggcggcggcctgtgcgcgtacgccattgtcgaattttaatgttggcgcaattgcgcgcggtgtgagcggaacctggtatttcggtgccaatatggaatttattggtgcgacaatgcagcaaaccgttcatgccgaacaaagcgcgatcagccacgcctggttgagtggtgaaaaagcgcttgcagccatcaccgttaactacacgccttgtggtcactgccgtcagtttatgaatgaactgaacagcggtctggatctgcgtattcatctgccgggccgcgaggcacacgcgctgcgtgactatctgccagatgcctttgggccgaaagatctggagattaaaacgctgctgatggacgaacaggatcacggctatgcgctgacgggtgatgcgctttctcaggcagcgattgcggcggcaaaccgttcgcacatgccttacagtaagtcgccaagcggtgtcgcgctggaatgtaaagacggtcgtattttcagtggcagctacgctgaaaacgccgcattcaacccgactcagatctgtggacaaccctggtcgatgcacagacgtgcacttacatcgaaattcggcgcacacggcgaccggcggacgagtgcgggatttaggcgtaattagaggcagactcattaccagcgttccctcggcgttcacatgcacatcagactgacgacttaagtgatctgcccgcctcggactcccaaagtgctgggaatacaagtcgcaagttaccgcctgacagccgagaactttcagcgtgctggctacgtccatcgcgacatcaccgccgccgataattaatgcgctttgtggaatgctgatatcgccttgcgcctgtcgtgcacgttgcaagaagtcgacggcaatctcaacgtcactatgctcaaacagcggtagcccggaaccgcttgataaccccacggtgaccagtaccgcgcggttttctgctttcagctgctcaagggtgagtgtgttaccgacttcgttgttgcacttaatggtcacgcccattttttcaatacgggcgatctctgcatccagcactgattgcggtaaccggaattgcggaataccgttacgcaaccagccaccggggtgcgcttctttctcataaatcgtgacgtcataaccctggtttgtcagtgtcacactggcctgcaatccggcaggacctgcgccaataatcgcgactttgccgagcgttttagtaccgggctgataaatttccattccggtttgttgttcaaaatcagtaacaaaacgctgtaagcggccgatatcaatgggagcatcaacaccggcacgggtacaaccgctttggcataatttctccgtcgggcacactctgagagagttggttagtggggggcgctgggccatgccaggaacactcagtgtatcactggggaccgttgaccatggaattggcgggtgcgcgtcactcgtaacactttccagagagcttcgatttcgaccgtggatacgagttggattcctgccgtagaggagatcatcgctggctgtggaactggaacatccgtggttgtcagaccctgctaggacactcgggctgctggggatagctcggaccccgaagtgaagccgtaaccgaagcagctgcgtcagcgcacggaagaccgccggacgcggcactacctggcgcaatccttcgcgcagtattcgctccggcagtgggcgtttcactttctgctcgacaatatcacgcccgatatccagcaaattgtgatagcgcacaccagaaggacaggtggtttcacaattacggcaagtgaggcagcgatcgagatgctcctgtttaatcagatagatgcgcccgcgcggcccgtccagttcatcgcccagaagctgataggttgggcaggttgcggtacaaaatccgcagtgaacacaggcgcgcaggatgctgtcggcttccagcgcgcgcgcgttctgccgcatctcttcagttaattgggtttgcatagcctgctcctcaaagttccgcgtacatgcgaccggggttaaacacgccgcaagggtcgagctgctgtttaagctgcattgcgtgccaactcccacgctgtttaaccagtctgaaaccacatcttgcgcgctatgcgcagttaaatccacatgcagcggcgtgatggagacatagccctcatctaccgcagcaaaatcggtccccggaccagcatcacatttaccgcccggcgggccaatccagtacagcgtattgccgcgcggatcttgctgcgggatcacctgatctgccggatgtcgtgtaccgcagcgcgtcacgcgaatacctttgatttgatccaagggtaaatccggaacgttaatattaagaatacgcccggtgcgcagcggctctttacacagtgcgcgcaaaattccaccacccttgctaactctcttttcggactcagcccgcctgcggggggcgcagcgatgcgatgagaggagccgtacaactagatagagacgccgacggagtaacagctggattcttctgacgtggtagaggacgcaccacgcagcaaaggaaggaggaagtgtactcccccgctgatgaccaggcgccttttctaccaccacacctgtcttcat

SEQ ID NO: 24621 - DNA, 872 bp, Homo sapiens
  SIMILAR (347)..(757): 891254mologous to Escherichia coli similar to E. coli yhaE,accession number U82664,Smith-Waterman Score=603.
cgatagcggaatattccatcgcgttccgaaagtgggtttcgctttcggaaatgtgtttgcgttccgcacgaaaggcatacatcaccatggtcatgatgttggcgggcagcaggatcagcaaaaacggtagccacggcatatggctcatcaggtacgtacgcggcgtagcaagcagggaaggatccgcggccatcatcagcgacaccatcatcaccggggtaaggaagatcaaaaaagcttcattcgtggcagacgcacggcgcttcacatcaacagcacaataatgaaaggtaaaaggccacggcagatacagcatcgaaagccagcttacgtcagtgtgatggctcaggttgaagaagttctgttcggtgaaaatggttgtaccaaagcctcgctgaagggcaaaaccattgttgatatgagctccatttccccgattgaaactaagcgtttcgctcgtcaggtgaatgaactgggcggcgattatctcgatgcgccagtctccggcggtgaaatcggtgcgcgtgaagggacgttgtcgattatggttggcggtgatgaagcggtatttgaacgtgttaaaccgctgtttgaactgctcggtaaaaatatcaccctcgtgggcggtaacggcgatggtcaaacctgcaaagtggcaaatcagattatcgtggcgctcaatattgaagcggtttctgaagcccctgctatttgcttcaaaagccggtgcggacccggtacgttgtgcgccaggcgctgatgggcggcttttgcttccgtgccgcgaaccttttccgtggcttgcggacctcacggtaccagcgcgggtgatgtttcttcgcccaggcgctggtaacccatccttccaccat

SEQ ID NO: 24622 - DNA, 1233 bp, Homo sapiens
  SIMILAR (1)..(669): 901254mologous to Escherichia coli O157:H7 evolved beta-D- galactosidase, alpha subunit; cryptic gene,accession number AE005537,Smith-Waterman Score=1090.
atggttaaaaccggcgacaacctgttgtgtgtgcgcgtgatgcagtgggcggactctacctacgtggaagaccaggatatgtggtggtcagcggggatcttccgcgatgtttatctggtcggaaaacacctaacgcatattaacgatttcactgtgcgtaccgactttgacgaagcctattgcgatgccacgctttcctgcgaagtggtgctggaaaatctcgccgcctcccctgtcgtcacgacgctggaatataccctgtttgatggcgaacgcgtggtgcacagcagcgccattgatcatttggcaattgaaaaactgaccagcgccagctttgcttttactgtcgaacagccgcagcaatggtcagcagaatccccttatctttaccatctggtcatgacgctgaaagacgccaacggcaacgttctggaagtggtgccacaacgcgttggcttccgtgatatcaaagtgcgcgacggtctgttctggatcaataaccgttatgtgatgctgcacggcgtcaaccgtcacgacaacgatcatcgcaaaggccgcgccgttggaatggatcgcgtcgagaaagatctccagttgatgaaggagcccaatatcagctcccgtttacgcgctctgtgtgacgagcacgggatcatgctgattgccgataaagtgcagagcggcgcggggcgtcccggcacgctgtttgcgatggaccagatgggcgttgcgccggatcttaccacctttgcgaaatcgatcgcgggcggcttcccgctggcgggcgtccccgggcgcgcggaagtaatggatgccgtcgctccaggcggtctgggcggcacctatgcgggtaacccgattgcctgcgtggctgcgctggaagtgttgaaggtgtttgagcaggaaaatctgctgcaaaaagccaacgatctggggcagaagttgaaagacggattgctggcgatagccgaaaaacacccggagatcggcgacgtacgcgggctgggggcgatgatcgccattgagctgtttgaagacggcgatcacaacaagccggacgccaaactcaccgccgagatcgtggctcgcgcccgcgataaaggcctgattcttctctcctgcggcccgtattacaacgtgctgcgcatccttgtaccgctcaccattgaagacgctcagatccgtcagggtctggagatcatcagccagtgttttgatgaggcgaagcagtag

SEQ ID NO: 24623 - DNA, 2503 bp, Homo sapiens
  SIMILAR (1256)..(1537): 891254mologous to Escherichia coli K12 putative isomerase,accession number AE000179,Smith-Waterman Score=427.
atgcagcggcgtgatggagacatagccctcatctaccgcagcaaaatcggtccccggaccagcatcacatttaccgcccggcgggccaatccagtacagcgtattgccgcgcggatcttgctgcgggatcacctgatctgccggatgtcgtgtaccgcagcgcgtcacgcgaatacctttgatttgatccaagggtcaggggcagacaatttcgcagccatatatggtggcgcgaatgaccgaattactcgagctgacgccgcagtcgcgggtgctggaaattggcaccggttcgggatatcaaacggcaaactgtcgccgcgttctatcaccaggacatccagcccggctcgtgccatgaccaaaatgccctataatccacaggcttctggcgggagcaatctggcggtcagtaaccctgagctggataaactaatagccgcacgcgttgctgcattacgggccgctaacccggatgccagcgcgagcgttccggttgaactggtgacggcatcggcaagttacccaaggagcttgatgagatgtaacaggattctatctccaggaagtgcacgtggacaaatgattataacagcactgtttatctatgcgggtaacccgattgcctgcgtggctgcgctggaagtgttgaaggtgtttgagcaggaaaatctgctgcaaaaagccaacgatctggggcagaagttgaaagacggattgctggcgatatcattctggcgtgctaaatggctgaaaatattcgtcgtttgcggagccgagatctttgttgagtatgtgctgaaaaacaaagtgatctggctgctgtgcttcgccaacattttcctctatgtggtacgtattggtatcgaccagtggtcaaccgtatacgcgttccaggaactgaaactctctaaagcggtggcgattcagggctttacgctgtttgaagctggtgcgctggtcggtacgctgctgtggggctggctctctgacctggcgaacggtcgccgtggcctggtggcctgcatcgcgctggcgctgattatcgccacgctcgtcatcccttttcatatggtattccatccaaacgaacaatatgcgtattgcgtcaatgagttaaacagctcagtggatgtctgggaactgaaagatccgcacggtaatatcgaatgtgtccagacgctggatatgatgccggaaaacttctccgacacccgttgggcggctgatattcatatcaccccggatggtcgccaatttatacgcctgcgaccgtaccgccagcctgattaccgttttcagcgtttcggaagatggcagcgtgttgagtaaagaaggcttccagccaacggaaacccagccgcgcggcttcaatgttgatcacagcggcaagtatctgattgccgccgggcaaaaatctcaccacatctcggtatacgaaattgttggcgagcaggggctactgcatgaaaaaggccgctatgcggtcgggcagggaccagatgtgggtggtttgaccatcgccgttaccgcccacgagggtgatatttttaccgagcagttcaaacagcggtttaacacgttcaaataccgcttcatcaccgccaaccataatcgacaagaggctccaccgcgcagccgcaaaaagagcggacgggtctgcgccgccgcaggaggagcaggcgccgccgccatcatgctgctgcctgtgttcaccctgaaactgcgccacaaaatcagcccccgaatggtggccatagggcgctacgacgggactcacccgtgcctggcggccgccacccaaacgggcaagtccctgatcaatcgatgcggtatacagttcgacgtccgggtgcgctttttccagcgcagcgataccttctggcgcagctaccagcaccagaactttgatgctgctgcagcccgcttttttcagcaggtcgatggtcgcgataacggaaccaccggttgccagcattgggtcaacgatcagcgccatacgctcatcgatgttagaaaccagtttctggaagatccgctgaagtttgaaaaggacaaaataaaaggggcgattcgtaccgattttatattgtctgcggaaatcgtcgccatcacgctggggattgtggatgccaaagctggaagaaaagaaattatgatgtccaccacgttatttaaagatttcaccttcgaagccgctcaccgcttaccacacgtcccggaagggcataaatgtggtcgcctgcacgggcattcctttatggtgcgactggaaattaccggggaagtcgatccgcatacgggctggattatcgatttcgctgaactaaaagcggcgtttaaaccaacctacgagcgcctcgatcaccattatctcaatgatattccaggtctggctggtgctctcgcgactgaatatgcgccagggcgcgacgccaggcgatacgccgcgccgctacgcttaagccacgcagtaccgtctggtacagcaggttccagatga

SEQ ID NO: 24624 - DNA, 486 bp, Homo sapiens
  SIMILAR (22)..(366): 981254mologous to Escherichia coli heat shock cognate protein 66,accession number D90882,Smith-Waterman Score=559.
tggcttgtcgtcgcgctctgaaagacgacgggtgtagaagctgatgaagtgctggaagtggtgatggtgggcggttctactcgcgtgccgctggtgcgtgaacgggtaggcgaatttttcggtcgtccaccgctgacttccatcgacccggataaagtcgtcgctattggcgcggcgattcaggcggatattctggtgggtaacaagccagacagcgaaatgctgttgcttgatgtgatcccactgtcgctgggcctcgaaacgatgggcggcctggtggagaaagtgattccgcgtaataccactattccggtggcccgcgctcaggatttcaccacctttaaagatggtcagacggcgatgtcggctggcggtgcgcatattcgcgtgacgttccaggtcgatgccgacggtcttttgagcgtgacggcgatggagaaatccaccggcgttgaggcgtctattcaggtcaaaccgtcttacggt

SEQ ID NO: 24625 - DNA, 2469 bp, Homo sapiens
  SIMILAR (1)..(666): 971254mologous to Escherichia coli heat shock cognate protein 66,accession number D90882,Smith-Waterman Score=1060.
  misc_feature (1)...(2469): n = a,t,c or g
atggtgggcggatctacccgcgtgccgctggtgcgtgaacggttaggcgaatatttcggtcgtccaccgttgacttccatcgacccggataaagtcgtcgctattggcgcggcgattcaggcggatattctggtgggtaacaagccagacagcgaaatgctgttgcttgatgtgatcccactgtcgctgggcctcgaaacgatgggcggcctggtggagaaagtgattccgcgtaataccactattccggtggcccgcgctcaggatttcaccacctttaaagatggtcagacggcgatgtctatccatgtaatgcagggtgagcgcgaactggtgcaggactgccgctcactggcgcgttttgcgctgcgtggtattccggcgctaccggctggcggtgcgcatattcgcgtgacgttccaggtcgatgccgacggtcttttgagcgtgacggcgatggagaaatccaccggcgttgaggcgtctattcaggtcaacgcgtcttacggtctgaccgatagcgaaatcgcttcgatgatcaaagactcaatgagctatgccgagcaggacgtaaaagcccgaatgctggcagaacaaaaagtagaagcggcgcgtgtgctgaaaagtctgcacggcgcgctggctgctgatgccgcgctngaatcagtcccacctggcggtattggtccggcgatgatgtgtgaaatgattaagcgtaacgatctgctgcgcctgtctgaaacagtcatcaaaccgttttactaccagcgtgttcaggaaactatcgccatcattcgccgctatttaccggaaaatcgctgcctgattcataaaccggaaggagccattttcctctggctatggtttaaggatttgcccattacgaccaagcagctctatcagcgcctgaaagcacgcggcgtgctgatggtgccggggcacaacttcttcccagggctggataaaccgtggccgcatacgcatcaatgtatgcgcatgaactacgtaccagagccggagaaaattgaggcgggggttatgaccaatacccgccagcgtgtaggcttcgctgtggttgccgaaccaggagagcgcgaacagcgtcatgttagcgatagagtgctcgtagccggacgcgataaatgccagcagacaccaccagatagcgataaatttcgccgccccttcagtgcgcagcgccatccagattgccaggcaaaccagccagttacacaatgcacctttgaagaagagtaccattgccggtgcagtggttttagccagcgcgacggagtgaacgatgctggtatctaccggcagcaggctaccgccgccccagctatagagcatggcaacgaagacggaaccgaccaggttacccagccaggtttgcggcaggattgcccacatttgcccgtggctgatgctgcccgcttttaccccaaagagatcctgcgtatcgaaaaagcctgtggtcgtgaacccggcagcaccggcctgctggcggttattgaatctccgctggggattacccgcgcagtggaaatcgctcacgcttccgagcgtttgatcggtatcgccctcggtgcagaagactatgtgcgcaacctgcgtacagaacgctccccggaaggaactgaactgctgttcgcacgctgttccattttgcaggccgcgcgctctgcgggtattcaggcgttcgataccgtctattccgacgctaacaacgaagccggatttctgcaagaagccgcccacatcaaacagctgggctttgacggcaaatcgctgatcaacccgcgtcagattgatctgctgcacaacctctacgcaccgacccagaaagaagtggatcacgcccgccgcgtcgtagaagccgctgaagccgccgctcgcgaaggcctcggcgtggtttccctgaacggcaagatggtggacggtccggttatcgatcgcgcccgtctgaactttccggcatccgcgaagaataaggcaatcaaaatgacgcagaaaattgaacaatctcaacgacaagaacgggattgccggggccgccttggcggtattggtccggcgatgatgtgtgaaatgattaagcgtaacgatctgctgcgcctgtctgaaacagtcatcaaaccgttttactaccagcgtgttcaggaaactatcgccatcattcgccgctatttaccggaaaatcgctgcctgattcataaaccggaaggagccattttcctctggctatggtttaaggatttgcccattacgaccaagcagctctatcagcgcctgaaagcacgcggcgtgctgatggtgccggggcacaacttcttcccagggctggataaaccgtggccgcatacgcatcaatgtatgcgcatgaactacgtaccagagccggagaaaattgaggcgggggtgaagattctggcggaagagatagaaagagcctgggctgaaagtcactaa

SEQ ID NO: 24626 - DNA, 3294 bp, Homo sapiens
  SIMILAR (2604)..(2026): 1001254mologous to Escherichia coli K12 putative synthetase,accession number AE000181,Smith-Waterman Score=1014.
ttaaattgcataacgatttaaatagtcgagttgcgcattcatttccttattgtttaacttgtaagcctgagcaaaaagttcaggagggaggtaaacgtcataatgattgccagtgttcattaaataaccatactcaagatcttcatctgttgaaaaggattcattccccaaggagattgatgccacattactattaacaataaataatgagcaaatgctatctgaaagaacaacaagaaaattcttcaccgctttaatcctatccgacgtgtcggtatctaaagcaagcaagttcttgttatcattaaatataaactcgggtaaatgcaggatacatttttcgttattcaagcaactatcaatgaattgttttttaaaaaacagaaagctccatgacataagactactctgcccctgaatttggttgtcagattgtagatcaacgccaaataacgtctttacatcttccctgagattatagaatgccgtatcaacaagagcctcgatcgtttttttatcaaccattttaatgaattcgttgtaaacttccttttgcatcttataactgaccagcgcccatgaataatcatgttgttttaaaaccagtatagctcttaacagacaatatccatcgccatctacaggagcatattttaatcctaatgcctggttagtttcacgctgaataaaagatatcccagacaaatcaatgtcagaatccaaatcagatattcccggcgtatttatccgctctggctggacacttatattttcatcatcaaaacaatactcagaaaaaacatcatcacacgcattaatgttttcaatatactccataaagttataccaataataacctttaaaattggcaaaggcggcgtcaaagtcacggcggctcactgttttaccgtaattatccgcaaggaattttccgcgttcgctctctttaatttcttgattcaggcgtaccatcgtaccgaagtatgcgtccggatcaaaaccaaagcaggcaccgtgtttggcatattcgtagcgttccaggcaggaacgtccgccagctcctggcatgacttcacttagtttagcggccgtttccagtgataatccggtttccggcgatgaacacattcggtggcgcgcgcttgatgcagaaataaccggcagcatggttgcgatgtgcgcagacaggctggcatacaggtagtgtgcaaagtagaacaccagaaccagtacaatcaccgttgcgtttggtgagaatccttccaggtgcgtactcatggtaccggcgaaccagtcaataaaaccagaacgagtcaggccgttagccatcacaaccagagttgccaggttgaccagtgtgttccatgcgctgttatagcgggtaatgtctttccaaggcacaacgtgcagggccagcattagcgaaactgccagcagaccaaccgcagtagcattaatgacttcactaagctgagcaatacaaggccaatcagtgtccactctctggggatcaagcagagtcgaccggacaggcatgcaaaggcgtcgccagttgtgaccgcagtaaaagcgtgcgagcaggtcatagcagccgtaaatcagatagctgacgaccaccagcccgaccgcactaagcagcgcaacgcgattgtagtcgcggatgaccttccagacctcttcccagtccacttttttggcgtagaccaccagcaacacaatcaccgcgataaaaaacagccaggtgaggatcttctttgctgctgacaatcctgcggcaataatgccgttcagattatcgcgcagcgtctggttaaaatgacgatcgtggatgatgacatttgcttcgagattcagtgacaaactgagcggatcgagattactggaccctactgtcgcccagtgatcgtccatcaatgccactttgccgtggagcgggcggcggcggtactcaaaaacctgaacgccgcctttaaccagatagtatccagaaaggcgaccgaatctgacaacggcatatccgttcgcctgcgcttctcccggctggcggttctcttccgctttgtgatgacgtcgccaccagcgtcgtgccgcgctctgtccaggcaggttttccagctcaaactggagaatatcttcgacaatcggcccttcaaggcgtaccgcgtaatcctgtttagcctctggaccgtagctggacatatgctcggcggagtaattcagcccgccaataaaggctatacgcgcgtcgatcaccacaattttgcgatgcatccggcgaaacacattggtgcgcataccaaaaaggcgagggcggggatcgtagtagcggaacactacgccagctgccgtcagttcattgacaaactcatcgctgagatccggcgaaccgtagccatccagcaagacttccgctttaaccccgcgttgcgctgctgccagtagtgccgcatgcagttgtttgccgacgtcatcctcaaaccagataaacgtttcaagaatgatgcgttcttgtgcctcgccaatcgccttaaacaccgcgggataatattgctcgccgttttccagcaactggatcttattgccttcgcgccagctacatttcataaatgaatctccgcacggaaacgtgcgcgccgggcgtccgtgggcgcgggtaaaaatctcatccagtccggcctgcacttttaacggatgattagctttttgccgccagtcattgaaatcacccgccaccaataccggttcgccgtccggtagctcattcacccattcggcgagcatcgcaagtgcgatcacatgaatcgcttttccggtcatcggcggcacaatgcggcagtagagcacgccgcgcttttccgcaccatcgaccgaaacatcgcgattctcataatgttcaatgggataaaaaattgtagaatggtcaatgtgccaattgggagatcttatccggacaatttcgtgcgtattcagggtccggtgaatctcttcctgcgccttgggaaagtgaatatcagccgccgtaccagcttcgattcgccgctgccggtacaggtactggaagctagcccgaaaggtcacaaaaccgccgttgctcatcaccagaatatggtcgccaggctgagcggttttcaccaccatatctgccagcgtatccacatcgccactccagtgtgcaggctgaacgcaggcttctgccacttctgccacctgccacggaatatgcgccggttgcagcaggaagacttcatcggcacgacctaatgaaggtgccagatcgtctttgcagatccccat

SEQ ID NO: 24627 - DNA, 3144 bp, Homo sapiens
  SIMILAR (2068)..(2304): 511254mologous to Escherichia coli dihydroxybenzoic acid- activating enzyme,accession number X15058,Smith-Waterman Score=158.
atgcacgtgcgcctcaacgtccacgattcacatttgcggtatgctgcgtccacatgcactgcgtcttacccatgtctggagcacaaccgttggtctgtagcactagactgccatttaaattgcacatctgagccccaactgctgctgtgtggcagcatgctgtgtatttgcgtgtcattttgtgtgctgcatcatataccagcataccatacagcctacaccatgaccgtctgccattgccgcatccgggatcgactcagtgcctggcttgccgacgctcggtacttccagcatctacattcaatgtgtggggacactatccgaggatccccgaactggttaatctcagctcagcgtcaggcgcttgtgtgggtgaactctgatggccatgacgatgagcgcgatgtaggaatagggcggcttctccggggccggatgccggcgttggtcttcttggccttggacgggccggacgacgccttaattgccgttattggtagcgatggttcaggcaagtcaacggtgtgtgacatcttattaccgtggtcgaaaaatatggtgctgccgaaagagttcattaggaaaacaggccggaaatgtcggtcgtgcagtgacaaaattaccgttatgggaaaatccttacataaaacaattgaacgaaatcagctcctgctgcgggtcactctagaggatccctgcacatgcaacggcatgcacaagtatttcaatcatggcattcctgtcggcattgcgaactttaaatgccgctatgcactatggccggttggtcgtcgcgtggtatcggtagaacagcgcaagctgcgcgtgaagccaatgcaccggcttcattttgctcggcgctctggttcaacgtatgcaaccattgccttcggtgcattgctgatcgccatttacactatgtgggaacatcactgtatgagcactggtatcagcagccgatgtatctgctgccggtgccgtctggtacaacgtcctgacacttattggtcatctgctgttccggtccgcccgctgcaggacaacctggcgcgttgctatgaacaactgggcgttatcttgagctcaagtcgcgcatgtttgatcctgatattgaagataaagccaggcaccgctgtacgatttggctctcgccaacggtctgctgatgcgacattgaatcagacgaaactctcgctgctgacccgcttacgtggcgtcgtggtcaacggggaacgcgtcgcacgctgcattattactttgtcgcaaggatattcacgagcgtgccagctcttctcatattcagtatcaaacattcgtgaacattttcgccacagcgacgtgctgttccgttttcagcggctgagtcgatgcagggccaggcgtgccagcaactgtcacgctgtattttgttgtcaccgtgattcgttggcggcaataaacgctgattcacccggtttaagctgtaacgctgagaacctttccacaacgttgcatcgccttcgacgcagaacaaaatgcggcactctgctggctaatggtggtttctttatcactaagcatggggacgaccggcactatcaccgggtctcacgctttatgcgcgaacaatccaaaccggtgaccattgtcggccgcaaccggaagagggcagcagcattcccggcattcgccgctggcctacgaatatctgccggggattttcaacgcttctctgctttccggtggcaccaccggcacaccgaaactgatcccgcgcactataacgactactactacagcgtgcgtcgtagcgtcgagatttgtcagttacacaacagacacgctacctgtgcgcgatcccggcggctcataactacgcatgagttcgccaggatcgctgggcgtctttcttgccggaggaacggttttctggcggccgatcccagcgccacgctctgtttcccattgattgaaaacatcaggttaacgttaccgcgctggtgccacccgcagtcagcctgtggtgcaggcgctgatcgaaggcgaaagccgggcgcagcttgcctcgctgaaatgttacagagggttcacatcaccgtgcaggggcgcgagcaaagtcagattaaccgtgccggcgagaagatccctgccgaagagcatccgcaacctgctgctgcgccacccgccggtgatctacgccgcactggtgagcatgaagatgagctgatgggcgacaaaagctgcgcttatctggtggtaaaagaccgctgcgcccggtgcagatataaccgttcacatccagcgcgataccttcctgataacgtggcggcgcgcttcgctacccaccagcagggaagagaggtagttaccccggctttgccgccgtcgggatggtgtttggtgctgcgcggttccaggagaaaccatcgcatcgatcccctgctccagcgcttctgcgcccagatacgtccccacgggaaagcagcgataatcacgtcggttgagtatcccgctggcggtttactcccatgccaacatcaccgacgaagatcagcggacggatatagcgctgaccaaatacgccgccatccgtggaatacctgcaccgatccgccggtaaatttcaactctttgctgcgacgaagacgtaatcggtaccgagctcgagttcgtatccgtattacaatcgagctcggtaccggaagtatcgagccgtttaccccaaggctgtatggccggcgaccttatccgctggaaaccatgctacgcattcactgctgcagcattgaccatcaatcgctggctggccgaagcggcgtcatgatgactcaaggcaccttggtcgatgccaccatcattgaggacccagctcgaccaagaacaaagagcagcaacgcgatccggagatgcatagaccaagaaaggcaatcagtggcactttggcatgaaggcccacattgggtcgatgccaagagtggcctgacccacagcctggtcaccaccgcggccacgagcatgacctcaatcagctgggtaatctgctgcatggagaggagcaattgtctcagccgatgccggctaccaaggggcgccacagcgcgaggagctgccgaggtggatgtggactggctgatcgccgagcgccccggcaaggtaaaaccttga

SEQ ID NO: 24628 - DNA, 3969 bp, Homo sapiens; identical to SEQ ID NO: 1146
  SIMILAR (3633)..(3475): 701254mologous to Escherichia coli 37KD protein, similar to YI22-ECOLI,accession number D85613,Smith-Waterman Score=164.

SEQ ID NO: 24629 - DNA, 2829 bp, Homo sapiens
  SIMILAR (2322)..(1429): 871254mologous to Escherichia coli hycE,accession number X17506,Smith-Waterman Score=1323.
  misc_feature (1)...(2829): n = a,t,c or g
atgttctctggcgagaagatcaaccgcactgaaaaccgcgccgtgctgcacgtagcgctgcgtaaccgtagcaataccccgattttggttgatggcaaagacgtaatgccggaagtcaacgcggtgctggagaagatgaaaaccttctcagaagcgattatttccggtgagtggaaaggttataccggcaaagcaatcactgacgtagtgaacatcgggatcggcggttctgacctcggcccatacatggtgaccgaagctctgcgtccgtacaaaaaccacctgaacatgcactttgtttctaacgtcgatgggactcacatcgcggaagtgctgaaaaaagtaaacccggaaaccacgctgttcttggtagcatctaaaaccttcaccactcaggaaactatgaccaacgcccatagcgcgcgtgactggttcctgaaagcggcaggtgatgaaaaacacgttgcaaaacactttgcggcgctttccaccaatgccaaagccgttggcgagtttggtattgatactgccaacatgttcgagttctgggactgggttggcggccgttactctttgtggtcagcgattggcctgtcgattgttctctccatcggctttgataacttcgttgaactgctttncggcgcacacgcgatggacaagcatttctccaccacgcctgccgagaaaaacctgcctgtactgctggcgctgattggcatctggtacaacaatttctttgataaaaatgatgccctggtgatggtagacgacttcccacgccggtcgggtttgtcgtggaaaattgtcgtggttccccatgaatactgggtgggcggttctactcgcgtgccgctggtgcgtgaacgggtaggcgaatttttcggtcgtccaccgctgacttccatcgacccggataaagtcgtcgctattggcgcggcgattcaggcggatattctggtgggtaacaagccagacagcgaaatgctgttgcttgatgtgatcccactgtcgctgggcctcgaaacgatgggcggcctggtggagaaagtgattccgcgtaataccactattccggtggcccgcgctcaggatttcaccacctttaaagatggtcagacggcgatgtctatccatgtaatgcagggtgagcgcgaactggtgcaggactgccgctcactggcgcgttttgcgctgcgtggtattccggcgctaccggctggcggtgcgcatattcgcgtgacgttccaggtcgatgccgacggtcttttgagcgtgacggcgatggagaaatccaccggcgttgaggcgtctattcaggtcaaaccgtcttacggtctgaccgatagcgaaatcgcttcgatgatcaaagactcaatgagctatgccgagcaggacgtaaaagcccgaatgctggcagaacaaaaacctgggcaacaggaagcaaaactcgcgttaaaaaccttccattggcagcaggccatagccgacaaacgggtgatcggcgcgggtatcacgggcgtgaccgctggcacggaccatcgggccgacgttactgaagtcgcgagcgatttccgggtccagacgaccaatgccgacagtgcgctgttccatgttcggagtgctcagcagcacatccaccagctcctgcacttcacgacgcatctgttgtgccagctggcgggtctggatcatgtcgtctttcagcagatcgcgacgaatcccgccgatcaagttcaggccgtaggttttacgcgcaccggtaaggatctctgccattttcatggaggtttcacgcacgcggaagaactgcataaagccggagtcgaagccggtaaagtgacaggccaggccaaggttgagcagatgcgagtgcaagcgttctacctccagcagaatggcgcggatcatctgcgcacgttctggcacctgaatacccatcgcgttttccaccgacgtggtgtaggcggtgctgtgggcaaagccgcagatcccgcacacacggtcagagaggaaggtcacttcgttataacccatacgggtttccgccagtttttccatgccgcgatggacgtagaacagacngtagtcggcgtcgattatggtttccgcatcgacgaacagacggaagtggcccgggtcatcagaagtgacgtgcagcggaccaatcggcacgacgttggttttcttgtcggccaattcggtgatggactcgtaggtttcaacatcgggggtcggggccgacgcctgaccatattcctgctgtctttaccccacgggataagttcattccggccgtcattccggaggaaccggacgacgttattccgcagaacaaccggaattaaaccgccatattgggcacttacggctggccgtccggtaaacgagcggtcaattgcccgctattttctggccgcgggggctattggcgcgctgtataaaatgaacgcctccatctctggcgcggaagtcggctgtcagggggagattggcgtggcctgttcaatggcggcggcagggttaactgaactactgggcggcagtccggcgcaggtatgcaatgcggcggaaatcgcgatggagcataaccttgggctgacctgcgatccggttgccggacaggtacaaatcccgtgcattgaacgtaatgccattaatgccgtgaaagcagtaaacgccgcgcggatggcgatgcgccgcacctcggcaccgcgtgtttcactcgataaagtgatcgagacgatgtatgaaaccggcaaagatatgaacgataaataccgcgaaacatcacgcggaggactggccattaaagtggtctgcggctga

SEQ ID NO: 24630 - DNA, 1102 bp, Homo sapiens
  SIMILAR (1)..(336): 1001254mologous to Escherichia coli ribonuclease II,accession number X67913,Smith-Waterman Score=564.
atggccgagcgtcgccgtctcaaccggatggcagaacgtgatgttggtgactggttatacgcacgcttcctgaaagacaaagccgggaccgacacccgtttcgcagcggaaattgtcgatatcagccgtggcggcatgcgtgttcgtttggttgataacggcgctatcgcctttattccggcacctttcttacacgctgtgcgcgatgaactggtttgcagccaggaaaacggcactgtacaaattaaaggtgaaacggtttacaaagtgactgacgttattgacgtcactattgccgaagtccgcatggaaacccgcagcattattgcgcgcccgcatggggacgaccggcactatcaccggcgtctcacgctttatgcgcgaacaatccaaaccggtgaccattgtcggcctgcaaccggaagagggcagcagcattcccggcattcgccgctggcctacggaatatctgccggggattttcaacgcttctctggtggatgaaggtgcctggatattcatccagcgcgatgcggaaaacaccatgcgcgaactggcggtgccgggaaggaatattctgtggcgtcagctccggcggcgcggttgccggagcactgcgggtggcaaaagctaaccctgacgcggtggtggtagaaagatcatctgcgatcgtggcgatcgctacctttctaccggggtggaagatatcagcttcgaatggattgttgtcgatggcggttccaacgacggcacccgtgagtatctggaaaatctcaatggtatctttaacctacgctttgtcagcgagccagataacggtatctacgacgccatgaacaaaggcattgcgatggcacaaggcaagttcgcgttgtttctcaattcgggcgatatttttcatcagaatgccgcaaattttgtccgtaagttaaaaatgccaaaagataacgtgatgatcaccggcgatgcgctgctggattttggcgacgggcataaaattaaacgtagcgccaaaccggtgctggtatatttatcacagcctgcccgccagtcatcaggcgatatttttgcctgtatccggcttgaaaaaatggcgttatga

SEQ ID NO: 24631 - DNA, 2347 bp, Homo sapiens
  SIMILAR (1010)..(1450): 981254mologous to Escherichia coli Hsp70,accession number U01827,Smith-Waterman Score=725.
atgttcatgattggcgcgttggtgcttgccctggtcatgacgctgataacatttatggtgctacgtcggatcgtcattcgtccactgcaacatgccgcacaacggattgaaaaaatcgccagtggcgatctgacgatgaatgatgaaccggcgggtcgtaatgaaatcggtcgcttaagtcgtcatttacagcaaatgcagcattcactggggatgacagtagggactgttcgacagggcgcggaagagatttatcgtggcaccagcgaaatttcagctggcaatgcggacctgtcatctcgcaccgaagaacaagcggcggctatcgaacaaactgccgccagcatggagcaactcactgcgacggtgaaacagaatgcggataacgcgcatcatgccagcaaactggcgcaagaggcttctattaaagccagcgagggcgggcagacggtgaacggtgtagtaaaaacgatgggcgctatgtccacgagttcgaagaaaatttctgagatcaccggccgtcatcaacaggggattcgaacccctgttaccgccgtgaaagggcggtgtcctgggcctctagacgaaggggacacggatactgcttattacgcgttacgcgacattttcgccctcaccccaaatcgtaaacgccttgctattcccgtgtcaacagacaatcctggtaagccctgcaaagacccttctttaagcaaggatgtatccaaccgagttccccaacgggtaccctgttacgactcaccccgttcatcatcggtaaatgggaaccgcctccccggtaaagattttcacgatgacgagaggtctatggggcggagcggttcgtatgtcttggcactcgcgtacccacccaaaatcgcgctgagcgatgcggactccgtgaccgttaacgttgcgggctggcagggcgaaatcagccgtgaacaattcaatgaactgatcgcgccactggtaaaacgaaccttactggcttgtcgtcgcgctctgaaagacgacgggtgtagaagctgatgaagtgctggaagtggtgatggtgggcggttctactcgcgtgccgctggtgcgtgaacgggtaggcgaatttttcggtcgtccaccgctgacttccatcgacccggataaagtcgtcgctattggcgcggcgattcaggcggatattctggtgggtaacaagccagacagcgaaatgctgttgcttgatgtgatcccactgtcgctgggcctcgaaacgatgggcggcctggtggagaaagtgattccgcgtaataccactattccggtggcccgcgctcaggatttcaccacctttaaagatggtcagacggcgatgtctatccatgtaatgcagggtgagcgcgaactggtgcaggactgccgctcactggcgcgttttgcctgcgtggtattccggcgctaccggctggcggggccggtggatctcttcctgcgcccttgggaagtggatatcagccgccgtaccagcctcgattcgccgctgccggtacaggtactggaagccagcccgaaaggtcactacacccaattagtggtgcagccgctggggtggtacaacgaaccgctgacggtcgtgatgcatggcgacgatgccccgcagcgtggcgagcgtttattcgttggtctgcaacatgcgcggctgtataacggcgacgagcgcgcttcccgcgatccgggctttttaatggcaaggtttgtaacctgtagacctgataagacgcgcaagcttcgcatcaggcaacaccacgtatggatagagatcgtgagtacattagaacaaacaataggcaatacgcctctggtgaagttgcagcgaatggggccggataacggcagtgaagtgtggttaaaactggaaggcaataacccggcaggttcggtgaaagatcgtgcggcactttcgatgatcgtcgaggcggaaaagcgcggggaaattaaaccgggtgatgtcttaatcgaagccaccagtggtaacaccggcattgcgctggcaatgattgccgcgctgaaaagctatcgcatgaaattgctgatgcccgacaacatgagccaggaacgccgtgcggcgatgcgtgcttatggtgcggaactgattcttgtcaccaaagagcagggcatggaaggtgcgcgcgatctggcgctggagatggcgaatcgtggcgaaggaaagctgctcgatcagttcaataatcccgataacccttatgcgcattacaccaccactgggccggaaatctggcagcattcccggcattcgccgctggcctacggaatatctgccggggattttcaacgcttctctggtggatga

SEQ ID NO: 24632 - DNA, 679 bp, Homo sapiens
  SIMILAR (32)..(394): 901254mologous to Escherichia coli branching enzyme (EC 2.4.1.18),accession number M13751,Smith-Waterman Score=588.
  misc_feature (1)...(679): n = a,t,c or g
aatctcatgtccgtcgccgtacatcggagcgatctgctaccgccctggtgatacccagcttgatctgcatgttgacccgtacggctttgaatggctggtggtggatgacaaagaacgctcggtgctgatctttgtgcgtcgcgataaagagggtaacgaaatcatcgttgccagtaactttacgccggtaccgcgtcatgattatcgcttcggcataaaccagccgggcaaatggcgtgaaatcctcaataccgattccatgcactatcacggcagtaatgcaggcaatggcggcacggtacacagcgatgagattgccagccacggtcgtcagcattcactaagcctgacgctaccaccgctggccactatctggctggttcgggaggcagaatgacacaactcgccattggcaaacccgcttcccttggggcgcatttagaaagggaagggggggaaaatttcacatttttttccttaaatgccgacggggaaaaattgtggtctttgacgccaatggccaggacatcgttatgacttgccagggcacagtggcgacatttggcacgttattgccggatgcccgcccggntttgcgtatggtatcgcgtcatggccctgcaacccgccgggggcatgcttaccccggcagtggtgatgatcttgccgcggaaatgag

SEQ ID NO: 24633 - DNA, 2487 bp, Homo sapiens
  SIMILAR (1023)..(19): 991254mologous to Escherichia coli TldD protein,accession number D44451,Smith-Waterman Score=1697.
ttaatcattattacgcataccgccaacagtcaggttatcgactttcaacgttggctggcccacgccaaccggcaaactttgcccttctttaccgcagacacccacgccgttatccagtttcaggtcgttgccaaccatcgaaatctgctgcatggtttcgataccggaaccaatcaacgttgcgcctttcaccggcttcgttactttaccgttttcaatcagatatgcttctgaagtggagaaaacgaatttgccggaggtgatatccacctgaccgccaccaaagttcggtgcatagataccgtactcaacggattcaataatttcctgcggggtcgatttacccggcagcatataggtgttggtcatacgcggcatgggcagatgggcgtaggattcacggcgaccgttgccagtcggcgtcatccccatcaaacgcgcgttgagtttatcctgcatgtagcctttcagaatgccgttctcaatcagcacgttgtactggcctggcgtaccttcgtcatcaatcgccaccgaacctcggcgatcgaccatcgtgccatcatcaaccacggtacacagttctgaagccaccagctccccgacctgtccactaaatactgaagtgccacggcggttgaagtcgccttccagaccgtgaccaaccgcttcatgcaacagcacgcccggccaacctgcgccaagtactaccggcatggtgcccgctggtgcagcaacggcagaaagattgaccagcgccatacgcactgcttcttttgcccatgcatccgcacggacttcgccgtcgagatcggcaaggaagaattcataaccaaaacgaccgccgccgccactggcaccgcgttcgcgtttgccatcttcttcgacgagaacgctcacggaaagacgcaccagcggacggacatccgccgctagcgtgccgtcggtggccgcaaccaaaattaattcatagacaccactgaggctggcagtcacttcctgtacgcgcttgctctcgcgggcaaccgttgtcatcgtagatgcaatcagtttacccacttcagcgtacccgccagagagcaaacttcgtgggagatgccttccatcaatgcagccgtcgcccatgaaggcgtaggtgtagtggtcgacaatgtcgtggcccggacggttaaactgcgccgccagcgttttttctgcaatcgccataccgactgcgttggcaataccctgacccagcggaccggtggtggtttccacaccagcggtgtaacccacttccgggtgacccggagttttagagtgcagctgacggaagtttttcagttcttccatcggcagatcgtaaccggtgaggtgcagcaggctgtagatcagcatggagccgtggccgttggacagcacgaagcggtcacggtcagcccaggacggattctgcgggttgtgtttcaggaaatcacgccacaggacttcggcaatgtcagccatacccataggggcacccgggtgaccggatttggctttctgtactgcgtccatgctcagcgcacgaatagcattggcaagctctttacgtgaggacattttgactccagatcggatgatgaagggcacgcccttaacgacttgacgacagcgcgttttggtaaattcgatgctggagcctttcgggataaacatcacgtcgcctgctttggcgatcatggtttggccttcgtggcgaacatgcagctcccattccagcaccatgtcgatttcgtcgtagttcagggtccacgggaagaatgcgttctcccactgaataaaaccggcggccatgctgctgccgtcgtctccggtcacaagatcagtcaagcccacgcaatgcggctctgcgccgtcgaaacgaccaaacttgacgctactgccatcaatcactttgatgccgcctttgccggtcaccgatttgaagctcggctgcattgcgccctgctccagcgactgtttttccttcatcactttttccatcagctgtgcgaccaggctttcggtaaactggcttccggcagctgggcaatgatggtttcgcggatgcgctggctttcggttttgtcggctggcacgctggccggtaaacaaccccggagcgacattttcctttagcgagtgatgccgcgtttttttgcggctgcgtaagccgataaacagtgccagtaaaaaaccgatggcagcgatggcggtatcgaaccacataatatcggcaatacttctttgggacagatgagccgtaatcaacggaatagtaaaggtcgcaatactgcccgcactgtaatagatccctgtagctttacctttagcgtaagggaaacgttcagccattaacgtcaggccaatttgcacaacacctccagcagaggtaaaaccaatgacaaaagcaaatattatcaccacataaaatgtgggatgcaggcagacggtaaacagagcaataaatgagataaaggtgtacagcat

SEQ ID NO: 24634 - DNA, 732 bp, Homo sapiens
  SIMILAR (620)..(360): 521254mologous to Homo sapiens mitochondrial outer membrane protein,accession number AF043250,Smith-Waterman Score=180.
ttaatcagccacagaatcaggtcgaccggggaagttgttcgcggtacagcgcagataactcggtatcgcgaacgcactttcgcccacgccgggcagatccacgatggtcataaagtgttctccatccatgatgccgatcactggctcgtagtgggttaatgatttatctgctgcaatatacgtcagatacccatagcggtagaccggaagggagttctgtagtggctgcagaacttcaaaatttttcatcaccactctcggcttcaggtaagtcatcagcacgggaacatgttgatgcccattgagcaaattgcctgcaggtcggcatcgcgcttcctgtttcgccacacccaggagcccttgcacttccggtggcactcctcgaatgtgcccgggttggcaggcagccgcagcccaatcctcggcggcccctgaggcgctggcggttgagccccgggggtccgttccgaacttcgactcgtactggtgccggcgcccggctgcctcccagcggcggcacgtgaagccggcgcgagggcggaggtggggcacccacgagggccggcgcagggcgggttggcggccctgcggcggcggctggcagccaacacgttccccatggtcgcctgcagacgctgacaccgtggtgccagttatcgccgccttccaacagatgccagtcgaggtggcgtcatggttccactcgcggccctgggcaaattcgttacccat

SEQ ID NO: 24635 - DNA, 1494 bp, Homo sapiens
  SIMILAR (589)..(1230): 801254mologous to Escherichia coli similar to fdrA gene of E. coli,accession number U73857,Smith-Waterman Score=817.
atgaaagagaagagcttggaagcattacaacctacaaccgctgccacatgtcggctggataaggcgttcaaaatgggacgggagtggatgatgaaagagatggatcaattcccgacgcgtccgcaggaccgctttgctatcagcgaagatgataaacgtatctaccgtgaagagttgttcccgtactgggaaaaacgttcgatgaaagatttcatcaacgggcagatgacagatgaagtaaaagccgcgaccaacacgcagattttcagcatcaaccagacggataaaggccaggggcacattattattgattacccacgcctgttgaatcacgggctggcctgtaaagaggcttgcgcggcagcgaatgtactgctgaaagtgatcatcgaaaccggcgaactgaaagacgaagcgctgatccgtaaagcgtctgaaatctccatcaaagcgggtgcggacttcatcaaaacctctaccggtaaagtggctgtgaacgcgacgccggaaagcgcgcgcatcatgatggaagtgatccgtgatatgggcgtagaaaaaaccgttggtttcaaaccggcggcggcgtgcttactggtggagattgaagaactgctcaacaccaaagcgcaaagcggctcgcacgaggcgcgttacgccactattggcagcgccaaaaagcatatcccggaaagtaacctggcggtgatttcggtcaacggtctgtttgccgctcgcgaagcgcgtcaggcgctgcaaaacgatctcaacgtgatgctgttttccgataacgtctcagttgaagatgaactggcgctcaagcaactggcccacgaaaaagggctgctgatgatggggccagactgtggcacggcgattatcaacggcgcggcgctctgttttggtaacgccgtgcgtcgcggcaacatcggtattgttggcgcatccggcaccggcagtcaggagttgagcgtccgcattcatgaatttgccgtcggcgtttcgcaactgattggcagcggggcgcgcgacctgagcgagaaaaccggcggcgtctatgatgctatgaggccatctgggatgctggaaaacgatccgcatcctggaatcattgcgcttatctccgcgccgcctgcgcctccggtggccctcaagcagttctttttcatacgcaccggaacgtccgccaacgatatcgcggataccggcaaagaaatcacggacgaatccggcaaattgaatacaggtttcttatcagaacgcttcaccgctttacagtcaggggaggtggatttgctctcccgtaatacgacctggacttcatctcgcgatgccgggatgggaatggcatttaccggcgtcacttattacgacggcattggcttcgtagccagggcgctttggttgcaaccaccagggcgacgcgggtcacaggaacacgcgcggatctcctacctaaacaatggatcaaataaacaaagcactggagaaatctga

SEQ ID NO: 24636 - DNA, 5631 bp, Homo sapiens
  SIMILAR (1042)..(1092): 941254mologous to Escherichia coli hydrogenase-2 large subunit,accession number U09177,Smith-Waterman Score=93.
ctaccaagaaaaacattgaattcttcgaagctcgtcgcgctgaactggagctaaactggctgaagttctggcagctgctaatgctcgcgctgagaaaacaatgcactggaaactgttaccatcgcgtctaaagctggcgacgaaggtaactgttcggttccatcggtactcgcgacatcgctgacgctgtaactgcgctggcgttgaagtggctaagagcgaagttcgtctgccgaacggcgttcgcgtaccactggcgaacacgaagtgagcttccaggttcacagcgaagtatcgcgaaagtgatcgtaaacgtagtagtgacgtcattggcggcagcatttcgacctcacagaccgttgtgcagtcgattaagattaatcttattcgaagttgtaagacgcacacgggaataatcgggacgcccgccgcaattgccgcgtgaaagctccagtcttgaacggtagcaggccgcgaccacggcctcgtcagtgtggatttatgaaaaaacgtctcgaaaacggtgacgattactttgccgttaaccctaggggcaggtgcctgcattgctgctggatgacggtactttgctgacggaagcgtagcgattatgcagtatcttgccgacagcgtccccgaccgccagttctggcaccggtaaacagtatttcccgctctgtttcgccctatacaccggaagagtacaaaccgacagttcgcgcgcagctggagaagaactgcaatatgtgaacgaggcactgaaggattgagcactgggatctgcggcaaagatttacaattgctgatgcctatctgtttacggttctgcgctgggatacgcggtgaaactgaatcggctggcgcataccaaaatccaccagcggacggctgtatgccaggcttcatcggcggtgaccagcagcatttcaaaacggtcacgctgtagccagctcgcgccaggtgtttaacaacacaatttgtggccttgccaatgattcgagcggatccaatttcgggatagggtacaaggcacccagtatccactggggtcatccggcgatgaaactgccgccggaagtgaacctgattgcgtagcgcactacctgagcgcctgatgtacatcaagtctttcatcgacaaactgagcgactttgtgagcaggtttataaggttgataccgcagttattgccgcgttctacccgaatggctgacacgcggtaaaggtgcggtgaactacctgagcgtgccggattcccgaccgacagtaaaaacggcagcttccgttcactgctgtgaattgcaggaatcctgcaaaaccaatacagtgcactgatcaccaatatcgccaaaggcgtcacaccacctttgtgaagccgaacattccggcaacgggtgaattcaaagtgttggcttcctcgaagcgccgcgcggtatgctctctcagagcagcgctggtgggtacaccggttgccgatccgaataaaccgctggaagtggtcgtaccattcactcctttgacccgtgcatggcctgtgcggtacacgtagggatgctggatcgcgctgcgatttatccatttcactcgctgatgctggtttttggcttcgcaatgtacggtgcctggctggccccttgacgattcgtcgcttgctggcgaagcgttttctgcgtttacaacagacgctgccgtctggagtttgatcagtgccactgcaatgctcgccgttcaggcgggttgatgggaacgggatggacagatgtattttcgccaaacatttgcaggctgttttgcaaacgcagtttggtggcatctggttatggcaaattttctcgccctcgtaacgttgatcgtcgccccgttctgttttgccgatattggcccgctgctggcaactgcgctgcagaccatccgcgcctgcgtgagatgaacgtacagtttccggcgcaaaccggcgcgccacggtgattggcgcgggcgcgcataccctttcgctctctggcgcacaatctggcttgagggcgtacaactgccgctgcgcaatttgccggtgcgatcccgattgatgaaacggatctggtgggggcgtgctggcgcttccgcctcgctgcctgtgcgttacgccgcggtactgacggtcatcaacgcttggtcgatttcgtcgcgcgttttccgaatccgcatcccctgctggtggggccgggcaggactttggtaaagctctgggcatgttgttgcgcccacagtacaacaactcccgttggcagtcattgacgaagtgattgtccgcgcggggactatatcgacattggtacgcctctttttggcggatcggttgtgccgggacggtgaaatcactcgcatttccttccgtggcggttattgctctctgcggcttgtcaaaaccatggttcgaccggcgcttcgagggcttgcaacggttgggtgtcgtattggcaacgagcgtcacggcgtggaaaggatcggcttccactaatgtaccgtgaaaatctgcgtcatgtcgtagtcgcgccccatgcgcgatgcttcgcaaaatcggcacaatgccgcccatgatttttgttccgttgccagcattttcatcaagcagcgtgtccaggcgggaaatctcgattttattcactttttgccgtcgcgaactcagcaccgcgccaatctctttgagattcagctcttcctggtaatagaggttaataccagtttttcgcgctccggcaacgtttcgatggcttccatcaccgctggcgcagattactgtccagtagttgttgtagcgggttttctcgctatgatcatcagtaaccagttcgatgctatcgccgtgctcttcgcgccaccatcgtaggagaagagctgggctgcgcggcacccagtcacggctgcgaagttctccagcatagcgccacggatacgctgcactgcgtaagttgtaaatgccgtccttgtagggcgtcatagcgttcgacggcattaagtaacccaatgccgccgcctgtagcagatcgtcaagttccacgctcgcgggcagtcgaacctgaggcgcaatgcttcgtgacgcaccagcgggacataacgcaccaggacgtaatgcatgaaaggcgctgtcgataagctcccgtgtgtagctgcgatttcctgattgctttctggtgaccagttttttagcgctcgggatctttacgcaccacgccttcgccagagcagggagcgtccagcaaatggcatcgaacatttctggcaccggaggcgtggcgaaggcgatgccgccacggataaactggttaaagtgccggttttcactacgccgcccgtcagaatggctggacctatgagtatacggtacgccaaccgccgctggtgtagctagcaggcgcgagcatggctgactccagtacagtgttacaacaaaatcctcgttggcgttgaagttaaccgccagggcgtttccggcattttctcgccgattatgaacgaaacaccactgtgcccgtgtcgcgtgtagaaacttattcaaccagcacccggaacaggattcaattacggttaacgtcctcatcattttttcttcatgattttcaggtgttggctcatcgacatcttcatcctccggctcagtttcactttcgtcaaaagcatccgggtgacaatggcctctaatggatagcatctccgccttccagccggaagttatctcaaaaaaccgcttggtccggtagttcgtcgtggcgatgatgaatggttctcgatgtacgctggacgcttttcgccatgctgaatggccagcgacggtgaatcgtagcgtaagtacgatgatcaagggtattgcggcaatccggttccgagcagtagtggcggaaaactgatgctgtactggtccaaaatgttgagctcggtccatatcctggcttgcagcggacgctaattctccggtgatgcactggtacgtgaaacctatcagcgctctccgatgagcaagttcacatcgaaagcgtaggtcattactggacactgctgatgaactgctgaaagaaattccggcgaagtaattatttgatttgctgccgatggcgtttaatcgccttccggcagtttcatccttcattatccttcgataaagccatccctgtaaatgtccgtcgcgggttgccacgttcaatctacgattccgaacaggttgcttcttcttcttccggcgactgattactgttgtgcgtgaaggtgcgtcgatcatcggcctgttcatctgatgttctattacagttggcaactgtcgatcattttgattgtgctggcccgattgtttcgattgcgattcgcgttgtatcgaagcgttttcgcaacacagtaaaaacatgcagaacaccatggggcaggtgaccaccagcgcagtataatgctgaagggccacaaagaagtattgattttcggtggtcaggaagtgaaacgaaacgctgccgattccggtgaccagtcccaagaaataccgaaccggcgctggtgatgctatcgaccagttcacggggttgcgggtctgaatgatcaggtgctccgggccgtactggttggagatcccacgcactgcgctaaatctgacgttcgcttcggtgacaaaggcgttacccggcccgaagattttgtccactttggcacagattccgtaccaaacgccagtgcggcaatggcctgtgcgccgcgacgttaaacacgtcctgcacaccgcacagctgcgccgcataaaggatccatcggcaatcggcggcggtgagcacagcaccacttttttacagcccgcatactcgccggagtcgccagcattaataccgttgagaagagcggggcgggccgccaggaatatacaacccaactgaagcgacgttgcgcggtgcgcgttcgtggagatcaggctaaagtcgattttgcgctcgtccatattaaccgcttcacgcgaacctggattgccgtcagtgcagcgggtgattgccgtgccgggtaagttgacattgatgtctgatgatccactaacgttaccgtaaaacgtgagctgtacgaggttgagcgtgacggtacaccattgagtacgatggtatgacgatggagcgtgtggatcgcccgacgcagagtgtgccgacgcgtttatgcttttcaggtcgtaatcggcataccagccttgttgatcgttccacaggttttttcgatccctttttgacgggcatttgccagcgtttcgtactggtttccatcgcgttatctccggcagctttgctggcgcgggcgaggattttttcattttaaacatcaggctgttcagatcgaccggtacgatgctggtggtgctaaggtatttaactgctgcgggttgtccatccagcgcgagctgaaatccagccagacgcagcggcagagcgcaggtcgcggtaaatttcagtggcaggcgattcggattgcttttggcggtggcaatatcttccacccatgactctgtcgtggcgtatcgcgatcgtcccagtagcggttgagaagggtaccatccgaagtttgacaacgcgtttttcctgttgtccggcttgcaggttttcaacccgtccatccagtaagcatattctttttgcat

SEQ ID NO: 24637 - DNA, 1049 bp, Homo sapiens
  SIMILAR (3)..(65): 851254mologous to Escherichia coli branching enzyme (EC 2.4.1.18),accession number M13751,Smith-Waterman Score=105.
atggcagttggggttatcagccaaccggcctgtatgcgccaacccgccgctggtctgaacgtgattctcgactgggtgcaagcccacttcccgactgatgactttgcgcttgccgaatttgatggcacgaacttgtatgaacacagcgatccgcgtgaaggctatcatcaggactggaacacgctgatctacaactatggtcgccgtgaagtcagtaacttcctcgtcggtaacgcgctttactggattgaacgttttggtattgatgcgctgcgcgtcgatgcggtggcgtcaatgatttatcgcgactacagccgtaaagagggggagtggatcccgaacgaatttggcgggcgcgagaatcttgaagcgattgaattcttgcgtaataccaaccgtattcttggtgagcaggtttccggtgcggtgacaatggctgaggagtctaccgatttccctggcgtttctcgtccgcaggatatgggcggtctgggcttctggtacaagtggaacctcggctggatgcatgacaccctggactacatgaagctcgacccggtttatcgtcagtatcatcacgataaactgaccttcgggattctctacaactacactgaaaacttcgtcctgccgttgtcgcatgatgaagtggtccacggtaaaaaatcgattctcgaccgcatgccgggcgacgcatggcagaaattcgcgaacctgcgcgcctactatggctggatgtgggcattcccgggcaagaaactactgttcatggcggccaagattgccggtctctacaatgactcggagccaccccggaagaccatgcgcagaggggtgctgatgaccctgctgcagcagtcggccatgaccctgcccctgtggatcgggaagcctggtgacaagcccccacccctctgtggggccatccctgcctcaggagactacgtggccagacctggagacaaggtggctgcccgggtgaaggccgtggatggggacgagcagtggatcctggccgaggtggtcagttacagccatgccaccaacaa

SEQ ID NO: 24638 - DNA, 1482 bp, Homo sapiens
  SIMILAR (1261)..(1199): 951254mologous to Escherichia coli TldD protein,accession number D44451,Smith-Waterman Score=94.
ttaacgtttggagaactgcggacgacgacgtgctttacgcagaccgactttcttacgttcaacctgacgagcgtcacgagtaacgaagccagctttacgcagttcagaacgcagggactcgtcgtattccatcagagcgcgggtgataccgtgacggatcgcaccagcctgaccagagataccaccacctttaacggtgatgtacaggtccagtttctcaaccatgtcgaccagttccagcggctgacgaactaccatgcgggcagtttcacgaccgaagtactgttccagagaacgttggttgattacgattttaccgttgcccggtttgatgaaaacgcgagctgcggaacttttgcggcgaccagtgccgtagtattgattttcagccattgcttgcggttgctgtgccgcgtggttgtgctcgttacccgcgtaaactttcagtttacggaacatagcacgacccagcgggccttttggcaacatgcctttaaccgcgatttcaatcacacgctcaggacggcgagcaatcatctcttcaaaggtcgcttgtttgataccaccgatgtggccggtgtggtgatagtacactttgtcagtacgcttgttgccggttacagcaactttgtcagcgttcagaacgatgatgtaatcaccggtatctacgtgcggagtgtattccgctttgtgcttaccgcgcaggcgacgagccagttcagtagccagacggcccagagttttaccggtcgcgtcaacaacataccagtcgcgttttacggtttctggtttagctgcgccaagtactaccggcatggtgcccgctggtgcagcaacggcagaaagattgaccagcgccatacgcactgcttcttttgcccatgcatccgcacggacttcgccgtcgagatcggcaaggaagaattcataacctaaacgaccgccgccgccactggcaccgcgttcgcgtttgccatcttcttcgacgagaacgctcacggaaagacgcaccagcggacggacatccgccgctagcgtgccgtcggtggccgcaaccaaaattaattcatagacaccactgaggctggcagtcacttcctgtacgcgcttgtccgcttcgcgggcaacctgatcgacgcgacgcaggatatccagcttctcttcacggctcatgctttgcagcggatgatggtgcgcccgcttgcgcactctgttccagcgccagcaggctgatttggtcagcgtaagcaaatccgttttttcaccgctgattgcacgcacaccaacgccctgatcgatgttgtaagaaccatctttaataatgcggtcttctaaaacccaggattcgtgatagctcgactgaaaatagagatcgccataatcaaggcgacgttcggccagttgaccgaggatcgcgaacaagtcctgatgtttcaggccgttcgccgctagcaattgttcacttaccaggttaagactcat

SEQ ID NO: 24639 - DNA, 3444 bp, Homo sapiens
  SIMILAR (255)..(410): 831254mologous to Escherichia coli O157:H7 part of glycogen operon, a glycosyl hydrolase, debranching enzyme,accession number AE005566,Smith-Waterman Score=251.
atggtggtggatgaccaagaacgctcggtgctgatctttgtgcgtcgcgataaagagggtaacgaaatcatcgttgccagtaactttacgccggtaccgcgtcatgattatcgcttcggcataaaccagccgggcaaatggcgtgaaatcctcaataccgattccatgcactatcacggcagtaatgcaggcaatggcggcacggtacacagcgatgagattgccagccacggtcgtcagcattcactaagcctgacgctaccaccgctggccactatctggctgggcacagtggcgacatttggcacggttatctgccggatgcgcgcccgggtttgcgttatggttatcgcgttcatggcccatggcaacccgccgaggggcatcgctttaacccggcgaagattgttgattgatccttgcgcgcggcaaattgacggggagtttaaagataacccgctgctgcacgccggtcataatgaacctgactatcgcgacaacgccgccattgcgccgaaatgcgtagtggtggttgatcactatgactgggaagatgatgccccgccgcgcacgccgtggggcagcaccatcatttatgaagcccatgtcaaaggattaacgtacttgcacccggagatcccggtcgagatccgtggcacttataaagccctcgggcatccggtgatgatcaactatttgaaacaattgggcattaccgcgctggaactgctgccagtggcgcagtttgccagtgaaccacgtctgcaacgcatggggctaagtaactactggggttacaacccggtggcgatgtttgcgctgcatccggcgtatgcctgctcgccagaaacggcgctggatgagtttcgcgatgcaatcaaagcactgcataaagcgggtatcgaagtcattcttgatatcgtgctcaaccatagtgcggaactggacctcgacggcccgttattctcgctgcgtgggatcgataaccgtagctattattggataagagaagacggcgattatcacaactggaccggttgcggcaacacgctcaatttgagtcatccggcggtggtggattatgccagcgcctgcctgcgttattgggtagaaacctgccacgtcgatggtttccgctttgatctggcggcagtcatgggccgtacgccagagttccgtcaggatgcgccgttgtttaccgctatccagaactgcccggtgctctcgcagcccgttgaattaagggtggcaccattactgacatttacgattatcggtggcaatgccaccggtatcggaaccctgaatgtgcaggatcaagactctgtcatcacggtacgcagactctataatggatatttcggtaatggcacagtcaatatttccaataatggactgattaataacaaagaatattcattggtgggcgttcaggacggttcccacggtgtcgtcaacgtgaccgataaagggcattggaatttcctcggaacgggcgaagctttccgctatatctatatcggtgatgctggcgacggtgaacttaatgtctcgagtgaaggcaaagtagattcgggaattatcactgcggggatgaaagaaacaggcacaggcaacattactgttaaggataagaactccgttatcactaatctcggaactaatcttggttatgacggccacggcgaaatgaatatcagtaatcaggggcttgttgtcagcaacggaggaagttcactcggttatggagaaaccggcgtcgggaatgtcagcatcaccacggggggaatgtgggaggtcaataagaatgtctataccaccattggtgttgcgggcgtcggaaacctcaatattagcgatggcggtaagttcgtatcgcaaaatattacttttttgggcgataaagcaagcggtatcggcacactgaacctgatggatgcgacatcatcgttcgatactgtgggtatcaatgtcggtaattttggtagcggtatcgtaaatgtcagtaatggtgccacccttaattcaacgggctatggatttatcggaggaaatgcctccggtaaggggatagttaatatttcaacggacagtctctggaatttaaagacatcatctactaacgcacaattgctacaggtcggtgtattaggcacgggtgaactgaatattaccaccggaggtatagttaaagcgcgtgatacacagatagctctcaatgacaaaagtaagggcgacgtgagggtggatgggcagaactctcttcttgaaacattcaatatgtacgtagggacatctggtacgggtacgttaaccctgacgaataacggtacgctgaatgtcgaaggtggagaagtttacttaggtgtttttgagcctgctgtaggaacgctaaacattggtgctgctcacggtgaggcggcggcagatgccggatttatcaccaatgcgacgaaagtggagtttggtcttggcgaaggcgtttttgtctttaatcataccaataacagtgatgccggctaccaggtcgatatgctgattacaggtgacgataaagacggaaaagtgatccatgatgcaggccatacggtgttcaatgcagggaatacttatagcggtaaaacgctggtcaatgacggcctcctgacccttgcgtctcatacggcagatgggcattcgcgttctcgaaaaacttggatatcccgcatactttcgtttctacccgacttcaatacagtcgcgctagatgttaagacgttcggcatcaaagcgaatgacgacaaagccaagctcaaagcgctgggggaaatcgcgcacgcatgtgtcgacgcaacgatcatttattgcaagtcaccaactgttgcgggcctggtggcgcgcgagctgatcaggcttgggcatggcactccgactgagaatccccatgtcgactgggtcagcgaagagttcgatgccgactgggattacacagtcgcccttagaaacggtattggcttgcattttggcgcgctaccgagggcactgcagcaatacactgccgaccaattcaatgctggaaaactgcgctttttgctctgcacctccacgatcattgaaggagtcaacactatcgctaagaacgttgtgatctacgacaaccgcgatggaactcgcagcattgacaaattcacccatgggaacatcaaaggtcgcgccgggcgcatgggcgttcacttcgtcggcaaaatcttttgcctggaggaaatcccggaagacaatctcaatcaagaggtggatattccgctcggtattcagggcattgataccccaatcaacctgttagccagcgttcaaccagaccacttgtccgagttttcacaggatcgctttgatgaggttttcataaacgaccgtgtttccatcgaccttgtgaagaagcattcgtacttccgtgtggccggctga

SEQ ID NO: 24640 - DNA, 1183 bp, Homo sapiens
  SIMILAR (892)..(614): 981254mologous to Escherichia coli K12 putative periplasmic binding transport protein,accession number AE000405,Smith-Waterman Score=485.
ttataaaaatgacatataaataagtacatcccatttaattttcagcgggctttctgaacctacgttacgctcaaaaatttccgagtagttacccacctgtttgatgatgttataggcccatttattatccagcttcagatccttgccgtaatcgccttctttacccagcagatgtgccatatcaggcgttgctggattagccgctttttcatcgacgttctgggaattgatgcccatctcttcagcattcagcatggcgaaaagcgtccagcgtacaatcgagaaccattcatcatcgccacgacgaactaccggaccaagcggttcttttgagataacttccggtaagacaatccattcagctgggttgcttaatttgatgcgcagggcatacagttgtgattgatccgaggccagcgtatcgcagcgaccagattccagtgccttcgctgattcgtcagagcgatcgaaagtcaccggtgtgtacttcatattgtttgccttgaagtagtcggcgacgttgagttcggtatcagtacccgcctgaatacagacggtagcgccatccagttctttcgcgctttttagccccgctttatcgtgcgtcaggaagcccaatgccgtcgtaataagtgacgccggtaaatgccattcccatcccggcatcgcgagatgaagtccaggtcgtattacgggagagcaaatccacctcccctgactgtaaagcggtgaagcgttcttttgcagtgagcggggtatatttcactttcgtgtcgtcaccaaatacagcagcggcaacaccacgacaaatatcaacatcaatacctgaaaacttaccgtcagcatcggcataagagaacccaggtaatccatcactgatcccgcattgcacaaaaccttttttctgaacggcatcaagcgtcgcgccagcagcgcctgatttgcaacggcaagcagcacgctggcggcagccagtgtggctatcatcatcgtctattatgcgtctttgcttcggagtccagtttgccgctggtccgtgtgtttcccctgtctgcgttgccggcctcgatttttccttttgtcggtgctgcagcaagcttgtcgcgtcagtcaaggcgctttgtgcctctttgatttgcgcgatggcttccagtcgctgttcctgcaacacgcgagtatccat

SEQ ID NO: 24641 - DNA, 1557 bp, Homo sapiens
  SIMILAR (265)..(1536): 991254mologous to Escherichia coli K12 part of glycogen operon, a glycosyl hydrolase, debranching enzyme,accession number AE000419,Smith-Waterman Score=2322.
tttgtgcgtcgcgataaagagggtaacgaaatcatcgttgccagtaactttacgccggtaccgcgtcatgattatcgcttcggcataaaccagccgggcaaatggcgtgaaatcctcaataccgattccatgcactatcacggcagtaatgcaggcaatggcggcacggtacacagcgatgagattgccagccgacggtcgtcagcattcactaagcctgacgctaccaccgctggccactatctggctggttcgggaggcagaatgacacaactcgccattggcaaacccgctcccctcggcgcgcattacgacggtcagggcgtcaacttcacacttttctccgctcatgccgagcgggtagaactgtgtgtctttgacgccaatggccaggaacatcgctatgacttgccagggcacagtggcgacatttggcacggttatctgccggatgcgcgcccgggtttgcgttatggttatcgcgttcatggcccctggcaacccgccgaggggcatcgctttaacccggcgaagttgttgattgatccttgcgcgcggcaaattgacggggagtttaaagataacccgctgctgcacgccggtcataatgaacctgactatcgcgacaacgccgccattgcgccgaaatgcgtagtggtggttgatcactatgactgggaagatgatgccccgccgcgcacgccgtggggcagcaccatcatttatgaagcccatgtcaaaggattaacgtacttgcacccggagatcccggtcgagatccgtggcacttataaagccctcgggcatccggtgatgatcaactatttgaaaccattgggcattaccgcgctggaactgctgccagtggcgcagtttgccagtgaaccacgtctgcaacgcatggggctaagtaactactggggttacaacccggtggcgatgtttgcgctgcatccggcgtatgcctgctcgccagaaacggcgctggatgagtttcgcgatgcaatcaaagcactgcataaagcgggtatcgaagtcattcttgatatcgtgctcaaccatagtgcggaactggacctcgacggcccgttattctcgctgcgtgggatcgataaccgtagctattattggataagagaagacggcgattatcacaactggaccggttgcggcaacacgctcaatttgagtcatccggcggtggtggattatgccagcgcctgcctgcgttattgggtagaaacctgccacgtcgatggtttccgctttgatctggcggcagtcatgggccgtacgccagagttccgtcaggatgcgccgttgtttaccgctatccagaactgcccggtgctctcgcaggtgaagttaattgctgaaccgtgggatatcgctcctggtggttatcaggtgggaaatttcccgccgctgtttgccgagtggaacgatcatttccgcgatgctgaccgtcgtttctggctacattatgatttgcctctgggggcgtttgccgggcgtttagctgactccagcgatgtccgaaacgtaatggtcgtatga

SEQ ID NO: 24642 - DNA, 2808 bp, Homo sapiens
  SIMILAR (847)..(1569): 991254mologous to Escherichia coli ferrienterobactin receptor precursor,accession number U82598,Smith-Waterman Score=1265.
  misc_feature (1)...(2808): n = a,t,c or g
gcctacaaacggaacataaccgtaggtcggataaggcgtttacgccgcatccggcagccgttgcctgatgcgacgctgtgcgtcttatcaggcctacaaacggaacataaccgtaggctgaacggcctgaaacatcaggacttgttcgcgatcctcggtcaactggccgaacgtcgccttgattatggcgatctctattttcagtcgagctatcacgaatcctgggttttagaagaccgcattattaaagatggttcttacaacatcgatcagggcgtaggtgtgcgtgcaatcagcggtgaaaaaaccggatttgcttacgctgaccaaatcagcctgctggcgctggaacagagtgcgcaaacggcgcgcaccatcgtccgtgatagtggtgatggttgccgcgaagcggacaagcgcgtacaggaagtgactgccagcctcagtggtgtctatgaattaattttggttgcggccaccgacggcacgctagcggcggatgtccgtccgctggtgcgtctttccgtgagcgttctcgtcgaagaagatggcaaacgcgaacgcggtgccagtggcggcggcggtcgttttggttatgaattcttccttgccgatctcgacggcgaagtccgtgcggatgcatgggcaaaagaagcagtgcgtatggcgctggtcaatctttctgccgttgctgcaccagcgggcaccatgccggtagtacttggcgcaggttggccgggcgtgctgttgcatgaagcggttggtcacggtctggaaggcgacttcaaccgccgtggcacttcagtatttagtggatcaaaggttttcgcgttagcgggatgcgtcgtgttgatgacgaccatgcccgacagttgcaattcgtggcaaaaatgcaggaataaaacaatgaacaagaagattcattccctggccttgttggtcaatctggggatttatggggtagcgcaggcacaagagccgaccgatactcctgtttcacatgacgatactattgtcgttaccgccgccgagcagaacttacaggcgcctggcgtttcgaccatcaccgcagatgaaatccgcaaaaacccggttgcccgcgatgtgtcgaagatcatccgtaccatgccaggcgttaacctgaccggtaactccaccagtggtcagcgtgggaataaccgacagattgatattcgcggtatgggtccggaaaacacgctgattttgattgacggcaagccggtaagcagccgtaactcggtgcgtcagggctggcgtggcgagcgcgatacccgtggtgatacttcctgggtgccacctgaaatgattgaacgtattgaagttctgcgtggtccggcnagtgcgcgttatggcaacggcgcggcgggcggcgtggttaacatcattaccaaaaaaggcagcggcgagtggcacggctcctgggacgcatatttcaatgcgccagaacataaagaggaaggtgccaccaaacgcactaactttagcctgaccggtccgctgggcgacgaattcagcttccgtttgtatggcaacctcgacaaaacccaggtgacgcgtgggatatcaaccagggccatcagtccgcgcgtgccggaacgtatgccacgacgttaccagccggcgcgaaggggtaatcaattcttccatattcatactaagatcctcggaaaatggacgatatttgcgcattacctggcacaggtccgggacaaaatctcagcggctgcaaagcgttgcggccgttctccagaagaaattacgctgcttgcagtcagtaaaacaaaacctgcgagcgccatcgcagaagccattgatgccgggcagcgtcaatttgagcatttcgactggtgtcataccatcgaccgtttgcgcatcgctacccgtctcaacgaccagcgcccggcagaacttccccctcttaacgttctgattcaaattaacattagtgatgaaaacagtaagtccgggattcaactggctgaactggacgagctggcagctgcggtcgctgaactaccgcgtttacgtctgcgcgggttgatggcaatccctgcgcctgagtcagaatatgtaaggcagtttgaagttgcacgccaaatggctgtagcatttgccggactgaaaacgcgctacccgcatatcgacacgctctctctgggaatgtcggacgatatggaagccgccattgcggcaggtagcacgatgtttgtagtgaaggtaacgcagccaattatcgggccactgcgccgcgttattccggcaatggggccaattgacagcgcctcgctgctggttgcctatattctcagttttatcaaagccatcgtgctgtttaaagtggtgaccttcctgccaatcatctggattgccggtttactgattctgctgaaaaccatcggcctgctgattttctgggtcctgctggtgatggcgattatgagctggtgcaagacagaattaattatctttcgcgatcttccggcgctcggtaaactgttcagccagtcgccgccggtcgcgctggatcaacgcttctttggtgacttcattctcgaagccagcgccaaatatgctgatgttgcgctgatatatggcctggaagacgggcgagaatatcgtgataagcagcaaacgctgggtgaaattgtccagcagttgttaggcgcggcaccggttgtcggtgaccaggtagagtttgccgggatgatctggacggtggccgagaaagaagataatgaagtgttgaagattggcgtacgggtggctgaagaggaagctgaatcttaa

SEQ ID NO: 24643 - DNA, 1051 bp, Homo sapiens
  SIMILAR (223)..(846): 721254mologous to Escherichia coli TldD protein,accession number D44451,Smith-Waterman Score=658.
atggcgattacgcccgataacaccattatggcgctggcagaagattttctttcccgacgccagtacggcattcgttttcgtaatctggaaactggtaactggtacccggaactgctggataacgttgaacccagctttgtctgggcaaatgactcctggattttctactatgttcgcaagcatccgatatttatcgacctgaccacggaagaactggctgcgtcgagctatcacgaatcctgggttttagaagaccgcattattaaagatggttcttacaacatcgatcagggcgttggtgtgcgtgcaatcagcggtgaaaaaaccggatttgcttacgctgaccaaatcagcctgctggcgctggaacagagtgcgcaagcggcgcgcaccatcgtccgtgatagtggtgatggtaaagtacagacgctgggcgcggtagagcatagcccgttgtatacctcgggtagatccggctggcaaagcatgagccgtgaagagaagctggatatcctgcgtcgcgtcgataaggttgcccgcgaagcggacaagcgcgtacaggaagtgactgccagcctcagtggtgtctatgaattaattttggttgcggccaccgacggcacgctagcggcggatgtccgtccgctgggcaaagtgctgctggttgggcagtcaccaaatgctgaactttcggctcgcgccaaacagattgctatgggcgtagacggtgccaacgaagtgtataacgagattcgtcagggccagccgattggtctgggcgaagcatctaacgatacgtggatcaccaccaaagtgcgttcgcagctcttaaccagcgacctggtgaaatcgtccaacgtgaaagtgaccaccgaaaacggtgaagtgttcctgatggggctggtgactgaacgtgaagcgaaagcggcggcagatattgccagccgggtgagcggcgtgaagcgggtaaatcgcacgctgtttctcggctatgcggtgatgttctccgagctgatcctcgcacctgtaacaccgtccaactcggcgcgtg

SEQ ID NO: 24644 - DNA, 2079 bp, Homo sapiens
  SIMILAR (130)..(1797): 941254mologous to Escherichia coli branching enzyme (EC 2.4.1.18),accession number M13751,Smith-Waterman Score=2948.
atgatccccctggccagtgcatatcagggacagtgtgactggcggactgcgatcttcaagctggaacagctcccacaacttcgaatcagcctccagctctatcagatcaagctgttcctccgggagtcgatcagcgaatttaacgccgacgccgacaaagttcatcagatgcgcctgcgtaaagagagcggcatctgggaactgtttatccctggggcgcataacggtcagctctataaatacgagatgattgatgccaatggcaacttgcgtctgaagtccgacccttatgcctttgaagcgcaaatgcgcccggaaaccgcgtctcttatttgcgggctgccggaaaaggttgtacagactgaagagcgcaaaaaagcgaatcagtttgatgcgccaatctctatttatgaagttcacctgggttcctggcgtcgccacaccgacaacaatttctggttgagctaccgcgagctggccgatcaactggtgccttatgctaaatggatgggctttacccacctcgaactactgcacattaacgagcatcccttcgatggcagttggggttatcagccaaccggcctgtatgcgccaacccgccgttttggtactcgcgacgacttccgttatttcattgatgccgcacacgcagctggtctgaacgtgattctcgactgggtgccaggccacttcccgactgatgactttgcgcttgccgaatttgatggcacgaacttgtatgaacacagcgattcgcgtgaaagctatcatcaggactggaacacgctgatctacaactatggtcgccgtgaagtcagttactttctcgtcggtaacgcgctttactggatgaaccgttttggtattgatgcccgtaaagagggggagtggatcccgaacgaatttggcgggcgcgagaatcttgaagcgattgaattcttgcgtaataccaaccgtattcttggtgagcaggtttccggtgcggtgacaatggctgaggagtctaccgatttccctggcgtttctcgtccgcaggatatgggcggtctgggcttctggtacaagtggaacctcggctggatgcatgacaccctggactacatgaagctcgacccggtttatcgtcagtatcatcacgataaactgaccttcgggattctctacaactacactgaaaacttcgtcctgccgttgtcgcatgatgaagtggtccacggtaaaaaatcgattctcgaccgcatgccgggcgacgcatggcagaaattcgcgaacctgcgcgcctactatggctggatgtgggcattcccgggcaagaaactactgttcatgggtaacgaatttgcccagggccgcgagtggaaccatgacgccagcctcgactggcatctgttggaaggcggcgataactggcaccacggtgtccagcgtctggtgcgcgatctgaacctcacctaccgccaccataaagcaatgcatgaactggattttgacccgtacggctttgaatggctggtggtggatgacaaagaacgctcggtgctgatctttgtgcgtcgcgataaagagggtaacgaaatcatcgttgccagtaactttacgccggtaccgcgtcatgattatcgcttcggcataaaccagccgggcaaatggcgtgaaatcctcaataccgattccatgcactatcacggcagtaatgcaggcaatggcggcacggtacacagcgatgagattgccagccacgttcgtcagcattcactaagcctgacgctaccaccgctggccactatctggctgggcacagtggcgacatttggcacggttatctgccggatgcgcgcccgggtttgcgttatggttatcgcgttcatggccctgcaacccgccgaggggcatcgcttaacccgcgaagagcgtctaacagtcgccatctctaaggccttcagattcaggcaacgctattcgaagcggagtagactctccattcgcactcggcaagacgttagtgtcatcattgtccacggcttaccattgcatgacaaggctaaaccacatgacggcaacgtgaacgactcttaa

SEQ ID NO: 24645 - DNA, 3215 bp, Homo sapiens
  SIMILAR (1407)..(1595): 1001254mologous to Escherichia coli glycogen debranching enzyme,accession number J01616,Smith-Waterman Score=323.
atgggggctgagaagcagctcatcccagatggctgcggggtcagttacatccccagtagtggccctctggacaagtggcgggccctgctcttcatacagccggactacagagctgacccggtttatcgtcagatcatcacgataactgaccttcggattctttacgactacactgaaaacttcgtcctgccgttgtcgcatgatgaagtggtccacggtaaaaaatcgattctcgaccgcatgccgggcgacgcatggcagaaattcgcgaacctgcgcgcctactatggctggatgtgggcattcccgggcaagaaactactgttcatgggtaacgaatttgcccagggccgcgagtggaaccatgacgccagcctcgactggcatctgttggaaggcggcgataactggcaccacggtgtccagcgtctggtgcgcgatctgaacctcacctaccgccaccataaagcaatgcatgaactggattttgacccgtacggctttgaatggctggtggtggatgacaaagaacgctcggtgctgatctttgtgcgtcgcgataaagagggtaacgaaatcatcgttgccagtaactttacgccggtaccgcgtcatgattatcgcttcggcataaaccagccgggcaaatggcgtgaaatcctcaataccgattccatgcactatcacggcagtaatgcaggcaatggcggcacggtacacagcgatgagattgccagccacggtcgtcagcattcactaagcctgacgctaccaccgctggccactatctggctgggcgtcaacttcacacttttctccgctcatgccgagcgggtagaactgtgtgtctttgacgccaatggccaggaacatcgctatgacttgccagggcacagtggcgacatttggcacggttatctgccggatgcgcgcccgggtttgcgttatggttatcgcgttcatggccccctggcaacccgccgaggggcatcgctttaacccggcgaagttgttgattgatccttgcgcgcggcaaattgacggggagtttaaagataacccgctgctgcacgccggtcataatgaacctgactatcgcgacaacgccgccattgcgccgaaatgcgtagtggtggttgatcactatgactgggaagatgatgccccgccgcgcacgccgtggggcagcaccatcatttatgaagcccatgtcaaaggattaacaaacttgcacccggagatcccggtcgagatccgtggcacttataaagccctcgggcatccggtgatgatcaactatttgatacaattgggcattaccgcgctggaactgctgccagtggcgcagtttgccagtgaaccacgtctgcaacgcatggggctaagtaactactggggttacaaggccggtggcgatgtttgcgctgcatccggcgtatgcctgctcgccagaaacggcgctggatgagtttcgcgatgcaatcaaagcactgcataaagcgggtatcgaagtcattcttgatatcgtgctcaaccatagtgcggaactggacctcgacggcccgttattctcgctgcgtgggatcgataaccgtattgatgttgatatttgtcgtggtgttgccgctgctgtatttggtgacgacacgaaagtgaaatataccccgctcactgcaaaagaacgcttcaccgctttacagtcaggggaggtggatttgctctcccgtaatacgacctggacttcatctcgcgatgccgggatgggaatggcatttaccggcgtcacttattacgacggcattggcttcctgacgcacgataaagcggggctaaaaagcgcgaaagaactggatggcgctaccgtctgtattcaggcgggtactgataccgaactcaacgtcgccgactacttcaaggcaaacaatatgaagtacacaccggtgactttcgatcgctctgacgaatcagcgaaggcactggaatctggtcgctgcgatacgctggcctcggatcaatcacaactgtatgccctgcgcatcaaattaagcaacccagctgaatggattgtcttaccggaagttatctcaaaagaaccgcttggtccggtagttcgtcgtggcgatgatgaatggttctcgattgcctacaaacggaacataaccgtaggtcggataaggcgtttacgccgcatccggcagccgttgcctgatgcgacgctgtgcgtcttatcaggcctacaaacggaacataaccgtagcctgctggcgctggaacagagtgcgcaagcggcgcgcaccatcgtccgtgatagtggtgatggtaaagtacagacgctgggcgcggtagagcatagcccgttgtatacctcggtagatccgctgcaaagcatgagccgtgaagagaagctggatatcctgcgtcgcgtcgataaggttgcccgcgaagcggacaagcgcgtacaggaagtgactgccagcctcagtggtgtctatgaattaattttggttgcggccaccgacggcacgctagcggcggatgtccgtccgctggtgcgtctttccgtgagcgttctcgtcgaagaagatggcaaacgcgaacgcggtgccagtggcggcggcggtcgttttggttatgaattcttccttgccgatctcgacggcgaagtccgtgcggatgcatgggcaaaagaagcagtgcgtatggcgctggtcaatctttctgccgttgctgcaccagcgggcaccatgccggtagtacttggcgcaggttggccgggcgtgctgttgcatgaagcggttggtcacggtctggaaggcgacttcaaccgccgtggcacttcagtatttagtggacaggtcggggagctggtggcttcagaactgtgtaccgtggttgatgatggcacgatggtcgatcggcgaagatcgggggggatggagagaaagtaccccagcagtaaagtgctgatgttttttttaaaggagtctcgctctgtcatcagcctggagtgcagtggcaggataaaggtggtaccgagctcgattgtaatcatgtcatataagtggcagagcaagaaaccaaacccaacactatccactttcaatgctgttaccgtccagctgtggccccagctcaaatcaccactaagaaaacagttttatttcagcaaacagcaaaaatacattgggaagaacgccggcctagttcccaagtag

SEQ ID NO: 24646 - DNA, 1272 bp, Homo sapiens
  SIMILAR (608)..(432): 511254mologous to Escherichia coli K12 putative integral membrane protein involved in biogenesis of fimbriae, protein transport, DNA uptake,accession number AE000119,Smith-Waterman Score=106.
atgaagcagattaaagaactccagcgcctgctcggcaagaaaacatggaaaatgaactcgtcaaagaagccgttgaatatggacgggccaaaagtggatagcgcacgcgcccttattggccggggatggggaacccacaaattctaccgatgcgactgcataaagccaactatcaagacgaacacgtcttccagaggcaatgaaaaaaatccagatggtagccacaacaacattcacaacagctggtttcgtctacttacaagccaaaacatgtgcaaagtgcctgagagcccagccattttggtggatgtgggccagtcagcagagactgtgcaatctgttctgactgttaaggtggagcatcccatcttgcgcattgccgtcgccggttatgcatgccagcgccagagttgcttactcgccatgcggcatccccagtacgcgattaactcttcaaaggtggttaagccttgctctacggccaggcagccgtttcaaaaagcgtacgcatacccgcctgtcgtgcgtgcgtttccagcgatcaacgtcggtattagcggaaataagctgacgaatgaccggcgttatgggagaacttcaaataaggcctggggcagcggcgatggccatacattgtctgaatgtggatgggctccccttgctgccggcgacaatgtgggcaaagtttcgtaccagacgctgggctattaccagcgcatcctgggctacatcttctatccgattgcatggggatgggtgttccttccagtgaagcactgcaagtgggcagtatcatggcgccaaactggtttccaacgagttcgttgcgatgatggatctgcagaaaatgcttccacgctctctccgcgtgctgaaggcatcatctctgtgttcctggttccttcgctaacttctcttcaatcgggattatcgcagcggctgcggaatgccgcgactggtttggcatacttgccgcacaaacacttgctgtacgcgccgcattacgggttgtacaagcggaaagagattgcgtcttgtcgatggaacagcatcagtgcgcccgggggcggcagcgctgaatggcgactacatatgggattgatcctcatacctaacgctgaacggctggaccgatttgcgcaaacggcagacgagatacgcatgctgaccggggattcgtgtcgatctgctgtttttccaccgccgtttacgtgcctgctaatcgtcgatctaaaagtgggcaaattcagctatagcgatgcggacagatga

SEQ ID NO: 24647 - DNA, 312 bp, Homo sapiens
  SIMILAR (151)..(71): 621254mologous to Escherichia coli similar to ~start codon is not identified yet,accession number D90869,Smith-Waterman Score= 83.
tgagcggatacattcgggaccgaaccgaatccccggtcagcaatgcgtatctcgtctgccgtttgcgcaatcggtccagccgttcagcgtctctgctgtcggttagctcaaaatcagtaactgacagagccccggcattactgccgaagtatccagttcttcgggcttaccaatatgggccagaattgctaccagttatcgtgagagtaattcatcggcacgttaaatcatatcaggcgaataccacaacccttaagttagcgcttatgggggtcagccccccgcctgccagccgtgccgtccgggagggag

SEQ ID NO: 24648 - DNA, 504 bp, Homo sapiens
  SIMILAR (194)..(265): 531254mologous to Bacillus cereus nucleoside permease NupC,accession number Y09322,Smith-Waterman Score=66.
tggggcagcggcgatggccatacattgtctgaatgtggatgggctccccttgctgccggcgacaatgtgggcaaagtttcgtaccagacgctgggctattaccagcgcatcctgggctacatcttctatccgattgcatggggatgggtgttccttccagtgaagcactgcaagtgggcagtatcatggcgccaaactggtttccaacgagttcgttgcgatgatggatctgcagaaaatgcttccacgctctctccgcgtgctgaaggcatcatctctgtgttcctggttccttcgctaacttctcttcaatcgggattatcgcagcggctgcggaatgccgcgactggtttggcatacttgccgcacaaacacttgctgtacgcgccgcattacgggttgtacaagcggaaagagattgcgtcttgtcgatggaacagcatcagtgcgcccgggggcggcagcgctgaatggcgactacatatgggattgatcctcatacct

SEQ ID NO: 24649 - DNA, 1623 bp, Homo sapiens
  SIMILAR (453)..(208): 971254mologous to unidentified bacterium transposase,accession number Z78058,Smith-Waterman Score=425.
ctacaatgcaggccctacaggggtgggtggtaagtccaacaaacaggatttcatcttctggagctcctggatttcatcgtcccatgggccacagtgcagcgacagaacctcctcagctttctgtattgtgctcagggcttcgggtactgcaaacaggaagctctcggcgtcacgctggcaccccgacagccgctgaacagctcgctcgcaatccagcccgcgcagaaaacccatcatgtcaaagcgcattccttctgcagttaaccagcgcaatcctcgccagtgaacccggacgatataatcagcttctccaaaagcaagtgagcggatacattcgggacgcgaaccgaatccccggtcagcaatgcgtatctcgtctgccgtttgcgcaaatcggtccagccgttcagcgtctctgctgtcggttagctcaaaatcagtgaaagcaagtgtttgtgcggcaagtatgccaaaccagtcggcggcattccgcagccgcttcaggagagccacgtcagataatgttgcaacgtcatggagctgcctgctgtcggtaacgatgctccctttaggtcctgtgtgttgtatggtggtcatcgcctgagcgttacactgaagctgtaacatgtgtctcagcatcgccactccccaaatagtcacgtcaggacacaattcaggtgtcactgctgctttaagctgattgttgctttcacgtaaacagatgtccttgttactaatcttatcacaaagcttcgttatgattttgcgaacatcctcaaatcccaccaaaagagtcaacctcagggcaatgtggcaaaagacacccagtgtgagaagcagccctcccagaggacattctgtcctgtggtagagctcccaggcctgctgcaaacactcctggctgcaatacttggcataactgcatccgtcacacggaactgtggccaaagtgtgcttcaaacatcggtgacaatagaggtccccattggtgactctggtgtcccatttgctgtctaggccgtgatgcggtggtggcagttctcctgggttgagaacactcacaaaagcatcctcctgcaccaggagctctcctgggagaatatcttttgtggcaacgagacagcgaccttttaaaggatctacgcataagccgatggatgatgaggcattggaaagttgttcattctcctccctcagcgctgcatcctcaagggttttggccagagctgctgggaagctttctgtgagactgtccttttcttgcatcttcattttcagacgatggaggtttctctgcagagtctgagggaggacatctgctagggctggtgtggctgtgaagttcctttcaagatcactgatggtctggcttgcctcctgcagtctccccagggccaccagacattctgctttacgtaacataatcttgggttgcaacctttctggatacccatgtgtctgtgctctgttaatgtctttaagacacgtctcatactgacccaggtggaagagggctgccgagcggttagcatgacacagtgacatgtcctcagtgttaggccttgaatgtgacactccctgcaaaacaatgaactggttaaaagtataaatggacaccagcat

SEQ ID NO: 24650 - DNA, 1143 bp, Homo sapiens
  SIMILAR (595)..(554): 1001254mologous to Klebsiella pneumoniae putative transposase,accession number AJ276453,Smith-Waterman Score=69.
tcacaggtagaagaagagcccaaacttgaactcagggctgttgggttgaacactgccctttttactgtagcgcaccaccttcatctttgacctctcatctggttggcctttcattctctggcaggtgttgtctccaaactgaaggtgtctgcaggttgggctgtttgcacagattcccactggcaggatgggctgtttgcacagattcctcacctgcaggatgggcgtttgcacagattcctcacctgcaggatgggccgtgactctcataagaatgtctccaatttttccagccagttccaaatcaaccctgtcagcagcccttttgaacacctcctgcctgcactccagggacttggagcctccaggggctttcagaagcggtggccctgttttgctgtgaggagcaaactcctcagcctgctctccatcgaggccccatttctgtactgaggcctccagagctgagcaagaccaaagccctgtaagctccagatgaccatttttgttatctccacaacgagttagttcttcttttcggatccggcacttcgaatccccggtcagcaatgcgtatctcgtctgccgtttgcgcaatcggtccagccgttcagcgtctctgctgtcggttagctcaaaatcaggaaaggtatgaggatcatatcccatatgtagtcgccattcagcgtgccgcccccgggcgcactgattgctgttccatcgacaagacgcaatcttttccgcttgtacaacccgtaactgcggcgcgtacagcaagtgtttgtgggcaagtatgccaaaccagtcggcggcattccgcagccggtaatgacatccccccggggccgtaagccagccccagacgtagcaagttgcagcatcacgaatttcgcggcggcgggttagagccccggcattagtgccgaagtatccagttcttcgggcagaaacaccaattcttgggacccagcccaaacttgctgaatcgaaattctgggggcggagcccagcgatctgcattctaagagccctcaagtgattctgacacgcgttcaggtttgggaacactgcttttcctgcccaggctggtttcacttcttgactttctgccagggctgaaggtgtttccccgctccaccgcat

SEQ ID NO: 24651 - DNA, 1947 bp, Homo sapiens
  SIMILAR (1606)..(1641): 911254mologous to Escherichia coli NupC,accession number X74825,Smith-Waterman Score=45.
ttaaggccgtttaacttgggtgtaaagtccttgtgacaagttttgctttccaactggtttcccggggcgcttttttccagcctcaacctctttcttgaaccggggaggctttcggattgttattgaacgatcggcttcgcttaggggggccccggaagcccttactggaaaataaccgcgcatgcaaaacgcgggcccttgttttacccggttttccctggcaccgttggtataccgtgggccccgtttgtgtggcttccaccacttgatctccctgtttcgcttgccgggtttagtccccccgttgaagtgtcctgatggatgaatccgatatttacagaaacaatcgtgagaggtttttttgtgtttttcttttggtgggtgtgccggcacgtggggcttgtttgggtggtggtggcgggtgcgggctttgtgttcggtaccttcggtcggctggctggggttgtgggcgccggttcccgtgtgtcggtgataactggtcagcaattctggcccatattggtaagcccgaagaactggatacttcggcacgtaatgccggggctctaacccgccgccgcgaaattcgtgatgctgcaactctgctacgtctggggctggcttacggccccggggggatgtcattacgtgaagtcactgcatgggctcagctccatgacgttgcaacattatctgacgtggctcttctgaagcggctgccgaaatgccgccactggtttggcatacttgccggacaaacacttgctcacattcgcgtgttgccggtgatcatccgcgcaattggtttcctgctctccaaagtcaacggcatgggcaaactggaatcctttaacgccgtcagctccctgattctgggtcagtctgaaaactttattgcctataaagatatcctcggcaaaatctcccgtaatcgtatgtacaccatggctgccacggcaatgtccaccgtgtcgatgtccatcgttggtgcatacatgaccatgctggaaccgaaatacgtcgttgctgcgctggtactgaacatgttcagcacctttatcgtgctgtcgctgatcaatccttaccgtgttgatgccagtgaagaaaacatccagatgtccaacctgttcgaaggtcagagcttcttcgaaatgctgggtgaatacattctggcaggtttcaaagttgccattatcgttgccgcgatgctgattggctttatcgccctgatcgccgcgctgaacgcactgtttgccaccgttactggctggtttggctacagcatctccttccagggcatcctgggctacatcttctatccgattgcatgggtgatgggtgttccttccagtgaagcactgcaagtgggcagtatcatggcgaccaaactggtttccaacgagttcgttgcgatgatggatctgcagaaaattgcttccacgctctctccgtgtgctgaaggcatcatctctgtgctcctggattccttcgctaacttctcttcaatcgggattatcgcacgtgcagttaaaggcctgaatgaagagcaaggtaacgagggttctcgcttcggtctgaagctggtttaccggtctaccctggtgagctgtgctgtctgcgtcaatcgcagcactggtgctgtctgaccatacttaaaaaagccggggataatttccataagcgctaacttaagggttgtggtatgacgcctgatatgatataacgtgccgatgaattactctcacgataactggtcaggaattctggcccatatgggtaatcccgaagaactggattattcggcacgtaatgccggggctctaaaccgccgccgccgatatagactgtctttgaaggtttcaagttccttccctgcaaccgtctgtctgctgctgtgaagaggacaagcccagcatcttctgggcatcctctgtcacacagcgtcat

SEQ ID NO: 24652 - DNA, 2649 bp, Homo sapiens
  SIMILAR (1368)..(403): 961254mologous to Escherichia coli transposase,accession number X60200,Smith-Waterman Score=1597.
ttaaggagataattcgttgtttatatttaaatttagagctctcagttccccttttaaaatatcctctggcaacgtgaatgtataatggcccaacatattgatatgcccgtgcatcaggggagatagccgagcgatatcttcatctataatttcttcgccattacggcgcatccagctcaacgcttcctccatatagagcgtgttccacagaaccactgcattagtaaccaggcccagcgcccccagttgatcttcctgcccttcacgataacgctttctgatctctccgcgttgtccgtaacaaatcgcacgagccacagcgtggcggccttctcctcgattaagctgcgtcaggatccgccgacgataatcttcatcatcaatataattgaggagatatagcgttttgtttacacgccctacttccataattgcctgtgccagtcctgcatcggcaagccggggggaaaactgataccccagtagacaaaacagaccgaaaataatatcgctgctacccgcagtgtctgtcatgatatcaactggatacagccctgtctgctgctcaagaagtccttccagtacaaaaatcgaatcccgtaatgtaccgggtaccacaatgccatggaacccagagtactgatcagatacgaagttataccaggtgatgcctcgtccagaaccaaaatattttctgttagatcctgagttgatggtcttcactggtgtgacaaagcgcatgccgtcagctgatgccacttctccacctccccaacgaccagcaagctccagtgtggactgaaaatcaaccaggcgggcattggcgctgaccagcgtttctgcacgaaggtaattctgtttcacccaactgagccgatggcgggtcagtgctggtatattgtgctttatcagcggttccagtccgatattacaggcttcagccatcaataccgcacataaactgatgtgcaaatcttgcgctcgagcaccagattcactgacatgcgcaaactcatgtgtaaatcctgtctgggcatctatctcaagtaacagttccgttaaatctaccggtgggagtagctgtttgatccgattatttagacgaagcaatgatggtggctcttcctgtttctccagacaactgatagtcagggatggatatttaccttcattacagatatgaacttccgcattcttttcaaatcgtgatgccacggctttccaggtctcatccagctgaatagccagttgttgcacacctttacgtccatcgacaggatgtcccagtgcccgacagacaggaatacgctgagtctgccactcttcaccttgcaacaacttctcgcgaggatctccccagcgatcactgcacgctgtatccgtccctccgcatcgtatacgaggcgtttcccagggaccggtgataatatgttcaggcgcatcatcaaggatgcgctttttcgaaccattcagttctgccagataatgaatcgcagccagtacatgttcacctgccggtgccgcacggaaatgcaggtcccgcaacaccgccggaagaaaacgtttaacccgaccgtactgctcaaccatttcgtcatggaaattattgttctgtggacgagcaagttcattaaccttgcttacagattctgccagtctgtttttgggtacgcacttgaagataacctgcctgagatctgggacatctgtattatcatccagcaacaatgcacatgcccgcgccagtaacaatgcggcctgatcaagatctttcagtgtcctgagtctttttttttgcccggttttctttgcttcgcggataatgtccagaattagcatatcaagcacatcaacggcatcgtctaatgccgttatttcctgtgctttaacgaatgcagtaagtacagcaagctttctctgctgtggcattcgagcgatatattttaccgacgccatgccagcataacgagccagattacgcagttgaatggcaggcagaccggaaaagttcagtcgggaaaactcaagacttcgtaatcggatatatcgttccagcgcttcattaaacgcaggtccactgactgtaacagggccttttttcaactgttccagtgctgatacacgctgaccttccggaatgaccagaagctccatcacttgagctgcctgccatttgttcggcagtgcggccagctttttccacagccgctgatttgccctttcacgaatttcactgatgagacgtactagtgtggttgctccgggcagtaataccttattttgaagcaaccatgcagtggcaaaatcaaacatcagacccggtcgctcattactgagccacgcccgggtatatagcagacgcttcaggcggaaagaccatggaaaatcaccaaattcatgatagccgtaatattccttaattaatgcagtatgttctctaagggtagtgtcccgttcagcatagcgggagagaacttctggacggtggatattaagctgtaccgcgacaaaatgttgaacaccaggcagaacctgagttaaatccgtcagaaatgttcccagaaaacgggctgtggtgagctgaagcgcaatgcccagcctattatgtgtgccccgtcgttggttaatgataggccagatcccgttcat

SEQ ID NO: 24653 - DNA, 3707 bp, Homo sapiens; identical to SEQ ID NO: 13815
  SIMILAR (1501)..(1608): 911254mologous to Escherichia coli K12 putative reductase,accession number AE000288,Smith-Waterman Score=172.

SEQ ID NO: 24654 - DNA, 275 bp, Homo sapiens
  SIMILAR (60)..(221): 681254mologous to Escherichia coli K12 required for the efficient incorporation of molybdate into molybdoproteins,accession number AE000111,Smith-Waterman Score=173.
gaatccaatggaaagaccaggacattgagaatctgtaccaaaacctggggattaagctaagcggcgtttatcaggataaaggcatccctgcgctggaagaatggctgacatcggcgctaaccacgccgtttgaactggaaacccgcttaatcctgcaggtcttggctcgccatcgccagacgatgcgccacttgtacagcgacctcaccgttacctgccatcagcatgtcggctttcgaatccaccagcacggaacggcgcacggtatcggacca

SEQ ID NO: 24655 - DNA, 551 bp, Homo sapiens
  SIMILAR (3)..(344): 961254mologous to Escherichia coli exonuclease SbcD,accession number U73857,Smith-Waterman Score=550.
tggcgtcgattcccgcacagctggaccagtggcgcgaggtatcgcaggacccacctgtctggctggatatcgaaatcactactgatgagtatctgcatgatattcagcgcaaaatccaggcattaaccgaatcattgcctgtcgaagtattgctggtacgtcggagtcgtgaacagcgcgagcgtgtgttagccagccaacagcgtgaaaccctcagcgaactcagcgtcgaagaggtgttcaatcgccgtctggcactggaagaactggatgaatcgcagcagcaacgtctgcagcatcttttcaccacgacgttgcataccctcgccggagaacacgaagcatgaaaattctcagcctgcgcctgaaaaacctgagctcattaaaaggcgaatggaagattgatttcacccgcgagccgttcgccagcaacgggctgtttgctattaccggcccaacaggtgcggggaaaaccaccctgctggacgccatttgtctggcgctgtatcacgaaactagggttctgatctaacgtttcacaatcgcaaaat

SEQ ID NO: 24656 - DNA, 2203 bp, Homo sapiens
  SIMILAR (22)..(1242): 991254mologous to Escherichia coli transposase,accession number X60200,Smith-Waterman Score=2063.
atgaacgggatctggcctatcattaaccaacgacggggcacacataataggctgggcattgcgcttcagctcaccacagcccgttttctgggaacatttctgacggatttaactcaggttctgcctggtgttcaacattttgtcgcggtacagcttaatatccaccgtccagaagttctctcccgctatgctgaacgggacactacccttagagaacatactgcattaattaaggaatattacggctatcatgaatttggtgattttccatggtctttccgcctgaagcgtctgctatatacccgggcgtggctcagtaatgagcgaccgggtctgatgtttgattttgccactgcatggttgcttcaaaataaggtattactgcccggagcaaccacactagtacgtctcatcagtgaaattcgtgaaagggcaaatcagcggctgtggaaaaagctggccgcactgccgaacaaatggcaggcagctcaagtgatggagcttctggtcattccggaaggtcagcgtgtatcagcactggaacagttgaaaaaaggccctgttacagtcagtggacctgcgtttaatgaagcgctggaacgatatatccgattacgaagtcttgagttttcccgactgaacttttccggtctgcctgccattcaactgcgtaatctggctcgttatgctggcatggcgtcggtaaaatatatcgctcgaatgccacagcagagaaagcttgctgtacttactgcattcgttaaagcacaggaaataacggcattagacgatgccgttgatgtgcttgatatgctaattctggacattatccgcgaagcaaagaaaaccgggcaaaaaaaaagactcaggacactgaaagatcttgatcaggccgcattgttactggcgcgggcatgtgcattgttgctggatgataatacagatgtcccagatctcaggcaggttatcttcaagtgcgtacccaaaaacagactggcagaatctgtaagcaaggttaatgaacttgctcgtccacagaacaataatttccatgacgaaatggttgagcagtacggtcgggttaaacgttttcttccggcggtgttgcgggacctgcatttccgtgcggcaccggcaggtgaacatgtactggctgcgattcattatctggcagaactgaatggttcgaaaaagcgcatccttgatgatgcgcctgaacatattatcaccggtccctgggaaacgcctcgtatacgatgcggagggacggatacagcgtgcagtgatcgctggggagatcctcgcgagaagttgttgcaaggtgaagagtggcagactcagcgtattcctgtctgtcgggcactgggacatcctgtcgatggacgtaaaggtgtgcaacaactggctattcagctggatgagacctggaaagccgtggcatcacgatttgaaaagaatgcggaagttcatatctgtaatgaaggtaaatatccatccctgactatcagttgtctggagaaacaggaagagccaccatcattgcttcgtctaaataatcggatcaaacagctactcccaccggtagatttaacggaactgttacttgagatagatgcccagacaggatttacacatgagtttgcgcatgtcagtgaatctggtgctcgagcgcaagatttgcacatcagtttatgtgcggtattgatggctgaagcctgtaatatcggactggaaccgctgataaagcacaatataccagcactgacccgccatcggctcagttgggtgaaacagaattaccttcgtgcagaaacgctggtcagcgccaatgcccgcctggttgattttcagtccacactggagcttgctggtcgttggggaggtggagaagtggcatcagctgacggcatgcgctttgtcacaccagtgaagaccatcaactcaggatctaacagaaaatattttggttctggacgaggcatcacctggtataacttcgtatctgatcagtactctgggttccatggcattgtggtacccggtacattacgggattcgatttttgtactggaaggacttcttgagcagcagacagggctgtatccagttgatatcatgacagacactgcgggtagcagcgatattattttcggtctgttttgtctactggggtatcagttttccccccggcttgccgatgcag

SEQ ID NO: 24657 - DNA, 2600 bp, Homo sapiens
  SIMILAR (799)..(2598): 991254mologous to Escherichia coli transposase,accession number X60200,Smith-Waterman Score=3130.
atgcctgtcgactttctaacctctgaccaaaaacagaattacggttgttatgctgcagaacctaatgacgtgcaactggcgcgctattttcatcttgatgaacgggatctggccttcattaaccaacgacggggcaaacataataggctgggcattgcgcttcagctcaccacagcccgttttctgggaacatttctgacggatttaactcaggttctgcctggtgttcaacattttgtcgcggtacagcttaatatccaccgtccagaagttctctcccgctatgctgaacgggacactacccttagagaacatactgcattaattaaggaatattacggctatcatgaatttggtgattttccatggtctttccgcctgaagcgtctgctatatacccgggcgtggctcagtaatgagcgaccgggtctgatgtttgattttgccactgcatggttgcttcaaaataaggtattactgcccggagcaaccacactagtacgtctcatcagtgaaattcgtgaaagggcaaatcagcggctgtggaaaaagctggccgcactgccgaacaaatggcaggcagctcaagtgatggagcttctggtcattccggaaggtcagcgtgtatcagcactggaacagttgaaaaaaggccctgttacagtcagtggacctgcgtttaatgaagcgctggaacgatatatccgattacgaagtcttgagttttcccgactgaacttttccggtctgcctgccattcaactgcgtaatctggctcgttatgctggcatggcgtcgaacaataatttccatgacgaaatggttgagcagtacggtcgggttaaacgttttcttccggcggtgttgcgggacctgcatttccgtgcggcaccggcaggtgaacatgtactggctgcgattcattatctggcagaactgaatggttcgaaaaagcgcatccttgatgatgcgcctgaacatattatcaccggtccctggaaacgcctcgtatacgatgcggagggacggatacagcgtgcaggttattcactatgtttgctggaacgccttcaggatgcactgcgccgccgggacatctggcttgaaaacagtgatcgctggggagatcctcgcgagaagttgttgcaaggtgaagagtggcagactcagcgtattcctgtctgtcgggcactgggacatcctgtcgatggacgtaaaggtgtgcaacaactggctattcagctggatgagacctggaaagccgtggcatcacgatttgaaaagaatgcggaagttcatatctgtaatgaaggtaaatatccatccctgactatcagttgtctggagaaacaggaagagccaccatcattgcttcgtctaaataatcggatcaaacagctactcccaccggtagatttaacggaactgttacttgagatagatgcccagacaggaattacacatgagtttgcgcatgtcagtgaatctggtgctcgagcgcaagatttgcacatcagtttatgtgcggtattgatggctgaagcctgtaatatcggactggaaccgctgataaagcacaatataccagcactgacccgccatcggctcagttgggtgaaacagaattaccttcgtgcagaaacgctggtcagcgccaatgcccgcctggttgattttcagtccacactggagcttgctggtcgttggggaggtggagaagtggcatcagctgacggcatgcgctttgtcacaccagtgaagaccatcaactcaggatctaacagaaaatattttggttctggacgaggcatcacctggtataacttcgtatctgatcagtactctgggttccatggcattgtggtacccggtacattacgggattcgatttttgtactggaaggacttcttgagcagcagacagggctgaatccagttgaaatcatgacagacactgcgggtagcagcgatattattttcggtctgttctggctactggggtatcagttttccccccggcttgccgatgcaggtgaggcggtgttctggcgggtgaataaatcggcaaactacggagtactggataagttggcccgaggatatgcagatctgtcaaaagcggagagtcagtgggatgagatgatgcgaaccgctggttcgctgaagttgggtacaattcatgcgtcagaactcattcgctctttactgaaaagctcgcgcccatcaggactggcacaggcaattatggaagtagggcgtgtaaacaaaacgctatatctcctcaattatattgatgatgaagattatcgtcggcggatcctgacgcagcttaatcgaggagaaggccgccacgctgtggctcgtgcgatttgttacggacaacgcggagagatcagaaagcgttatcgtgaagggcaggaagatcaactgggggcgctgggcctggttactaatgcagtggttctgtggaacacgctctatatggaggaagcgttgagctggatgcgccgtaatggcgaagaaattatagatgaagatatcgctcggctatctcccctgatgcacgggcatatcaatatgttgggccattatacattcac

SEQ ID NO: 24658 - DNA, 2358 bp, Homo sapiens
  SIMILAR (922)..(1173): 961254mologous to Escherichia coli SMALL PROTEIN A,accession number D90888,Smith-Waterman Score=434.
atgaccctcaagactcctgatgcccggcaatcagtaggagccaacagcctaagggatattccctgcacccgccgggccggccttgcatcagagagtcgggacgccgcactcacgattttgcaggtcctgggggacggcgggcccagcgtgcaggtcctggctctgcggagctggccacggttcctagtgagaggctggctgggctttttctcacatgtccttgtcacacggcgatgtggccgggctgggatcacccttccctctcttcggaagagccctccggtctggtgtggagcagaaagtcccacagacaaccccagacacacactgattgcagtcggtagatcgactctgaggatccccgactgtgcccgagtggtgcacgttaaggtggctgtcatggtcaattttacgttctgtgtattttacaataaaaaccccaagcaggaggacggaagtccaatggcttctaaggatataaccctcaccttcgttctaccagctacaagcagaccatcatcatccctcccacggtccctgtccccacacgtcccacggggctacgttggtgcggtcaccgtccccacgcgttcccacggggcaagaccacgccatgggagggagctgggtgcggtgggaaagccccaccctgggagtccaggatctgggtcactgaaagaccttgagcgggcttacaaaaacttcttccggaagcgggctgcttttccccgattcaaaaagcggggacagaatgatgcattccgctacccgcagctggggtggggcgttggtgggatcgaagcagaagccgcaatgttaggccagccggtttccatgcttatcccggatgtagtgggcttcaaacttaccggaaaattacgtgaagctcccccagggaagctctgccctctccccagcgcagtttcgtcaggctgttccactctggagcgagtggtttaccgtcctgacatcaaccaggggaactatctgaccgctaacgacgtatccaaaatacgtgttggcatgacgcaacaacaagttgcgtacgcattgggtacaccgctgatgtccgatccatttggtacgaatacctggttctatgtcttccgccagcaaccaggtcatgaaggtgtaactcagcaaacgctgacgctgacctttaacagtagcggggacccgaagctgagagagcctcaagtggctcaggctacagcagcaggggtggcttttgtccctgacgtgggccccccacccccttcttccatgtctgggagtggcagcaacggcccctttctgtgtgggaagcagaccacgtttgaaggagggatgagggagcctgccctcgcatggtggccagggcacgtaactgcaggccaaagctgctggaactgcgggcggaaagccagtgagacgtgcagcggctgcaacgcggcacgctactgcgggtccttctgccagcatcgggactgggagaagcatcaccacgtgtgtggccagagcctgcagggccccacagccgtggtggccgacccgcgcgttatgaaaaagatcctgacaaccccgatcaaagctgaagatctgcaagatattcgcgtcggcgatgtgatctacctgaccggtacgctggtgacctgccgcgacgtttgtcaccgccgtttgatcgaactgaaacgtccgatcccttacgatctcaacggcaaagcgattttccacgctggccccatcgtgaaggcggaccggcagagttatccaagtgcttcaggtcagcagcagctcccccggctcgcgttaggaatgcagattccgggtgcgccccggggatcctctagagtggtgcgcgggcaggcgagggcgagcaggccgccggaaggaccaggcacccggggcaaggctgtgaggacaccagccctgtgggatcctataaacctgctgatcattaaagataatcagattgtgtatcgcaaagcctggggagcggcgaaaaagtacgatggcagcgtgttgatggaacagcctgtcaaagccaccaccgggacgctgtatgacctggcctcaaacaccaaaatgtacgccacgaacttcgccctgcaaaagctgatgagcgaaggcaaactgcatcctgacgatcggattgcgaaatatattccggggtttgccgataatccgcccagtggacgggaggggccccgccatccagcctttaacctgggtggtccctggaccgaccagcctgtggggggtgtggcgggcaccggtgtgcccagcagcttgttttgtgtaactggggcctccaatctgctccccgtggtccccctgggacggcgcttccagttgggggggctgttggctcctcagtga

SEQ ID NO: 24659 - DNA, 2172 bp, Homo sapiens
  SIMILAR (629)..(757): 391254mologous to Escherichia coli Nodulation protein V (EC 2.7.3.-),accession number D90844,Smith-Waterman Score=45.
atgctgagtatgctgcgttccagcgacgtgctggcgcgactcggtggggatgaatttggtctgctgctaccagactgtaatgttgaaagcgcgcgttttatcgctacacgcattatcagtgccgtgaatgactatcactttatatgggaaggccgtgtgcatcgggtaggtgccagtgccgggattaccttgattgatgacaacaatcatcaggcggcagaagtgatgtcgcaggctgatatcgcctgttatgcctccaaaaatggtggccggggccgggtgacggtttacgaaccgcagcaagctgccgcacatagcgaacgggcggcgatgtcgcttgatgaacagtggcggatgattaaagagaatcagttgatgatgctcgcccacggtgtcgcttcgccacggatcccggaagcgcgtaatttgtggctgatttcacttaagctctggagttgcgaaggcgagattattgatgaacaaacatttcgtcgtagcttcagcgatccggcgcttagccatgctcttgaccgccgggtattccacgaatttttccagcaggccgcaaaagcgggttgccacgcgcggttctggcagagtcgggttgaatgcggcgttttcagcgtagctgccactgaaaatacgaccgtctttacattccagcgcgacaccgcttggcgacttactcttaatatccaccgtccagaagttctctcccgctatgctgaacgggacactacccttagagaacatactgcattaattaaggaatattacggctatcatgaatttggtgattttccatggtctttccgcctgaagcgtctgctatatacccgggcgtggctcagtaatgagcgaccgggtctgatgtttgattttgccactgcatggttgcttcaaaataaggtattactgcccggagcaaccacactagtacgtctcatcagtgaaattcgtgaaagggcaaatcaccggctgtggaaaaagctggccgcactgccgaacaaatggcaggcagctcaagtgatggagcttctggtcattccggaaggtcagcgtgtatcagcactggaacagttgaaaaaaggccctgttacagtcagtggacctgcgtttaatgaaacgctggaacgatatatccgattacgaagtcttgagttttcccgactgaacttttccgggatgagaaggcatgaggatagtaaaaattgtacgatcgttagctcggtaccccagatccgccaatttgtagccgataaatgccacaacaccggaccagacgatcgtaatggcgatgctttccagctgtaccagcaactgatggcccatcgtcacaccttcagcgaagcccacgccgcccagcgagctggcggcaaaaatcccggtcatgatacagccgacaatgccacaaacgccgtgcacaccgaagacatcgcagggatcatccacccgcagcaagcgtttgagcatggaaaggaaatcagtagacgggctgatctgcagctcagcagtcgcccttggaggatccccgcgatccgcgcttccggcagccagctggtgacactggcgatgaaacgtgtcgacttgcgccagcacaacgacgctatcctcgaaccgcttatcgcggcgggtgtgaccctgctgccaaatacatccggggcgaaaacagcggaagaagccattttcgccgcccatctggctcgtgaagcgttaggcacaaactggttaaaattagagattcaccctgacgcccgctggctgttgcccgatcccatcgaaaccctgaaagccgccgaaacgctggtacaacagggatttgtcgtgctgccttactgcggggccgatccggtattgtgtaaacgtctggaagaagtcggctgtgcagcggtgatgccgctcggcgcgccgattggctcgaatcagggactggaaacccgcgccatgctggagattattatccagcaggccacagtgccggtggttgtcgatgctggcatcggcgttcccagccatgccgcgcaggcgctggaaatgggggccgacgcggtgttagtgaatacggcgattgccgtcgcggacgatcccgtcaacatgccgaaggcatttcgtctggcggtagaagcaggcctactggcacttgaaacgactatgagctcggtacctagataa

SEQ ID NO: 24660 - DNA, 717 bp, Homo sapiens; identical to SEQ ID NO: 16025
  SIMILAR (423)..(16): 801254mologous to Escherichia coli lipoprotein-34,accession number X57402,Smith-Waterman Score=529.

SEQ ID NO: 24661 - DNA, 5052 bp, Homo sapiens
  SIMILAR (5052)..(4039): 841254mologous to Escherichia coli GLYCINE BETAINE/L-PROLINE TRANSPORT ATP-BINDING PROTEIN PROV,accession number D90891,Smith- Waterman Score=1348.
ctattctggaccgttattgtattccaccatgcggttgtagttagtgtcattcagattgcgctgtatttcgtcgttatcatctacgctgccggtattacccgcaaacggacgattagagatcaccgcatcggcccacggtttagccgtgttaaaaccttcgttgatggcgctatcacggatcaccacctgaccgttggtattggcatcaacatccagcgagcggcccagttgcgccacaccatcaccgaaagcattgaaacggctgtttacggcgaggaaaccgtagtaaatgttggacagcgtagccggtgcaaacacatacgcttcttgctgagtacgtgagttcaccacgcggaattcggtgttatcgaacaccactgcgccgcgaccagaaacgatatccacatccccttcaatgtagctgttggtcaccagcgtacgcggctgacgattcgtttccagacggttctggtcaccatcagtacgcagtgccaccgccggatggttacctgcatctacgtatcgcccagcgtgttttcgatggtcagattttgcagacacgttgatgacagcattcaggtcaatcagcaaaagtgtattggctgtaaatcctgcgtggtggcctgtcctgcccgcagcataaccatataccgcagtggaatgaactggtgaaagccggaaacactcgacgccgccgtcgagctttctcaccagaccaacaacctgccgcatattaccggacgcgtctgcccgcaagaccgtttgtgtgaaggcgcctgtactattcgcgatgagcacggcgcggtaactatcgtcaacattgaacgataagctcatgtcaccaaagtggacaatcgggtgacgattatcgtagcaggtccggcagggctggcctgtgcggatgttttgacccgctatggcgtgggggtgacgatgtacgatcgccatccagaaatcggtggcttgctcactatcggcataccttctttcaaactggataaatccctgttggcacgccgtcgggaaatcttcagcgcgatggggattcacttcgaactcaattgtgatgtgggtaaagatgtctctttggattcgcttttggaacaatacgacgcggtcttcgttggcgtaggcatttacctttccatgaaagcgggttttcccaatgaagatgcccgagcgtttatgttgcctacattgccatataggtggcggtggcactggcaatataaagctgttcttcattgtgtaattcaacgcgggcgacggcgactttattgcctgcacgcaacaggctactagtagcagtaaaacgctcgcccctgcctgggcgcagataatcaacgcgaagatcaatggtccccatccgcgataccgctggcgtagttcatcttcactgatggtttcgtggcgggttaaggtacttcccacgcacaccagaccggcggcgacatccagcgccgacgcaatgaccccgccgtgcaaaatgctttgcgcccagttgcccaccatcattggctgatttttaaaggccagctgtgcgactctttttcgtaacgctccagttccatccccaatgcgcggtctcgtcatcacttcaagttgctgttcgcgggtttgcgtcgagttaaggcacgccgccgccacgccgttggcttgcagttgatccacctgatctttcatcaacgaaatcagcggtgaaacaaccacggtaaggccgtttagcaataaggcagggatttgatagcaaagggattttccgccaccagtgggcatgacgacgaggcaatcgcggccggaaagcacagtgtcgataatttcttcctggccggggcgaaactgttggtagccaaaggtttcttgtaaaacctgtttagctccggactccagattcaacacttccgcctgcgccacattcaccccgattgcaagacgataaggcagctcactccccatcgggaagagatccagcaacgcgccgcgcgtggcgtattcgccgtgctccatcacctggtcaacatggcgataaccggcgctgtccagttgggttcgtaatgcatctcgtgacaggcgctgaccttttttcatcaccagcgcatgaccgtggagaaaactgtgtgggcaaacgcgctgcataagcgtattcaccggaacaatcagtacgccacgctgcatcgtcggtagctggtaaagggtggaaaggcgcgaggagataatgtcctgatgaggcgaaaaactgtcgtagggaagagtttcccagtccgccagattcatcaccatttgatcggtaaactggctgatttcatcatgcaaacgcagagcattttgcatatctggtgcaatgagtaccaccggaccggcgtgacgttcggcaatttccgctaccagcgttgcacaagctgcgccggttaactcgcccagcagacgctgctcacccgatgcctgcaggtcccaggttgggaacacatgataatcacacaggctatattgtttcaacacaggatacgcatagcggctcaccgacttgaggccatcatcaaaggtaatcaccaccgctcgcgcagggagattgatcttattcttcacgtagccttccagctgcaccatgctcagtgtcgcgtatcccctgtcacgcagccaggccatctggttattgaaagcgcgtaccgatgtggtcgtcgaagtatggcgaaaacgggtgttttcttcgtcgcgcagaatatggtgataggttagcaccgacaggccattatcgggttgggcatccagtgcgctgatataggccagtcgatcgccaatacggatctgataccaggtttgatttaacctgtctttcagtttatgcaaaatcgggtagcgcaaattgtccgccagtaccccaaatggcgcacttcccgcactcggcgcgttatagaccggcgtatctttccaggtaactaagttctgattactcagcggcttgttgaggtcgcccaaaccgtcttcaactttttgtcgcccctgaaccggctcgagatgacctttatcgataaaacctttgccaaagccaaaattaaatgcgtaataacttgcggcagtgggctccacggcaatgatttgtccggcccgaatattccccacggtcaccatcttgtcaccaatttgcgcccagaccgcagcattttcgatggtttgcatataacgggcaggtaacgcggcactgacacttgcggtaaacagcatcagcaggagaataacagcttgtttgtacatgaaaaaataaccgagggtgaaacaacgcgcgctcaacaatcggtttgcccgcgcagcgttcgccagtggtttatcttcaatacgtacgtcatagtagaactgggtagtcgggtcgaacatacaggtgttgatgtagtccgcgagctgctgtgccaactggcgatagcgtttggcctcttctggcttaccgaggatggttgccatctccgccagataatggttatcgctgtacatatagctggcctgatccaccgactcctgcaatagcgagtagcccagcaacgttccgtcctgactgccgttttcggcgatttcaccgtccagtcgccggcgattgctatttctgacgttagtcatatttcctgcgtcggtaatgatttcggtttcaatgatattttctcccgctacgttgaagcggtaggtcgcgaaggcgatgtactgctggggatctccacctccggtaactctgcaaacgtgatcaaagcgatcgcagcggcgcgtgagaagggaatgaaagtgatcaccctgaccggtaaagacggcggcaaaatggctggcacggcggatatcgaaattcgcgtaccgcactttggttatgccgaccgcattcaggagattcacattaaagtgatccatatcctgatccagttgattgaaaaagagatggttaagtaagtcctgctttaatttcataagacgccccagcgtcgccatagtgcgttcaccgaatacgtgcgcaacaaccgtcttccggagactgtcatacgcgtaaaacagccagcgctggcgcgatttagccccgacatagccccactgttcgtccatttccgcgcagacgatgacgtcactgcccggcgggttgagaagcggtgtaagtgaactgcagttgccatgttttacggcagtgagagcagagatagcgctgatgtccggcggtgcttttgccgttacgcaccaccccgtcagtagctgaacaggagggacagccgcggttttaagcgaatcgatggagactgcgccgacaaacttattaccgcgttcgataacgtagccatattcgcgatcttcatcctgcaataatttcagtgccgaacgtgggccgaagccaggggttttacgaattaagccattcggtgtccggcgggcaatatctttcgcactgaatacctgactaatatcaacgccacggaagaaggtacggacataatcattcgccggattattgagaatttcatccggtgtgccgacctgtaccacttcaccattttgcataatggcaattcggtcgccaatacgcatggcttcatcaagatcgtgggaaataaagacaatggtgcgctgatgtttcgcctgtaattttaccagctcatcctgcatctcggtgcgaattaatggatcgagcgccgagaaggcttcgtccattaataatatatccggattaatggcgcgggctaatcccacacgttgacgcatcccgccagagagttcatccgggtagctgtgggcataattttccagcccgacctgacgcagtgcatcaagggctttttcccggcgttcttcggcattaattccggccaattccataccgaacgcagtattgtccagcacggtcatatgcggcattaaggcaaaggactggaagaccatcgcaatcttttttctgcgcacctcacggagttcggcgtcggatattttggcaatatccacaccatcaatcagcacttgcccgcgggtgggttcaatcaggcgattgagaaggcgtaccattgtggatttacccgagccggataatcccat

SEQ ID NO: 24662 - DNA, 3009 bp, Homo sapiens
  SIMILAR (1)..(3006): 991254mologous to Escherichia coli transposase,accession number X60200,Smith-Waterman Score=5171.
atgcctgtcgactttctaacctctgaccaaaaacagaattacggttgttatgctgcagaacctaatgacgtgcaactggcgcgctattttcatcttgatgaacgggatctggccttcattaaccaacgacggggcaaacataataggctgggcattgcgcttcagctcaccacagcccgttttctgggaacatttctgacggatttaactcaggttctgcctggtgttcaacattttgtcgcggtacagcttaatatccaccgtccagaagttctctcccgctatgctgaacgggacactacccttagagaacatactgcattaattaaggaatattacggctatcatgaatttggtgattttccatggtctttccgcctgaagcgtctgctatatacccgggcgtggctcagtaatgagcgaccgggtctgatgtttgattttgccactgcatggttgcttcaaaataaggtattactgcccggagcaaccacactagtacgtctcatcagtgaaattcgtgaaagggcaaatcagcggctgtggaaaaagctggccgcactgccgaacaaatggcaggcagctcaagtgatggagcttctggtcattccggaaggtcagcgtgtatcagcactggaacagttgaaaaaaggccctgttacagtcagtggacctgcgtttaatgaagcgctggaacgatatatccgattacgaagtcttgagttttcccgactgaacttttccggtctgcctgccattcaactgcgtaatctggctcgttatgctggcatggcgtcggtaaaatatatcgctcgaatgccacagcagagaaagcttgctgtacttactgcattcgttaaagcacaggaaataacggcattagacgatgccgttgatgtgcttgatatgctaattctggacattatccgcgaagcaaagaaaaccgggcaaaaaaaaagactcaggacactgaaagatcttgatcaggccgcattgttactggcgcgggcatgtgcattgttgctggatgataatacagatgtcccagatctcaggcaggttatcttcaagtgcgtacccaaaaacagactggcagaatctgtaagcaaggttaatgaacttgctcgtccacagaacaataatttccatgacgaaatggttgagcagtacggtcgggttaaacgttttcttccggcggtgttgcgggacctgcatttccgtgcggcaccggcaggtgaacatgtactggctgcgattcattatctggcagaactgaatggttcgaaaaagcgcatccttgatgatgcgcctgaacatattatcaccggtccctggaaacgcctcgtatacgatgcggagggacggatacagcgtgcaggttattcactatgtttgctggaacgccttcaggatgcactgcgccgccgggacatctggcttgaaaacagtgatcgctggggagatcctcgcgagaagttgttgcaaggtgaagagtggcagactcagcgtattcctgtctgtcgggcactgggacatcctgtcgatggacgtaaaggtgtgcaacaactggctattcagctggatgagacctggaaagccgtggcatcacgatttgaaaagaatgcggaagttcatatctgtaatgaaggtaaatatccatccctgactatcagttgtctggagaaacaggaagagccaccatcattgcttcgtctaaataatcggatcaaacagctactcccaccggtagatttaacggaactgttacttgagatagatgcccagacaggatttacacatgagtttgcgcatgtcagtgaatctggtgctcgagcgcaagatttgcacatcagtttatgtgcggtattgatggctgaagcctgtaatatcggactggaaccgctgataaagcacaatataccagcactgaccgcccatcggctcagttgggtgaaacagaattaccttcgtgcagaaacgctggtcagcgccaatgcccgcctggttgattttcagtccacactggagcttgctggtcgttggggaggtggagaagtggcatcagctgacggcatgcgctttgtcacaccagtgaagaccatcaactcaggatctaacagaaaatattttggttctggacgaggcatcacctggtataacttcgtatctgatcagtactctgggttccatggcattgtggtacccggtacattacgggattcgatttttgtactggaaggacttcttgagcagcagacagggctgaatccagttgaaatcatgacagacactgcgggtagcagcgatattattttcggtctgttctggctactggggtatcagttttccccccggcttgccgatgcaggtgaggcggtgttctggcgggtgaataaatcggcaaactacggagtactggataagttggcccgaggatatgcagatctgtcaaaagcggagagtcagtgggatgagatgatgcgaaccgctggttcgctgaagttgggtacaattcatgcgtcagaactcattcgctctttactgaaaagctcgcgcccatcaggactggcacaggcaattatggaagtagggcgtgtaaacaaaacgctatatctcctcaattatattgatgatgaagattatcgtcggcggatcctgacgcagcttaatcgaggagaaggccgccacgctgtggctcgtgcgatttgttacggacaacgcggagagatcagaaagcgttatcgtgaagggcaggaagatcaactgggggcgctgggcctggttactaatgcagtggttctgtggaacacgctctatatggaggaagcgttgagctggatgcgccgtaatggcgaagaaattatagatgaagatatcgctcggctatctcccctgatgcacgggcatatcaatatgttgggccattatacattcacgttgccagaggatattttaaaaggggaactgagagctctaaatttaaatataaacaacgaattatctccttaa

SEQ ID NO: 24663 - DNA, 1186 bp, Homo sapiens
  SIMILAR (418)..(792): 1001254mologous to Escherichia coli transposase,accession number X60200,Smith-Waterman Score=668.
atgattgatgtcttagggccggagaaacgcagacggcgtaccacacaggaaaagatcgcaattgttcagcagagctttgaaccggggatgacggtctccctcgttgcccggcaacatggtgtagcagccagccagttatttctctggcgtaagcaataccaggaaggaagtcttactgctgtcgccgccggagaacaggttgttcctgcctctgaacttgctgccgccatgaagcagattaaagaactccagcgcctgctcggcaagaaaacgatggaaaatgaactcctcaaagaagccgttgaatatggacgggcaaaaaagtggatagcgcacgcgcccttattgcccggggatggggattgcacgtcattctcagacgaacgcctgcaggtcctgtcaggtagtacgcctgatatgcctgtcgactttctaacctctgaccaaaaacagaattacggttgttatgctgcagaacctaatgacgtgcaactggcgcgctattttcatcttgatgaacgggatctggccttcattaaccaacgacggggcaaacataataggctgggcattgcgcttcagctcaccacagcccgttttctgggaacatttctgacggatttaactcaggttctgcctggtgttcaacattttgtcgcggtacagcttaatatccaccgtccagaagttctctcccgctatgctgaacgggacactacccttagagaacatactgcattaattaaggaatattacggctatcatgaatttggtgattttccatggtctttcccgcctgaagcgtctgctatatacccgggcgtggctcagtaatgagcgaccgggtctgatgtttgattttgccactgcatggttgcttcaaaataaggtattactgcccggagcaaccacactagtacgtctcatcagtgaaattcgtgaaagggcaaatcagcggctgtggaaaaagctggccgcactgccgaacaaatggcaggcagctcaaactattatcataggtaggccaaatgaggataaccggatgaaaaaatgggcagtaataatttctgcagtcggactggcgtttgctgtttccgggtgttccagtgattacgtcatggcgaccaaagatggccgtatgattttgaccgatggaaaacctgaaattgatgatgataccgggctg

SEQ ID NO: 24664 - DNA, 4707 bp, Homo sapiens
  SIMILAR (1709)..(2797): 1001254mologous to Escherichia coli O157:H7 Z4370 gene product,accession number AE005531,Smith-Waterman Score=1971.
ctgcaaactcgctgtcagcgattgcacttgttccggcgtgaaagcgtgacgccgctggctgcgcttgcagcttctccagctctgtgcgggccgatttgtgctgctcaaaaaccatcgccgagatttgcccgtagatttcagtgccggttaactcctcgagcaattccgcgcgttctttgggtttggcattcaggaaggcagcaaattgcccctgcaaattaccgtcgggttggttacgcgcccgattctggctccagaatgcacggtacgcttcacctttcacttcaaactccacctccgccagacattcggcggtatcgcgggtcatgagatcattttgcgattgtgaaacgttagagagacgcggagtttcgtgatacagcgccagacaaatggcgtccagcagggtggttttccccgcacctgttgggccggtaatagcaaacagcccgttgctggcgaacggctcgcgggtgaaatcaatctcgcgctgttcacgactccgacgtaccagcaatacttcgacaggcaatgattcggttaatgcctggattttgcgctgaatatcatgcagatactcatcagtagtgatttcgatatccagccagacaggtggctcctgcgatacatcgcgccactgttccagctgtgcggtaatcgacgccagatcgcctttcagcactgccatgggttgcgttaccggtacgttcaggttttccacgctctctaatttgccgtttgaaaatgtcacgcgatggacatatttagacctgcaggaaacactacggtcatcagtgtgagcggatccattgcttcgtcgagacgcaatccttcgacataaggatatttcagcccacgcccgataaagcggtcctgctgccctggcatttcgcattgctgttaggttcgcaagcgccagcaatttgtgcagcggaaaaccaatccacggcaccaccatcgaccacgcttccacgcagcgcatacgataaatacgctcttccagcgggaagcgacgggttaagtcatcatgatcgagggtcaatggttttgccacttcgccgctgattttcagtgtccatggatcggttttcaggctaccagcattagcggcgggatcggctttatccagcccgaattcatagaagttattataaccggaaactttatctgctggcgtcagtggcaggttattttgccaggcggcaggcttgctgaactccagcgcttttccggcgggggcgggcgggcgatcgttccctttaaaccagctaagcagatcggcatgcgcagcgtgaggcaaagaaagtgcagttgcactgatgcccagtgcttttaacacctgccgacgcttcataaagaataccgactcggccgtaacatctgattcttttaaaaattgatgacctgcaggcatgaagggagtctgggtgatgacccgggtattaatggacagctgtgggacgtcaaccgtattgatgtcaccgcgcacgaaggaacgtgggaacgctggacggtacgcgcggacgagccgcaagcgttccatattgaaggcgtaatgttccagatccgtaacgtgaatggcgcgatgccgttcccggaagacagaggctggaaagataccgtttgggttgacggacaagtggagctgcttgtttatttcggtcagccttcctgggcgcacttcccgttctacttcaacagtcagacgctgttctcctggccgcagtactgggccgcctgttttggaccggcaccgtttttgccgatgtctcgtgaagagatggatcaacttggctgggatagctgcgacatcattttggttactggcgacgcgtatgtcgatcacccaagcttcgggatggcgatttgcggtcgtatgctggaagcgcagggctttcgcgtcgggatcatcgcccagccggactggagcagcaaagacgactttatgcgtctgggtaaaccgaatctgtttttcggtgttactgctggcaacatggattcgatgatcaaccgttataccgccgatcgccgtttacgtcatgacgatgcctacacgccggataacgtcgcgggtaagcgcccggatcgcgccacactggtttatacccagcgttgtaaagaggcgtggaaagatgtaccggtgatcctcggcggtattgaggctagtctgcgccgtaccgcgcattatgattactggtccgataccgtgcgccgttccgtgctggtggattcgaaagccgacatgctgatgtttggtaacggtgagcgtccgctggtggaagtggcgcatcgtctggcgatgggcgagccaattagtgaaatccgcgatgtgcgtaataccgcgattatcgtgaaagaggcgctgcctggctggagcggcgtggattccacccgtcttgatacccctggaaaaatcgacccaatcccgcatccgtatggtgaagatttgccgtgcgcggataacaaaccggtggcaccgaaaaagcaggaagccaaagccgtaaccgtgcagccaccgcgcccgaaaccgtgggaaaaaacctacgtgttgctgccttctttcgagaaagtgaagggcgataaagtgctgtacgcccatgcttcgcgtattctgcaccacgaaaccaacccaggctgtgcccgcgcattgatgcaaaaacacggcgaccgctatgtgtggatcaacccgcctgctattccgctttctaccgaagagatggacagcgtttttgcgctgccatacaagcgcgtgccacatccggcctatggcaatgcccgtattccggcttacgaaatgaattacggttgttatgctgcagaacctaatgacgtgcaactggcgcgctattttcatcttgatgaacgggatctgggcttcattaaccaacgacggggcaaacataataggctgggcattgcgcttcagctcaccacagcccgttttctgggaacatttctgacggatttaactcaggttctgcctggtgttcaacattttgtcgcggtacagcttaatatccaccgtccagaagttctctcccgctatgctgaacgggacactacccttagagaacatactgcattaattaaggaatattacggctatcatgaatttggtgattttccatggtctttccgcctgaagcgtctgctatatacccgggcgtggctcagtaatgagcgaccgggtctgatgtttgattttgccactgcatggttgcttcaaaataaggtattactgcccggagcaaccacactagtacgtctcatcagtgaaattcgtgaaagggcaaatcagcggctgtggaaaaagctggccgcactgccgaacaaatggcaggcagctcaagtgatggagcttctggtcattccggaaggctgttccactctggagcgagtggtttcccgtcctgacatcacccaggggaactatctgaccgctaacgacgtatccaaaatacgtgttggcatgacgcaacaacaagttgcgtacgcattgggtacaccgctgatgtccgatccatttggtacgaatacctggttctatgtcttccgccagcaaccaggtcatgaaggtgtaactcagcaaacgctgacgctgacctttaacagtagcggtgtgttgaccaatattgataacaaacctgcgctgagtgcattgcttatcagagatatgcccccatatgttgaggcatatcctaacgagaatctgacaaccgttatgcctgaacaatatcgttatacgctgcccgtcaaagcgggtgagcagcgtctgctgggcgagttaaccggcgcagcctgtgcaacgctggtagcggaaattgccgaacgtcacgccggtccggtggtactcattgcaccagatatgcaaaatgctctgcgtttgcatgatgaaatcagccagtttaccgatcaaatggtgatgaatctggcggactgggaaacatcttccctacgacagtttttcgcctcatcaggacattatctcctcgcgcctttccaccctttaccagctaccgacgaatccaggggggggtactgattgttccggtgaatacgcttatgcagcgcgtttgcccacacagttttctccacggtcatgcgctggtgatgaaaaaaggtcagcgcctgtcccgagatgcattacgaacccaactggaccgcgcccgttatcgccatgttgaccagccagcgcacgctggcggcaaagtgctggagatgatcgtggtggggatcgccacctggctggggttcttgctcttcgggctgaactattcgctgctgctggcagtgctggtcggcttctcggttcttattccgtacattggcgcatttgtggtgaccattccggtggttggcgtggcgctattccagtttggcgcaggtactgaattctggagctgcttcgcggtgtatctgattattcaggcgctggacggcaacctgttagtgccggtgttgttctccgaagcggttaacctgcatccgctgcatcaccgggagcagattggcggtaataaaatggctgaccgtcagtgccggaaaattgtctgcgctactgtgcgccagctgccagaaggggggaggggcgaaatggcgaatggcaatggcgaacggaatcacaaacaaattggcgatacagtgctcaaagccactgggagcaaacagggtgatgggcaaaatcatggcgacgattttgtcgcgtaa

SEQ ID NO: 24665 - DNA, 2634 bp, Homo sapiens
  SIMILAR (1974)..(2123): 681254mologous to Homo sapiens epithelial sodium channel beta subunit,accession number L36593,Smith-Waterman Score=156.
  misc_feature (1)...(2634): n = a,t,c or g
atgcaggaaaagcaggtcctagcagcctatgtgcagccctccagtgaaggccaaagtcggtctcgccgcgctcgccgggtgtcccagtgtcaccaacactcggccgccgccgccagcttggcgcgcaccgccgcctccgccaccgccgacagcgcgcatcctccgtgtccccgctccgccgcccgagcaggtgccactatgcacgtgaagaagtacctgctgaagggcctgcatcggctgcagaagggccccggctacacgtacaaggagctgctggtgtggtactgcgacaacaccaacacccacggccccaagcgcatcatctgtgaggggcccaagaagaaagccatgtggttcctgctcaccctgctcttcgccgccctcgtctgctggcagtggggcatcttcatcaggacctacttgagctgggaggtcagcgtctccctctccgtaggcttcaagaccatggacttccccgccgtcaccatctgcaatgctagccccttcaagtattccaaaatcaagcatttgctgaaggacctggatgagctgatggaagctgtcctggagagaatcctggctcctgagctaagccatgccaatgccaccaggaacctaagcttttcaattgtgaaccccacaccccatggtccttattgatgaacggaacccccaccaccccatggtccttgatctctttggagacaaccacaatggcttaacaagcagctcagcatcagaaaagatctgtaatgcccacgggtgcaaaatggccatgagactatgtagcctcaacaggacccagtgtaccttccggaacttcaccagtgctacccaggcattgacagagtggtacatcctgcaggccaccaacatctttgcacaggtgccacagcaggagctagtagagatgagctaccccggcgagcagatgatcctggcctgcctattcggagctgagccctgcaactaccggaacttcacgtccatcttctaccctcactatggcaactgttacatcttcaactggggcatgacagagaaggcacttccttcggccaaccctggaactgaattcggcctgaagttgatcctggacataggccaggaagactacgtccccttccttgcgtccacggccggggtcaggctgatgcttcacgagcagaggtcataccccttcatcagagatgagggcatctaccccatgtcggggacagagacgtccatcggggtactcgtggacaagcttcagcgcatgggggagccctacagcccgtgcaccgtgaatggttctgaggtccccgtccaaaacttctacagtgactacaacacgacctactccatccaggcctgtcttcgctcctgcttccaagaccacatgatccgtaactgcaactgtggccactacctgtacccactcccccgtggggagaaatactgcaacaaccgggacttcccagactgggcccattgctactcagatctacagatgagcgtggcgcagagagagacctgcattggcatgtgcaaggagtcctgcaatgacacccagtacaagatgaccatctccatggctgactggccttctgaggcctccgaggactggattttccacgtcttgtctcaggagcgggaccaaagcaccaatatcaccctgagcaggaagggaattgtcaagctcaacatcttcttccaagaatttaactatcgcaccattgaagaatcagcagccaataacatcgtctggctgctctcgaatctgggtggccagtttggcttctggatggggggctctgtgctgtgcctcatcgagtttggggagatcatcatcgactttgtgtggatcaccatcatcaagctggtggccttggccaagagcctacggcagcggcgagcccaagccagttacgctggcccaccgcccaccgtggccgagctggtggaggcccacaccaactttggcttccagccctgacacggccccccgcagccccaacattgggcccctacccaggtgagcaggccctgcccaatccagggcacccgccccccccaactatgactcctggcgtctgcagccgctggacgtcaccgagtctgccagtgagggtgatgccatctaaccctgcccctgcccaccccgggcgggctgaaactcactgagcagccaagactgttgcccgaggcctcactgtatggtgccctctccaaagggtcgggagggtagctctccaggccagagcttgtgtccttcaacagagaggccagcgggcaactggtccgttactggccaagggctctgaagaatcaacggtgctggtacaggatacaggaataaattgtatcttcacctggttcctacccttcgtccctacctgtcctgattccntggtcctgaagaccccctcggaacacccttctcctggtggcaggccacttccctcccagtgccagtctccatccaccccagagaggaaacaggcgggtgggccatgtggttttctccttcctggccttggctggcctctggggcaggggtggtggagagatggaagggcatcaggtgtagggaccctgccaagtggcacctgatttactctagaaaataaaagtagaaaatactgagaaaaa

SEQ ID NO: 24666 - DNA, 2427 bp, Homo sapiens
  SIMILAR (705)..(7): 931254mologous to Escherichia coli K12 orf, hypothetical protein,accession number AE000497,Smith-Waterman Score=1110.
ctacctctttccctttcgcgggaggattattttgctgctcggtactggcctgaaagcctttttgcacatctcataggcggattcccggtccacctcatcctcatatttgccatacaccggagagtgattaatcaagccattacgctcatcttccgtcaccggccccatccgcgaacaaggcgcgatcaccatcgcacgctccaccacagaagggcttcctttcgcatccagaaaagagatcaacgcctcgccggtgcccagttcctgaatcgccttttcggtatcaaacgccggattggcccgcatggtttgcgccgctgccttcactgctttctgaccttttggcgtaaaagcccgcaaagcatgttgaacgcgattaccgagctgcccgagcacattatccggaatatcagacgggttttgcgaaacgaaccagacgcccacgccttttgagcgaataagccttatcacctgctcaatcttatccagcagtacctgcggggcatcgttaaacagcagatgtgcctcgtcgaagaaaaacaccagttttggtttctccagatcgcccgcttccggcaattgttcatacaactctgaaagcatccacagcaggctggcggcgtacagtttcggcatctgataaagtttctcggcgctgaggatattgataacgcctttaccgttggcatcggtgcgcatccagtcgtactgattctggaaggatttggcgttatcgccgatgtactgggtaattgcccgcagatctttaaagtcgagcagtaacagcccctgatcgtcagcaatgcggaagatgatattcagcacgccagattgcacatcgttgagattcaacagtcgtgccagggttttacccgtccccgttgcgccggtaatcagcccatgacggttagccattcccggcagtaaaaacagttctgtgtccggcgtgcgggcatttaacaggggttcactcatgagatatcctccagtttcctgcctggagtataggcaacgtccggcaaagagaatacgtgtaatgaagagaaaataacctaaagcgtgttgccgtgataaatccatcgcaatatcgtcattggtgcaaaatacaccgtctaaatccgggtttgcgctaagggcatcacgcattaactgcattcctaaatgaatggatgagatggcgcgtggattcatgcgtaatggggaaagattatgcagcatcatcgcatcgcaatacccctgataacgctgttcatcgcgggtgtcatctatctccttcatcttatccatcctcttatccttcctcttcccctccttatcttcatcctcctccgtttcctcggtttcctccgtttcctccgtctccttcttcttcttcttcttcttattattcttcttcttcctcttcttcttcctcttcttcttcttcctcttctttttctttctttctctttcgttctttttctctttactttccttcctccctcccacttgcagcatctggaaataatttttcacaatagtttcagccttttctttctttttaactttgtcttcatctaccctggtttggttcttcttgttcttcttgttcttcttcttcttcttcttcttcttcttcttcttcttcttcttcttcttcttcttcttcttcttcttgttcttcttcttcttcttcttcttcttcttcttcttcttccttcttcttcttcttcttcttcttcttcttcttcttcttcttcttctcttcttcttcttcttcttcttcttccttctctcttcctcttcctcttcttcttcgtcttccttcttcttatcttcatcttttcttcttcttcttcttttcttcttattttcttcttcttctttcttcttcttccttcttctggatctcttcgagactctcataattttaattgatttttttttatgtttttgatgaacgccaagttgatgcctttttttttcccactgggccctgaatatatctccatcaccttcctgaatgcactggggtaaccatctggttttgtaacaagctgagaggagcctggcatgtagtgggcactcgatgaatatggtgagaataacaaagcattcctttgcaatgcagggctcagttgttatggctttcaaagaaggcaatgtaactgacatactgagatcattaaacagcacaggaactgtgcctctattgcagtgactgtcatttggcaagcttgtacccagctgcagcgacaccgagctcctcacagcttcccaaagtgggctggcccctctcacgacagggtcatcgcacaggctccctctgtgagtgagaacatgcgatagttcttgagacagtttgctcagaatgatggtttccagcttcttccatgtccctgcaaaggacatgaactcatccttttttatggatgcatagtattccat

SEQ ID NO: 24667 - DNA, 1260 bp, Homo sapiens
  SIMILAR (1)..(666): 1001254mologous to Escherichia coli Nucleotide-binding protein UgpC,accession number D90769,Smith-Waterman Score=1111.
atggcgtttggtctgaagatgcaaaaaatcgccaaagaggtgattgatgagcgggtgaactgggcggcgcaaattctcggcctgcgtgagtacctgaaacgtaagccgggggcgctttccggcgggcaacgtcagcgagtggcgcttgggcgggcgattgtacgcgaagcgggcgtgtttttaatggatgaaccgctctctaaccttgatgccaagctgcgcgtgcaaatgcgcgcagagatcagcaagctgcatcagaaactgaacaccaccatgatctacgtgacccacgatcagaccgaagcgatgaccatggcgacgcggattgtgattatgaaagacgggattgttcagcaagtaggtgcgccgaaaaccgtttataaccaacccgcgaatatgtttgtttccggatttattggatcaccagcgatgaattttattcgcggcacgatcgatggcgataaattcgttacggaaacgcttaaattaaccattcccgaagagaaattagcggttctgaaaacacaggaaagtttgcataagcccatcgtgatgggaatacgaccggaagatattcatccggacgcgcaagaggaaaataacatttccgccaaaattagcgtggcagaattaaccggtgcggaatttatgctctacaccacggtggtcattcctgtggtgtctgtgcaaatgatcaaaaaacacaagatggcacggctccttcccaatggactggccatcaccaccaacaccagccagaagggcaaagagagagataataaaaagaatatgaaaagacaccaggaacaggagaaatcagacagcagtataggggaagtaaaagccacttatgtgaaggggttctcagtggtgaccctagcaagggatttcattaacagaggtgccgacttcctggtgacggaggtggaaaatggtggctccttgggcagcaagaagggtgtgaaccttcctggggctgctgtggacttgcctgctgtgtcggagaaggacatccaggatctgaagtttggggtcgagcaggatgttgatatggtgtttgcgtcattcatccgcaaggcatctgatgtccatgaagttaggaaggtcctgggagagaagggaaagaacatcaagattatcagcaaaatcgagaatcatgagggggttcggaggcaagtccccgttgtccctgctccagtcccagcgcagctctccgaagggcatggtccatcctgtgaatgtctgattcccagcccctag

SEQ ID NO: 24668 - DNA, 3300 bp, Homo sapiens
  SIMILAR (2191)..(3063): 991254mologous to Pseudomonas aeruginosa probable acetyltransferase,accession number AE004766,Smith-Waterman Score= 1513.
atgcccatcattactcttcccgacggcagtcaacgttccttcgatcacccggtctccgtggccgaggtggcccaatccatcggcgcgggcctggccaaggcgaccctcgccggcaaggtcgacggccgcctgatcatcacgcccaaggacgaggaaggactggagatcatccgccactcctgcgcccacctggtcggccatgcggtcaagcagctctatccgaccgcgaagatggtcatcggcccggtgatcgaggaaggcttctactacgacattttcttcgagcgccccttcacccccgaggacatggcggcgatccagcagcgcatgcgcgagctgatcgacaaggactacgacgtgatcaagaagatgaccccgcgcgccgaggtcatcgagctgttcaaactacaagctgcgcctgatcgacgacatgccggacgagaaggccatgggctgtacttccatgaggagtacgtggacatgtgccgcggcccgcatgtgccgaacacccgcttcctcaaggcgttccaactgaccaagatttccggcgcctactggcgcggcgactcgaagaacgagcagttgcaacgcatctacggcaccgcctgggccgacaagaagcaactggcggcctacatccagcgcatcgaagaggccgagaagcgcgaccatcgccgcatcggcaagcagctcgacctgttccacctgcaggaagaagcgccgggcatggtgttctggcacccgaatggctggagcgtctaccaggtgctcgagcagtacatgcgcaaggtccagcgcgaccatggctatgtcgaagtgcgtaccccgcaggtggtcgaccgcatcctctgggagcgttcgggccactggtcgaactacgccgagaacattgttcacactccttcggaaatcgcgactaccggtcaaaccgatgaactgcccctatccatgctgccggtcgactctagacgctccccccacgcgaagaaaatgaccgatctcttttccagccctgaccacacactcgacgcgcttggcctgcgctgcccggaaccggtgatgatggtgcgcaaaaccgtgcgcaatatgcagcctggcgaaacgttgctgcttatcgccgacgacccggccactacccgcgatattcctgggttttgtccatttatggactacgaactggttgctaaagagacggatggactgccttatcgtcatttgattagtaaaggctccttacagccctaccactatgccagtgaagcaagcctctctcagttctcagagcatgtgaggacaggagtcgatcataatcggcacgcgaacgatatccggttcaccggcaatcagattgagaaaacgcaccatcgccgcttcggcatcgagcatcccttcatccatgttgatatcgataatctgcgcgccgttttccacctattgacgcgcgacatccaacgcctcgctatatttctcttctttgatcagacgcttgaacttaacggaaccggtgacgttggccggacaaacggcaggctacgggaatttccggcaatttacgcggcgctaatccttctactgcacgactcatcgctgcaatatattgtggcgtggtgcacagcaaccgccgacgatattgagaaaacccgcttgcgcccattcacgtatctattttgccatcgtatcggcgtcgagatcactttccctgaaaaactttcgacccgaaaggttcaggtaatggttcccggaaaatctttaatcgggaaatttaaaacgccaaggctgtcaaacatccgttgttaccggaaattccacgccgctttccctcgggtcgagaagatcaccctgaacatgggtgttggtgaagcgatcgctgacaaaaaactgctggataacgcagcagcagacctggcagcaatctccggtcaaaaaccgctgatcaccaaagcacgcaaatctgttgcaggcttcaaaatccgtcagggctatccgatcggctgtaaatctttcgacggtcgtggtaactacagcatgggtgtccgtgagcagatcatcttcccagaaatcgactacgataaagtcgaccgcgttcgtggtttggatattaccattaccactactgcgaaatctgacgaagaaggccgcgctctgctggctgcctttgacttcccgttccgcaataaggtacgttcccatccctcggataccctgcgcctgtggttcaccgactaccgcccggcgcgccgtccgccacgcggtttccgcatccgccgggtgcataccgaggaggactgggcggcgatcaaccgcctgtacctggcgcgcggcatgcttccggtgcagaccgagcgcctcagcccgcgacaccagggcgggccgatctactggctggccgaggacgccgacactggcgtcgcggtaggcacggtgatgggcctcaaccacgccaaggcgttccaggatccggagggcggctccagcctctggtgcctggcggtggacccgcaatgcagccggccgggcgtcggcgaggcgctggtacggcacctggtcgagcacttcatgagccgcgaactggcttacctcgacctctcggtgctgcacaacaaccagcaggccaaggcgctctaccgcaagctcggcttccgcgaactggcgaccttcaccatcaagcgcaagaacggcatcaaccagtcgctgttcctcggccccggcccggaggaagacctcaacccctacgcccggatcatcgtcgacgaagcccaccggcgcggcatcgaggtgcgcgtcgacgacgccgagggcggcctgttcaccctgacccagggcggccggcagatccgctgccgtgaatcgctctccgacctgaccacggcggtgagcatgaccctctgccaggacaaggtcctcacccaccgcgccctgcagcacgccggcctgcgtcagctacagcagcgcctggccggcagcgcggaggaaaacgccgcgttcctcgccgagcacggttcgctggtggtcaagccggtggacggcgagcagggccagggcgtggcggtggacctgcgcacccggaagaggtcgaggaggcatcgaggccgccccatttcattcgggtgctctgagactacacgcggcacgactggcgtctggtattgctacgagtgtgcgcgcatcgtctccgcgcgtatcgcacgctgccacatcgctactatgagccagacgcgcgcagcgcacggggaaacgatcgtgacagaacacgacctcgcgcgctatgtgacacttgcacggaactgctcggaccactaa

SEQ ID NO: 24669 - DNA, 4590 bp, Homo sapiens
  SIMILAR (1587)..(496): 991254mologous to Escherichia coli putative glycosyl transferase,accession number U38473,Smith-Waterman Score=1860.
ttactgccggaaaacgttgagtttatccacggtccggggtgcccggtgtgcgtactgccgatgggtagaatcgacacctgcgtggagattgccagccatccggaagtcatcttctgtacctttggcgacgccatgcgcgtgccggggaaacagggatcgctgttgcaggcaaaagcacgcggtgccgatgtgcgcatcgtttactcgccgatggatgcgttgaaattcttctgccagcacattacgcttatcccgacgttgcgcagtttgctggaacagccggataacggtatcgatgcgttcctcgcgccgggtcacgtcagtatggtatcggcaccgacgccgagcctgaccgccgttcaggcggcagatggtggtttgcagcatggtgagatcgcctttcaggcataaaaactgcttgggataaagtacgcgggaaagcggccataagcggctaccggagccacctgccatcacaactggatagagtttcgagttctctttatcgagcgtgcgttcggcatattcacgtgccaccgtgttgtgtttgggcagcaggagcgcctgacggatccccgccaccagcgcctcgaccgattccggttcaacgcaaaccgcaatgcccggaaaggtttcgcaaagctgccccagttctgtgtaggcttcagcagtaatcaccgcgttaccgcctactgccagaatattggtcagtttcgacggcaatacggcatctgccgcgccgcgtttttgcaccaccagatggcaatcgcccatcttcagcagtgcgggtaaagcgtcatacgattgcagcgggaaaaattgcatgttgcgcagtccacgctgctgcgccattttttccagccgcgctttgccgccgccctggccgacaatggcaaaattcaccggttcatcgcccagacgatcggcagcttcaataacgttttccagcccctgcttttcaccaatattgccggagtaaagaatgatttttttgttatccggcaggtcaagctggttacgaagggcatcaacatcggcatctgcaacatgctgaaaacgggcaatttccgaccagttggggaagaagatgacgttttccgccgccacgcctttttcgatggctttattcatcatcgaacgcgaaatcgtggagacgttatcgacgttatgcagtccgctacgttcgaacgccgttgccagctgtgccactttgccgcctttgccttttccggcaaggcccagccccagcatggcgtccacttcgtaatcctgaatatgcagcacggtacgcgcaccagagagtttcgccagcaggcgcattcccggcgcgcaaaacagcgttggcaccacgccaataatgcgatccggcttccagcgacgttgcgccatcagcggaaagaaactgctgacggcaaaactgcccagatgcaacaggcgtttcagggtgctcggctgttttggcacatacagcgggcagcgccacaccgtggcggccccctcttctcgtttgtagcgccaggcggaatagttctcgcccacctgccattgcgggtagtaaggcggtgcggtaatgacccgcacctcatgacttgtgccgcagccattacaccatgtcggtaccgctacattgttggcccacagcgctgcggcaaagcagccgccaaacataccgaggatcatcatcccgtcgatgcgggttaatggcgatccttccagatggataattttaaagtaaccccactcttcagcatggacgccgaacagttgcaggagctggccgccccaacgggtaaattcacccgtgacagcccaaaaggtgccagtaatgccaaaatagtaagtagagagaatacccgccgcgatgaccgcagggatgggggcccagaatttaatcaaccaggcgtgtttgaattgctgccatgacatgaatgtagcctcttgaaaggctggcgacatcagggctttaatgccacaatcctcttttcttctcatgcaggacgaatgatgaaaaaactcgcaattgcaggcgcgctcttgttgctggcgggctgtgccgaagtcgaaaactataacaatgtcgtgaaaacccccgcgccggactggctggcgggctactggcagaccaaagggccgcaacgtgcgctggtcagcccggaagcgataggcagcctgattgtcactaaagagggcgataccctggattgccgtcagtggcagcgggtgattgccgtgccgtgtaagttgacattgatgtctgatgatctcactaacgttaccgtaaaacgtgagctgtaccaagctgagcgtgacggttacaccattgactccactggtttccaattggcttgtgatgccgaaagaaaggtgcgcgcgctggaaaaggcgaaagagccgagctttggccaaaaccggtcggttcaaaggttcccgcacccacctgtggccgttcttcgtctccggagatttcttctttccgggcgcaagataattcgcctggtggcgtttatggcaaaatctgcggagtgctgttcgtcgccgggggccgctgttctggtcacccgcatgatgctgggcgataacgctgaagcggttaaccagcatatcgtctggttcccgccagtgagcattaatctcctgcttactattttgctcgcggtcgttgccggtacagtgggatgcctgctgcgtcttccttccggcacgatgctcatcccgatgcatcgaactaccggaatggctgctggcgatggcgtatatggcaattggctggcggattggtcttggtttcgataaacaaatcttactgcgggcactacgcccgctaccgcaaatcctgctgtcgatttttgctctgctggctatttgtgcgggtatggcgtgggggggttcgccatctcgatgaaaaaccttaaagcgaaacagcgccccatgatgcttattctcatccacctgcccccgcgtagcgtaggaaaatcgaggaatctccagtaacgcgtgtgcgagtgcatccagttgcgccgcattgagatctttcgctttatgatttccagtcaacccaacctgccagaggatctccaaccgcaaattattgccaagcctgcgcgctgcattttcgacagctggcgctgctgtatgccgatgtgttgcatgagctggcgcagccgtttcaatgcactgctggcaggcgatgatgtttccggttttgaaaacccggaaggttcgctgaccggggggattcaggccacaggcaattatccgggcaaagcgcgtaatgccagtgaggacagcattcgccagttctggattgatcactgcaaagccagccgtcgcgtttcggcctattttggcgagcaactcggcacaccatcggtgatgaacatctggatcccggatggtatgaaagatatcaccgttgaccgtctcgccccgcgtcagcgtctgctggcagcactggatgaggtgatcaggcgagaagctaaacccaatatcgacgccgttgagagccaattgtttggcattggcgcagagagctacacggttggctccaatgagttttacatggggtatgccaaccagccagccagactgcgctgtgcctggacgccgggcacttccacccgagttgctttgcttgcaacgttcaagccagtccaggttcgctgggacagcgatcacgtagtgctgctggatgatgaaacccaggcaattgccagtgagattgtgcgtcacgatctgtttgaccgggtgcatatcggccttgacttcttcgatgcctcgctgagctgcgcaagctggaagcggcgggcgattacactgcgcgtctggcactgctggaagagcagaaatcgttgccgtggcaggcggtctgggaaatgtattgccaacgtcacgatacgccagcaggtagcgaatgggtatcatttggtccgcccgaaacaggttggccagcgtgaataacatcgccagttggttatcgtttttcagcaaccccttgtatctggctttcacgaagccgaactgtcgcttgatgatgcgaaatgggtgctccaccctggcccggatgctggctttcatgtattcgatgttgatggccgttttgttcttgcgtggatgctgtttcaaggttcttaccttgccggggcgctcggcgatcagccagtccacatccacctcggccagctcctcgcgctgtggcgccccttggtagccggcatcggctgagacaaattgctcctctccatgcagcagattacccagctgattgaggtcatgctcgttggccgcggtggtgaccaggctgtgggtcaggccactcttggcatcgacaccaatgtgggccttcatgccaaagtgccactgattgcctttcttggtctgatgcatctccggatcgcgttgctgctctttgttcttggtcgagctgggtgcctcaatgatggtggcatcgaccaaggtgccttgagtcatcatgacgcctgcttcggccagccagcgattgatggtcttgaacaattggcgggccagttgatgctgctccagcaggtggcggaaattcatgatggtggtgcggtccggcaaggcgctatccag

SEQ ID NO: 24670 - DNA, 1188 bp, Homo sapiens
  SIMILAR (4)..(486): 901254mologous to Escherichia coli K12 putative transport protein,accession number AE000187,Smith-Waterman Score=724.
atgttcaataatcatataatccgtcgacgttgtttcacgatagatgacaacgtcgtgcttaacaaaggtgacgttttacaagtcagcggcgatgcccgccgcgtaaaaaccatcgccgatcgcatcggctttatctcgattcacagccaggtcactgacctgctggcattctgcgccttctttgttattgggctgatgatcgggatgatcaccttccagttcagcacattcagtttcggcatggggaacgctgccgggttgttattcgccggaattatgctgggctttatgcgtgctaaccacccgaccttcggttacattccgcagggtgcattaagcatggtgaaagagttcggcttgatggtgtttatggcaggcgttggtctgagcgccggtagcggtattaataacggcctgggcgcgattggcggtcagatgttgattgccggattaattgtcagtggtataaaagtgttcctattttttcacattctctccacaattgttgtttctgactttttaatgcctttactggcaaatacaccgtttattgtcaccggctcgggcaaattcttccgtaacgtccagcttgatcctgcggctaacttaggcatcgtaaaagtcgacagcgacggcgcgggctaccacattctttgggggttaaccaacgaagccgtccccacttccgaacttccggctcacttcctttcccactgcgagcgcattaaagccaccaacggcaaagatcgggtgatcatgcaaggaacgactctagctcgactgacatcaatcgtaaacccacatttctcaccgcatacaaaaatcaaatcaaaatggattagagacttaaatctaagacctcatactctgaaactactgaaagaaaacattggaacaactctccaggacattggtttgggcaaaaatttcttgacaaatatccgacaagcacaggcaaccaaagcaaaaacggacaaatatgataatattgagttaaaaagtttctgcacagcaaaggaaacaatcaacaagagtcttggaattcagccagagagccttgtgaagacacggacacagagatacacacagggaaaacatattgtgaagaccgaggcaatgcagctggaattcaaggaatgtcaagaattactggcaaccaccggaagcttggagagaggcaaggaatag

SEQ ID NO: 24671 - DNA, 5992 bp, Homo sapiens
  SIMILAR (5216)..(5977): 931254mologous to Escherichia coli similar to phosphotransferase system enzyme I,accession number U00006,Smith- Waterman Score=1223.
ctatgcgtatgtgaacgcggaaatccgcgagaaaggcgacacctacggcaatctggtaccattctccccgaaacataaaggcacgctgggcgtggactacaagccaggaaactggacgttcaatctgaacagcgatttccagtccagccagtttgcggataacgccaatacggtgaaagagagcgccgacggcagtaccggccgcattcccggcttcatgctctggggcgcacgcgtggcgtatgactttggcccgcagatggcagatctgaacctggcattcggtgtgaaaaacatcttcgaccaggactacttcatccgctcttatgacgacaacaacaaaggcatctatgcaggccagccgcgcacgctgtatatgcagggctggaatgtgattatgttggcatttatccgttttctttttgcaggcctgctgctggtgatcagccacgcctttgccgccacggttcaggacgaacacggcacgtttacactcgaaaaaacgccacaacggattgtggtgctggaactctcgttcgccgatgcgctggccggcgtggacgtcatcccgatcggtattgccgacgatacactgtcaaaggcatcctggcccaattgtgtggcacctgaaaccgtgggatccggggaaacagacggcacgatgcttgaaaacacatgggcaaccagcagccaggcaggattgaccgcagcagttgctcccagccgatggacggatggagcaaccggcatcgaagggaacgttcagcccagagaggcaaagctgccgtccagtcccgatttcacgtggattgctgtccgtgaatggcaaggcctgttcctttgtggtcgtcgtgggggctgcgcacctcttatttgccaaagccgctctcggttaacccatcgcgtaacgatggatccgcgttgcgggaacccatccgcttggggtgacccgggggactctggcagggcctgcctttgtgcgtctgtcgctcgtcttcttgctccgccgcgtgctcgctggttcatcgcttctgccattgctgatggggtaacagaaacagaggttttacttcctgacggcgcttcagaacatgattattcactgcgcccatcggatgtaaaacgcttacagaacgcggacttagtcgtttgggttggcccggagatggaagcgtttatgcaagaaaccggtaagcaaattaccaggagcgaagtcagcccgctctgtcgccgcgtggcgtttaataagtttaaccgcgacccacaaccgcgttatgattggggtcgactcaccgttctttactctggctcgtcgctgtctggcggccgttatgttgttatcatccgtgagtgccactgccaattgtcaaaaccattgagactggaacagaacgaaattcgttcgctcttacctgaagccagtgagccgattgatcaagctgcacaagaagatgaagccattccccaggacgaactggatgacaaaatcgccggtgaagcgggcgtgcatgaatatgttgtttccactggcgatacgctaagcagcattctcaatcagtatggtattgatatgggtgatatcacccaatctgctgcgccgacaaagaattgcgtattacaagttgaagttagcggccgtctgggcggcagcggaaatcgcacgtaccgaatgatcgaagcagcacgtcgtgctatgacccgtgcagttaagcgtcaagacggtgatgtaatgaaagcaaaagagctgcgtgagaagagcgttgaagagctgaacaccgagctgctgaacctgctgcgtgagcagttcaacctgcgtatgcaggctgcaagtggccagctgcaacagtctcacctgttgaagcaagtgcgtcgcgatgtcgcacgcgttaagactttactgaacgagaaggcgggtcgcgttgttagcgacaaaatggagaaatccattgttgttgctatcgaacgttttgtgaaacacccgatctacggtaaattcatcaagcgtacgaccaaactgcacagaaagcggttcctgagcatcactttccgcgatgctaaagctcgtgatgaagccattgcgtatctgagcaagcgccatccggagctggtgattagcagccacggcagcaatccagctgaccgcgtgaatatgtcggtgcagcagaacattaatatcctgcgtaaccgtgtaaaccaacttggacgtggctggagccggtggttcacgcgtcagggtgctgaccgtatcgttgttgtaaactgccagtgtattcaggacactgcgcagcgctggtgtgtaacgatcatgtctaacttcactaaggacaacatcggcaaaccgatggcaaccctgtttgtggagtacaaagacagcggtaagaaagatgcaaatggtcgtgcggttctggtgaaacaggaagaggtgattaacatcgccaacatccagtctcgtctgggtaacagcttccgtatcaccggcatcaacaacccgaacgaagcccgtcagctgtcactgcctgctgcgtgccggcgcaacgctgagtatgccaggtatcgcgggtatcgtcttaacccttgcggtggcggtcgatgcgaacaagcaagcctgacaggtgcaggtgcaaccttccctgcgccggtgtatgccaaatgggctgacacttaccagaaagaaaccgctacctgcgaaagtgaacgaagagtggaaaaacaacgttggtactggctctaccgtaaatgccgatcggtctgggcggtaaagctggaactctttcgggtaaagccgctggatatcccacagcaacgggttgggcagcaacacgttttgctgaaagcgtttaatcgcagactggcaatgcagtttatccagctcatcgccaccgacgtgacggaaatcctgccccttcacgtagtagaagatggtaccgacagcctttattgcctggcgctgtcccatctgcgttgtgggcgtttgtcactccggtggcggcgtgagcttcctcgcgggctgggcgttaatgttagttggtgctatccgtttaaagcgcaagggcagtgcgccgcagaaattaccgataaagccggccagcgggaaattttcggttttgcccgcgtgaaagagaatgcgggttatgtcatttatgaatgttatcaacctgatgatggcgataagttaatccgtgagctgccgttcagttcattaatttttgcccgccagtggtttgtggtgggggaactcctgcagcatttgccgccagaagatcgtattacccccattgtcggcatgttacagggcgtagtagagaagggcggtgaactgcgtgttgaagttgccgataccaacgaaagcaaagagttactgaaattctgccgtaaatttactgttccgctacgcgctgccttgcgcgatgccggggtgctggcgaactatgaaacgccgaagcgtccggttgtgcatgtattctttattgcaccaggctgctgctataccggttactcatacagcaacaataattcgccgttctatatgggcattccgcgcctgaaatttccggcagatgcgccgagtcgttccacgctcaaactggaagaggcatttcatgtgtttattcctgcggatgagtgggatgaacgcctggcgaacgggatgtgggcggtggatttaggcgcttgccctggcggctggaccttccaactggtgaagcgcacatggtcggttattccgtcgaccacggctcgatggtccaatcctctggattacgacagggacctgctggggaacacggttccattccgcccgaggccagaaatttccggaagtgttacaggggtcccagaccttacccgctgctacggatcctccaggtatgcaatggctggcatccggcgtgctggaatggaagctcgtctgatcgcgcctggcgcggatggcgtaaaaatgcagtgtgatttattgtcgtgtcagaacgctggctggcaaggagtgacgcttaataccacgcgggggcatttctatcgcgcggcgctggaagggttaactgcgcaattacagcgcaatctacagatgctggaaaaaatcgggcactttaaggcctctgaattattgttagtcggtggaggaagtcgcaacacattgtggaatcagattaaagccaatatgcttgatattccggtaaaagttctcgacgacgccgaaacgaccgtcgcaggagctgcgctgttcggttggtatggcgtaggggaatttaacagcccggaagaagcccgcgcacagattcattatcagtaccgttatttctacccgcaaactgaacctgaatttatagaggaagtgatccgcgctgatggcctgttggtgagcgacttgctccaggcgattatcccgttatttgaactggacagttatgcaccgccgctggtgatgatggcggcggtagaaggtgacactctcgatcctgaagtagaacgacgttaccgtaatgcgctttcactacaagccccgtgtcctgacatcatccgcatcaatcgttttgcgttttatgaacgggcgcaaaaagcctttgcgatcgttatcacaggcgaacgagcgaagtacgggaatattcttttaaaaaaaggggcctacaactgttgccgacccgtaggccggataaggcgctcgcgccgcatccggcagtgtttacccgcggacgactcaaaatatctttctcataagcccgcacgctctccagccattcgctacctgctggcgtatcgtgacgttggcaatacatttcccagaccgcctgccacggaaacgatttcatgctctaccagacagtgccagacgcgcagatgtaatcgcccgaccgcattccagacattgcgcagctacagcggaacagaccaacgtgggtcatgcgcgtcggcaagccacgttgaaacgctgtgtaatactttttcatcacaaattgagtggcataacctgcgcactgaccgcaagggcaacgccaaaagcgcccttgcgctgattggcaccgatacgctggcgggcgataactgccagttactgatttccggggccgacgaacaggaagcgcaccagcgtttaagccaatggctgcgcgatgaattcccccactgcgatgcgccgctggcggaagttaaatctgacgaactggaaccactgccggtttcactgaccaatctgaatccgcaaattatccgcgcccgcaccgtgtgcagcggtagtgcaggcggcattctgacgccgatctcttctttagatctcaatgcgctgggtaatcttcccgcagccaaaggcgttgacgccgagcaatccgcactggaaaacggcctgacgctggtactgaaaaacattgagtttcgtctgctggatagcgacggtgctaccagcgcgattctggaagctcaccgatccctggctggcgatacttccctgcgcgaacatttactggcaggcgtcagcgccggattaagctgcgccgaagcaattgttgccagcgcgaatcacttttgcgaagagttttcccgttccagcagcagctacctgcaagaacgtgccctggacgtacgcgacgtctgcttccagttactccagcaaatctacggtgagcaacgcttcccggcaccgggcaaactgacgcagcccgccatttgtatggctgatgaactgacccccagccagttcctcgaactggataaaaatcacctcaaaggattgttgctcaaaagcggcggcaccacctcacatacggtgatccttgcccgttcgttcaacattccacgctggttgcaacaaacgatttatatcgacggcaacgccggggcgattgtggttgagccaggggaagccgtagctcgttattatcagcaagaagcccgcgtacaggacgccctgcgtgacccacagcgtgtctggctgacccaacaagcccgtaccgctgacggtatccgcattgaaattgccgctaacatcgaggctcgactctag

SEQ ID NO: 24672 - DNA, 2586 bp, Homo sapiens
  SIMILAR (1)..(537): 1001254mologous to Escherichia coli high-affinity choline transport protein,accession number U73857,Smith-Waterman Score=919.
ttatggctctcggtgttcggcaatagcgcgctgtatgaaatcatccacggcggcgcggcatttgccgaggaagcgatggtccatccggagcgcggcttctacagcctgctggcgcagtatccggcgtttacctttagcgcctccgtcgccaccattactggcctgctgttttatgtgacctcggcggactccggggcgctggtgctggggaatttcacctcgcagcttaaagatatcaacagcgacgcccccggctggctgcgcgtcttctggtcggtggcgattggcctgctgacgctcggcatgctgatgactaacgggatatccgcgctgcaaaacaccacggtgattatggggctgccgttcagctttgtgatcttcttcgtgatggcggggttgtataaatctctgaaggtagaagattaccgccgtgaaagtgccaaccgcgataccgcaccgcgaccgctggggcttcaggatcgcctgagctggaaaaaacgtctctcgcgcctgatgaattatccgggcacgcgttacatcgacgcgcttggcctgcgctgcccggaaccggtgatgatggtgcgcaaaaccgtgcgcaatatgcagcctggcgaaacgttgctgattatcgccgacgatccggccactacccgcgatattcctgggttttgtacctttatggaacacgaactggttgctaaagagacggatggactgccttatcgttatttgattcgtaaaggcggttgataggggctgattggcttcgatgccgccttttcccctcaccctaaccctctccccagaggggcgaggggaccgatcgcgctcaatgttgcgatcggtttgccttatctcctgcgcaacaatcttaacgcattcgctgtcaccagcaccgtcgcccccgtatctgccagcactgccagccacaacccggtcatccagcgtggtgacgaggaagatccctttcagccccagcgcaatagtgatgttctggcggatattggcgtgagtggcgcgtgccagttcaatcatttgcaccaggccgcgcaggtggttatgggttaatgctgcgtcggcggtttccagcgccacgtctgtgccgctacccattgcaatcccgatggcggcagctttcatcgctggcgcgtcgttataccggcaccgagcatcgccaaggggctgttgatccgctcggcaccggttgactgtataacaaatggtcggagtgccgcgatgaaactgcgcaaaatcctgaaaagtatgttcaataactattgcaagacgttcaaagacgtaccgccaggcaatatgttccgataacaaaaaacctgctccggcaggtttttttgtgtccaagaatttgagcacggttgtcgccctagaacgtcgtttaggcttcccatgatttatgccccgttgttttctcaagaagctttgtgtgaagctaccagaattttcagccaccgttgtgttgcctagtggacacactttttgaagccacacaagtgtgtgttgcctccctgtgttttgccgttgtggcgctcgttggtagtcgcgctgggtttttagccccggtgttgtggctcttttgacacgcccgtgtggtgttctgtcgtatttttggtcgctctggttttcttccttgtggcgagcgtgtgagtttgccccctgttgttgtgcggcgcggtgttgttgccttctatgagtatgttttgtaggcatctccgcctgtgtttttcccccggttttggttttcctttggcgcctgggtgttggttctcctgaggttgttttttgcgctgtgtgtctgctctgcggagtgcctgtctgtttgtgtcgcttctcgcattgtggtcggtgtggttgtgtggttctcctcgttgtgcttgcggtgtggtcctttcgcgcatttttttctctcgggtcgtggtgttcgcctggtgctcgtggggggggcgggccgcgacgctggtttggtctgctctgtcgttgtgctctgtctagctgttcttgtttgggttgtgtctttgtggcgtgttgttggagtgcttttgggtcgtgtacgagtggtggcgttgatgcggtagcgctctgcgcgtgtggtgggccgcgggtgtgggtgcgcggtgcgtggggcagcgtcttggaggggccgtaggtgtgtgttgctcgtccggttgtgggttcgttgtggggcggctgggttgatcgacgtccttcttcctgattacgaccataggcaggccagtcctgatcggctacgggggagatagcttcagcaggtgtggcatcggcgcttaaggtgccgttgatctcctgcggatcgttaaatccggcccaggtcaggataccaccgctaatcagcagtgcgaccaccagtgcggcaactgcgccgctggcaggaatgaccaggcgacgccagacaaacggcaggatcagccagatgccgaagaagaccagaatgtcgctgcgcggagtcagcgcccagaagtcgaaaccaacttcccagacgccccaaatcatggtgccgagcagcagggctgcgtatagccaaagcgcggcgcgtttactgcgccacagcat

SEQ ID NO: 24673 - DNA, 2196 bp, Homo sapiens
  SIMILAR (1896)..(1426): 951254mologous to Escherichia coli L-rhamnose isomerase,accession number X60472,Smith-Waterman Score=768.
atgtcccttaatcaggctgctgctcactttatgcttgctggtagtggttctgtagccaggtggctgaaggtctatgaagagcgcggagaagctggtttacgcgcgctcaagattggcaccaaaagaaacattgcaatatcagttgatccagaaaaagcggcatcagcattggagctgtcaaaagaccgacgcattgaggatcttgaaaggcaagttcgatttcttgaaacgcggcttatgtatctaaaaaagctgaaagccttagctcatcccacgaaaaaggctgcggagataccgcgcagtacgttttattatcatctaaaggctctcagcaagcctgacaagtatgcggacgttaaaaagcgtattagtgagatttatcacgagaatagaggccgatacggataccgtagggtaacgctgtctcttcatcgagaagggaaacagattaaccataaagctgttcagcgcctgatgggaaccctctcacttaaagcagcgattaaggtcaagcgataccgctcttacagaggagaggtagggcaaaccgcccctaatgttctccaaagagatttcaaggctacgcggccaaacgagaagtgggttaccgatgttactgaatttgcagtcaatgggcgcaagctgtatttgtctccagttatagatctctttcaacaacgaagttatttcttacaggctttcgggaaagaaccagtgattgaacctgggttgagaaatatggctcgaatcaggggctttcaaaaaggctttatccccacagaaacatccgggtctggaaccctctgtgtgtacgcccacgcctacattggtgccggatcggtagaccggataaggcgttcacgccgcatccggcaagtggttaaacccgctcaaacaccgtcgcaataccctgacccagaccgatacacatcgtcgccagaccaaactgaacgtctttgcgttccatcagattcagcagcgtgtgcagagcgctacatgcacacagtgctgagcaatcgacatgacagcaggtcccgcagaaaggccccgggcgagcaaagaggcacttgcatgctgcaggatggcactggcaccagcgggataggtgcccagaagaaaaaaatgtacgccaataacggcgctatagaccgaaagctgctttttgaagcgacgttcgtcacgattgaaaaatgttgtgataccaatcagaaaggcgatgacacccacgccctgggccagccaatacgcggtcatgataaatccttagcaggggggaaggcccatccccccgggggggagtcacagacccgcaaaaagggggagggagtttcttttttccccaaaaagaccccgtttgtgggggcctacaactgttgccgacccgtaggccggataaggcgctcgcgccgcatccggcagtgtttacccgcggcgactcaaaatttctttctcataagcccgcacgctctccagccattcgctacctgctggcgtatcgtgacgttggcaatacatttcccagaccgcctgccacggcaacgatttctgctcttccagcagtgccagacgcgcagtgtaatcgcccgccgcttccagcttgcgcagctcagcggtaggttccagcaacgcacgcagcagggcttttttcatattgcgtgtaccaatgacccacgcggcaatgcggttgatagaggcatcgaagaagtcaaggccgatatgcacccggtcaaacagatcgtgacgcacaatctcactggcaattgcctgggtttcatcatccagcagcactacgtgatcgctgtcccagcgaaccggacggctgacgtgcagcagcaactgcggcacatacagcatggcggcggaaatctggtcggaatcaactcgtcgggtgaaatgccgggtccagcaaggcagctggggtccattggcacagtccagcagtccatcatcaaccacccttactggcagtgcacaggcaacaactccccatattaccgtagccgtagcaacattgtccatagggccatatgcagcaccccagccacatcgtcacaatccccacaccgcaggccagtgcacaaaaaaacagcacaacagcaacaacacacaacaactactttcgtgtacaactggtattaccaagggtggtatcatacggaaacagcctgcatttttccaccttgggacgcttcttaa

SEQ ID NO: 24674 - DNA, 2034 bp, Homo sapiens; identical to SEQ ID NO: 9170
  SIMILAR (1156)..(1875): 991254mologous to Escherichia coli No definition line found,accession number U00039,Smith-Waterman Score=1229.

SEQ ID NO: 24675 - DNA, 1500 bp, Homo sapiens
  SIMILAR (788)..(702): 1001254mologous to Escherichia coli No definition line found,accession number U00039,Smith-Waterman Score=140.
ttaactcgcctgcaaagcgtagatttcggatttatctgccagtcttttcaacagcatattgagtaatacgccatacattggcaggaagaaaacgatactgattaacactttgaaacagtaatcgaccagcgcgatttccatccagtgttcagccataaaggcatccgggctacgccagaaggcaatgaagaaaaaggccagcgtgtcgctgacgttaccgaacagtgtggacgctgtcggtgccagccaccagcggcgactctgacgcaggcggttaaaaacgtgcacgtcgaggatttgccccagcgcgtaggccatgaaactggcggtggcgatacgggcgacaaacaggttgaagtgggcgagtgcgccgaatcccacacactcgacgcgcttggcctgcgctgcccggaaccggtgatgatggtgcgcaaaaccgtgcgcaatatgcagcctggcgaaacgttgctgattatcgccgacgatccggccactacccgcgatattcctgggttttgtacctttatggaacacgaactggttgctaaagagacggatggactgccttatcgttatttgattcgtaaaggcggttgataggggctgattggcttcgatgccgccttttcccctcaccctaaccctctccccagaggggcgaggggaccgatcgcgctcaatgttgcgatcggtttgccttatctcctgcgcaacaatcttaacgcattcgctgtcaccagcaccgtcgcccccgtatctgccagcactgccagccacaacccggtcatccagcgtggtgacgaggaagatccctttcagccccagcgcaatagtgatgttctggcggatattggcgtgagtggcgcgtgccagttcaatcatttgcaccaggccgcgcaggtggttatgggttaatgctgcgtcggcggtttccagcgccacgtctgtgccgctacccattgcaatcccgatggcggcagctttcatcgctggcgcgtcgttaataccgtcaccgaccatcgccagcggcgcatgttgattcagctcggtcaccgctttgactttatcttccggcaacaggcccgctttaaactccagccccagctccccggcaattgccgccgctgcgcgtggattatcgccggtgaggatcacccctttgacgcccagcgcgttcagttcactgatggcagttgcagcatcggcgcgcagggtatcccaggtaccttcttcccaggctttacgtttggcgtcgagcctctcctgattacaaattccgcgaccgttaattacttcgttaaactcctgccagtcgatctcaccaaagcggtagtgaccgctttcagtgtcaaaatgcagatccgggtcaggaacggtcataccgagcatttcaacatccaggccatggtgatacaagggctgggctcctaatgccttgggcatctccacccctgtggctttgcaggttacagcttctgtggctgctttcatgggccacat

SEQ ID NO: 24676 - DNA, 1497 bp, Homo sapiens
  SIMILAR (1159)..(1494): 991254mologous to Escherichia coli K12 flavodoxin 2,accession number AE000373,Smith-Waterman Score=607.
atgcagaaactgacgctgacctacgcggaaacccgccgtctgtatggtaaagaggtttaccatcgcccgtcgcgctttatcggcgagctgccggaagagtgtgtggaagaggtgcgcctgcgcgccacggtaagccgcccggtcagccatcagcggatgggtacgccgatggtcgagaacgacagcggctacaagctcggccagcgcgtacgccacgctaagtttggtgaaggcaccattgtcaatatggaaggcagcgggatcgcggccttatgccactgtcgcgtactcattgcgacagcagccctcatggatcctgacgatgcagtagagctgtcggttaccacgatgatgtttgcgctatgtaacacgcgaaacccccgggtggcttgggacactgctccctgtgtcccagccactacagctgcatccatggctaaaagggccccagatatgtctcagtcagctgctccagaggctggaagccagaagccaccaaggctttcatgtggtgaaagcttgcaccctctgccagccaccaagcgtgcctacaactattgccgacctgtaggccggataaggcacttgtgccgcatccggcaatcaatgcctgatgcgacgctgtcgcgtcttatcaggcctacaactgttgccgacccgccggataaggcgctcgcgccgcatccggcagtgtttacccgcggcgactcaaaatttctttctcataagcccgcacgctctccagccattcgctacctgctggcgtcggtctggggcccagtcggcatgatggcgatgatgctggcgatgactggctttgtcgtggcaacccggaaactcagaaggcgatttgggtttaaatcttgcaaaaacggggtgctttatcggatctcgtcatcttcaatcaccaccagcccagccagccccatcgccacctgtcgcccggttttgccgtgctggatgcggatggacccgatgctcgatatgatggggatgcagatgctaatggagaaatatggcgatcaggcgatggccgggatggatcacagccagatgatgggccatatgttcctcggtcacaaagtgattcgcgcaaaccacgtcggcgactggggcactcagttcggtatgctttttcgcatcgcggtagaaaccttcaaggaagactgggaagccgtctgggatcagctcgacgacctgaaccttgaaggtaaaattgttgcgctgtatgggcttggcgatcaactgggatacggcgagtggttcctcgatgcgctcggtatgctgcatgacaaactctcgaccaaaggcgtgaagttcgtcggctactggccaacggaaggatatgaatttaccagcccgaaaccggtgattgctgacgggcaactgttcgtgggtctggcgctggatgaaactaaccagtatgaccttagcgacgagcgtattcagagctggtgcgagcaaatcctcaacgaaatggcagagcattacgcctga

SEQ ID NO: 24677 - DNA, 1626 bp, Homo sapiens
  SIMILAR (465)..(539): 921254mologous to Escherichia coli rhamnulose-1-phosphate aldolase,accession number L19201,Smith-Waterman Score=127.
gtggctgtaccctgggcccagtcaagtccttttcgctcagggtggcttggttgtcctggccgcagtacttctatattatcgagagagcctgttccccgtgttgtggccccctggcacctggggaggcaccacacgtaaatttatttcattctacccattctgaaaacaaaaaacaaccacacaactcaccatatcacaacgacatccaacccacactcaactacctccccacaaaccaaaaaaaacaaacacaacaagaacaatcacacaacataacaaaacaaggcagtcagctccatgatgtgacacaagtgccttatcaggcctacaggtcggcaatagttgtaggcctgataagacgcgacagcgtcgcatcaggcattgattgccggatgcggcgcgagcgccttatccggcctacgggtcgtgcatccgacaacaccgaatttacaggaacacagaacatgcaaaacattactcattcctggtttgtccaggtaatgatcaaagccaccaccgacgcctggctgaaaggctgggcatgagcgcaacggcggcaacctgacgctacgcctggatgacgccgatatcgcaccatatcacgacaatttccagcaacaagcgtgctatatcccgctcagccagcccatgcctttactggcaaatacaccgtatattgtcaccggctcgggcaaattcttccgtaacgtccagcttgatcctgcggctaacttaggcatcgtaaaagtcgacagcgacggcgcgggctaccacattctttgggggttaaccatcgaagccgtccccacttccgatcttccggctcacttcctttcccactgcgagcgcattaaagtcaccaacggcaaagatcgggtgatcatgcactgtctagccaccaatctgatcggcctcatctatgtacttgacaatgacaccgcggtcttcactcgccaactgtgggaaggcaggcaccgagtgtctgtgggaccgcacaaatattcaaacatcgtgggttgtggcctgccaggatatggcaggaacaagctgataaactcattaagaaccggaaatcgcaattatgaggttcaggcggcgataaccaagcgaattaaaggcggaatgttaccaccgggcgagtggagctcgacggcgattaccgatcgtccaacggtgaatatgctggggggatattactcgcagcagcaatttttgcgtaacctggatgtccgttcaaacatggcttctgccgaccaaccatcggtcatggacgaagcctataaagagtttgttatgcaactggcctcgtgggatacccgcagagagttctggctgcaaaccgactattacaaacagcggatggtgggcaacagcaaagccgatgcggcgttgctggatgaaatgattaacaacatccagtttatccccggagactttacccgcgcggtcaatgacagcgtgaagcttattgccgaaaccgcgcctgacgctaataacctgttacgtcagtatgttgcttttgccagccagcgtgcagccagccatctgaatgatgagctgaaaggcgccatgggccggcgcgtacccatcccagaattgaaaaagccgtttccccaacggttgtaa

SEQ ID NO: 24678 - DNA, 1340 bp, Homo sapiens
  SIMILAR (290)..(631): 991254mologous to Escherichia coli Nucleotide-binding protein UgpC,accession number D90769,Smith-Waterman Score=581.
gaagcgtgtcggccagtttcaaaccaatatcacgcagcagttttttcgccggattggtaccggaaaacagatcgcggaatccctgcataccagccagcatcaacgccgcactgtgcttgcggctacgctcatagcgacgcagataaatgtactgcccgatgtctttcccctgacgatgcaaccgtttcagttcggcaatcagctctgcagcatccataaagccgagatttaccccctgccccgccagcgggtgaatggtatgtgcggcgtcgcccaccagcgccagacggtgcatgtggtgaaggacttcaacctggaaattgccgataaagagttcatcgtgtttgtcggcccgtcgggctgcggtaagtcgaccaccctgcgcatgattgccgggcttgaggagatcagcggcggcgatctgttgatcgacggcaaacgaatgaatgacgttccagccaaagcacgcaatatagcgatggtgttccagaactacgcgttgtatccgcatatgacggtttacgacaacatggcgtttggtctgaagatgcaaaaaatcgccaaagaggtgattgatgagcgggtgaactgggcggcgcaaattctcggcctgcgtgagtacctgaaacagatcagcaagctgcatcagaaactgaacaccaccatgatctacgtgacccacgatcagaccgaagcgatgaccatggcgacgcggattgtgattatgaaagacgggattgttcagcaatcgatgaattttattcgcggcacgatcgatggcgataaattcgttacggaaacgcttaaattaaccattcccgaagagaaattagcggttctgacaacacaggaaagtttgcataagcccatcgtgatgggaatacgaccggaagatattcatccggacgcgcaagaggaaaataacatttccgccaaaattagcgtggcagaattaaccggcctcgtggatcgcattaactgcggtgcgcacaaagatatggcgctggaagatttccaccgcagcgcgctggcgattcagggctggctaccccgtttcattgaatttggtgcctgtagtgcggaaatggcaccagaagcggtactccacggattacgcccaattggtatggcttgcgaaggtgatatgttccgcgccactgcgggcgtaaacacgcataaaggcagcattttttctttagggctgctatgtgcggcaattggccgtttgcttcaactcaaccaaccggtaacgccaacaaccgtttgttctacggcggcaagtttctgccgtggcctgaccgatcgcgaactgcgtaccaataattcacaactgacggcag

SEQ ID NO: 24679 - DNA, 3441 bp, Homo sapiens
  SIMILAR (2814)..(1849): 971254mologous to Escherichia coli L-rhamnose isomerase,accession number X60472,Smith-Waterman Score=1642.
atggtggagtggttgcatcaccgcgggttgacgctggcgacggcgcaaagtgacgatttgcaggcattactggcagaacggctggagggcgggtataaagccaccagctcagcgcgtttgctgagtgcagtgcgccgattgttccagtatctttatcgcgaaaagtttcgtgaagacgatcccagtgcgcatctcgcttcaccgaaattgccccagcgtttgccaaaagatttaagcgaagcgcaggtcgaacgtttattacaggcaccattaatcgatcagccactggagctacgcgataaagccatgcttgaagtgttgtatgctaccgggctgcgtgtctctgaactggtcggactgacaatgagtgatatcagcctgcgtcagggcgtggtacgggtcattggtaaaggcaacaaagagcgtctggtgccgttaggtgaagaggcggtttactggctggaaaccatacggaaaaagggtcaagcacccacaacctggttggctgcacctcgagcagcgttgattgggtttaaccagcaggcccaccagttggcttcgattccggtgttcatgcgcatcaaacaacagctgttgtttatttcaaagatgaacgtgcagcttttagcagcctggcaagagctgtgtcaaagtgacctatccctggaccggcagcttaccggactctatgatgccttgcttggtgcttggcacacacaaatccagtgggctacacagggtttcaggcatggctgtaagcggaacaccattaaaccggacgtcgtgatcgtgttgaatacccccgaagcgggagatgttccgggcattgataccattaaatacccgctaaacttgggccaggggcggggcttgatgctgtttgacaagcgctacttccccaaccagaaattggtagcagcgttaaaaagctgtgccgcacataacgatttaccgctgcaattttccaccatgaaaaccggtgcgacggatggcgggcgctacaacgtgatgggcggcgggcgtccggttgtcgcgctgtgtctgccaactcgttatctgcacgccaacagcggtatgatttcaaaagccgattacgaagctctgctcacgctgatacggggttttctgacgaccttaactgcggagaaagtcaacgcgtttagccagttccgtcagattgtcgatctgctggagcaacagccgcgcacgcctggcgagctggcgcaacagactggcgtttcaggcaggaccatcctgcgtgatattgactatctcaacttcacccttaacggcaaagcccgcattttcgccagtggcagtgcgggctatcagctggaaatcttcgagcgccgcagcttttttcagttgctgcaaaagcacgatagggtacaccacttaaaacgatacccattgtacatgtggaaattaccccttatagaaacgcaggggaaaagcaccaatgtgttacagccgggcgcgatgtttgttctaatccggcgtatgtttgttagcggagaagacggcgattatcacaactggaccggttgcggcaacacgctcaatttgagtcatccggcggtggtggattacgccagcgcctgcctgcgttattgggtagtaacctgccacgtcgatggtttccgctttgatctggcggcagtcatgggccgtacgccagagttccgtcaggatgcgccgttgtttaccgctatccagaactgcccggtgctctcgcaggtgaagttaattgctcacccgtgggatatcgctcctggtggtaatcaggcctacaactgttgccgacccgtaggccggataaggcgctcgcgccgcatccggcagtgtttacccgcggcgactcaaaatttctttctcataagcccgcacgctctccagccattcgctacctgctggcgtatcgtgacgttggcaatacatttcccagaccgcctgccacggcaacgatttctgctcttccagcagtgccagacgcgcagtgtaatcgcccgccgcttccagcttgcgcagctcagcggtaggttccagcaacgcacgcagcagggcttttttcatattgcgtgtaccaatgacccacgcggcaatgcggttgatagaggcatcgaagaagtcaaggccgatatgcacccggtcaaacagatcgtgacgcacaatctcactggcaattgcctgggtttcatcatccagcagcactacgtgatcgctgtcccagcgaaccggacggctgacgtgcagcagcaactgcggcacatacagcatggcggcggaaatcttgtcggaaatcacttcagtcgggtggaagtgcccggcgtccaggcacagcgcagtctggcggctggtggcataccccatgtaaaactcattggagccaaccgtgtagctctctgcgccaatgccaaacaatttgctctcaacggcgtcgatatggtgcgcagggtttagcttctcgctgatcacctcatccagtgctgccagcagacgctgacgcggggcgagacggtcaacggtgatatctttcataccatccgggatccagatgttcatcaccgatggtgtgccgagttgctcgccaaaataggccgaaacgcgacggctggctttgcagtgatcaatccagaactggcgaatgctgtcgtcggcatgggaaagcgtaaagccatcggcgcttagcggatgcgaaaagcaggaggggttaaaatccagaccgagctgattggctttcgcccattcaacccagtttttgaagtgctctggtttgatcccgtcagccgacgtggctatcggtacatcgtgatcaccggtgacgatttgccggaagccaggctggcagtgccgcgtgtttcctgggccgaacatcagataatcgcattccgatgtgtgccggacagccgcagcatgaatctgtccaatgcggtgtcggtagtggtgtatgaagccgttgaaatgctggtccatatccattgatggcttatcgctgtctggtttaccgacaatacgagccggaacgccagcggcggtggtatgcggcggcaccggttgcagcaccacggaacctgcgccaatcttcgcgccgcgcccaacttcaatattgccgaggattttcgcgcccgcgccaatcatcacaccttcacgaattttcgggtgacggtcaccaccagatttacccgtaccgccaagcgtcacagattgcagaatcgatacgtcgttttcaatcaccgccgtttcaccaacgacgatgcctgtcgcgtggtcaagcatgataccgcgaccaatttttgctgccgggtgaatatcgacctggaacgtcacagaaaccgtttcgaactcatccagacgcaggtcgaagcccgccgtgatgttaaccagcacgccgcgcgcgccagacaggtcgatatcttccagcagcggagaagagatagccat

SEQ ID NO: 24680 - DNA, 2317 bp, Homo sapiens
  SIMILAR (61)..(924): 891254mologous to Escherichia coli Nucleotide-binding protein UgpC,accession number D90769,Smith-Waterman Score=1292.
atgtcaccgtccgcgttatcgccttctggcaaatcgttagcaaaggaatcaacaggctcacttgtcgttccacatagtcgagatatctacgataaccaggtgcatttggtaaggaactgcaacctggaaatgcccgatcaagagttcatcgtgttgtacggcccgtcggactgcggtaagtcgaccaccctgcgcatgatcgccgggcttgaggagatcagcggcggcgatctgttgatcgacggcaaacgaatgaatgacgttccagccaaagcacgcaatatagcgatggtgttccagaactacgcgttgtatccgcatatgacggtttacgacaacatggcgtttggtctgaagatgcaaaaaatcgccaaagaggtgattgatgagcgggtgaactgggcggcgcaaattctcggcctgcgtgagtacctgaaacgtaagccgggggcgctttccggcgggcaacgtcagcgagtggcgcttgggcgggcgattgtacgcgaagcgggcgtgtttttaatggatgaaccgctctctaaccttgatgccaagctgcgcgtgcaaatgcgcgcagagatcagcaagctgcatcagaaactgaacaccaccatgatctacgtgacccacgatcagaccgaagcgatgaccatggcgacgcggattgtgattatgaaagacgggattgttcagcaagtaggtgcgccgaaaaccgtttataaccaacccgcgaatatgtttgtttccggatttattggatcaccagcgatgaattttattcgcggcacgatcgatggcgataaattcgttacggaaacgcttaaattaaccattcccgaagagaaattagcggttctgaaaacacaggaagtgtgccctgaccacacactcgacgcgcttggcctgcgctgcccggaaccggtgatgatggtgcgcaaaaccgtgcgcaatatgcagcctggcgaaacgttgctgattatcgccgacgatccggccactacccgcgatattcctgggttttgtacctttatggaacacgaactggttgctaaagagacggatggactgccttatcgttatttgattcgtaaacgtggtgacgaggaagatccctttcagccccagcgcaatagtgatattctggcggatattggcgtgagtggcgagagccagttgcggatctgcgtgctggcagatcagaaagcagtgaaggcagcggcgcaaaccatgcgggccaatccggcgtttgataccgaaaaggcgattcaggaactgggcaccggcgaggcgttgatctcttttctggatgcgaaaggaagcccttctgtggtggagcgtgcgatggtgatcgcgccttgttcgcggatggggccggtgacggaagatgagcgtaatgggcttgattaatcacttcttccggtgtatggcaaatatgaggggatgaggttggaccgggaatccgcctatgagatgttgcaaaaagggctttttcaggccagttaccgagcaggcaaaataaatccttcccgcgaaaaggggaaagaggttagcggtggatgaacgggcattcttggtggatttgaaggatattttgttcgggcactaccgggaccacgcggccggggaaagaaagatgtttatcactggcagtctcctttgagttcccggccagaccgctgcaacaaagagtgggcgcggggcgccgcggcaggggcgcggggagatcagcggccgcgccggcgcgtcgtggctgggcggggagaacggagaacaagacagaagggcacagagggaccgcccgggacgggtgaaccctatgccgacgtggcggaaccgcgcccgatagggccaccgccaggcggcggcggctccccgataataggcgtggatgtgagccaggcatgcccggagttggcgtccaatcgtttgaccggtgcaatcggcctgacttcttcgagcctctatcaccgcctgcccgcgtgggtcattggtacacgcaatatgaaaaaagccctgctgcgtgcgttgctggaacctaccgctgagctgcgcaagctggaagcggcgggcgattacactgcgcgtctggcactgctggaagagcagaaatcgttgccgtggcaggcggtctgggaaatgtattgccaacgtcacgatacgccagcaggtagcgaatggctggagagcgtgcgggcttatgagaaagaaattttgagtcgccgcgggtcggcaatagttgtaggcctgataagacgcgacagcgtcgcatcaggcattgattgccggatgcggcacaagtgccttatccggcctacag

SEQ ID NO: 24681 - DNA, 879 bp, Homo sapiens
  SIMILAR (1)..(57): 1001254mologous to Escherichia coli PUTATIVE MALATE OXIDOREDUCTASE (NAD) (EC 1.1.1.38) (MALIC ENZYME),accession number D90875,Smith-Waterman Score=95.
ttaggcaacattggcgcgctggcaggcaaaccggtgatggaaggcaagggcgttctgatcgtcgtggaataccggaatattcatccgctcgcgcagtttctgttcaatatagaaacattctggcgctttaatgtcttcgaggttgatgccgccgaaggttggttcgagcgcggcgacaacttcaataaatttgtccgggtcgagttcgtcaacttcaatgtcaaatacatcaattttctttgcatgagtggctgctacgtgctgttgcttgcttaatgtgcttttggtggggcctgctttgtggacgtgaattgatttttgcaacgatggattgatggtgcgatgtgtgtgcccctgcgtgattgaaattgattgttgttgtagaataatgaatagatgatcacctgctggctgatgtgctttgtggtgaacgtttatcactgtggctgcatgtgatttgctgatgatgtattctgtgttgcagtcttctgtctgacccattggaggaaaccattgctgcgtgttggatccattgttggtgtcctccttctctttggtatcttggcctttcaaggacacttctgcagcttcagatcccatttgtcctcccagtccgttaatatcaagggcgcggtattggccagcgaacaggcattgcgggaagcaggcattgaactgagcgattttgtccgtggcaatgaaaaagcgcgtgagcggatgaaagcacaatatagcattgcgggtatgaccactggttgctgtgatatagaagacgaatgcgattgagatgaaaacaccggcggtaatcgccagatagaaagtcttaagcggatgtttcgttgctttatagacacccgcctcttcggccactttggccat

SEQ ID NO: 24682 - DNA, 1467 bp, Homo sapiens
  SIMILAR (900)..(337): 961254mologous to Escherichia coli sensory transducer protein,accession number M13463,Smith-Waterman Score=909.
ttactttgtccagaaatcatcgaaaacggtaattggcggacggcgtttatgttcggttttcagataccagttctctattgttctggcgacctgttgaggtacgtttttcccttccagatagtcgtcgatattgtcataggtcacgccgagtgccacttcatctggcagagaagggcgatcatcttccagatcggccgttggcgctttcttataaaggtgttccgggcaagctaatgccgccagtaactgtttaccctgacgtttgttgagacgatacagcggattaatgtccgtaccgccgtcagcatatgtagtgaagaatcggtaatggcttctgagtgcactgctgatgtagatcgccgcaacaataatcatgctgataaacaccagtgccgaaatctgatagttacgctggctttgcgcactggcggcttccagcacatgggtgatctccagctgccaggcctcaaagttaacgtcaaacgcattctgtgatccctgcaccggcgcagggaggaaatccgaaagttgattactttcaagccaggtcgcctgatgttcgagatcgttgtgccagcgggcaaaacttttctccgtctctttttgcaatcccctgacgtgctcgttgcccgcagtcatcgccataaaacttttaaacagcgtggtggattgcgtcagactggcgcgcgccgtcgtcatcaacgttttaatgtcatccgccggatagctaagtgccgtcagagtgcccgctttgttcaacgcggtactggcctgtaacattaccgcccgagtttgcgctaatgccgcacgttgctgattgctctgctcgacctgattcagtcggtgcaaatcgtcgcgaaatgcccaaaaagacatgccgctactgccaatcctaagcagtgaatgctggataaagcgaaaatggggtaaggcctgaatgaagaccgggtcttcaaccacgcgacacagactgtcattgcggcgaaaagtctcctgcaaaggctgaatcagatggatttcatcaagtgtgaatacggcgatatgcccttcgtgttcagccaccagataccaggtctgctggtggatgagtaaccggcagggagctaggcgctcacagcgtcgcccctctgcaatcagcgtcacccgcctgcgcccggtaatggcctgaatcagtctccacaaagacaatgctcctgaaggcgaaagaaccggattggctggtgctatcacgcagggagactcatcgcacatcagcagtgcattcaccagacgggggtcaaggccgggaaaaagcccggccagcccgctgcggtgggcaaagataagcacgtcgggcaccatctgcatctcactgccagcagtgcgtaagcggcagtatccggactgatactccaggtccagatacatcagtcgttcacgaaaatcacgccgcagcgtgcgcactgacacgccaaactcagccggcat

SEQ ID NO: 24683 - DNA, 1011 bp, Homo sapiens
  SIMILAR (562)..(915): 991254mologous to Escherichia coli similar to,accession number D90863,Smith-Waterman Score=648.
ttactttttccagaaatcatcgaaaacggtaattggcggacggcgtttatgttcggttttcagataccagttctctattgttctggcgacctgttgaggtacgtttttcccttccagatagtcgacgatattgtcataggtcacgcagagtgccacttcatctggcagagaagggcgatcatcatccagatctttgaacggacgcttcatgttttcgatagcgtcgatgatgtcgtggtgaaccagctgttcgttctggatacctacacaacgaccgccgtaacctgccagcagcagatcgatagcgtaagcgcccatacgggaagccagaatacggtcgtaaggcaccggagaaccaccgcgctggatgtggcccagcacagttgcgcgggtttcacgaccggtttctttctcgatgaaatgcgccagttcgtcaacatcacacatatgttcggtaatcgccacgatcgcgtgttttttacctttcgcgatacccgctttgatttcgtttaccaggtcttcacggctgaattcaacagctcgagtcgtatctgtctcttcccgtatacccgaatcgtctttgctcatggcttttatgccagcgcaattcatgagatttcgcactggtgtattgccgggaaagcgcgccgtgagctggttgatttcggctactggtattgcccggacggacgcgatgcccaaacgcaaagccagtttgaagatgttgaagtgaagccgcaggcgctcgactggttgttctgtgtggcggcgggatatccgtttaacgtcagttgcgacaatctggaaggggatttcgaaccggatcgtgtggtgtttcaacggcgagtacatgcgcaggtgatggattatctgacaaatggcattccggaacgtccggcacgcttcattaaagcaggcggaacagttcccgtggccggaagcgctcaactgaagccagcgccacgttttacaatgaggaaagaagatgatcgcggagtttgaatcacgcat

SEQ ID NO: 24684 - DNA, 1146 bp, Homo sapiens
  SIMILAR (662)..(709): 931254mologous to Escherichia coli PepP (proline amino peptidaseII),accession number D90281,Smith-Waterman Score=70.
atggcacatacacgggcgatggaaaaatgccgtccgggaatgttcgagtaccatctggaaggcgaaattcaccacgaatttaaccgccacggtgcgcgctatccgtcctataacaccattgtcggcagcggtgaaaacggctgcattctgcactacaccgaaaacgagtgtgaaatgcgcgacggcgacctggtgttgattgacgcgggttgtgaatacaaaggttacgctggcgatattacccgcaccttcccggtcaacggcaaattcacccaggcccagcgtgaaatctacgacattgtgctggagtctctcgaaaccagcctgcgcctgtatcgtccgggaacttccattctggaagtcactggtgaagtggtgcgcatcatggttagcggcctggtaaaactcggcatcctgaaaggtgatgttgatgaactgatcgctcagaacgcccatcgtcctttctttatgcatggccttagccactggttaggactggatgtccatgacgtgggtgtttatggtcaggatcgctcgcgcattctggaaccgggcatggtactgaccgtagagccagggctgtatattgcgccggatgcagaagtgccagaacaatatcgcggtatcggcattcgtattgaagacgacattgtgattaccgaaaccgccggaagaaatcgaagcgttgatggttgctgcgagaaagcaatgagcgtaatcatcgtcggtggcggcatggcgggcgcgacgctggcgctggctatttcccggttaagtcacggggcgctgccggtacatttgattgaagcgactgcgccagagtcacatgctcatccgggctttgatggacgagcgatagcgctggcggcgggtacctgtcagcaactggcgcgcatcggcgtctggcaatctctggcggattgcgcaactgccatcaccaccgtgcatttccaacggcagcccgtccggatcgttaaagaaggtgaagcgtttttgcgtgtatggatcgacacggatggtttcacacttcacgttatggctttcaaggtgcgccactgccgcatcgatgtcatcaacgctaaaagccagatgacgcagaccgcaagcttccggtcggctgggtcgttccggcgggaacggaaatga

SEQ ID NO: 24685 - DNA, 2311 bp, Homo sapiens
  SIMILAR (1008)..(1526): 961254mologous to Escherichia coli UbiH (VisB),accession number D90281,Smith-Waterman Score=880.
aaatgaagcaggggacgactcccgctgaggacgatcgccaaaaacaacgtgcgtagcagctgcccaatgatctctctcgctgcctgaatgcccgcgaggatcactaccaaggaggcccgcttgaacacaatgtgcgtgcccgttttatcgggatgaggggtttacattgaggcttccttgcgactttttgtataaagggtagcgggagacacgccagcaatattctgattcttactgctgattttcacgtcagcacgtggtaaaaatgaaacactgttgtaaaaatgtggtgatcctcatgcccgaacccgtagccgaacccgcgctaaacggattgcgcctgaatttgcgcattgtctctatagtcatgtttaacttcgccagctacctcaccatcgggttgccgctcgctgtattaccgggctatgtccatgatgtgatgggctttagcgccttctgggcaggattggttatcagcctgcaatatttcgccaccttgctgagccgccctcatgccggacgttacgccgattcgctgggacccaaaaagattgtcgtcttcggtttatgcgggtgctttttgagcggcctggggtatctgacggcaggattaacggcagtctgcctgtcatcagccgttattctttgccggggggtgcagctgcatcctgtcagtgatctaaggatcccgcgtggtgaaaaagccggaagaaatcgaagcgttgatggttgctgcgagaaagcaatgagcgtaatcatcgtcggtggcggcatggcgggcgcgacgctggcgctggctatttcccggttaagtcacggggcgctgccggtacatttgattgaagcgactgcgccagagtcacatgctcatccgggctttgatggacgagcgatagcgctggcggcgggtacctgtcagcaactggcgcgcatcggcgtctggcaatctctggcggattgcgcaactgccatcaccaccgtgcatgttgtcgaattgcacaatgtcgggcaacggctgtttgccattgctgcgtaaagcacctggcgtaacgctgcattgccctgatcgcgtggctaacgttgcccgtactcagagtcacgttgaagtgacgctggagagtggcgagacgctgacgggccgcgtgctggtagcagctgatggcacccattcagcgttagccaccgcgtgcggcgttgactggcagcaggagccttacgaacaactggccgtgattgccaacgttgctacttccgttgcgcatgaagggcgcgcttttgaacgctttacgcaacatggcccgctggcgatgttgccgatgtctgacggacgctgttcgctggtctggtgtcatccactggaacggcgcgaagaggtgttgtcgtggagtgacgagaagttttgccgtgaactccagtcggcctttggctggcgacttgggaaaattacccacgctggtaaacgcagtgcttatccgctggcgttaacccacgccgccagatctattacccatcgtaccgtgctgattcaaagtgaacgattaaaccataaagctttagagaaaagaactcttaccgtctgggataacagctttctgatttatagacaaagtgatgtatcggaaattcgtctcgctagtctcttcgcgtccttttcaatccgtaagtcaaaacaacaagcgcgaaagcacacaaacagaagaagcaaagacaaagaaaaacgaacaagacagaagagaaaaacaacaagcagacaaagaagacgaagacaaaggatggtccgcgtcggcgacgaacagattgcaggatgccattgcctttattcaaccggatcgccgaacaggcagttgcgggaagcaggcattgaactgagcgattttgtccgtggcaatgaaaaagcgcgtgagcggatgaaagcacaatatagcattgcgggtatgaccagcggtgtcgtggtgggcaccgatcatgcagcagaagccattaccggattcttcactaaatatggtgacggcggtacggacattaatccgctgtatcgtctcaacaaacgtcagggtaaacagttactggcggcattagcttgcccggaacacctttataagaaagcgccaacggccgatctggaagatgatcgcccttctctgccataacacagtggcactgccccgtgacctatgacaatatcgacgactatctggaagggaaaaacgtacctcaacaggtcgccccaacaatagagaactggtatctgaaaaccgaacataaacgccgtccgccaattaccgttttcgatgattcctggaaaaagtaa

SEQ ID NO: 24686 - DNA, 489 bp, Homo sapiens
  SIMILAR (1)..(336): 1001254mologous to Escherichia coli O157:H7 putative ATP- binding component of ABC transporter,accession number AE005655,Smith-Waterman Score=549.
cttggcattcgcacaccttcaactgaacaaccgattgaatttctctccggcggcaatcagcaaaaagtgttgctttcacgttggctactgacccgaccgcaatttctgatcctcgatgagccaacccgcggcattgatgttggtgcccacgccgagatcatccgcctgattgaaacgctatgcgccgatggtctggcgctgctggtgatctcctccgaactggaagagctggtgggctatgccgatcgggtgattatcatgcgcgatcgcaaacaggtggcggagatcccgctggcagagctttccgttccggcgatcatgaacgccattgcggcgctgatgctaatcatagtgaccccagggtttgctgtgcagattaaaggagataattcaggtcgtggtgccgagcccagtgcctggcacagaacaggtttgcagtcagtgtttactgtcggtaccggtgacctcagctgtgcatgggagagaaag

SEQ ID NO: 24687 - DNA, 2346 bp, Homo sapiens
  SIMILAR (1)..(291): 1001254mologous to Escherichia coli K12 putative aldolase,accession number AE000464,Smith-Waterman Score=481.
atgctggcggtcgatcagcgcgaagccatgcgcatgatgtttgccgcggctggggcacccgctccggtagccgatagcgttttaactgatttcaaagttaacgctgcaaaggccctctcgccttatgcctcggcgattctggtagatcaacaattctgctaccgccaggtggttgagcaaaacgcgattgccaaaagttgcgccatgattgtcgccgccgatgagttcattcctggcaacggtattccggtcgatagcgtggttattgaccgcaaaatcaatccgctacagaacaacatgacgctggatcagatgcgcagccgtctggcttacgatggactgaactacaacacctatcgtaaccagatccgcaaagagatgattatctctgaagttttaaataatcgcgaaagcgtccctgattcattactcacttggctggagtgcacccataatatcgaggctgaaaatcagagacttaccatcttcgccagtcaggcttgcatcgccaccagaccgtggtatttcaccgctgggtcaaagattaagccgatgatcgaaattgcaataatcaccaacaagatcccgccggcctgtatctggcgctggcaatcattatttgtggctacggtttattcaaatcaaacatcagctgtttgcttggcgagctctacgacgagaacgatcatcgacgtgatggcggtttttcgctgctgtattttgtgctttcgcccctttgccgctttggtgctgctgatagcggcgttcgacatccgtggtgatcccggtataaagcttattgtcggcggtacggatcaacaggaagtttctggcgtagaagcggacgacgttatcggtactctggcgcgcgaagccgaaaaagccgggcgtccggtgctgatcagcactggcgataaagatatggcgcagctggtgacgccaaatattacgcttatcaataccatgacgaataccatcctcggaccggaagaggcgtgccggtgggatatcgttcagcagggtagcgaggcgagggatcggttctgcggtttccgggctgatgcgcatacccaatttggcggcaaaacgtaccgcgcgcagcatacgtaccggatcttcacggtagcgcgtttccgggttaccaatcagacggataacgccgtccttcagatccttcatgccgccaacgctgttgatagtgaaatgcggcgctggggtcttcttcgatggagccgaaaatgttcagggcacatcaaagtgatcactggcggtgaaaagcgcaagggtaatggctattactatgcgccgacgctgctggctggcgcattacaggacgatgccatcgtgcaaaaagaggtatttggtccagtagtgagtgttacgcccttcgacaacgaagaacaggtggtgaactgggcgaatgacagccagtacggacttgcatcttcgggcttattatttttttccgagccgcatcaaggctctgttaactcaataaaaggaggcattatgtttgattacatcctgtctctcggcggtaccgttttcgtccctatcatcatgatcgtgattggccttatcttccgcatcccctggctgcaggcgattaaggcaggggtaacggttgggattggttttgtcgcagagcaaaaagccgcgaaagcgaaagctcaggaatacatggcagcggtgatccgcactcaccccattaatgaccaaaacacaaagccagaaaaaactgcagtcgctactaaattttatcatcttatgcaacaagcgaagatgcctttctccgcaccaccgccaacgtttgaaagcatcgtggcggacaaaacggctgaaattaaaagaggtctcctacgcgtaagacgagaatcccgccttcgtccagctgcgtcattagcgcagttggaatttccggcggtgcccgtaacaatgatagcgtcaaacggcgcacgtgccattcgccatgccacaccggatgagttagcgccatttgccaaagccgatggttcgatggggccgaatgtaacggcgagacgctggcgggcgaacggggacctgtatttcgctgtagtcgtaggcaaaaaagaagcgatctaccgtcaattagatcaaaccacccaacgttttaacgtgggcctggtagcgatcaccgacgtgcagaacgcccgcgcacagtacgataccgtgctggcgaacgaagtgaccgcacgtaataaccttgataacgcggtagagcagctgcgccagatcaccggtaactactatccggaactggctgcgctgaatgtcgaaaactttaaaaccgacaaaccatatatcgtattcctggatgataattag

SEQ ID NO: 24688 - DNA, 1716 bp, Homo sapiens
  SIMILAR (718)..(1227): 971254mologous to Escherichia coli cutE,accession number X58070,Smith-Waterman Score=856.
gagagcgattttctcttccatcaaatcctgaaaatcaaagcggtcgagcgtttcctggccgcgatagctgcgcaccgcattaagtgccgtttgcaggaaaaactggttactgacacctgggcaatgcagggcaaacacgaagaagccctgcgtattgctcaggagatgctggatagaggaatgcagttaatgcgtgatgcccttagcgcaaacccggatttagacggtgtattttgcaccaatgacgatattgcgatgggtgcgcttctgctgtgccgcgagagaaacctcgccgtgccagaacaaatttccattgcgggttttcatgggctggagattggcaggcaaatgatcccaagcctcgccagcgtaattactccccgttttgatattggtcggatggccgcccaaatgttgctgagcaaaattaaaaataacgatcacaaccacaacactgttgacctcgggcaggaaactggaggatatctcatgagtgaacccctgttaattgcccgcacgccggacacagaactgtttttactgccgggaatggctaaccgtcatgggctgattaccggcgcaacggggacgggtaaaaccgttacgctgcaaaaactggcggagtcattgtcggaaatcggcgtgccggtgtttatggctgatgtgaaacacgcatctgactggcgtcgcgaaggcaggaacgtcgtctgtggccgaaaaccacctgggctgcgcgtagcgattgccgcccctgccctctggcaagtgaccgagtttctgcgcggttgggtactgaccggcttcccgtggttacagttcggctatagccagattgatggcccgttaaaagggctggcaccgataatgggcgtggaagccattaacttcctgctgatgatggttagtggcctgctggcactggcgttggtcaaacgcaactggcgtccgctggtggtggccgtcgtgctgtttgcccttcccttcccgctgcgttacatccagtggtttaccccacaaccggagaaaaccattcaggtttcgatggttcagggcgatattccgcaatcgctgaaatgggacgaaggccagcttcttaatacgctgaagatttactacaacgcaacggcaccgctgatgggcaaatcatcgttgattatctggccggagtcggcgataaccgatctggaaattaatcagcaaccgttcctcaaagcactggacgtggaagatgagcaagggatagccgacacgctggtctacatgttgcagcaggaaggttttgccgtcgaggtctttgagcgaggcttgccggtgctggataaagctcgcaagcaggtacccgacgtcatgattctcgatgttggtctgccggatattagcggctttgaattgtgccgccagttactggcgctccatccggcgttacctgtactgttcctgacggcccgaagtgaagaggtcgatcgcctgcttgggctggaaattggtgctgacgactacgtggctaaaccgttttcaccccgcgaagtgtgcgccagggtgcgcaccttactgcgtcgggtgaagaagttctcgacgccgtctcccgtcatccgtattggacattttgaattgaatgaacccgcggcgcagatcagctggtttgacacgccattagcgctgactcggtatgagtttatagtgttgaaaacgttcactcaagtcaacttgctataa

SEQ ID NO: 24689 - DNA, 921 bp, Homo sapiens
atggagatcaaattagttgataacgtcttccaggagacctacggccatcctactgatatgaaccagatcatacctgccctgatgggatgccagagaaagactgctgcaagtagggatcctctggaaacagaacagagggaagaagataccttccctgaagcccagatgttccagaagcctgcgcctcattcacaaagtcaccccaaaaatgccctagagtttggagttttgaagaagcgggaagaaggcctgagtaagggcctgggaaccaagttagatcctacttcagcatcagcacatgccagcgatggtgcacacagacttaaaagggaaatcctttggattctgcctggactcctggggctcagccctggccttgccttgagggtgcaaagaggagtaaaaatatgggaaggcctgtgtgcagctgcaatggattcttcaagtgatcagaggcggtttcctgcctgtataaaacagcatgaagaaaagcatccaactcttcttcatctggatgcctcacaccttatgacctgctttgtggtggaaatgacactgtatgttttaattgcaggcttcaagagcctatgtagcatccactcttaccctcctagaaccctgagatatttatgtgaaaaagtctgggatagccttcttgagaatgagagacgacatgagaagagaggcccagccaacttcttgcatcgattgccagctgaacaccagtggggaatagtgcaatccagcaacattatggccggtctttcagcccgtctgcagctcttcctggaacacaggccttttcctgtgtttgaactcaccgccaatggctgtcctaccaaaggcactgacattgaaaccgcctttgcaaaaattataactgaggaaattacgacagtgaaagaaatcagacctaattga

SEQ ID NO: 24690 - DNA, 4338 bp, Homo sapiens
  SIMILAR (411)..(19): 971254mologous to Escherichia coli RecC1004,accession number AF176618,Smith-Waterman Score=673.
tcattctaagctttcatgcctgcaggtcctttgtcgttcgcctggctggtagttttgtggatcaaacggcatccgggtatggaggcaagtaagatgcgcttttacccttgcctcgctttcatcacagttgagcgcttcatcgcccggtagataatgactttgcccgatgtagtcgatcagttcctgcaccagtaccgacgggaaacgctcactgttatcctgaatggaacgaccgatatagctgatatagagtttttgctgcgcggaaattaacgcttccaggaacagatagcggtcgtcatcgcgacggctacggtcgccacgcttcggtttctggctcatcaggtcaaagcccaatggcgcaagctgacgtggataaacgccgtcgttcattcccagcaggcaaaccactaaaccttcggcgataatcgctgccattgttgttcgatcagcgtcatcgccgcttcggtttccgcatccggcaggaagaaggcgttgagcatatcgcgacaaaccggcaaccactcttccagcggacgctcctgtgccagcccgcgacgccagatgtttagcgaaaccgccgaagtgatcttcggtatcaaacctgctgacagcggcacggcgttgatcaaaggcaaaccgcaaaacctgcgatcgccacatcaggcttcggtactgggcattggcttctgcccggaagacaggaaaaccgatggcatcatcgctgccgcctcggtgcgggaaaatatcatcctcgctctccaggcccagcgcggctggctggcagatttgatcaagctcatcaatgatataccgtagattcgggctgatttcctggacttctttataaccctgacccacaccatcagcgacgaccgttttacgctgacgcggatatttaaacttaacgctcttggcgaaaaactcgcctttgtctttctggaaatagattttcagaatatcgttgttggcttccaataaaggcattctgcaaccacggatgccgcggttctgaaagccaataacatccagagcattcttgggatccagtcgatcgataccgggatcctcggtgcggtgatcgccggtattatcgtctggatgctgcatgagcgtttccataatatccgcctgccggatgcgctggcattcgacgcagggcagcgagggaaagtctgcggtcaaaccgtcagcggcgcactgaccatcttccaggggcaattgagttgcccgaccactcacggtttttctgaaagcgggacggtttcctttggcaaggtaaaatgggtgcgtttcttgggggtctgcaggtgcagcgttagtatgtagtaatgcgcgagtccggaaaatcggcataaaattaaaggtctgctgatttctggcctgatcggctggttcgttggagggaataacgaaacgctggaattcgtgttccggttcgtaagtgaaattttgtatgtcataaaggggctggttaaggggtggggcgcaacggttgattttttcagggttccagctgatggcttccgcgtaggggcgacagccgggataaccgcactgaccacactggctctgcggtaagatttcgtcaattttctcaacgaccggatcgtcttccaccgcaaaacggcgggaggcataacccagaatggcgccaaacgccaggcccagcaggctcacggcggcaacggcaatccagatagcattcattacaacttcaccaaaccactgcgtcacattctgaccaaaaaagcgaccaaacgtagacgtcacctgcgtccgaaagccatggtttccaaaggcgatctgggcctggtaatcgcgtgcctgccgtacgcataagccgttaacgtttttagcgtggccgtcggtcacgtaagcggtagtgccgtcaagtggtggattgcgcgtatcgcgcagcagcaggtcagaacggtatgttgcaaaggcgtcatgggccctgaaaaagccgctgttggaatcgaccggaggatccgggctggtagcgcgtgattcgacgaagtagcggtcaccgctctggttgaaaagcgtgcagctctggcctaagcggatgtagggggggcaggctccgcttgtcgtttcacgcatcaaacttggcgttgatcgcgaggccttgcgaagggctcttccctcaatggaataattctgaaggtgcggtctatgtgataccccagagagttcccccagcaggatggagcccttgtttcccgtaatgaaggccgcgtacggcccctgaaagcgatgcgtcgcgaacgtggtgaacgtcgcgaagtgatgggtaccgcaaagatgcaggtggaagaggccagccgctccggtaaaatcgttttcgaaatggaagacgtttgctaccaggttaacggtaagcaactggtgaaagatttttctgcccaggttgtggcgacaaaattgccctgattggtccgaatgggtgcggcaaaaccacgctgctaaaactgatgctcggtcagcttcaagccggacagcggacgtattcacgttggcaccaaactggaagtggcttatttcgatcagcaccgcgcggaactggatcccgataaaacggtgatggataactttgccgaggtagcaagaagggatggttaacggcagccacgccactattgggcgattttcagactttcgttcctccgaacgggcgtacccggtacgtgcccttccgacgtaccggacccttgcgctgccgtttgtcctaaaccagcaatattggatcgcgctataaattatcctcaataagaagcggcagtcctcgacaaggagaggcccacgcggcatcgcctgtgggaagcggatgcgataacggagaggcgtgcggcatcttctttgcaatactgggggctgccttcttcccgggggttttactagctcaacacgctcgactcgttccatccggggccgacggccaaaatgcttatggacctcgatctctattgcaagtgccccaggtgcacgaaccaggagccgcctaggacccatgtggctggttaggtagaggacacgaagtccggcatgcctgcaggtccgcgtggcttgagaaattttcaacgtcgcccgaagcgataaaaacgaaatcctgactaatgtcttccgctcaaaaggcgtgctggtcggcacttcgacgatgaataacgtgatgatgccgaaaatcgccggggcttccgtaacaaacgcgccagtgctttcggctctcacggctggagcggcggtgcggtggatcgtctttccacgcgcctgcaggatgcgggtttcgaaatgtcgcttagcctcggcccacggatgcagtgcagcgtctgccagtggatttacgatccggcaaaaggcgagccaatgcaggacgttgcgccaggaacgccgtggagtgaagtcccggataacttcctctgcccggaatgctccctcggcaaagacgtcttggaagaactggcatcggaggcaaatgagtaacggcattgtgatcatcgttcgggcttccacaatgcatgcccgccgcgaaccggccttttcttcaccttcgggtaataacacgctatacatgccacgatccggaatggtgccgccgctggtaaccgccaacaattgagcgccaggtcgggcggtcaatatcccggtctccctgttccagaccagtttggggcgaaaagcagaaaaatcgccagagggatagcgcccggaaagcatatccagcgtggcgtcaaaaacacgtcttggcagatctttccacggtgcggcacggcgtacgcgggagtaccattcgtctacctgtaatgcatccatcgccgcggcggcaacggtttgctgcgcaaggacgtcgagaggattatgcggtggtgtcaggttttccagcctgccgtagtcatagcggatgccgtaaccgcgccccggcaaccctaacgtcgccagagaatcaaggaagcaagccgccagacgtcccaggccaccgttaccgaggcctgggtcattttcttcatcaatcagctcttcgagatttaaccccatcgcttccagtgcgccctgtacatcttcgtaaattcctagcgacaacatggcgttggagagcgtacggccaatcaaaaactccatcgacaggtagtaaacctgacgagtttcttgcgacaactgggcacggtttgaacgtaaccagcgctccacgagacgatcgcgcacagcaaataacgttgcgttcagccattcatgtttattggcgacgaccgggtcctttccaatcgtaaacatatctatgcatgcctgcaggatcaaatcaaactgaagccgcaaactccggaggaagaacaacat

SEQ ID NO: 24691 - DNA, 1359 bp, Homo sapiens
  SIMILAR (972)..(4): 991254mologous to Escherichia coli K12 L-idonate transcriptional regulator,accession number AE000497,Smith-Waterman Score=1646.
ctaaagcgtgttgccgtgataaatctgatacccgaggtcaacagggttgtggttgtgatcgttatttttaattttgctcagcaacatttgggcggccatccgaccaatatcaaaacggggagtaattacgctggcgaggcttgggatcatttgcctgccaatctccagcccatgaaaacccgcaatggaaatttgttctggcacggcgaggtttcgctcgcggcacagcagaagcgcacccatcgcaatatcgtcattggtgcaaaatacaccgtctaaatccgggtttgcgctaagggcatcacgcattaactgcattcctaaatgaatggatgagatggcgcgtggattcatgcgtaatggggaaagattatgcagcatcatcgcatcgcaatacccctgataacgctgttcatcgcgggtgtcatctttggaaccgagatacagaattttgtgcctgactcgcttctccagcatggtacacaccatgtcaaaagcggcctgccgattatcaaaaccgacctccatatccagccgttctccctgtacatccatcaattccacgaccggaatggtggctgaacgcagaaatttcaccgtcctgatggtgtgatatttttccgaaagtataatcccgtcaatgttataagagagcaggttaatcaccgactcttcttcggaatcgcgatcgtaattgtaattagcaataagggtctgataattatgctcagaggtgacggattctattcccgcgagaatgtcagcgaagagttgattttgaaatgacggaatcaagataccgagggtataactttgtgcattcaacaacatgccgggagcgcgattagggatataattgatctcttccataattttggcgatgcgctcgcctgtttcctttgccacctttttcggcgagcggatataacgactcacggtcatttttgttacgccagccagcgtagcgatatccgtccaggtacgcaacgtttcaccaaccgtcagattaaaataccctttaaatagccagaagccagggtcgtttacgtgtgacgcgatcacgctgcccgcaccggttgccagtaccattaaagcgggatcggcatgggtaacgttgataatcggcaacaccacacccgcggtggtaatggccgcgacggtggcagagcccagagcgatacgcaacagcgccgcaacagtccagcacatcaataacggcgaaagtgtagttccggtcattaagtgtgaaatatagtgcccgacaccgctatctactaatacctgcttaaacgcgccgccgccagcgataataaacacaatcatcgcgatagcgcctatagaatccccaatgatatccat

SEQ ID NO: 24692 - DNA, 854 bp, Homo sapiens
  SIMILAR (302)..(102): 911254mologous to Escherichia coli matches PS00107: Protein kinases ATP-binding region signature,accession number U00006,Smith- Waterman Score=315.
atgccgcgaagttcggcgataattcgacgtttaatccgccagcgaaaacagcgtcgcagtgaaagcgcagaccaaatacccatagcgccaggccaaaaaccactgttaccgagcctgcaggtccaatatttatcactggctgaacagagcggatttttcacattaccgctggtgcccaaatacccccagcccaggccgagcgtaaaatcgaacggcccccaggctttgctggcaacaagatattccgcatcaaacagccccgtaccgccgatatcccgcgcaccaaccgccacttgcgccagctacgtaactctcttcccacaaacgcagtttgaggatcgaaggctttatctttatacgtttgatcgccagagaacgcttcgacgctgctgtactgccgggtgcgcacgtcggtgtagcgcaccgttgtttccagccacgggaagagttgcactgaagctgagtaataacggtactgatcgttatcgcgatagttcagactcaactccccttcccgtgccatacgcgcggtgggcgtttgtaataatcctacgccaccgaaatccgactgcgacggaccaatgggcgcaggatatgtttcgccgtagcaagctgtgctaatgcccagcgccagtaagctaagcagatgtctttttttcattattgaggtatccgctgcgtcagagtctgaagaatgtcggcgttaagggcatcaggcgtctcactccagacggagtccgcgaggccaacataaataatgctggcgggcatcggctctacgtgacgcttgttccagtaagccaccggcgctttttgcgtgcgtccgtccgggtaaaccacccacgcgtagctgc

SEQ ID NO: 24693 - DNA, 3187 bp, Homo sapiens
  SIMILAR (1781)..(2485): 891254mologous to Escherichia coli O157:H7 putative ATP- binding component of ABC transporter,accession number AE005655,Smith-Waterman Score=1037.
atgtccaggataagagggaacgataaaaactttcctccctttgttggggatagggccgagcgtaaaatcgaacggcccccaggctttgctggcaacaagatattccgcatcaaacagccccgtaccgccgatatcccgcgcaccaaccgccacttgcggcagccagtaactctcttcccacaaacgcagtttgagatcgaaggctttatctttatacgtttgatcgccagagaacgcttcgacgctgctgtactgccgggatatgtttctccgacgccgcaaaaaggcataaatgagtcgctgttggaaaaaccgggtgctgcggtggcaacgttaaaatctggtgcgccagatgacgagtctacggagcttggacctttaagctcgctggcgcatctcgaacgcgtcggcaaggcagtagaagaggcgaaagcgacagggcacatcaaagtgatcactggcggtgaaaagcgcaagggtaatggctattactatgcgccgacgctgctggctggcgcattacaggacgatgccatcgtgcaaaaagaggtatttggtccagtagtgagtgttacgcccttcgacaacgaagaacaggtggtgaactgggcgaatgacagccagtacggacttgcatcttcggtatggacgaaagatgtgggcagggcgcatcgcgtcagcgcacggctgcaatatggttggacctgggtcaatacccatttcatgctgccacagcagttacaggagcaaagcgatgaatgtcaccaccagccccattgtcaggctggtgatgatcgctttactattgatcgtcgactgatcaccaagggatgcctggagaaccacacacaggacagcgctcggtaccctatcgactttgatgatggttcaaaaaccgagaacacccgcgtttcttatccgatctatcacatcgataacattgttaagccggtttccaaagcgggccacgcgactaaggttatcttcctgactgctgatgctttcggcgtgttgccgccggtttctcgcctgactgccgatcaaacccagtatcacttcctctctggcttcaccgccaaactggccggtactgagcgtggcatcaccgaaccgacgccaaccttctccgcttgcttcggcgcggcattcctgtcgctgcacccgactcagtacgcagaagtgctggtgaaacgtatgcaggcggcgggcgcgcaggcttatctggttaacactggctggaacggcactggcaaacgtatctcgattaaagatacccgcgccattatcgacgccatcctcaacggttcgctggataatgcaaaaaccttcactctgccgatgtttaacctggcgatcccaaccgaactgccgggcgtcgtcactctcaaccagggaacgcgcttcgaaggcactgcattgttacgtgatttccgcattacggacttccaggattatcaggcgatcattggtcaccaggcggtggcgctcgacccgaacgataccgaccagatggacatgcgcacattgtggaacactgacaccgatcgtgctcgcgcagaactgaactggcgtatcacgttggtattcaccgtgtttatgatggcacttaaggttggacccgtaaggcgtggttaacccacgtcagggacgcgtactgtcgatgctgccagccatgctgctgtatctacttttcttcctgatccagacctccctgaaatcgaacggcggtaaaggtaagctggacccgacgctgtggatgtggaccgttaacctgatttatctggctttagcgattgttctcaacctttgggacaccgtgccggtccgccgcctgcgcgccagtttttcgcgtaaaggagcgaggatccccttcgtaggctgtcgggaaacgtgcgagctaccgcagatcgaactggtaaaaatgatgctggggcgcgagctggatacccacgcgctacagcgtgccgggcgaacattgttgagcgacaaacccgttgccgcgttcaaaaattacggcaaaaaaggaacgatcgcaccgtttgatctcgaagtacgccccggcgagatcgtcggtctggctggattgctgggatcaggacgtaccgaaaccgccgaagtgatcttcggtatcaaacctgctgacagcggcacggcgttgatcaaaggcaaaccgcaaaacctgcgatcgccacatcaggcttcggtactgggcattggcttctgcccggaagacaggaaaaccgatggcatcatcgctgccgcctcggtgcgggaaaatatcatcctcgctctccaggcccagcgcggctggctacgtcccatttcccgcaaagaacagcaagagattgccgaacgctttatccgccagcttggcattcgcacaccttcaactgaacaaccgattgaatttctctccggcggcaatcagcaaaaagtgttgcttttacgttggctactgacccgaccgcaatttctgatcctcgacgtgacagtccccacattctgcagacttaaaagggaaatcctttggattctgcctggactcctggggctcagccctggccttgccttgggagtgaggtgggatcgatgctatcgcactctctataacattgacgggattatactttcggaaaaatatcacaccatcaggacggtgaaatttctgcgttcagccaccattccggtcgtggaattgatggatgtacagggagaacggctggatatggaggtcggttttgataatcggcaggccgcttttgacatggtgtgtaccatgctggagaagcgagtcaggcacaaaattctgtatctcggttccaaagatgacacccgcgatgaacagcgttatcaggggtattgcgatgcgatgatgctgcataatctttccccattacgcatgaatccacgcgccatctcatccattcatttaggaatgcagttaatgcgtgatgcccttagcgcaaacccggatttagacggtgtattttgcaccaatgacgatattgcgatgggtgcgcttctgctgtgccgcgagcgaaacctcgccgtgccagaacaaatttccattgcgggttttcatgggctggagattggcaggcaaatgatcccaagccttgtcagcgtaattactccccgttttgatattgggcggatggccgcccacatgttggctgagcaaaattaa

SEQ ID NO: 24694 - DNA, 2037 bp, Homo sapiens
  SIMILAR (505)..(1254): 851254mologous to Escherichia coli 100 pct identical to sp:YI5B_ECOLI,accession number AP002527,Smith-Waterman Score=1078.
atgactttgtcatgcagctccaccgattttgagaacgacagcgacttccgtcccagccgtgccaggatcatctcggcacgttttggtgtcccccgaacccaggtcaggacatgggttgccctctatgaaaaacatggagaaaaaggtttaattcccaaacctaaaggcgttagtgctgatccagagttgcgtattaaggtcgtgaaagctgtgatcgagcagcacatgtcccttaatcaggctgctgctcactttatgcttgctggtagtggttctgtagccaggtggctgaaggtctatgaagagcgcggagaagctggtttacgcgcgctcaagattggcaccaaaagaaacattgcaatatcagttgatccagaaaaagcggcatcagcattggagctgtcaaaagaccgacgcattgaggatcttgaaaggcaagttcgatttcttgaaacgcggcttatgtatctaaaaaagctgaaagccttagctcatcccacgaaaaaggctgcggagataccgcgcagtacgttttattatcatctaaaggctctcagcaagcctgacaagtatgcggacgttaaaaagcgtattagtgagatttatcacgagaatagaggccgatacggataccgtagggtaacgctgtctcttcatcgagaagggaaacagattaaccataaagctgttcagcgcctgatgggaaccctctcacttaaagcagcgattaaggtcaagcgataccgctcttacagaggagaggtagggcaaaccgcccctaatgttctccaaagagatttcaaggctacgcggccaaacgagaagtgggttaccgatgttactgaatttgcagtcaatgggcgcaagctgtatttgtctccagtaatagatctcttcaacaacgaagttatttcttacagcctttcggaaagaccagtgatgaacatggttgagaatatgctcgatcaggcattcaaaaagcttaatcctcacgagcatcctgttctgcactctgaccagggatggcagtatcgtatgagaagatatcaaaatatccttaaagaacatggtattaaacaaagcatgtccagaaaaggcaattgtctggataatgctgtggtcgcaggatatcgctattctacgcaaggtttttataacttatccgacagtgcctacagtcgaatgagtggttacaccgtcaagcctcctagcggagacaccaatgagcagacacaatttattgattattttaatctgttctacagtaagcgtggtcaggaacaaataagcatctctcagcagcttggaaattacggacccgggttgaagcccaaggcctttgggccaaccaagccggggtttgttttgaagcctggtatactggaatccacgggtgtcgatggtgtggtaattgccggagctgcaggaagtagcgatgacctgcgacggatggcagaagaaaaagctatcccggtgattttcgcttcccgtgccagttatcttgatgatgttgatacggaggtttatgtgtttaattctgacaacctgagactcgacggaaaatgcgccatcatcacaggtgcgggtgcaggtattggtaaagaaatcgccattacattcgcgacagctggcgcatctgtggtggtcagtgatattaacgccgacgcagctaaccatgttgtagacgaaattcaacaactgggtggtcaggcatttgcctgccgttgtgatattacttccgaacaggaactctctgcactggcagactttgctatcagtaagctgggtaaagttgatattctggttaacaacgccggtggcggtggacctaaaccgtttgatatgccaatggcggattttcgccgtgcttatgaactgaatgtgttttcttttttccatctgtcacaacttgttgcgccagaaatggaaaaaaatggcggtggcgttattctgaccatcacttctatggcggcagaaaataaaaatataaacattgcgttgtctgtttgcttgtgtttggtcttgttcgtgttctga

SEQ ID NO: 24695 - DNA, 4977 bp, Homo sapiens; identical to SEQ ID NO: 22472
  SIMILAR (2283)..(2333): 941254mologous to Escherichia coli arginine decarboxylase,accession number M93362,Smith-Waterman Score=84.

SEQ ID NO: 24696 - DNA, 1307 bp, Homo sapiens
  SIMILAR (676)..(227): 981254mologous to Escherichia coli o287,accession number L10328,Smith-Waterman Score=710.
cctttctgaaactgcgggatatcgccgaccaccagtggttcaggccgtagtagcgcacgcgcatctgtttgcgatcttgcagcccaacaatttgcgccatccggctttcaataccgattggcatgtcacagatgttgaggattttcgcattcgggcgcagacgacgcgtggcttctgcgacaatggctgccgggttggagtagttgagcatccaggcattagcacgtttcagctcgatggcggagtttgtcacttcggcattgatagacttcgacgcaagagtgttcgactcgcggttgaactcctgcatcataaaatccagacgacgaccaaccgcttcttttttcttcagaatgttgtaggtctctttgacatgcgcttcgaggcgatccagttcttcggcaacgtcaattcgttgtgccagcagaaccagttcctgctccagacggttgttttccagttgcacctgagcatcttccagcttcgcgaccagacgctcacgctgccattgcaggatttccggcatatgggagcggactttgaccacttcggcggtgacgccttccagacgctgctcgatcaatgctttcagtgcctgaccttcggtttcgcgcgcgacaataaagtcgtccagcgtaccattcaacgccgcgagaatttcaacggcaatggcgttaaagatcctgctcctgggctgccatcacgcccggccagcgtagaatatcaaccgggttgatttccccttcgtcactctgcatttttacccagttcgcggcagttaccagctgtttagccagtttttcgttgaggatcagctcaccttgcgcgctaacatatcctttcatcggattggttttcagcttgccgttttccaccagcttctgtagcgcatctaccagcgccacgcaggcacccgtaatcgacgcggtacgcgtgccaccatcagcctgaagcacgtcgcagtccagcgtaatggtgaactcacccagcgctttcaaatctactgccgcgcgaagagcacgggcgatcagacgctggatttccattgtgcgtccaccctgcttacctttcgccgcttcacgagcgttacgggtgtgggtagaacgtggcagcatgccgtactctgcggtgatccagccctggccctgacctttcaggaagcgcggcacgccttcttcaatagaggcggtacacaacactttggtatcgccaaattcgaccagcaccgagccttctgcatgttttgtatagttacgagtcagggtaacgggacgcacctgattattgctacggcctgctggacgcat

SEQ ID NO: 24697 - DNA, 1984 bp, Homo sapiens
  SIMILAR (1479)..(1499): 1001254mologous to synthetic construct insB,accession number M27083,Smith-Waterman Score=44.
atggccgcattaccatacatgcaactgtacatagctgattacctggctgacaccatgcatttgtcagcagaggagcatggtgcgtatttgttgctgatgttcaattactggcaaacaggaaagccaatacctaaaaacaggctggcaaaaattgcccgtctgactaacgagcgatgggctgatgttgaaccatccttgcaggagtttttttgcgataacggcgaggaatgggtgcatcttcggattgaggaagatctggcatcagtcagggaaaaattaaccaaaaaatcagccgcaggaaaagcatctgttcaggccagaagaagcagaaaggaagcagatgttcaaacaaaacaagagagaaatttaacaggtgttcaaacagatgttgaagtggtgtttgaacatgatgtcaacacaaaggcaactaataaagatacagataaagatctaaaaacagatccccccctaaatcccccccgggggaatcgaggtgtcaaaaagtttgaccctctggatattactttgccgaactggatttctgtctcgctttggcgtgagtgggttgaatttcgccaggcattgcgaaaaccgattcgaacggagcagggcgctaacggggcgatacgggagctggaaaaattccgccagcagggtttttcacctgagcaggtgattcgacacagcatcgccaatgaataccagggcttgttcgcgccgaaaggtgttcgacctgagacgttactccgacagactggccccgtcacatgtaaccgcgccattcaagacggtagcggagtggcgcgagtggcaactttccgaagccagaaacgttgtgaggagatcaaccgtcagaatcgtcagttgcgggtggaaaaaattctgaatcgctctggcatccagccattgcaccgcaaatgctcgttttcgaattaccagcggaaaacctggtaccgggaagaaccacttagcggcactatcgggaatcgcctgctgaaagacggtcagacagtgattgtggttaccgtggctgatgttatgagtgccctgcacgccagctatgacgatgggcagtcaggcgaaaaatttttgcgggaactgtgcgaagtggatctgctggttcttgatgaaattggcattcagcgcgagacgaaaaacgagcaggtggtactgcaccagattgttgatcgccggacagcgtcgatgcgcactaaaagcattcgctttttcacccgtggaagatggcatagccgttcgccagttgctgtttactttgttggcaaccgcattgatcgtcccctatttcaaacgctcgtcgcggctactgacggggtggtgcgtaacggcaaaagcactgccggacatcagcgctatctctgctctcactgccgtaaaacatggcaactgcagttcacttacaccgcttctcaacccggtacgcaccagacaatcattgatatggccatgaatggcgttggatgccgggcaaccgcccgcacttatgggcgttggcctcaacacgattttccgccatttaaaaaactcaggccgcagtcggtaacctcgcgcatacagccgggcagtgacgtcatcgtctgcgcggaaatggacgaacagtggggatacgtcggggctaaatcgcgccagcactggctgttttacgcgtatgacaggctccggaagacggttgttgcgcacgtattcggtgaacgcactatggcgacgctggggcgtcttatgaagctgctgtcaccctttgacgtggtgatatggatgacggatggctggccgctgtatgaatcccgccctgaagggaaagctgcacgtaatcagcaagcgatatacgcagcgaattgagcggcataacctgaatctgaggcagcacctggcacggctgggacggaagtcgctgtcgttctcaaaatcggtggagctgcatgacaaagtcatcgggcattatctgaacataaaacactatcaataa

SEQ ID NO: 24698 - DNA, 678 bp, Homo sapiens
  SIMILAR (671)..(465): 441254mologous to Shigella boydii transposase,accession number U96388,Smith-Waterman Score=127.
atgacgtgccggctgctcacaaggcttccaggccaagctggtgtgggaaagagagtttctggagtaccagatgagttgtctcccctattctccgttggatcgcggtacctgcagggtggtgtggggctggtttccccaacatctggcgccaacgtgggactccccgttatctctacaaataatctggtgaaggaatgtagagcatggaaagtggaagatgacagaaaaagggtgcctgaatatgtttcacttcaagctctgtggataagtagtgtgcttggagaattccacggtacctcgggaaaacggataatgcccgtgactttgtcatgcagctccaccgattttgagaacgacagcgacttccgcccagccgtgccaggtgctgcctcagattcaggttatgccgctcaattcctgcgtatatcgcttgctgattacgtgcagctttcccttcaggcgggatcatacagcggccagccatccgtcatccatatcaccacgtcaaaggtgcgttcaccgaatagtgcgcaacaaccgtcttccggagactgtcatacgcgtaaaacagccaggctggcgcgatttagccccgacatagccccactgttcgtccatttccgccagacgatgacgtcactgcccggctgtatgcgcgaggttaccgactgcgcctga

SEQ ID NO: 24699 - DNA, 962 bp, Homo sapiens
  SIMILAR (358)..(2): 971254mologous to Escherichia coli K12 putative transport system permease protein,accession number AE000134,Smith-Waterman Score=561.
gcctgtctttggcttttgaacgggaggtacgtgattcaccgatcagccagtcaaagatgaagataatcgccagcatcaccacgatcagaatggaaccgtaggcaatcgctacaccgtattcgccatcttccacgcggttgaggatgtaagccgtcgctacgcgggtatccggcgtgacgaggaacacaatggcgctgacggtggtaatggcgcgcacaaagctgtaaatcagcgccgagaggatcgccgggcgcagcagcggcagcaggatgtgcgtaatggtacgcagggaaccggcgcgcaggctgagtgaggcttcatcgagcgatttatcgatttggcccggtaatgactccaatttgtcatgctgctccaccgattttgagaacgacagcgacttccgtcccagccgtgccaggtgctgcctcagattcaggttatgccgctcaattcgctgcgtatatcgcttgctgattacgtgcagctttcccttcaggcgggattcatacagcggccagccatccgtcatccatatcaccacgtcaaagggtgacagcaggctcataagacgccccagcgtcgccaagtgcgtcaccgaatacgtgcgcaaaaacggcttccgaacctgcatacgcggtaaacagcagcgcggggccgaatagcccgaagtatccaaggtcggccactccggcgaacatgagcccggccggctgatggccgggaccgaagggccgaagattaaaggggcaccaggtagggcgcccaaaggggatgaaccgttctgcacgggttaatgaggaactttgccctcccagccaggcgatccgctgatgcccatgagaagcagagaacacatagcccattcccacgggatcaaggccgatatctttggccatttccgaaccggcgatagagagcgtagcgcggtcgccgtagttgaaggatgtgacgataaacaacat

SEQ ID NO: 24700 - DNA, 1912 bp, Homo sapiens
  SIMILAR (1215)..(1289): 1001254mologous to Escherichia coli K12 flagellar biosynthesis, hook protein,accession number AE000208,Smith-Waterman Score=129.
ggaccgggacgtcggggcgaatagaaagccccgcgccggaggggtaggtacaaatgtaatcgagtgagcccccagaaccggtgattcacgaactggtggcccactccgaagcagtttgctctggtgcagggtgtgacccgcggcaaaagcggtaatacgctggatttcggcacttacggcaccaccaccctcgacgaagtacggcagataatttaagccttcacatttcaggagtcagtcatggccttttctcaagcggttagcggattaaacgctgccgccaccaacctcgatgttattggcaacaatatcgccaactccgccacctacggctttaaatcaggcacggcctcttttgccgatatgtttgccggttcgaaagtgggactgggggtaaaagttgccggtatcactcaggactttaccgatggcacgaccaccaacaccgggcgaggtctggacgttgctatcagccagaacggttttttccgtctggtagacagcaacggttcggtgttctacagccgtaacggacaatttaagctggatgaaaaccgtaacctggtgaatatgcaaggtttacagctgacgggttacccggcaaccggtacgccgccgactattcagcaaggggcgaatccgaccaatatttcgatcccgaataccctgatggcagcgaaaactaccaccacggcatcgatgcagatcaacctgaattccagtgatccgcttcctactgttacgccattcagcgccagcaatgcggatagctataacaaaaaaggttcggtgactgttttcgacagtcagggtaatgctcatgacatgagcgtctactttgtgaagaccggggataataactggcaggtctacacccaggatagcagtgatccaaacagcattgcgaagacagcgacaacactggaatttaatgctaatggcacattagtggatggtgcgatggcaataatatcgcaaccggcgcaattaacgtctgagcttcctcaactccatgcagcaaaataccggcgctaacaatattgtggcaaccacccagaacggctacaaaccgggcgatctggtgagttatcaaatcaatgatgacggtacggttgtcggcaactattccaacgaacaaacccaactgctggggcagattgtactggcgaactttgccaacaacgaaggtctggcatccgaaggcgacaacgtcgtggtctgcgacgcaatcttctggcgtggcgctgttggggacagccgggacgggaaactttggcaccctgaccaacgctcgatcgaatcaggcatagcgttcctggtgaatgttccgctcaatccaaaattaaagcgagttaatgtagccggggcaagatggcatccatatggttggccggcgttcgcggaacgtgcctgtttgatcgaaccggaaggtgaccggagaacacatcaccgccccaacaaccagaggacatactcgagaaaaacacagcgacaaggtggacacaagaccagacaagacaactgggaacaaaaaggggacggaggcccaagaccggagcccacggacccacaccagcatgacgcgaacagaccgacagtagccaccaaaaagagaaggaaatcaacgcaatcccaaagaaaccacagaaaccccaagggaacacacccaaccgaagaacacggaaccgcaggcaccacaaaaccaccagacacaccccagaccgacaactggacccataagggaagcctgagggaggggaaggcgaaccgaaagaggaacccgctacgaggagcagaggtagcaggggggggaaagcaacgcgcaaaagcagagagacaaacacagcgcggagagcgaagggaggacgtcgacgaaggggaagaagacagaagcaaaaaaacagaaaaatag

SEQ ID NO: 24701 - DNA, 754 bp, Homo sapiens
  SIMILAR (752)..(435): 881254mologous to synthetic construct InsB peptide,accession number Z37515,Smith-Waterman Score=527.
atgacatttaaacagttactgcttgccctagagctacagctaacacctctgactgctgttgccaacacaggagcccacgagagggaaacagtaatgactatagaggcaaggaggaatacagcccaaacaggccctattatctggttcacttccacgcctggagatgtcactcgaggaggttggagaaagcaaagatgggtgactgctctttcctctcatacctctgacctcaagggcactgatctgatgccagtagggacgctcctatataggatgtctgacaaccctgttgaggggtctcacccagttgggtggcatgggaagcaggacccattaatgaagaactttggctgccccttggtggaggggataatgcccgatgactttgtcatgcagctccaccgattttgagaacgacagcgacttccgtcccgccgtgccaggtgctgcctcagattcaggttataccgctcaattcgctgcgtatatcgcttgctgattacgtgcagctttcccttcaggcgggattcatacagcggccagccatccgtcatccatatcaccacgtcaaaggtgcgttcaccgaatacgtgcgcaacaaccgtcttccggagactgtcatacgcgtaaaacagccagcgctggcgcgatttagccccgacatagccccactgttcgtccatttccgcgcagacgatgacgtcactgcccggctgtatgcgcgaggttaccgactgcggcctgagttttttaa

SEQ ID NO: 24702 - DNA, 2769 bp, Homo sapiens
  SIMILAR (623)..(694): 611254mologous to Escherichia coli O157:H7 flagellar biosynthesis, hook protein,accession number AE005317,Smith-Waterman Score=91.
tcatgtctgttccccgttgggcacgatgacgattatgcggaattgcttattcacggttttccactccggataattctgtgtccagattcgcgatggacgctcgcgagccgggtaacccgttattccgccgaagtggtcaaagtccgctcccatatgccggaaatcctgcaaggcagcgtgagcgtctggtcgcgaagctggaagatgctcaggtgcaactgaaaacaaccgtctggagcaggaactggttctgctggcacaacgaattgcgttgccgaagaactggatcgcctcgaagcgcatgtcaaagagacctacacattcctttgacgtggtgatatggatgacggatgctggccgctgtatgaatcccgcctgaagggaaagctgcacgtaatcagaagcgatatacgcagcgaattgagcggcataacctgaatctgaggcagccctggcacggctgggacggaagtcgctgtcgttctcaaaatcggtggagtgcatgacaaagtcatcgggcattatcgatgctcgaccaccaacaccgggcgagttctggacgttgctatcaccagaacggttttttccgtctggtagacagcaacggttcggtgttctacgccgtaacggacaatttaagctggatgaaaaccgtaacccggctaccggtacgccgccgactatcagcaaggggcgaatccgaccaatatttcgatcccgaataccctgatgcagcgaaaaccaactgctgggcagattgtactggcgaactttgccaaccacgaaggtctggcatccgaggcgacaacgtctggtctgcgacgcaatcttctggcgtggcggtgcatgtagggcaacccacaggcatttaacacttgtagcgttgccggcttcgtgatgttcgtgtcggaacttgtggatgcggtataaccaagtgttcagcgcaaacgcagcaccggaaaaccgagcaggaagcccgcgccgctgcaaatccgaagattcggtgtccacaactgtttcctccttgcggtggtgcatcctggttgtcccgcgcgtatctggcgactgtttgtgcccctgtgtcggtttgtgggggcacaacacaacctgtgtgccgcgcctattgttttccgaacgtctgctcgcggaccccaatttggcccgtggccttcctacgatttcttctcgcgccccgaattcggttaaagtggcgggcttcggattcccgcactgtgccgccatggtgaggccctggcaagaccgttcaggttttgattgggtgaccgcgcattgttgtggttcccgaccaggtgaattgtacggctttatggcgaagcggcgatgtgatcctcggctctttactgccatgttgtttaccggtatctggccacaacgggcgttcatccactggcgcatcaactggcgaaaagtacatgatgcagcaaatactgctgagccttgttcatgcgctgtacgaagtaatccgcagccggtttttgccaatacggaaaaattgaacgatgctgtgaagagctgcgtcagttgctcaataaccaccatgacctgaaggttgtggaacaccaatctatggttatgtgtggctgaacatggaaacggcgcatcagctgagttgctatcgaatctgatttgccgggccttgcgcaaataattcctgacttcagaatcatcttgctgctgcttcgattcagcaaggataaagggtagatagtgaaaagggataaaagcattgtcatctgcggcagctatgagtaacttgggtgcaccgggttcccctgtgtggccaccgggggatcccccatgggcgccgcaaagcgcgtggatgagaacgctcgggtcgatgtccaaggcacgcaaaccactcttggcgcatatcaccgtaaatggcagtgagaaagcaatgaaatattccttagggccagtgctgtggtacagcagcgccgacgtgattatcttggtgaagcggtatgcagcaagcgtcgggcaaccaaagttggcactggctggagatggcaaaatcgctcgccgggagtggtaagcagattgtctctccacgctggcgctggtgcaggcatcatctgaactgggcgaactgaacgctatgttgagaacggtgagtttctgattgaagccagcgatctcggctggtgaatatgtgcgctgaacgcaaactgccgttcgtcgccgggcacgcctgaactgcgggataactctccagccccgcagatggacaaactccacttcaatcacgggaatatgctcaatggcggcgtagcagaaaaaggaaaatcgacgtccagcgccttcgccagtcgcacaaccctgcaccatcccaactgtgagtttttgccagtacagcgaagtaacaaagagcacgtagcacagcctcgtcgttgactgtatgtctttctcccatctttcgtacagtttgcggggcaatacttcatcaagtcgtttaatgtgtccaggtagcgcaggttgccacgccaggcttgctcctgcgttttgcctcgtgatgatctgtttcctcgtgattatctggcgtgtgttctcgtgtttagtctcttcgtttttgggtgctttattccgtaacctccagtacatgccttcgtctttttccattgctattgactgccgtatgtcggtgaatgtttcgacccttgtgtatgccatcacctgccggcaacatgcgctcgggcaaagtgaaccttcgataatcaagtctctgacgccggagatatttctcgccat

SEQ ID NO: 24703 - DNA, 456 bp, Homo sapiens
  SIMILAR (166)..(453): 891254mologous to Salmonella typhimurium putative chaperonin,accession number AF093749,Smith-Waterman Score=430.
atgaagcagatggatacccgcggcaaagtcatcaactgcgccttcgccgtttccgctgctttcgccctgggcgaccacttaggcttcgccgctgccaacatgaacgccatgatcttcccgatgattgtcggcaagttgatcggcggcgtaacggcgattggcgtggcgatgatgctggtgccgcgctacgaattcattaaacgcgaaattagctggcaaagtccggtgttctttacccctgtcgataaacagggcggtttaaaagaagcggaactgaaaaccttaatactcgagcaatatcatgctgcgggtattgagccggaaagcgttgattctggtgccatcatcatcaccggtgaaagcgcgaaaacccgcaatgctcgcccgacggtaatggcgctctctcagtcgctgggcgattttgtcgttgccagcgccgggccgcacctcgaataa

SEQ ID NO: 24704 - DNA, 671 bp, Homo sapiens
  SIMILAR (192)..(554): 871254mologous to Salmonella typhimurium putative chaperonin,accession number AF093749,Smith-Waterman Score=515.
gattccccgccaacaacatcccgatgttcggcatgatgaatcagatggatacccgcggcaaattcatcttctgcgccttcgccgtttccgctgctttcgccctgggcgaccacttaggcttcgccgctgccaacatgaacgccatgatcttcccgatgattgtcggcaagttgatcggcggcgtaacggcgattggcgtggcgatgatgctggtgattttctcccggctggagctggttaaccgtgcggcggtgtcgcaggtgccgcgctacgaattcattaaacgcgaaattagctggcaaagtccggtgttctttacccctgtcgataaacagggcggtttaaaagaagcggaactgaaaaccttaatactcgagcaatatcatgctgcgggtattgagccggaaagcgttgattctggtgccatcatcatcaccggtgaaagcgcgaaaacccgcaatgctcgcccggcggggatggcgctctctcagtcgctgggcgattttgtcgttgccagggccgggccgcaccttgaatccgtgaacgccgggtaccgaactcgaattcgaaatcatgggcatagctggttccctggggaaattggtatccgttcacaattcccacacacattacgaaccggaagcataaatggtaaagcctggggtgcctaa

SEQ ID NO: 24705 - DNA, 1626 bp, Homo sapiens
  SIMILAR (976)..(1617): 991254mologous to Escherichia coli tail-specific protease,accession number M75634,Smith-Waterman Score=1083.
atgaataggaaattgaagtcagagtgtaaagggctggaactgctggctatgggggcagtggagctagaggacaggcagcatcccccagtaagagctcaggttttcacagccacagtgggatggaagcccttactcaggagaaaccactttgtaatgtgggttttcaaccttggctgcacgttgcaatcacctggggatcccccgcaaccgcctgacaaagattctgatgttattggtctgaggagctgcctgagaattggtgattccaaagctcctctggtgttatgtgtttttctagcacaagaaaagttccggaaaactcaaatatatgtgaggtgtgcaacaaatggggacggctgttctgctgcgacacttgtccaagatcctttcatgagcactgccacatcccatccgtggaagctaacaagtcacattgtggaaaacctggaaatctggagtgggaacccctgcttcttcctttgtaaaaaaggcccttgcacaggtgagtgtgcggaaccacgaaaatgtgctccaccacttgtagttgctgcaaatattgatgaaaagactctgaaacgagaaggtgtttgtaaaaccagtcttcctaccactatgggtttcagcagtagtgacttttcagacctgagtaatggagaagagcttcaggaaacctgcagctcatccctaagaagagggtcagaatttaagatccaaggttaccgctatcaagaacatacatctacaatcctacctttttcatggaaccccaagaattctgccagctcaatctacatatgcttgccagcagtatcagcagcacctgctactaaagatggctctacctgtacccagagtcaaatgaacctgccagcacaagccagccatgactgctgggcagaaccagccatgactctcttatgtgggcacagtttgggccccaagcatcagagaatcccagctattgccattgcccagcagggacgccgttttgagcgttaccagtacgctttgtcggtactggaaaagccgatggatttcaccggcaacgacacttataaccttgaccgcagcaaagcgccctggccgaaaaacgaggctgagttgaacgcgctgtgggacagtaaagtcaaattcgacgagttaagcctgaagctgacaggaaaaacggataaagaaattcgtgaaaccctgactcgccgctacaaatttgccattcgtcgtctggcgcaaaccaacagcgaagatgttttctcgctggcaatgacggcgtttgcgcgtgaaatcgacccgcataccaactatctttccccgcgtaataccgaacagttcaacactgaaatgagtttgtcgctggaaggtattggcgcagtgctgcaaatggatgatgactacaccgttatcaattcgatggtggcaggtggtccggcagcgaagagtaaagctatcagcgttggtgacaaaattgtcggtgttggtcaaacaggcaagccgatggttgacgtgattggctggcgtcttgatgatgtggttgccttaattaaagggccgaagggcagtaaagttcgtctggaaattttacctgctggtaaagggaccaagacccgtactgtaaccgttgacccgtga

SEQ ID NO: 24706 - DNA, 4986 bp, Homo sapiens
  SIMILAR (462)..(503): 851254mologous to Escherichia coli ribonuclease I,accession number M55687,Smith-Waterman Score=74.
  misc_feature (1)...(4986): n = a,t,c or g
atgaaagcattctggcgtaacgccgcgttgctcgcggtttctctgcttcccttctcttctgccaacgccttagcgttgcaggcaaaacagtatggcgattttgatcgctatgtcctggccctctcctggcaaaccggattttgccagagtcaacacgatcgaaatcgtaacgaacgagatgaatgtcgcctgcaaaccgaaacgaccaacaaagctgattttctgaccgtacatggtctgtggccaggattgcctaaatcggttgctgcccgtggtgttgatgaacgccgctggatgcgcttcggttgcgctactcgcccaatcccgaatctaccagaagcgcgcgccagccgaatgtgttcatcgccggaaaccggattatcactggaaacggccgctaaactaagtgaagtcatgccaggagctggcggacgttcctgcctggaacgctacgaatatgccaacacggtgcctgcttttggtttgatccggacgcatacttcgatttgtcagatctgcctgactgaacgcctgatagccgcctttcagtttatccgggaacggaatggattcgatctggcctttcttgtgataagccagcgtacaggcagctaccgcctggaaggattccgcacgaccagtaccgagattgaagatgccggaaacgccattttccaggaaccacagattcacatcagccacgtcgcccacatagacgaatcctgtttgaagttctcgctaccttcaaacagcttcgtggtctgcggaagaagcgtacaggaacgggatttcacgctccaggcagtagtgcagcagctccttggagtattgatagttgttatccatcatatacttgccgtcccactcggtggtggaagagcacgcgccttcgtggaaaatcgcttcgacatcgccgaactcttcgccagccataatctggatcaggaagtcttccttatccatatagtcttcgatattcagatccaccaggttcacaaactttggtgcggttgtccaccaccagaatatcggggattccgtcttgccatgccatgcatggtcgactcctatgaggatccccacgtttatctctccaccgcttacacctacgccaaacatcgccctgaccacgctgacgatgaaaccacctctttcatgcagtttggtatctggtacgaatacggcggcggacgtttcgccacggcttttgatagccgcttctacatgaaaaatgcctctcacgatcccagcgaccaaatcttcctgatgcaatatttctactgtttttccgcccatgccgctaacgccgacaattataaaaacgtgattaaccgtactggcgcgccgcagtacatgaaggattacgattacgacgatcaccagcgttttaatccgtttttcgatctcggagcctggcatggtcatctgttgccagacggccctaacaccatgggcggctttccgggcgttgcgctgctgacggaagagtacatcaactttatggccagcaatttcgaccgcctgaccgtctggcaggacggcaagaaagtcgactttacgctggaggcatacagtattcccggtgcgctggtgcaaaaactgacagcaaaagatgtgcaagtcgaaatgactctgcgcttcgccacgccgcgcacgtcactactggaaaccaaaatcaccagcaataaaccgctggatctggtcgaaccgaacccggattatccgcgctggagccgcaagcgtattgaagaaacctgttgggaactgctgatgaacggttatctcaattgcgaagatttaatcgacccggtggtgacctttgccaatagcccggaaagctatatgcagtatgtcgaccagcatccggaacagagcatcaaaatgggcaatcaggcgttctttccggaaaacattctggagaaatttcgttatatcaaagagatgggcttcgatggttttgagattgacggcaaactgctggttaacaacatcgaagaagtcaaagcggcgatcaaagaaaccggtttaccggtgaccaccgcctgctgtggctatgacggatggattggcgactttatcgaagagcgtcgtcttaatggcttaaaacagatcgagcgcattctcgaagcgctggcagaagtggggcgtcagacgctcagcctggtcaacggtaataccgcaaccacgcgcccaaccttctgccgctttgctcggtttgccttcagcgtcgaacgcctgggcaatcgccgggccgcgtttttcgatttcacgatccggttgcgcttccgccagctactttcagcgccagacgacgcggacagcaaaccattgaacggtgccgtgtgcgaggccagcgttatccagctccgcagtaaagttcgcagcaaaggactcagccaggctgcgcagtgcttttggtggcagctcttcagtgccgatttccaccagaaaagttttctcagacatagccgcctcttacttatctttgttgcacatcgggaagccgagggcttcacgggaagcgtaaatgtagcgctgacgctcggtgacggagatggctttacgcgcatccagcaggttgaagctgtgggcggctttcagaatacgctcgtaggctggcagcggcacggnattttccagcgccacatgctgctgcgcttctttctcgtactgctcgaagcaggtgaacaggaagtccacatccgcgtattcgaagttgtaagtggactgctccacttcgttctgatggaacacgtcgccgtaggtggttttacccagcgggccgtcgctccagaccaggtcgtaaacgctgtctacgccctgaatgtacatggccagacgttccagaccaatcggctttgtctggctgatattaagcagacggctcatctcttcggttggcatcagaggaatgatttcctgttcgctacgatcgataaccattttcttcacttcttcgataaagtgatatttcgaattttccatgacctgccaggatctgctgctcgactagctgatcagcaaaatatgcagacacataatgccaaagttgagtttcagcagccgcggttccgccagcactttactgaaactgcctttcaccattccggactcacgattaagtacgtgagtgctactgttgggcacaacccaaatggtcaacgcaatgccggtcgttgccagaatagcgatcatccagaacagcgcgtgcagcccaagtttgtgagtgatgatcgggccaagcaccatcgcaatggcaaaggttctcatttgctgatgagcaccgccgaagacggcaaacaggtgccatgggtacagccgcatgaaccgcccgtcggcgatattcattccggttactgggagctggcgaaagacggtatgtacggtgttgctaaccgccctaacggtacggcgcataaatactttgctagcgcaccgtacaaaattgcggcgaaatccggtaccgctcaggtcttcggtctgaaagcgaacgaaacctataatgcgcacaaaattgccgagcgtttacgtgaccacaaactgatgaccgcctttgcgccatacaacaatccgcaagttgctgtcgccatgattctggagaacggtggtgcgggtccggcggttggtacactgatgcgccagatcctcgaccacattatgctgggtgataacaacaccgatctgcctgcggaaaatccagcgcgccctggttatctggagcgccagggtcaggatattggcatgatggagcgtaaaatcggccaaatcgcgatgggtctggtcatcatggtggtgatggcgcaaattcctccacgcgtttatgaaggctgggccccctatctctatatcatctgtattattttgctggtggcggtagatgctttcggtgccatctctaaaggttcgaaggttgaaccgattccgcaaaatggaccgtgcggtgacaacagcctggtggcgcttaaattgcttagcccggatggtgataatgcatggtcggtgatgtataaactaagccaggcgttaagcgacatcgaagttccatgttcggtgctggagtgtgaaggatgtgagcgacctatgaaaacatgttggcaaatcctcgaaattgaaagcacgacgcaaatagacattatccgccaggcttatcttgctcgcttaccgttgtgtcatcccgaaaccgatccgcaagggtttaaagcattacgccaggcctatgaagaggccctgcgactggcggtaaatcctgtcgaggaagcagatgatgaagaaaaagatgctgccgctgaacatgaaatactacgtgcattcaggacattactggattcagaaagtgatcgttttcagccttccgcctggcagaaatttattcagcaattaaatacctggaacatggaggatgtcgatcaattacgctggccgctgtgtgcaatcgccatagaagcgcgatatctttcattaaattgtgcttctttgctggcagagcgtttgaactggcattcatttaatgacagcgaaggaatggatgaggaagaaagggaggcttttcttgaggccattcaggctggtgattgtttcgatttccttagccttctggaatatcccattgcgttgcagaaccagactgttgagtattacttcgcgctggaacgttgctgccgttaccatcctgactatgtcactgcgtttttggcgatggaaagtccgtggttaattcctgatgatgcaagttacatcgcaaactgttgcgctggtacactcggtgcaaacaggtattgcggaactcattcctgtcgctcaacaattgcaaaccgaagaacccagaagcgaagatgcccggtattacctgtgtgcacaacgtttgtactgccgcgaaggggaaagcctgcatgccgatctctgcgcgtactcggaaaatttaccatctacacaactgatatttgttgttacatggagcaacgtcattgccggattattcgcgtataa

SEQ ID NO: 24707 - DNA, 726 bp, Homo sapiens
  SIMILAR (175)..(315): 391254mologous to Vibrio cholerae tail-specific protease,accession number AE004228,Smith-Waterman Score=59.
aaatgcgctgtcatcgtccgggttagtcagcacgcgcagataaccagcaagtccttgatttcaggacgagagaaaaacgacgtaccaccagaattttaccgcgcggttaaaatgtcggtgaagaccgcggtaaagagaaagtcggcgtgctggatattccgggcttctatgtgggttgacagacgatgtcaaagtgcaactgcagaaactggaaaaacagaatgtagcagcgtcatcatcgacctgcgtagcaatggcgtccgcgataacaacggcaaggttcgtgaagatagcgataccgacggacagttttctataaaggcccgctggtggtgctggttgaccgcttcagtgcttggcttcagaaatctttgccgcggcaatgcaggattacggtcgtgcgctgttgtgggtgaaccgacgtttgctggttttgagctgctggacggtggcaaaagcggaactcgcggtagcaggacgctgccagcgaactcgcagtttgcaagtgacggtattaaccgaaaagtgactgagcgtacatgtatacgaagattattggtactgcagctatctgcccgaacaagtgcggacaaacgccgatttggaaaaaatgtggacacctctgacgagtggattgtcactcgtaccggtatccgcgaacgcacattgccgcgccaaacgaaaccgtttcaaccatgggctttgaagcgggacacgcgcaattga

SEQ ID NO: 24708 - DNA, 6732 bp, Homo sapiens
  SIMILAR (1561)..(2238): 761254mologous to Vibrio cholerae carbamoyl-phosphate synthase, large subunit,accession number AE004309,Smith-Waterman Score=865.
atgaacggacttctgattcttacggcactcctgccgtttgtcggctttgcacagcccattaatactctgaacaaccctaaccagccggggtatcagatacccagccagcagcggatgcaaacccagatgcagactcagcaaatccagcaaaaagggatgctgaatcagcaactgaaaacgcaaactcagttgcaacagcagcatttagaaaaccagataaacaataattctcagcgggtgttgcagtcacagccgggggagcgaaatcccgcccggcagcaaatgctgcccaacaccaacggcgggatgttaaacagcaaccgtaatccggatagttcgttgaatcagcagcatatgctgccggagaggagaaacggcgacatgctgaatcagcccagcacgccgcagcctgacattccgttgaaaactattgggcccaacaaaccgcgcggcagttccggtgccgcctgttgtgcagcttctaaagcatcaatctcaaacgatgacagcagcggcggcgtcataccggcccacagctcgcgtgccgccagcgccaccattttgcccgttaatggcccggtgccggtggtgggtttgatttcgatattcgccatcatcccgtgttcgcggcaacgttccgccacctgcgaaagcaacggtagcggctcacctttaaacattttgctgtaccaactgcccgcatccacgcgcagtaaatcctgccagttcagttcacccgcgacgccccagccgttgctccgtgccggtggctctatatgcgcagggcggcagggggatttacccccgttgaaggtaatgcccgtccctacaaagacttttggcgtccacatccgtgtttctccctactgcctgccctcaaacgatttgcgcttaggatgcccacgtcttcagccacgtgatgccttctgcgatcgtcttaaagttcatccgacccacgcggatgccgtgcgcagaagcttgattcagatatggatgttccgcacggcaggtcgaacaccaggtcgcccagacgttaagcagtactggtttgccctgagtcagcacatccgcctgataaaactgccccggattgtccatgattcgagacgaaacttcggcacaggcttgccaatgagcgccgattccagattggtcggatcatccccttcggcattacgcgccagctgccacagcagcgccgcggcaatcgccaggaagataatcaacggaattaacaatactttgcgcttcatacggcctccggcgcagttttttgcggactcacgcgcttacgatagcgaggatcaaacagacacagcagtccgcccaacgccatcatcagcccgcccgcccaaatccagcgaacaaatgctcttcaccgagggccgcgtacaggtcacgcgtgatgccgccgtcaattgccgcttcggtcatcatcgacccggcagtgttgtaataacgtttttccgcatacagcaccgtttccggcttgccatcgcgcgttacgccgatagtcgccacaccgccacgccagttcgggccagtcacctctttgacatcacggaagcgaccggtttcccgattgctaaagtggcggcgaaactggcggtgggttacaccctcgacgaactgatgaacgacatcactggcggacgtactccggcctccttcgagccgtccatcgactatgtggttactaaaattcctcgcttcaacttcgaaaaattcgccggtgctaacgaccgtctgaccactcagatgaaatcggttggcgaagtgatggcgattggtcgcacgcagcaggaatccctgcaaaaagcgctgcgcggcctggaagtcggtgcgactggattcgacccgaaagtgagcctggatgacccggaagcgttaaccaaaatccgtcgcgaactgaaagacgcaggcgcagatcgtatctggtacatcgccgatgcgttccgtgcgggcctgtctgtggacggcgtcttcaacctgaccaacattgaccgctggttcctggtacagattgaagagctggtgcgtctggaagagaaagtggcggaagtgggcatcactggcctgaacgctgacttcctgcgccagctgaaacgcaaaggctttgccgatgcgcgcttggcaaaactggcgggcgtacgcgaagcggaaatccagttcgccaccgacaccgcttacatgtactccacttatgaagaagagtgcgaagcgaatccgtctaccgaccgtgaaaaaatcatggtgcttggcggcggcccgaaccgtatcggtcagggtatcgaattcgactactgttgcgtacacgcctcgctggcgctgcgcgaagacggttacgaaaccattatggttaactgtaacccggaaaccgtctccaccgactacgacacttccgaccgcctctacttcgagccggtaactctggaagatgtgctggaaatcgtgcgtatcgagaagccgaaaggcgttatcgtccagtacggcgctgctggcgtaccggttatcggcaccagcccggatgctatcgaccgtgcagaagaccgtgaacgcttccagcatgcggttgagcgtctgaaactgacacaaccggcgaacgccaccgttaccgctattgaaatggcgcgtagagaagggcgaacgagattggctacccgctggtggtcacgtccgtcttacgtcctccgcggtcgggcgatggcaatcgtctatgacgaagctgacctgcgtcgctacttccagacggcggtcacggtgtatacgatgcgccgtgtgccgcacccgtcctcgatacgcggcgccgttaccatatgtcactcctcccttgtttctgagctccccttcgcctcatcgggcatattcttttcatcccagtttctaaagtgttctcgtgccgtccgggcccttgtccctgttgcgcacaccgccctttgcctggccagttgccacacggtccgccgtctgtatccttttacgtcgtttaaccgaaaacccctgtggagtcccagagtccagcaacatagacttgggggttataaacaccaaactgaagtgtttactgtaattgctcctattaaaactcggggtaccacatgtgacgtccagctgctagcgtcagagaggtggctcccgcggagaacgaccgtcgcgggaaacattggcaagcggttggacccgaaaacgcgcgcggccgtaacaaacgggaccaccagaatttccgcaggacgctggccacggagccgtaaccagggtggaagaaaggccctgcgccgggacacgcaaattccgggcacggctggggtatgctccggcgtcacgtatcccgaggaaaccgagtcggcaagggaacgctggcccagattcaccaatgggcctgacggcgaagtgatcgccattgatgtcaatgatgagcagttaaaactggcacccgaaatgggcgcagatttagcgattaactcacacaccgaagacgccgccaaaattgtgcagaaaacttacggcggtttgttccgcctcgaggtggtgtgtaccgccgttgtcggatatggcgcctgggtatttaggggcgccatcgccgcccccgcttgttatcacccgcccgtgctggtggcccggggacatgccggacgtaagctcactgctgagatggcacgaaattacgatctgattctggcaatggagtcggaacatattgctcaggttaccgcaattgctcccgaggtccgcgggaagacaatgctgtttgggcaatggctggaacagaaagagatcccggatccctatcgtaaaagtcaggacgcatttgaacatgtctacgccgtccactcccacagcttagcaggcgtcttggcattatcttcgcttttctcaagcccggcaggtcgtagtctaggccgtagcagccctaaagcagtatcagcagtcccgcccgacgtcccaccagtcccgttcgccagatggtcaccccgggggataaccatgtcggtggcgatgccaactgtggcatctggcttgacgacccatcggcaaggttatctctattcgcccattgatccgcaaacaaataaaccgtggcccgccatgccacagagttttcataatttatgtcaacgtgcggctacggcggcgggctatccagatttccagccagatgcttgtcttatcaaccgctacgctcctggcgcgaaactgtcgctgcatcaggataaagacgaaccggatctgcgcgcgccaattgtttctgtttctctgggcttacccgcgatttttcaatttggcggcctgaaacgaaatgatccgctcaaacgtttgttgttggaacatggcgatgtggtggtatggggcggtgaatcgcggctgttttatcacggtattcaaccgttgaaagcggggtttcatccactcaccatcgactgccgctacaacctgacattccgtcaggcaggcgcttatgacgatcgtatctggacccgcagcattgttgcctggcctggcgtgcgtcatctggacggtgatgatttctctccggttatcacccaggcgcaacagatgccaggcttcccgtacagcgaaattccgcaccttatcaccgtggattttgttcgccagacgctgcttggcgctgctaatacgctgattagatctgagaaactgggctgcggtgtcaacgatctgccgctgtcgctggtgctctcctggtttgaacagaaagcgatcgtcattctgctgacgctgctttctctgggcgtgaaaaatatcgtcaccggcccgactgcacctggtttcctgacaccagacctgctggcggtgctgaacgagaaattcggcctgcgttctatcaccactgttgaagaagacatgaagcaactgttgagcgcgagtttgtcgatgacgatgccaacgaatcaatgcccgtggcggatgcaggttcatcacattacgcaagaaacgccggatgtgtggacgatttccctgatttgccacgattactacccatatcgcgccgggcaatatgcactggtcagcgtgcgaaactcagcggaaacgctgcgtgcttacaccatttcctccacgccaggcgtgagtgaatatatcaccctgaccgtgcggcggattgatgacggtgtcggctcccagtggctgacgcgcgatgtaaaacgcggtgattatctctggctttcggacgcgatgggggaatttacctgcgacgataaagcagaagataaattcctgttgctggcggcaggctgcggcgtcacgccgattatgtcgatgcgtcgctggcttgcgaagaaccgtcgggatcctctagagtcacctacagcaggcactcccctcgcgcgcccgtgtgcgtcccaactgacggtgctgacgccgggaacacacttctgtgcggacctgagtagaaatatgaccaacagcaaaggccatcgtcagaacggtcagaccgaacgccaacgccacgccggcaaaaccgatgcctattccggaagcctgagtcatgacgtccccgtcaagccggtccaggagctctggtattccgcaaaagcagagtacctggcgggagcgagatatgccgccaacaatatcaatcatatacttgaagaagcgtcacaagcgactcaaacagcggttaacattgccgggaaggaatgcaacctcgaggagcaatatcagcttggcactgaagcagctctgaaacctcacctgcgcacaatcatcattctcaaacagggaatagtctggtgtacatccctgcctgggaatcgggtcctgttgtctcgtattcctgttttcccggacagtaatttactgttggctccagcaatcgacaccgttaatagattacctatcctgctctatcagaaccaatttgcagatacgcgcattttggttacgataagcgatcagcatattcgtggggcacttaatgtacccttgaaaggggtaaggtatgtattacgcgtggcggatgacattattggaccaacgggtgatgtgatgacgcttaatggacattatccctataccgagaagttcatggacgtcacatgtggtaccccaccttgtgttataactagtgcatttcgtagcattgaacctgaattaacagtttatacgtgcttaaaaaaaatagaagcatctttcgaattaatcgaagaaaatggagatcctaaaataacgtctgaaatacagttgttaaaggcaagtggaattctccaaagtttgtatagtgtaggatttgttggtattcgtgataaaaacacctcatcctattcattttgccatgacgggcgaactccagataaaggttttgaaagtaatgagaaattattaattcatccatgttactggcttggtttgaatctaaatcgtaatgcacttgctccagaggaagcagaggagataaatgacgaatatgatattaatattatttcagataattcagccattagaaataaaacaataggtcaaataactactcatctagatcagataccgataggaaatgaaggtgccactgaatttgaacaatggtgtttagacgcactaagaatagtatttgcatcccacctaacagacatcaagtcccatccaaatggtaacgcagttcagagacgagatattataggcaccaatggtggcaaatctgatttttggaaacgagtattggaggactataaaacagacaagttgtttttgatgctaaaaattttgaagaattag

SEQ ID NO: 24709 - DNA, 1419 bp, Homo sapiens
  SIMILAR (592)..(1416): 931254mologous to Homo sapiens putative p150,accession number U93574,Smith-Waterman Score=1299.
atgaaagttaaagtactgtccctcctggtcccagctctgctggtagcaggcgcagcaaacgctgctgaagtttacaacaaagacggcaacaaattagatctgtacggtaaagtagacggcctgcactatttctctgacaacaaagatgtagatggcgaccagacctacatgcgtcttggcttcaaaggtgaaactcaggttactgaccagctgaccggttacggccagtgggaatatcagatccagggcaacagcgctgaaaacgaaaacaactcctggacccgtgtggcattcgcaagtctgaaattccaggatgtgggttctttcgactacggtcgtaactacggcgttgtttatgacgtaacttcctggaccgacgtactgccagaattcggtggtgacacctacggttctgacaacttcatgcagcagcgtggtaacggcttcgcgacctaccgggacactgacgtgttcggtctggtaccgactcgattgcatccggcccgcgtgtgctgtgctctacgcgaactgaaagacgcaggcgcagatcgtatctggtacatcgccgatgcgttccgtgcgggcctgtctgtggacggcgtcttcaacctgaccaacattgaccgctggttcctgcatataaacagagccaaagacaaaaaccacatgattatctcaatagatgcagaaaaagcctttgacaaaattcaacaacccttcatgctaaaaactctcaataaattaggtattgatgggacgtatttcagaataataagagctatctatgacaaacccacagccaatatcatactgaatgggcaaaaactggaagcattccctttgaaaactggcacaagacagggatgccctctctcaccgctcctattcaacatagtgttggaagttctggccagggcaatcaggcaggagaaggaaataaagggtattcaattaggaaaagaggaagtcaaattgtccctgtttgcagacgacatgattgtttatctagaaaaccccatcgtctcagcccaaaatctccttaaactgataagcgacttcagcaaagtctcaggatacaaaatcaatgtacaaaaatcacaaacattcttatacaccaataacagacaaacagagagccaaatcatgagtgaactcccattcacaattgcttcaaggagaataaaatacctaggaatccaacttacaagggatgtgaaggacctcttcaaggagaactacaaacctctgctcaaggaaataaaagaggatacaaacaaatggaagaacattccatgctcatgggtaggaagaatcaatatcgtgaaaatggccatactgcccaaggtattttatagattcaatgccatccccatcaagctaccaatgactttcttcacagattcggaaaaaactacttga

SEQ ID NO: 24710 - DNA, 1594 bp, Homo sapiens
  SIMILAR (1593)..(1000): 961254mologous to Escherichia coli K12 orf, hypothetical protein,accession number AE000315,Smith-Waterman Score=1047.
ctatccagcgaccgcttcatttgcgggttctggcgcagccgcgccaacgcaacgcgctttgatgcgttcttcaatcatctccacctgttcgcggttttcttccagccactgcgcgccttgttcggtcagcgcaatctgcttcttacctccttcctcttcgcggatggtaatcagcgactgctcctgcagaaaatccagcgttgggtagatgacgcccgggcttggggtgtaattcccctgggttagattctcaatcgctttaatcaattcgtaaccgtggctgtcatcgcgcgagagaatatccagaatcaccagacgtaattcaccgtgaccaaagaaacgttgccgacgaccgccgccgcgaccgtggcgaccaccgcagcattgaccgtgttcatgctggtgaccgtgtccgcagtgctcgtgttctgacttctcacctttgcagcagccctcatggcgtggctggccatcacgaaggcgataacaatgaataacacccccccggtaccgcagcgcgttcgcaatgatctgcgcttccgtgaactgatgtggtaacgcgttgagcgcatcagcgccggttttcagcgcattgtctcgggcgcgaaggcgctggacggttttacatcgcgtggctttgacgatcacagcaaactcttctttcctcaacctgacgctcactttgtgccgccaacggtaacggaagagggcatcgtggtggcaggtccgcgcggttcgctggtggtgccggaagattacgcgtatcagctgtatgtctgcgatgaatccggaatgcctgcattgcgccgccgcctggaaacgttgagcaaacttgccgttaaaccgcaagttagtgcgctggttagcgtgcgggataacgcctgtcaggattatctcgcgcaccttgatggttttaatatcgaatggctggcacatgatgagcaggcggtagatgcgcgtctggcgcagatgcaaatccctgccgatgattacttcatcttcaacttctgcatgaatggtataaaccggcgtgcctttatctcgcaggatgcggttgagtaaccaaccgttaaaatcttctgctttcacatcccgaccaatcacttcatcccaggtgggtaaggtcaccggaatttgcgcagtgccagggtttcctgattcgagcaatggacggaacggcatggccccacgacaatcgctgttgtagcgcaaatggaacgcttcttttgcttcgatcaccttctggtcggcacgccagcccgcagcggcagaacaggttaccggttgaccgataatctcttccagagtgcgaagaccgcgtgcaatatcgtcgatcattgtttgccgatcccagttaccgctacgggcttgccaggcatggtgatcccaggcgtgcaggccgacttcgtgatgtttagccgcttcacgaatgatatcggcattggcatgaccaatctctttacctggccaggccgtacctgccagtaaaatatccccaccataaagcgattgcgcgttttgacgcacattcttccacaaaaaatgtggcttcaccagtcgccaaagatggcggcccatattgtccgggccgatg

SEQ ID NO: 24711 - DNA, 1488 bp, Homo sapiens
  SIMILAR (1488)..(1156): 1001254mologous to Escherichia coli f115,accession number L10328,Smith-Waterman Score=553.
ttacatgcggcccaagacaattcttcttcttccaatgtggctcagggaagccaaaagattggacaccccggcggtagcgcccgttctccgctgattaaaaaagcgctggcagaacagttgccgggcattccgattgcaggcggcgatgactttggctccgtcaccgccgggctggcacgcgtcgccatggtgcacattgtggcgcttatgagccccggtcccgatttcttttttgtctctcagaccgctggcagtcgttcccgtaaagaagcgatgatgggcgtgctgggcattaccttcgccggttgtcctgatgaagtgatgatcggcagggaatagcatctgcgccggacgcgcatttaccgtctgctcatgatgtgccagacattcgatgttcaaaccataccggtgcgcgagataatcctgacaggcgttatgccgcacgctaaccatcgcactaacttgcggtttaacggcaagtatgatcaacgtttccaggcggcggcgcaatgcatgcattacggattcatcgcatacatacagctgatacgcgttatcttccggcaccaccagcgaaccacgcggacctgccaccgtatgtatatatcccggatgcgcctgcatcaggcagccggtggctaccccaccgttgcgaataaagaaatcaatactcagttcatggcgtagttcgtcatacagcggcgtatagtcacgcgacggtgggcgtggtccttccggccagacgatgccctcttccgttaccgttggcggcacaaagtgagcgtcaggttgaggaaagaagagtttgctgtgatcgtcaaagccacgcgatgtaaaaccgtccagcgcctcgccgccgaggacaatgcgctgaaaaccggcgctgatgcgctcaacgcgtaacacagtcagttcacggaagcgcagatcattgcgaacgcgccagacccttgaattgatacgacttctagctcggtaccccgccacgatggcgagaatgccaatcgaaatccagaataacatgcccgcctggtgccagttgtgtttgatagccaacgccatcaacgcgccgtagcccagcatggtacgaaaccacgccagtgatgtgcgctccggctgcagtcctgggtcggcaatgcgtctggctttgcggaacaccagtcccataacgatcaccgccacgaccatcaatattaagctaatgattaataagctgttggtgtagggcaggtcctctttcagacgcatcgctttttcattgcgtaaccagcgcaagtagccatacatcgctaacccgccggaaaacagacacaacaacaacgccagcagttcgcgaatgacgggcgtggcgaaatctggcgcaagttgatcaagcccaacccccgccgccagaaatcctagtgcagtacggatccacgccagaaaagtacgctcattagccagcgagaagcggtaatcaggcgcttctccgaggcgggaaattttcat

SEQ ID NO: 24712 - DNA, 1344 bp, Homo sapiens
  SIMILAR (1309)..(713): 851254mologous to Escherichia coli carbamoyl-phosphate synthetase subunit B,accession number J01597,Smith-Waterman Score= 804.
  misc_feature (1)...(1344): n = a,t,c or g
tcagaacgtgaatgcagcgccacgttcatcacttatgagtcggtacagcgatacattgtgaaccgggagaagtccacgtcgtaaggccgtacccgttgccgtcagggcagcaattatgtggatgtaattagaaacaggaagcctaggctcggtaccgactacaatctctcggctccgttccaacaggtatgtcgctgctgcaaccgggtaaagcgccgctgcatatgccacccaagcgcaggaagtgtatgacgttaccggtgcgggcgacacggtgatggcgtcctggcggcaacgctggcagcgggtaattcgctggaagaagcctcttctttgccaatgcggcggctgtgcgtggtggtcggcaaactgggaanctccacggtttcgccgatcgagtcgacagcgtatgattgtgctgggcgcactggaagcggtcgactgggtagtgcgtttgaagaggacacgccgcagcgcttgatcgccgggatcttgccagactgctggtgaaaggcggcgactataaaccagaagagattgccgggagtaagaagtctgggccaacggtggcgaagtgttggtgctcaactttgaagacgttgctcgacgaccaacatcatcaagaagatccaacaggataaaaaaggtaaccggaaagcggttcacagatctcgcttcgtacatggcaggcctattacgctgttgttttttcaactttcgggtcgaatccagtcgcaccgacttccaggccgcgcagcgctttttgcagggattcctgctgcgtgcgaccaatcgccatcacttcgccaaccgatttcatctgagtggtcagacggtcgttagcaccggcgaatttttcgaagttgaagcgaggaattttagtaaccacatagtcgatggacggctcgaaggaggccggagtacgtccgccagtgatgtcgttcatcagttcgtcgagggtgtaacccaccgccagtttcgccgccactttaacaatcgggaaaccggtcgctttcgacgccagcgccgaagaacgggacacgcgtgggttcatttcgataacaatcagacgaccgtttttcgggttcaccgcaaactgaacgttggaaccaccggtttcaacgccgatttcacgcagcaccgccatcgaggcggtacgcatgatttgatattctttggcggccaacggttgggctggcgcgacagtgatggaatacccgtgtggatgcccatcgcattgaagttttccatagagcagacgatgaagccgttggcgttttatcaccaccaccttcatttcggactctttcacccgatcaggattatcaatcaccaacccttggc

SEQ ID NO: 24713 - DNA, 3332 bp, Homo sapiens
  SIMILAR (46)..(5): 641254mologous to Escherichia coli carbamoyl-phosphate synthetase subunit B,accession number J01597,Smith-Waterman Score= 44.
ttttattgctaccgccaattccggcttccgccagcttttcgtcaaggtcgcgaccgtctgcgactttctccaactgtgcggcagcatccaggcgagcctgacgttcggcctgacgcgtttgcaggcgttttaaggattctgccgctgtcgaaacgctggaagatgcgccaacggtagaggttgttacagcctgttgtgcacgctgcatggcttcagtggctttaacgacttccatttgctgctcaaactgagcgatacgctgcgctgtcgctgtaactgctttttccacgccatcacgggagacttccagattcgacaacacttgctcttcagcggtaatgagattctcaaggcgcgcgatttcttcagcaacttcgttaatcaacgacggattaacgttcttgcttaacgcttccagcgcacgggcttccagactggctttgcgctcacgtaaatctttcagcttatcgtgacttaatttcacccgcgccagcagatcaacgcgagattctccggcagctatagacaaaaaaaaacctatgggatcctctagagtgacctcagcatcagctaattccaatcgtgctcggtaccagcgctttttgcagggattcctgctgcgtgcgaccaatcgccatcacttcgccaaccgatttcatctgagtggtcagacggtcgttagcaccggcgaatttttcgaagttgaagcgaggaattttagtaaccacatagtcgatggacggctcgaaggaggccggagtacgtccgccagtgatgtcgttcatcagttcgtcgagggtgtaacccaccgccagtttcgccgccactttagcaatcgggaaaccggtcgctttcgacgccagcgccgaagaacgggacacgcgtgggttcatttcgataacaatcagacgaccgtttttcgggttcaccgcaaactgaacgttggaaccaccggtttcaacgccgatttcacgcagcaccgccatcgaggcgttacgcatgatttgatattctttgtcggtcagcgtttgggctggcgcgacagtgatggagtcaccggtgtggatgcccatcgcatcgaagttttcgatagagcagacgatgatgcagttgtcgtttttatcacgcaccacttccatctcgtactctttccagccgatcagcgactcatcaatcagcaactctttggtcggagagagatccagaccgcgggcgcaaatttcttcaaactcttcacggttataagcgataccgccgccgctaccgcccatggtaaaggatgggcgaataatgcacgggaagcccacgtcagcggcaaccgccagcgcttcttccatcgtgtgtgcgataccggaacgcgcggtttccagaccaattttcttcatcgctacgtcgaaacgacggcggtcttctgctttatcaatcgcatcggcagtggcaccaatcatggtgacaccgaactcttccaacacgccctgacgttccagctccagcgcgcagttcagcgccgtctgaccgcccatcgttggcagcaccgcgtccgggcgctctttttcaataatcttgcgtacaacttcccagtgaatcggctcgatgtaggttgcatcagccatttccgggtcggtcatgatggtcgccgggttggagttcaccagaatgacgcggtaaccctcttcacgcagggctttacacgcttgcgcgccagagtagtctaactcacacgcctgaccgataacaatcgggcccggacccagaatccggatacttttgaaatcgggaaaatgcttcacgccctgtttagccactaccgtagcggcagtatgcaaagcggcttgcgaatgcacgatctctgcgccatcgcctggctggtgcgcccggacctgttcactctcaaacccgtgcaaagcagcctcgatgcggtaaaagatgattttgatgtgtttatcgattttacccgtccggaaggtacgctgaaccatctcgctttttgtcgccagcatggcaaagggatggtgatcggcactacggggtttgacgaagccggtaaacaagcaattcgtgacgccgctgccgatattgcgattgtctttgctgccaattttagcgttggcgttaacgtcatgcttaagtgtcaccagggtgaaaacaatactgtagcgtagctttccgtccatcaatgaatgcagcgcaatccccaccactaccgcgacgggcatcagcgccagaaagaaaggccaggtgtagataaagaagaacagcgtgttagagccataaatcaacatcggcatcgccagcgcaaataaccaggagataaaaccgaccacggcaccaggcagtgaccatgtggtttcttcatcctcagtaaggctgtcgttatttgttagtgtaatgttatggctattacgcatatttgatcctgttacattgagatgaatttctgccgattcaggcgcttcgtaaacggaatctattcccgtaaagttgcgcagttcaccggcacgcgctttcttatataagcctttgggatcgcgggcttcgcaaatcgccagcggcgtatcgacaaacacttcgataaagcgcccttctcctacgcgttcgcgaaccatctggcgttcggcgcggtgtggcgagataaatgcggtcagcaccaccagtccggcttcaaccatcaaattcgccacttcaccgacgcgacggatattctctttacgatcggcatcgcccgttgaccggtttaactccttgtttcccggccgttgtttgcaaagttggcaggggggcttgtcccgcgtggggcccatgttggtgggaacgtcgtcctgatgcatatagtctgcgtattctgctatgggctcaacacgtggatccccggtgattccactcttgctgtaattagacgcgtcgtcctcggacacatagccgcgtcggccgcagtggcggccggcgcaggcacatggttggttccacacggcccactctcgttgctctgatacggccgtctggtggtacccctcttgccgcgcgaaaatatctcgtcctgtgtgaacacgattcccctctttgttgcccctgtctcctcgtgtgggagggaacctcttttcttttcctttttccctcccttgctggtgattacgcttggcacgctgtatctgtttgccggaagcgctctgctgctttccggtatggccggagcgacggggtacgaaggtattggtggattcccgatggcgtttacagatttcgctaacctggatgtgctgggactccccgttccgctgattatcttcctgatatgtctcctcgttttctggctctggctgcataaaacccat

SEQ ID NO: 24714 - DNA, 1794 bp, Homo sapiens
  SIMILAR (885)..(4): 431254mologous to Yersinia pestis HmsF,accession number U22837,Smith-Waterman Score=658.
ttaatcatttttcggataccaggctgttgaaaactcaggacgaataaggtctatttcaggttggttatgcagaaaattgtcgggataataaccatagtttttcactccattcagttgtaataggctcatccagtgagcgagttgttgcgaagaaatagcctgatgctgaccatttttctgccagttttgtgcctgtaattctaaaatagatttgtctttagcctgagggatgtttttaatttgattggtccattgtattaaccattggtcagccgatttttctgcgacaccttccagatacggcatagccataatcgcggtccagtcatagctatataggaaatcagcataattctgtgcaaaccaggcttcactttcaggttgtattaccggaagtgcaaaaatatttcgtgcagttttaatatgtggaccgcgaatggcttttacgcgcgcactaagttctaaagtgaagtcagttaacgcacgacttttaaagcgggcccactgtttaaattgctccgggttttgtcgaatttcgctcagactcccgctaaagcctgcttgctgataagccgtgatagccggtgcactggcatcttcataatctgaaagcaaagcatcatcgtggaacaatatgccatcaaaagcagcatgtccggcaagatcttcatataacatgccaacttgtgctctgactctttgctcattgacgttacccgcagaagaagcaccggctaactccgtgccagcagccgcggtaatacggagggtgcaagcgttaatcggaattactgggaactgcatctgatactggcaagcttgagtctcgtagaggggggtagaattccaggtgtagcggtgaaatgcgtagagatctggaggaataccggtggcgaaggcggccccctggacgaagactgacgcctggtagtccacgccgtaaacgatgtcgacttggaggttgtgcccttgaggcgtggcttccggagctaacgcgttaagtcgaccgcacgtgtctctagcgcctggcggtctgcttgcaccaacgccggtatgctcggcaatgcgacgttcccatgcttccccgtctgtagggccttgtcgtccttcactgcccttagtcactgtggtttgcgccgtttgccgtttgtttctggcccgtccgcggttggccccgtttccggacctgttgggtcttgtgtccgctgtctccgtttgcgctttcgtctcttcgttggtcgtgtttcttgtccagtacactctcttcaccagagtccttgaccacttttctcggcagttcccctcgagtttgtgtatacacttaccactgttatacccgccgtcatgagctaccagttgacgatgaaaggagctgtgcacctgcacggcataccctagccccgttgtccgaattgatggatttaccgaaacgcctttgcgggtcacattgttcgcaatccaataattgccggcgcatgaaatattgcgtacatgcgacactcggaactccgcgggggcatccgaagcgccttctacctgcgcataaatgactcccgggtggcgatatatgggcgcgtcatgagtctgctggatggccggcagaagcgtcgtgtgcgcgccgcaatactcttccgcgctttgttcccagcgaatggccactgtgtgtaatcctcgccagtagctaccagtttgggtcactaccagaagtgcctcacgcgtgtgacttaccttgtcggcgcgtgaggaaaccgaaggcgataggcctgtatgcgaggtgtatgtgaaacttggcat

SEQ ID NO: 24715 - DNA, 4751 bp, Homo sapiens
  SIMILAR (1942)..(2715): 971254mologous to Escherichia coli tail-specific protease,accession number M75634,Smith-Waterman Score=1243.
  misc_feature (1)...(4751): n = a,t,c or g
atgaataacaccccccgctacccgcagcgcgttcgcaatgatctgcgcttccgtgaactgactgtgttacgcgttgagcgcatcagcgccggttttcagcgcattgtcctcggcggcgaggcgctggacggttttacatcgcgtggctttgacgatcacagcaaactcttctttcctcaacctgacgctcactttgtgccgccaacggtaacggaagagggcatcgtctggccggaaggaccacgcccaccgtcgcgtgactatacgccgctgtatgacgaactacgccatgaactggcgattgatttctttattcacgacggtggggtcgccagcggctgggcgatgcaggcgcaaccgggcgataaacttacggtggcaggtccgcgcggttcgctggtggtgccggaagattacgcgtatcagctgtatgtctgcgatgaatccggaatgcctgcattgcgccgccgcctggaaacgttgagcaaacttgccgttaaaccgcaagttagtgcgctggttagcgtgcgggataacgcctgtcaggattatctcgcgcacctgagtggcnggggtctgaccgccgtactggacgataacgcctttcggcttctcgatacgcacgatttccagcacatcttccagagttaccggctcgaagtagaggcggttcggaancgccagcgaggcgtgtacgcaacagtagtcgaattcgataccctgaccgatacggttcgggccgccgccaagcaccatgattttttcacggtcggtagacggattcgcttcgcactcttcttcataagtggagtacatcggccccagcccagtgtgttgccaagcgcgcatcggcaaagcctttgcgtttcagctggcgcaggaagtcagcgttcaggccagtatgcccacttccgccactttctcttccagacgcaccagctcttcaatctgtaccaggaccagcggtcaatgttggtcagggttgaagacccgtccacagacagcccgcacggaacgcatcggcgatgtaccagatacgatcggcgcctgcgtctttcagttcgcgacggattttggttaacgcttcncgggtcatccaggctcactttcgggtcgaatcccagtcgcaccgacttccaggccgcgcagcgctttttgcagggattcctgctgcgtgcgaccaatcgccatcacttcgccaaccgatttcatctgagtggtcagacggtcgttagcaccggcgaatttttcgaagttgaagcgaggaattttagtaaccacatagtcgatggacggctcgaaggaggccggagtacgtccgccagtgatgtcgttcatcagttcgtcgagggtgtaacccaccgccagtttcgccgccactttagcaatcgggaaaccggtcgctttcgacgccagcgccgaagaacgggacacgcgtgggttcatttcgataacaatcagacgaccgtttttcgggttcaccgcaaacgtgacacgtttggagaccgaacgcggggggatatgttcaagatccgtgccctgggaagttgtgtccaaaatcgcctgggccgaggctcccgatccgccgggggttacaatccttggtttgaagacgcagcatgcgacggtagtgagcgcgtaacgtcgcgcttcacccgttctcattatcgccagttcgacctcgatcaggcattttcggccaaaatctttgaccggtacctgaatctgctcgattacagccacaagcgtaaaaccgagttaggcgatgaagctgcgttcagcgcaaagctcgacgttttctacgatctctacaatctggcgcaaaagcgccgttttgagcgttaccagtacgctttgtcggtactggaaaagccgatggatttcaccggcaacgacacttataaccttgaccgcagcaaagcgccctggccgaaaaacgaggctgagttgaacgcgctgtgggacaatgttttctcgctggcaatgacggcgtttgcgcgtgaaatcgacccgcataccaactatctttccccgcgtaataccgaacagttcaacactgaaatgagtttgtcgctggaaggtattggcgcagtgctgcaaatggatgatgactacaccgttatcaattcgatggtggcaggtggtccggcagcgaagagtaaagctatcagcgttggtgacaaaattgtcggtgttggtcaaacaggcaagccgatggttgacgtgattggctggcgtcttgatgatgtggttgccttaattaaagggccgaagggcagtaaagttcgtctggaaattttacctgctggtaaagggaccaagacccgtactgtaacgttgacccgtgaacgtattcgtctcgaagaccgcgcggttaaaatgtcggtgaagaccgtcggtaaagagaaagtcggcgtgctggatattccgggcttctatgtgggtttgacagacgatgtcaaagtgcaactgcagaaactggaaaaacagaatgtcagcagcgtcatcatcgacctgcgtagcaatggcggtggggcgttaactgaagccgtatcgctctccggtctgtttattcctgcgggtcccattgttcaggtccgcgataacaacggcaaggttcgtgaagatagcgataccgacggacaggttttctataaaggcccgctggtggtgctggttgaccgcttcagtgcttcggcttcagaaatctttgctcgtgatgttgtggtcggtttgtgtatttgtttgtcttcgttggatgtttggttgtgtggattgttttgtaggtgtagtgtggatgctgagagaacgaagagacaaggaaagaaaggagaagagagcagaaagagaaggagaaaaggatatgagttgtcttatctactcttcgggtggtccgcggttgtgttgttgtttgtttcggatgcggaacaacatcgcgccagccggcatggtggcaacgcttgccaacaacatcccgatgttcggcatgatgaagcagatggatacccgcggcaaagtcatcaactgcgccttcgccgtttccgctgctttcgccctgggcgaccacttaggcttcgccgctgccaacatgaacgccatgatcttcccgatgattgtcggcaagttgatcggcggcgtaacggcgattggcgtggcgatgatgctggtgccaaaagaagacgcgaccgcgactaaaaccttgcggccgtactccccaggcggtcgacttaacgcgttagctccggaagccacgcctcaagggcacaacctccaagtcgacatcgtttacggcgtggactaccaggcgtcagtcttcgtccagggggccgccttcgccaccggtattcctccagatctctacgcatttcaccgctacacctggaattctacccccctctacgagactcaagcttgccagtatcagatgcagttcccagtaattccgattaacgcttgcaccctccgtattaccgcggctgctggcacggagttagccggtgcttcttctgcgggtaacgtcaatgagcaagtactttacaacccgaaggccttcttcatacacgcggcatggctgcatcaggcttgcgcccattgtgcaatattccccactgctgcctcccgtaggagtctggaccgtgtctcagttccagtgtggctggtcatcctctcagaccagctagggatcgtcgccttgtacctgggtaaaaacgagcgtgacactgcacgccgttctaacggcgacggtgttggcggttctatcagctacgaatacgaaggctttggtatcgttggtgcttatggtgcagctgaccgtaccaacctgcaagaagctcaacctcttggcaacggcaaaacgttataacaccggcgagcaaaaaatcgacgtcaccgccttcgaaccaccacgaaataatatgcaaaagtttgataccaggaccttccagggcttgatcctgaccttacaggattactgggctcgccagggctgcaccattgttcaaccattggacatggaagtcggcgcgggaacctctcacccaatgacctgtctgcgcgcgctggggccagaaccgatggcggctgcttatgttcagccttctcgtcgcccgaccgatggtcgctacggcgaaaaccccaaccgtttacagcactactatcagttccaggtggtcattaagccatcgccggacaatattcaggagctgtacctcggttctctgaaagagctgggcatggacccgactattcacgacatccgtttcgtggaagataactgggaaaacccgacgctgggtgcctggggactgggctgggaagtgtggctgaacggcatggaagtgacgcagttcacttacttccagcaggttggtggtctggagtgtaaaccggttaccggcgagatcacctacggtctggaacgtctggccatgtacattcagggcgtagacagcgtttacgacctggtctggagcgacggcccgctgggtaaaaccacctacggcgacgtgttccatcagaacgaagtggagcagtccacttacaacttcgaatacgcggatgtggacttcctgttcacctgcttcgagcagtacgagaaagaagcgcagcagctgctggcgctggaaaatccgctgccgctgccagcctacgagcgtattctgaaagccgcccacagcttcaacctgctggatgcgcgtaaagccatctccgtcaccgagcgtcagcgctacattctgcgcattcgcacctga

SEQ ID NO: 24716 - DNA, 671 bp, Homo sapiens
  SIMILAR (7)..(669): 961254mologous to Escherichia coli gtg start, alternate starts possible,accession number U00039,Smith-Waterman Score=1093.
ggatgctgtgaaacggcttccgtggtcgtgaaccgcagctggatgcgatgccggagcagtgcggcattaagggctgatcattcagtgacaatctgctgaattgatgaaacaggcaccggagacggtgccttatctgttctggcggcccgctgggggctggagcacgatgaagacaacctgatggcgctggtgttaacgccggaacatctggaattgcgcaagcgtgatgagccaaaacttggcggcatctttgttgattttgttggcggagcgatggcgcaccgacgcaaattcggcggtggtcgcggtgaggcggtggcgaaagcggtgggcattaaaggcgattatttgccggatgtggtggatgccactgcaggacttgggcgcgatgcctttgtactggcttcagtcggctgccgcgtgcggatgctggagcgtaatccagtggttgccgcgctactcgacgacggcctggcgcgtggttatgcggatgcggaaatcggcggctggttgcaggagcggttgcagttaattcacgcctccagcctgacggcgctgactgatattaccccgcgcccgcaggtggtttatctcgacccgatgttcccgcataagcagaaaagcgcgctagtgaaaaaagagatgcgtgtctttcagtcgctggtgggacc

SEQ ID NO: 24717 - DNA, 1338 bp, Homo sapiens
  SIMILAR (922)..(1335): 971254mologous to Escherichia coli heat shock protein dnaJ,accession number M12565,Smith-Waterman Score=698.
atgcgcgataagcgtttatacgcgattcaagcttgtgcgctatacgcctattacgcctttaaccgtttaaccgatgtacgtcttaaaaaatatgggattcggcggcccaagtttctcattcccgggggtcaatatgggaataatccggccacccaaaacaaaaccttaaaaagtgctcaccatggaaaacgtttttcgggggaaaaacctccaaagattcttccggctgttgagacccagttcgatgtaaccccttgttgcccccaattgtttttcagcatctttactttcaccaagcgtttcgggttccgccggatcaggggtccaataatcctcgaaactctggcagaaatcaagaaacgggtcgcggtgggcccatctccgtcctggggccgtttcccgcacgctctcagccatattttcgccggtggttatgccgcaggttactacagctacctgtgggctgacgtactggcggcagatgctttctcgcgctttgaggaagagggcattttcaaccgtgaaaccgggcagtcgttcctcgacaacattctgagccgtggcggttcagaagagccgatggatctgttcaaacgcttccgtggtcgcaccggagacggtgccttatctgttctggcggcccgctgggggctggagcacgatgaagacaacctgatggcgctggtgttaacgccggaacatctggaattgcgcaagcgtgatgagccaaaacttggcggcatctttgttgattttgttggcggagcgatggcgcaccgacgcaaattcggcggtggtcgcgcggctatcccctatcgcttttgccctgagcgggatagacgtcccaatgatacttttgcttttggacatatccgcttttgttcccagtttgcatggaccgtaaagcgggcaaacatggcggcaccggcaggcgatctgtacgttcaggttcagtttaacagccacccgattttcgagcgtgaaggcaacaccctgtattgcgaagtcccgatcaacttcgctatggcggcgctgggtggcgaaatcgaagtaccgacccttgatggtcgcgtcaaactgaaagtgcctggcgaaacccagaccggtaagctattccgtatgcgcggtaaaggcgtcaagtctgtccgcggtggcgcacagggtgatttgctgtgccgcgttgtcgtcgaaacaccggtaggcctgaacgaaaggcagaaacagctgctgcaagagctgcaagaaagcttcggtggcccaaccggcgagcacaacagcccgcgctcaaagagcttctttgatggtgtgaagaagttttttgacgacctgacccgctaa

SEQ ID NO: 24718 - DNA, 638 bp, Homo sapiens
  SIMILAR (636)..(565): 1001254mologous to Escherichia coli histidine-tRNA synthetase,accession number M11843,Smith-Waterman Score=120.
tttgatgggttatcaagggttttcagcgcggcatcagcctgcttgagctgtacctgaacgcgagcaagacgcagatttatcacggctttgagattttcatcgctcgtgtctgccagcccctgttgtaactgggcggcagctttctctagttcatttttgtcaacaaattgtgcggtaaccgcattttgataggcaagagaagcggagcgtgcagaatcaacctgatggctgttccagtagcgccagccaatcagtgcgccaacgcccaaaatcaccccaacagccagtgcagagcgcaaatccttcactactgctgtgccgttagccacttcagactcacccagcaccacagcaacgcgggcaccccatttatcagcacgggcaaactgtttcttaaagttgccgccgccgtggttggtcatcaatttcacgcccggtaattcatcacgcagacgctcagctaatgccatagccgcagattgtgtatcagcacctgaagccaccaggtatatatcgacaacaggatcggctttaaattccggattaacggcctgtactaacatacagacgttcgaggcccatagcaaaaccgacagccggtgttgcacgaccgcccagttgttccacaagaccgtcat

SEQ ID NO: 24719 - DNA, 1398 bp, Homo sapiens
  SIMILAR (483)..(4): 1001254mologous to Escherichia coli similar to,accession number D90888,Smith-Waterman Score=821.
ttaaggggtagtaatcaccactgcgacgcggcggttctcggcgcggccctgggcggtcttgttactggctatgggatatttttttcctaaaccctgtgtggtgagattgctgcgtggaatttgtccacccatagcccatgcatcggccacgacattcgcccgtttcaatgataagccttcgttgtaactgtcttcaccatagttatcggtgtgtccatccatacgggcatgtgttagccctgtcgaggccaatttagctgccatggtttggatctgttgctggctttccgggagcaatttgtagtcattttttgcgaacagaatggcatctgataagcccagcgaccagtcgccggcggattcagtaaatccataagattgcatagcggcgacttgctcaggagtaaactttccctgaggggactggcagccagtcagtattagtgaggtgaaaaccaggggtgctaccaggtgctttatcatatcgatatatccttgtatctcacagttttcggcacgctggtgtttgccttgcttatcacctttgctcagcaatgcttcaccacgcaggtcggcaacaatggcagcccacccttcacctttgatggtatcaagggttttcagcgcggcatcagcctgcttgagctgtacctgaacgcgagcaagacgcagatttatcacggctttgagattttcatcgctcgtgtctgccagcccctgttgtaactgggcggcagctttctctagttcatttttgtcaacaaattgctgcgcaagttccaaagaagccagcgcaccataagtatttttattttcagcagcaaatttttccgccgccgggatgctatccggtttgccttcgctcactgcggtaaccgcattttgataggcaagagaagcggagcgtgcagaatcaacctgatggctgttccagtagcgccagccaatcagtgcgccaacgcccaaaatcaccccaacagccagtgcagagcgcaaatccttcactactgctgtgccgttagccacttcagactcacccagcaccacagcaacgcgggcaccccatttatcagcacgggcaaactgtttcttaaagttgccgccgccgtggttggtcatcaatttcacgcccggtaattcatcacgcagacgctcagctaatgccatagccgcagattgtgtatcagcacctgaagccaccaggtatatatcgacaacaggatcggctttaaattccggattaacggcctgtactaacaatacaagacgttcgaggcccatagcaaaaccgacagccggtgttgcacgaccgcccagttgttccacaagaccgtcataacgaccgcctagaccggcatctccaacgaagagaatcaagttaactcgtacgtgacacat

SEQ ID NO: 24720 - DNA, 1579 bp, Homo sapiens; identical to SEQ ID NO: 17769
  SIMILAR (778)..(1086): 1001254mologous to Escherichia coli histidine-tRNA synthetase,accession number M11843,Smith-Waterman Score=513.

SEQ ID NO: 24721 - DNA, 3020 bp, Homo sapiens
  SIMILAR (1782)..(2555): 951254mologous to Escherichia coli K12 putative transcriptional regulator LYSR-type,accession number AE000344,Smith -Waterman Score=1247.
atggccaaagccaatcccattcctgtcccccgctacccaagggactcccagtctgtatgcacaaggcgggatgtgaagtctggatgtgcaagaaacccagctgaagccgctcgttgcctcgaatgtaaatacgtttgcagcaagtgtgtggatgtctgcccgaaccgcgccaacgtctccattgcggtcccaggcttccagaaccgtttccagacgctgcacctcgacgcttactgtaacgaatgcggcaactgcgctcagttctgtccgtggaacggtaaaccgtacaaagacaaaatcaccgtcttcagcctggcgcaagactttgataacagcagcaacccaggcttccttgtggaagattgccgggtacgagtacgtctgaataaccaaagctgggtgttaaacatcgacagcaaaggtcagtttaacaacgtaccaccggagctgaacgatatgtgccgcatcatcagccatgtccaccagcatcatcattatctgctgggccgcgtggagctacacccggcaaaagtgcaggaaggcgttgatatcgccatcgaaaacgatgtgattgtcgctatcggcgatgccctgacgcaacgctaccccgacgccagcttcaaagagatgcatggccggattgtgatgccagggattgtctgctcgcacaaccatttttactcggggctttcccgcggaattatggcaaacatcgccccttgcccggatttcatctcaacgctgaaaaatctctggtcgcgaaatcacccagcgcaacgggcagaccatcaagcgggtttttaatcaccagaccgacaccggttagcggcaatgagcagcaggaacagaccgataccaatccccgtgccgtgcgccacaccgtgaggcaagttgcgcaaaatccagctacggatacccgtggcagaaattaccgtaaacagcacacccatcaggaacacggcacccagcgcgacaggtacgctaatatgttgccccagcaccaggctgaatgcggtaaacgctgtcagggagatggcgcaaccaatcgccaacggcagattagcccacagacccatcacgatagaaccgagtccggcaaccagacaggttgcaacgaaaactgccgcaggcgggaagcctgctttacccaacatacctggaacgacgatgaccgagtagaccatcgccagaaacgtttgaagcgcagattttcacgcttgagatttcatcgtcgtgttgccagcccctgttgtaactgggcggcagcttctctagttcattgtggtcaacaaaatgtgcgcaagttccaaagaagccagcgcaccataagtatttttattttcagcagcaaatttttccgccgccgggatgctatccggtttgccttcgctcactgcggtaaccgcattttgataggcaagagaagcggagcgtgcagaatcaacctgatggctgttccagtagcgccagccaatcagtgcgccaacgcccaaaatcaccccaacagccagcactttgccattttcagcaaaaaagcgtttaaccgcttctacctggtcgttttcgttctcatgctcatgctaattgcctatagcgcgctagatttgtgtattcagcgacctgaagccacgcaggtatatatcgacaacaggatcggctttaaattccggattaacgtaatagccagcaacaggggaacccccgattttaattggggaccttattgggagaaaaattcgttaaaaaatatccccccgcaggccccaagaaacattttccaaaagtccacaaatatcgccagggaaaaaacgcttgagcaggagttttcagtccagttatttgagaaaattggccgacggatgtgccttacccgcgaaggaaaaaagttgctgccgcacatttatgaacttacccgagtgatggatacgcttcgtgaggctgccaaaaaggagtcagatccggacggggaactacgcgttgtttcgggcgaaacgttgctctcttaccgaatgccgcaggtgttgcagcgttttcggcaacgcgccccaaaagtgcgtttatcgttgcagtcgctgaactgttacgtgatccgtgatgcgctactgaatgatgaggccgatgttggcgtcttttatcgtgtagggaatgatgatgctctgaatcgacgagagttgggtgaacaatcactggtgctggtggcttcaccgcaaattgcagatgtcgattttactgagccgggaagacataacgcctgtagctttattatcaacgaaccgcaatgtgtcttccggcagatatttgagagcacgctgcgtcagcggcggatcacggtggaaaacaccattgagcttataagtatcgaaagcatcaagcgttgtgtcgcggcgaatatcggggtcagctacctaccgcgctttgcggtggcaaaagagttggagtgcggagaattaattgaattgccttttggcgaacagtcgcagaccattacggccatgtgcgcacatcatgctggaaaagcggttagcccggcgatgcacacttttattcatgcgctttattcatgccggatgcggcgtgaacgccttatccgggctacaagatcgtgccaattcaatatattgcatgaaccacgtagggctgataagcgtagcgcatcaggcagtttgcggttgcaagaatttaattaccaggataaaccttgcatggagattcgcatcaggacatatgagaagacacccatacggatggataaaggcctaacaaattttgggtcacgatggattttacccgagctcgcccacaaagagaaggacgaagaaacacaacagagaagaaagagcaagagagacagtaggagagaagagacagacacgaaaaagaagacgagagacaaagcaacgaaaagagaaaaagataaagaaatagaagaaatggcttcaatatccatcaccagtagatgcgaagacaaattggagaatttttcgtcaatgaaatactatacagaaatagaaaataattaa

SEQ ID NO: 24722 - DNA, 1356 bp, Homo sapiens
  SIMILAR (561)..(4): 991254mologous to Escherichia coli K12 putative transcriptional regulator LYSR-type,accession number AE000344,Smith -Waterman Score=941.
ttatccagccacaaaactctcttcaacacactgaataaaagtgtgcatcgccgggctaaccgcttttccagcatgatgtgcgcacatggccgtaatggtctgcgactgttcgccaaaaggcaattcaattaattctccgcactccaactcttttgccaccgcaaagcgcggtaggtagctgaccccgatattcgccgcgacacaacgcttgatgctttcgatacttataagctcaatggtgttttccaccgtgatccgccgctgacgcagcgtgctctcaaatatctgccggaagacacattgcggttcgttgataataaagctacaggcgttatgtcttcccggctcagtaaaatcgacatctgcaatttgcggtgaagccaccagcaccagtgattgttcacccaactctcgtcgattcagagcatcatcattccctacacgataaaagacgccaacatcggcctcatcattcagtagcgcatcacggatcacgtaacagttcagcgactgcaacgataaacgcacttttggggcgcgttgcccaaaacgctgcaacacgtggcactcggtaagggtggggctgggctggaatccctcatcacagtcgcaccggaagctgcccgcggtgttgacacagcggccgttgacacagaggtcaggctgagcgtggcattcattgtcatgtagcaccacaacctgcatcgccagtttaatttcttccggctctttcagggtagaggcattcacgcggtcgctcagcacttcgtcagatttcgccagaatgttagatacacgtttgttcgccgccgccagtgcagcagctgcatccagggtacggaaatgcgataccgctttcatacgggcatcgaaatcagccggacgagtcggacgacgcgccagtaccgcctggatggtgtcaacggtataaccttcatcaaaaatcaacagcgcattgtggcggttacacaattcacgcagaccttgtaaaaacgcgttgctggctggcaccacaccgccttccccctggtccaggcaggtagtagcagtagcatccggtgtgtacccggcctgacagtggcagcggaaggagccaaggctgttgatgcactccccatgagcacacaggtgagcaagcatacggcattcatctacatctgaattagctgatatcaggagggagacattcctcttactgctgctgatgggattgctaaacttggacgatgataacttggagtttccagaactcaacttctttacagcatgagggccttggaaggtctgcgtgttgtggtggagctttgcaaaaaccttatttcgagcatccaggagcttcatggctcttaactgcat

SEQ ID NO: 24723 - DNA, 2949 bp, Homo sapiens
  SIMILAR (1043)..(1135): 481254mologous to Escherichia coli DOLICHOL-PHOSPHATE MANNOSYLTRANSFERASE (EC 2.4.1.83) (DOLICHOL- PHOSPHATE MANNOSE SYNTHASE) (DOLICHYL-PHOSPHATE BETA-D-MANNOSYLTRANSFERASE), accession number D90856,Smith-Waterman Score=57.
atgcccgttcgcacgctgtttgagatgacacttggcgaaacgttcttccttaatgccaaactgccaaccggtaaagaatttatgccgcgtgaaatcagtttgttgattgctgaagagggaaatccgctgagcagccaggaaatcctggaaggcggtgaatcgctgatattatcggaagtcgcagagccgccagcacaaatgattgattcactcaccaccttatttaaaaccattaagccggtgaagcgtgcttttatttgttcaattaaagagaacgaagaggcacagcctaatttacttattggcattgaagccgatggtgatatcgaagaaattattcaggcgacgggaagtgtagcgaccgatacattacctggcgatgaaccaatcgatatttgtcagcttgagcaggagttttcagtccagttatttgagaaaattggccgacggatgtgccttacccgcgaaggaaaaaagttgctgccgcacatttatgaacttacccgagtgatggatacgcttcgtgaggctgccaaaaaggagtcagatccggacggggaactacgcgttgtttcgggcgaaacgttgctctcttaccgaatgccgcaggtgttgcagcgttttcggcaacgcgccccaaaagtgcgtttatcgttgcagtcgctgaactgttacgtgatccgtgatgcgctactgaatgatgaggccgatgttggcgtcttttatcgtgtagggaatgatgatgctctgaatcgacgagagttgggtgaacaatcactggtgctggtggcttcaccgcaaattgcagatgtcgattttactgaatgtccccagcatatcagcctggagtttccattcaggaaatttccccagctccccagaccctcccagacttgcctcctccctcctgacaaagccccagccctacccatagccccagccaccaccccctttgaggagagaaggtgctgggttggaaaaagagttgggggggagacgagttcgggtaaagggttcgggatgccagccgtggatatgcgggaaagtcccggtgtttattcccgttattacggagcaggaaagcttccaggaattaatcagcgcaccaccacagcctgtgaatcgttggggaaagagtatgagatcctgatgattgatgacggcagtagcgataattccgcgcatatgctggtcgaagcctcacaagcggagaacagccatattgtgtctattttgcttaaccgcaattacggccaacattcagcgattatggcgggattcagtcacgttactggcgacttaattattacccttgatgccgatctccagaatccgccagaagaaatcccccgcctggtggcaaaagccgatgaaggttacgacgtggtagggactgtacgccagaaccgccaggacagctggtttcgtaaaaccgcttcgaagatgattaaccggcttattcagcgcaccactggcaaagcgatgggtgattacggttgtatgtgcgcgcctatcgccgtcatattgtcgatgcgatgttgcactgccatgaacgcagcacctttatcccgattctggcgaatatcttcgcccgccgtgccattgaaattccagtacatcatgccgagcattcctgagaaagagaacctcattgacaaaggaaagtcagttggggccaaggtgctatttctgaaagatatcaaccgcagcatcaaacacaccttcctcgactttggcgatgacgacttcaccaatggcaagccgcacccgatgattgaccccaccaaccgcatcagtcgcttgatcgaagaggcgcgcgatccagaagtggcggtgatcgtgatggattttgtgctcggatttggatcgcatgaagatccggtcggctccaccatcgagacgatcaaagaagcgaaagcgatcgccgctgccgaaggacgcgagttgatcattctcgcctatgtgctgggtaccgatcttgatacgccatcgggaggaagcctgatgagccagtcactgtttagccaaccattgaacgttattaacgtcggcatcgccatgtttagcgatgacctgaaaaagcagcatgtagaagtgactcaactcgactggacgccgccggggcagggcaatatgcaggtggtgcaggcgctggataacattgccgattcgccgctggcggacaaaatcgccgccgctaaccagcaggcgctggagcgtattatccagtcgcatccggtgctgattggttttgatcaggcgattaacgtggtgccgggcatgacggcgaaaaccattcttcacgccgggccgccgatcacctgggaaaaaatgtgcggcgcgatgaaaggcgcggtcaccggagcgctggtgttcgaaggactggcgaaagatctcgacgaggctgagtgctgtactgtgcatcgagtgagagtgaacgtattcgatgagcgcttgcatgacctctcgcagtgcctgttgctggatgggtatatggtccacgacaagaaactgctgcaagccgatccatccatcgccgatgcggcccccatggaggatgatctctatgaggccatcatcgacaagatcaatgattcggctgaagctttccgtgccagtcctccggactacaacgcagctttaacgaatgcgcgggtcgctctcgaaaccctggctgtggatgtcgccgctggcgtggcacagcagcatccaggtgtcgccacatacaacccgacaagctggggctcggtgattgcatttctacgccagtgtggcgaaatcacggtcgaagaggagaaaggcttggccggggtctttggattcctcagccctggcgctcaccgccccatcggcattccgcaagagcaaatggctcggctgggacgctccttcgccttgaacatgtgctggttccttttgcacaaccggcttgctcgcagtggcaactga

SEQ ID NO: 24724 - DNA, 2544 bp, Homo sapiens
  SIMILAR (1911)..(1432): 961254mologous to Escherichia coli PTS SYSTEM, FRUCTOSE- SPECIFIC IIBC COMPONENT (EIIBC-FRU) (FRUCTOSE- PERMEASE IIBC COMPONENT) (PHOSPHOTRANSFERASE ENZYME II, BC COMPONENT) (EC 2.7.1.69),accession number D90868,Smith-Waterman Score=772.
ctatttaacttgcatcatgcgacaaaaactcgaggctttttgctgatttatgccagcgcaactgtgctctaagatgtttcgctggtttattaactgatgattgaagatcccatggaaaataatgaaattcagagcgtgttgatgaacgctctctccctccaggaagtccacgtttccggcgatggcagccactttcaggttattgccgtgggtgagttgtttgacggcatgagtcgggttaaaaaacagcagacggtctatggtccgctgatggaatatattgcggataaccgcattcatgctgtgtcgatcaaagcgtatacccctgcggagtgggcgcgcgatcgcaaactgaacggcttttgagctatgggcgattcgccggtagcggatatgaattgttaactgagaacaaactaaatggataaatttcgtgttcaggggccaacgaagctccagggcgaagtcacaatttccggcgctaaaaatgctgctctgcctaatctttttgccgcacttttgctgattaccaccggagagcgaaccaatttgcgtccgatgacccggcgtttttacccgcatcgaatcaatcacccactgggtatcgcttttcatccgcgagttatccagtaaaccaactttatttttgtagttgcgaatattggaaattaacgagttaaaaccaatatccagataggcataaattcccgttgagcggcgctcctcagttaccagtgcaaatccatggtttatggcttcgttggcattatggttattgatcggcaataccgaatcaaacgagacatcgcgaatcgacggctggcgcagtgacgtcaggttacgtacctcgaggatgacttcgcccggtttgttttctttgtcagggaaacgctggttagctcgtactaaaggatgtgcgatgatatcgcgtacggtgattgataacgacaactgtaccagtaagttttcgcgcttttttgccacccgcgaagaagcagagtcttttatgaccaaactgaaagagcttgccgccgctacatcctctgcagatgaaggggccagcgtggctggtgaataaagccctggagctcgccagacataatgacgctcacctgacgttaattcatattgatgatggcttaagcgagttgtatccgggtatctacttccctgcaacagaagatattcttcaattgttgaagaataagtcggataacaagctgtattaactgacgaaaaatattccatggccgaagacaaaaccgtatggcccgtgtctattgcccgtccggacgtaatgttcggctctgcgggctcttcagcactgtgtgttccgcaccctgtggttgcggaagatccagggggggtttttacccggggggcactgcttccagtccctttatatgcgatccccggagactctcctgccccgaggctatcgattaacaatttgcctttacggaacatcatcagacgcaggaacaccaccatcagcgcagttatgactgcccccagcgcgatccccgccatatagacgcccaggttagtgaccagcggccatgcccagatagcggactccgggaaccattgcactgcgcccagccagacagcggcggttgagccgacaatagcgccgaccatatacgacggaatggcggtgatggggctttccagcgcaaacggaatcgcaccctcactgatccccataaacgccaggaacatggcggtcttaccctgcggataaagttgagcgttgaacaggcgtttgccggttaaacgacggtcgataatggtcgccagccccagaccaatcggcggaataacgatagcgatagaacgagcggtgaccggtaatacgtggtcagtggtaaagctgaaggcaacaaaaccttgctgaggtcgatctagaggatcccactcataattgcgatgccagtagtcacggtcgcgccagtgaccaccgtcccagtaattaccgtaatgatcgcgatcgccaatttgtaatttgattgatggcagtagggtgatttcacctgcgtttgctgctaataacagccatgccggaagcatgacgatacagagcagcggtagcaatgtggtattgggtacaacgactgccgccataaaaagacttaaccagccatcgcgtgttaccaccagcacgatgccgagaatagcgcaagaaacggttattgccgctggtacggcgggaacgtgctcatgcagcatcaaccctaatgccacgccgacaaacactgccgggaagattcgcccaccgcgaaagccactggcggcagcaacgaccaaggcggcaagtttaattaccgccagcaaaaagtaatcgctggtgctgaaagcgatagcaatgagcattaatagtcgcttgccaatacgtttcatgtaatagcctgcgattaacatcatcggaatttccagaccggcagcgataccaatcatttctccagtcagtttatcggttagatgcagttcatcaataataaatagcggcatatttatcatgtagagattattcgccgcccacat

SEQ ID NO: 24725 - DNA, 1245 bp, Homo sapiens
  SIMILAR (542)..(724): 591254mologous to Escherichia coli K12 putative transcriptional regulator LYSR-type,accession number AE000179,Smith -Waterman Score=150.
cgtcagggcgcctctagaggatcgcaaactgaacggcttttgagctatgggcgattcgccggtagcggatatgaattgttaactgagaacaaactaaatggataaatttcgtgttcaggggccaacgaagctccagggcgaagtcacaatttccggcgctaaaaatgctgctctgcctaatctttttgccgcactactggcggaagaaccggtagagatccagaacgtcccgaaactgaaagacgtcgatacatcaatgaagctgctaagccagctgggtgcgaaagtagaacgtaatggttctgtgcatattgatgcccgcgacgttaatgtattctgcgcaccttacgatctggttaaaaccatgcgtgcttctatctgggcgctggggccgctggtagcgcgctttggtcaggggcaagtttcactacctggcggttgtacgatcggtgcacatatcgtgatggataaagtcagcgttggcgcaacggtgaccatcatgtgtgctgcaatcctgacggaaggcgccacgattattgaagtattttattttttaccgctggcaatcggtaaatttaatgagctgtatcccaatattaaagtgcggattctgggaacaaggcacgaataattgcatgggaatcggtgctgtgtaacggaatcagactttgggcataaacatggaacaacgtcacaaattcatccattggattttaccccactgggtccaacggaggccgttcgtgctgggcctgtcggcgtgaccatccattggccaaaaagcagcttgtagaatggcaggagttagtgggttacaaaatgattggcgtacgctcctccagcggcaaccgactgttgatagaacaacagctggccgacaagccctggaagctggactggttttacgaagtgcgtcatctttcgacgtcattaggactggtggaggcgggactggggatttcggcgcttcctggcctggcaatgcctcatgcgccctattcttcgattattggtatcccattggtggaacccgttatacgtcgaacattgggaataattcgccgtaaagatgccgtactttctccagcagcagaacgcttttttaccttgctgagtgatttttgccctggagtcccaagtgaagacaatatatttgaatccccggctagtcaacaacatgaatatattgggtcaaggcaatgttttctaatgccgagtgaaacgacaggaacgatgcatgtctag

SEQ ID NO: 24726 - DNA, 840 bp, Homo sapiens
  SIMILAR (280)..(756): 991254mologous to Escherichia coli MukE,accession number D26440,Smith-Waterman Score=805.
atggcggagttgggtaaacgcagtagcgtggccgtctcctggattgggaaagtgaaaaccactgcccagatggtggcgttggcatggctgctgtggcgtccgcccatttgggttgagtacgccggtattgcacttttctttgtggctgcggtactgactctgtggtcaatgttgcaatatttgacgctgcgcgtgcagatttgcttgatcagtgatcgtttcggcgtaattttcagcaaacgatcaaaagtggtgaaaaatatcgttgactcatcgcgccaggaatatctggaagagttttacgcgcgttataacgttgagcttattcgcgcaccagaagggttcttctatttacgcccacgttccaccacgctgatccctcgttccgtcttgtcggaactggatatgatggtcgggaaaatcctctgttatctctatctcagcccggaacggctggcgaatgaggggattttcacccagcaggaactgtacgacgaactgctcaccctggccgatgaagcaaaactgctgaaactggtgaacaaccgttcaaccggttcagacgttgaccgtcagaagttgcaggagaaagtacgttcttcgctcaaccgtctgcgtcgtttaggcatggtgtggtttatgggccacgacagcagcaagtttcgcattaccgaatcggtgttccgcttcggagccgatgtgcgtgctggcgacgatccccgtgaagcacagcgtcgcctgattcgtgatggcgacgaatgccgattgaaaatcatctgcaactcaacgatgaaaccgaagagaatcagccagatagcggagaggaagaataatgattga

SEQ ID NO: 24727 - DNA, 1431 bp, Homo sapiens
  SIMILAR (25)..(675): 941254mologous to Escherichia coli biotin sulfoxide reductase,accession number U00039,Smith-Waterman Score=1118.
atgaccgacatttcccgatattcgtttaactggtggcaggcggtgccaacttactcatcatcagataccaatcgcctgatccgtgcctggcaaaaaccggagctggtggtgatctctgaatgcttctggacggcggcggcaaaacacgcggatatcgttctgcctgcgactacctcttttgagcgtaatgatctcaccatgaccggtgattacagtaatcagcatctggtgccgatgaagcaagtggtgccgccacgctatgaagcgcgtaatgattttgatgtttttgccgagttaagtgaacgctgggagaagggcggttatgcacgttttacggaaggaaaaagtgagctgcaatggctggaaacgttttataacgttgcccgacagcgcggggcaagccagcaggttgaattgccgccatttgctgagttctggcaagccaaccagttaattgagatgccggaaaacccggacagcgagcggtttattcgcttcgctgatttttgccgcgatccgctggcgcatccgttaaaaaccgccagcggcaagattgaaatcttctcacagcgtattgccgattacggttacccggattgccctgggcatccaatgtggctggagccggacgaatggcagggcaatgccgaaccagaacagttgcagatgctcgccgggatgattgacctgatgccgtcgtcgatggcgttgctggcaccaaacgtgaactcgtatcgccgcttccagccgggaatgcgtccgtggggccataacaaccgcaccgtcgccctgcgtattccgtgcggcgaccgtcataatcaccgcgtggaatatcgcgtggcgggtgccgatgccaacccatatctggtgatggcagcgatttttgccggtattttgcatggccttgataacgagctgccgttgcaggaagaagtcgaaggcaacgggctggaacaggaaggcttaccctttccgattcgccagagcgatgccctggacttgtgtttcagcgacatacttgtatctccgaacatgtacattgacgatggcatgaaacgcgactggccagttatgaaacagtgcgcgctgcaacgcagatggcgtatattgccagatcactacggtactgaaccagctgaaaaacgacccggattcgcgccgcattattgtttcagctacgcgttattggtgcatatgatggcgcagcagtgcgatctggaagtgggtgattttgtctggaccggtggcgacacgcatctgtacagcaaccatatggatcaaactcatctgcaattaagccgcgaaccgcgtccgctgccgaagttgattatcaaacgtaaacccgaatccatcttcgactaccgtttcgaagactttgagattgaaggctacgatccgcatccgggcattaaagcgccggtggctatctaa

SEQ ID NO: 24728 - DNA, 1447 bp, Homo sapiens
  SIMILAR (242)..(919): 861254mologous to Escherichia coli ilvG,accession number M32253,Smith-Waterman Score=1004.
aacagctacacccaataagttagatgaatatgaattagtcggagaactggcgcttacaggcgctctgcgtggcgttcccggcgcaatctccagtgcaactgaagctattaagtcgggcagaaaaattatcgtcgcgaaagataacgaagatgaagaacaaggaaagcgaggactggaaattaccgctgctggcgggcacaaccttttactgattgggccgccgggaacaggtaaaacaatgctcgccagccgtattaatggcctgttgccagatttaagcaatgaagaggcactggagagtgctgcgatattaagtctgctgcgtgatgaacattcctggcgttacgaccatcccggtgacgctatctacgcgccgttgttgttaaaacaactgtcggatcgtaaacctgcggattgcgtcgtgaccacagatgtggggcagcaccagatgtgggctgcgcagcacatcgcccacactcgcccggaaaatttcatcacctccagcggtttaggtaccatgggttttggtttaccggcggcggttggcgcacaagtcgcgcgaccgaacgataccgttgtctgtatctccggtgacggctctttcatgatgaatgtgcaagagctgggcaccgtaaaacgcaagcagttaccgttgaaaatcgtcttactcgataaccaacggttagggatggttcgacaatggcagcaactgttttttcaggaacgatacagcgaaaccacccttactgataaccccgatttcctcatgttagccagcgccttcggcatccatggccaacacatcacccggaaagaccaggttgaagcggcactcgacaccatgctgaacagtgatgggccatacctgcttcatgtaacaatcgacgggacaccccgcgttgatccgccaaagaaaccgctgaagatccgcaaaattgagtttgttgaaatttacgagccgttttccgaaggccaggccaaagcgcaggctgaccgctgcctgtcgtgcggcaacccatactgcgagtggaaatgcccggtacacaactacatcccgaactggctgaagctcgccaacgaggggcgtatttttgaagcggcggaactgtcgcaccagaccaacaccctgccggaagtttgcggacgagtctgcccgcaagaccgtctgtgcgaaggttcctgcactctgaacgatgagtttggcgcggtgaccatcggcaacattgagcgctatatcaacgataaagcgttcgagatgggctggcgtccggatatgtctggtgtgaaacagaccggtaaaaaagtggcgattatcggcgcaggcccggcaggtctggcgtgtgcggatgtcctgacgcgtaacggcgtaaaagccgttgtcttcgaccgtcatccagaaattggcgggctagccgaagacgacctagaggcaggcagcccgggctga

SEQ ID NO: 24729 - DNA, 1788 bp, Homo sapiens
  SIMILAR (1)..(411): 951254mologous to Escherichia coli RF-3/Tos,accession number D17724,Smith-Waterman Score=665.
atggacccgaaacaccgcgaccgcgtggcgtttatgcgtgtggtgtccggtaaatatgaaaaaggcatgaaactgcgccaggtgcgcactgcgaaagatgtggtgatctccgacgcgctgacctttatggcgggtgaccgttcgcacgttgaagaagcgtatccgggcgatatcctcggcctgcacaaccacagcaccattcagatcggcgacacctttacccatggtgagatgatgaagttcaccggtattccgaacttcgcaccagaactgttccgtcgtatccgcctgaaagatccggtgaagcaaaaacagctgctcaaagggctggtacagctttccgaagagggcgcggagcaggtgttccgttcaatctccaacaacgatctgatcgttggtgcagttgacgttcgcagcaaaatgcatgacgccttattggattacatggacaaaattcgcgatccgttccgcagttaccaatggagtctgcgtccgtggcgtaaagatgcacggccgcgctggatgggggcgtttcgtccacgtccacaagatggctattcgccagttgtacgcgactatgacaccggcctaccgacacaaggggtgaagcttgagagacctgtatctacgttccgacaactgaaaagcggggacattgatcatcaagacgaacgagtcatcgagctcaacattgcgttaagcaaactgcttaaggtctccaggcagttttacctgacgggaccgttcgttaacagcattcgcgtcgcgctagatgttaagacgttcggcatcaaagcgaatgacgacaaagccaagctcaaagcgctgggggaaatcgcgcacgcatgtgtcgacgcaacgatcatttattgcaagtcaccaactgttgcgggcctggtggcgcgcgagctgatcaagcttgggcatggcactccgactgagaatccccatgtctactgggtcagcgaaaagttcgatgccgactgggattacacagtcgcccttagaaacggtaatttctacacggcggttttgcgccttaccttctgcggtgctgttgctggcgattgggttagccgggccaaggccctgagtacggatgcggctggcgtccacgccctgggtgatcaacgcgctggcaacggaatccgcacgttgctgggagagacgcatgttcaggtcgtgaccacccgtgctgtcggtataaccaatcacgttaaccgccgttttcggatactctttcagtaccattgccacgccggtcatggtatcgtacaaacgatcgacaccaaccacacagatgatatgccattgtacgcagaaacagggtctagctcctatactgaccaatattgtatgtatgcgaccacatcaggagaagaacctagacgatttgtatctacttccctgtcgccgcgctttcgtaaccgtcagtttgctggattactgctcgatcaagcgtttctggctgggcttggcaattatttgcgggtggagatcctctggcaggttgggttgactggaaatcataaagcgaaagatctcaatgcggcgcaactggatgcactcgcacacgcgttactggagattcctcgattttcctacgctacgcgggggcaggtggatgagaataaacatcatggggcgctgtttcgctttaaggtttttcatcgagatggcgaaccgtgcgaacgttgtggcagcatcattgagaaaaccacgctgtcatctcgcccgttttactggtgccctggctgccaacactatgccgaccgcttcggcgcataa

SEQ ID NO: 24730 - DNA, 657 bp, Homo sapiens
  SIMILAR (1)..(645): 1001254mologous to Escherichia coli malY,accession number M60722,Smith-Waterman Score=1179.
atgttcgatttttcaaaggtcgtggatcgtcatggcacatggtgtacacagtgggattatgtcgctgaccgtttcggcactgctgacctgttaccgttcacgatttcagacatggattttgccactgccccctgcattatcgaggcgctgaatcagcgcctgatgcacggcgtatttggctacagccgctggaaaaacgatgagtttctcgcggctattgcccactggttttccacccagcattacaccgccatcgattctcagacggtggtgtatggcccttctgtcatctatatggtttcagaactgattcgtcagtggtctgaaacaggtgaaggcgtggtgatccacacacccgcctatgacgcattttacaaggccattgaaggtaaccagcgcacagtaatgcccgttgctttagagaagcaggctgatggttggttttgcgatatgggcaagttggaagccgtgttggcgaaaccagaatgtaaaattatgctcctgtgtagcccacagaatcctaccgggaaagtgtggacgtgcgatgagctggagatcatggctgacctgtgcgagcgtcatggtgtgcgggttatttccgatgaaatccatatggatatggtttggggcgagcagccgcatatttccctggagtaa

SEQ ID NO: 24731 - DNA, 4155 bp, Homo sapiens
  SIMILAR (775)..(746): 1001254mologous to Escherichia coli K12 putative heat shock protein,accession number AE000297,Smith-Waterman Score=52.
ttagtgatgggtaactggaaactgaacggcagccgccacatggttcacgagctggtttctaacctgcgtaaagagctggcaggtgttgctggctgtgcggttgcaatcgcaccaccggaaatgtatatcgatatggcgaagcgcgaagctgaaggcagccacatcatgctgggtgcgcaaaacgtggacctgaacctgtccggcgcattcaccggtgaaacctctgctgctatgctgaaagacatcggcgcacagtacatcatcatcggtcactctgaacgtcgtacttaccacaaagaatctgacgaactgatcgcgaaaaaattcgcggtgctgaaagagcagggcctgactccggttctgtgcatcggtgaaaccgaagctgaaaatgaagcgggcaaaactgaagaagtttgcgcacgtcagatcgacgcggtactgaaaactcagggtgctgcggcattcgaaggtgcggttatcgcttacgaacctgtatgggcaatcggtactggcaaatctgcaactccggctcaggcacaggctgttcacaaattcatccgtgaccacatcgctaaagttgacgctaacatcgctgaacaagtgatcattcagtacggcggctctgtaaacgcgtctaacgctgcagaactgtttgctcagccggatatcgacggcgcgccggttggtggtgcttctctgaaagctgacgccttcgcagttatcgttaaagcgccggtcaggtagatacgtccggtttttcctgggcgttatccaggccagttgcgcctgttccagaatccgcgtcagtggctggctgagggcgctttccagccctcgctggctaatcagcgtagccagttcattgctgataaacggcagtgaggcgcgggtttccgctacgcttgaaagagcaattttgcactcttctgcgctacgcaccaggcgatagcttaaacgctgacgccagactttctgtaacagggccactttttccggttcgcgggcatcgcgtaccagatcgttaagcagacgaccgttggcactactgtagaaatcactctgcgcaggtacgtcgttgatggcaaccgcattccaccacggcaggatcggcagggcgatgcctttttcggtttcgccacccatacccagcagtggcatcaggtttttaaacgccagcgcgatatccagatcgttaccgccaatacggcaaccactgtgacccagcaggctggcttcacgatcgagacgcgaacgccactgcggccccatcagcagcaatgaacagtcagtcgtaccaccgccgatatccaccaccagcacccgtttttcttcgtgcaaggtggcttcgtaatccagcccagccgcgaccggctcgtactggaataccacgtccgtgaatccggcacgcttcgccgcgcgttccagaatcccttgcgcctgggtgtttgcttcatcaccgcccagcccctggaagttgatcggacgaccaatcaccgcctgagtaatcgcttctggcagctgtgcctgcgcctgctggcgaatgtgcaacatcattgcgcagaccagatcctcaaacagcgctacctgctgcggttttaagccgctggcaccgaggaacgattttggtgatttcacaaaccacacttcttctggatcatcaatgtactgtgccagtgaggaaagaccgaactgcacgcttttcgccgtaacatcgatatcttcttcgcggttataacgaatcgcccgacgtaacagcgcctgcgtttcatcgtcgtctgccggaacatcatgatggcggtacagccattcgcttaccgcttcacgcgttggcgcgcaaagcattgaaggcagcagcgtgctgtcgttttccatttttagcaaatgcggtttaccgtcacgcatgaccgccactgaacagtttgcgaaccgctccacgggcgacgcggccccgccagcccgcaggcagaccatcccgccccaggtggcttcttcaccataatgcggcggctcacaggggagcatttgccccgcgctttccagcgccgcttcaattgtcaccagcggcgttccgacacgcgcggttatcaccagctcggtcgggtcgtaattaacaatgccgcgatgacaacgaacatccagcgtttgcccggtgacagggcgacctaaaaaggctttgctattgctgccctgaatcaccagcggcgttttatcgctaatcgcctgattcacctgctccagcagcgcctggctgtaatcacactcgcgtagcatcagaaacgcgtgatgcacatgcatggcaccaaattcagcacagcggtgtagcgtgggaatgtttttcccagggttcagcaaaccatcggggtcaaacgccgccttgaccgcatggaaggtcgtgatttcatcgctgttgaactgggcgcacatttgattgattttttctcgcccgatgccatgttcgccactgatgctgccgccaacttcaacgcagagttcgaggatcttcccgcccagctcttccgcgcgggcaaattcaccgggttcgttggcatcgaaaaggattaacgggtgcatgttgccatcagacatatccggacgccagcccatctcgaacgctttatcgttgatatagcgctcaatgttgccgatggtcaccgcgccaaactcatcgttcagagtgcaggaaccttcgcacagacggtcttgcgggcagactcgtccgcaaacttccggcagggtgttggtctggtgcgacagttccgccgcttcaaaaatacgcccctcgttggcgagcttcagccagttcgggatgtagttgtgtaccgggcatttccactcgcagtatgggttgccgcacgacaggcagcggtcagcctgcgctttggcctggccttcggaaaacggctcgtaaatttcaacaaactcaattttgcggatcttcagcggtttctttggcggatcaacgcggcgcaactcagctgcgctacgactacggtgacccagcagtgcttttacatcactggacttcggtttaaccagcgcaaatttagtggcgaaggttgaccagttcgccagaatctcttcaccgcgctgagagccggtatgctgcacatgctcggtgataagaccacgcagatgctcttcatggatcgccagagcgtcaacgcttaagacctcgaccagttccgggttaacgcgtttgcggaaatcgccgctttcatcgagaacgtaagcgaaaccgccggtcatgcccgcaccgaagttaacgccggttttacccagaatgcagacgataccacccgtcatatattcacaaccgttgtcgccaatgccttctaccacggtgatagcaccggagttacgcacgccgaaacgttcacccgcgcggcctgcggcatacagacgaccaccggtcgcgccatacaggcaggtgttgccgataatgcttgcttcatggctgcggaaggcggaaccaaccggaggacgaatggggattaagccgcccggcatgcctttaccgacatagtcgttggcatcaccggtcacgtgccggtccacgccgccgcgttcccatttcccggggaggccttcgcaccgcgcccgtatatcatcttgcacgcggatcaggcacaactcagcaagtaaatagacatcaggtcgtggcagtttcgccagtagatagtacagcggactgtgtcggattgtacgcatgccaccgcgcatcctgtctagtgcaccgtcttcatgggcttcgagggtgaaatcaacgggcataaaggtggtcgggcgatgatgttgcggccagttaaactcaatcccaccggaaatccacggccccagcagccccaccagcgcaggtttaatgacttcattgtgataaacaaaatcgcgctgtttcactttatcccacgcgcgatgcacccgaccgcccagttccggcaggatcatcactttgatgtagtcgttttccagccacaccgcctgccaggatttcagggttttctgctcgctcagcgtatcggtcacgccgtagggataaaccgcgccggacgatccctgataaacgcgattttccaggaacatgggatgtatatcctgcggcccggtttcataggtcgggatctcaacgcgctcttgccacacttttactggagtcat

SEQ ID NO: 24732 - DNA, 1710 bp, Homo sapiens
  SIMILAR (910)..(1689): 981254mologous to Escherichia coli yehP,accession number U00007,Smith-Waterman Score=1322.
atgggtttactgcggtgtaaccccaccatatgtagaggagaatttgtgtttccatctttgtgggttggtagcagttacagagactgtcctggtctgctgatttctggcctgatcgcctgcgtcgttggcggcactaccgaaccgctggaattcctgttgctgttcgtagcgccagttctgtatgtcatccacgcgctgttaaccggcctcggcttcaccgtcatgtctgtgctcggcgtcaccatcggtaataccgacggcaatatcatcgacttcgtggtgttcggtattttgcatggtctgtcaaccaagtggtacatggtgccagtggtggcggcaatctggtttgtcgtttactacgtcatcttccgtttcgctatcacccgcttcaatctgaaaaccccggggcgcgatagcgaagttgccagctcaatcgaaaaagccgttgccggtgcgccgggtaaatcaggttacaacgttcctgcaatcctcgaagcattaggcggtgccgacaatattgtcagcctcgataactgcattacccgtctgcgttttgccgaagcggcgctgacgatgctggcgcagttatccccggcacaatctggtgaggcgctgcacggtttgctggcgctggcccgccatcaactggcctgtcagccggcatttatcgccggtttcagcagtcatttaaatcaactgagtgaagccgattttattaacgccctgcccgatttacgcgcggcgatggcctggctaccaccacgagaacgcgggacgctggcgcatcaggtgcttgagcattatcaactggcgcaacttcccgtttcggcgctgcaaatgccgccattgcacatcatcaacaactcgaacagcaggcactggcatcgctgcaaaactggggagttttccatgtctgaactgaacgatcttctgaccacccgtgagctacaacgctggcgattaattcttggcgaagcggcagaaacgacgctttgtgggctggatgacaacgcccggcagatagaccacgcgctggagtggctgtatgggcgcgatcctgaacggctccagcgtggtgaacgttccggtggattaggtggctcaaatctcaccacccctgagtggatcaacagtattcacacgctgtttccgcagcaggtgattgagcggctggaaagcgatgccgtgctgcgctacggcattgaagatgtggtgacgaatctcgacgtgctggaacgtatgcagccttctgaaagcctgctacgcgctgttttgcacaccaaacatctgatgaaccccgaagtactggctgccgcccgccggatagtgtgccaggttgttgaagaaattatggctcgactggcaaaggaagttcgtcaggctttttctggtgtccgcgatcgccgtcgccgttcatttattccactggcgcgaaactttgatttcaaaagtactctgcgcgccaacctgcaacactggcacccgcaacacggcaagttgtatatcgaatccccccgctttaacagccgcattaaacgccaaagcgaacaatggcaactggtcttactggttgatcaaagcggatcgatggtcgattcggtgatccactctgcggtgatggcggcctgtttgtggcagttacccggcattcgtacccatctggtggcgtttgacacccgatccatcataagacgagcttctctcctctag

SEQ ID NO: 24733 - DNA, 3618 bp, Homo sapiens; identical to SEQ ID NO: 10738
  SIMILAR (1447)..(2253): 951254mologous to Escherichia coli caiA,accession number X73904,Smith-Waterman Score=1336.

SEQ ID NO: 24734 - DNA, 3796 bp, Homo sapiens
  SIMILAR (3769)..(3029): 991254mologous to Escherichia coli K12 putative amino acid/amine transport protein, cryptic,accession number AE000484,Smith-Waterman Score=1253.
atgcttcttctgcgggagcacacggacacgcgacacgaccacccgcgcacacccacaagagccacaagaagacgaagacacacagaaaagaaacgacgaaagaaaaaaagacccgctacgcacgtgctcatgaccgccacgcttataccggtgagtcggctgctggcaactgaccagccccagctctttcatgagtctgccagcaagccagcgccccatctggtatcctctctgggttgccattgtggcgatgcttcttgctccggcagagccgtggctgatgccatgcagttcaagacggtttttccagtatttgtagctgctgcgatgaaccccgaacacatggcagagagtggccacaggataacgcgccctgagtttcccgattatcgagaactgttcagggagtctgacatcaagagcgcggttgtagattcaatctgtcaatgcaacacccctttcaattatctctttcggtgttttgaacttcagtgtctttctcgacacggacatagcgcatatggtgttatgcagaggcggcattcacctatgcaggagacaagaatcgccagcttaccgttacagcgataccgctggcatgaagattccgtgcgtaaccgctggttcagcgtgatggtggggccgtctgtgcgcgtgaatgaatggttcagcgcgtatgcgatggcgggtatggcttacagccgtgtgtcgactttctccggggattatctccgccagccccttgtatctggctttcacgaagccgaactgacgcttgatgatgcgaaacgggtgctccaccctggcacggatgctggctttcatgtattcgatgttgatggccgttttgttcttgcgcggattctgcttcaaggtttttaccttgccgggacgctcggcgatcaggcagtccacattcaactcggccagctcctcgcgctgaggcgctccttggtagccggcatcgctgaaacaaatgcgactctccatgaggcgattacccggcgaagatggcatgtcgtgggcccggtggtaccaggctcgggtacgccacctgggatcgacccatgggggctaagacgagggcggattgactatgacagagagaccgaaagaagggcactccttgagaacggggcccagcagtgggtccccagacggggtaataaccggtctgcacgcaatatgcgaaaaaagcgcaatgcacagggacaaatagtgtcgagaccgaataacgacgatgtcgcactcctagcaggcatcccccgcaaggcacagcaattgggcacatacattcctgctcaaaccgtggcgataaaaaagggccaccgaagtgaccctttttcagaacttttgcgaattacgcgtaaccgtagctcatcaggcgctgataacgacgattttttaaatcttcagtgcttaacacgtcgagatcggccagatccgccagcagttgcgctttcaacgatgccgccatcgcttccgggttacgaagatcagaaatttcctgagcactggggctttgatgtcgcttccattgagaaagccctggcgcacaacgagcgcaatgaaaaccgtattcgcggtgcttcaacgatttctcaacagacagccaaaaatctctttttatgggatgggcgtagctgggttcgaaaagggctggaagccggattaacgctggggatagaaacggtctggagcaaaaagcgtatcctgacggtttacctgaatatcgccgaatttggcgacggtgtgtttggcgtcgaagctgcggcacaacgttatttccacaaacccgcgagcaaacttacccggtcggaagctgcattactggcagctgtattacctaatccacttcgtttcaaagtctcctcgccatcgggctacgtgcgtagccgtcaggcgtggattttacggcagatgtatcagttaggcgaggatattctgcggcttcagcgacatcgtcgagatacggttatactgccaataaaggttcagctggttcaggaactgggcagtgtgaacggttcatgggaaggattgggaaaaaatccggccagtcccgacgccaaggaacacggcatcgtaatcactcagcagatcgtccagctgtacgtcgcggcccacttcggtattgagtttgaattcaatacccatgccggtgaagatttcacggcgacgcgtcattacctctttttccagcttgaaggccggaataccgaaggtcagcagcccgccaatttctggatgacggtcgaagacaacggcttttacgccgttacgcgtcaggacatccgcacacgccagacctgccgggcctgcgccgataatcgccacttttttaccggtctgtttcacaccagacatatccggacgccagcccatctcgaacgctttatcgttgatatagcgctcaatgttgccgatggtcaccgcgccaaactcatcgttcagagtgcaggaaccttcgcacagacggtcttgcgggcagactcgtccgcaaacttccggcagggtgttggtctggtgcgacagttccgccgcttcaaaaatacgcccctcgttggcgagcttcagccagttcgggatgtagttgtgtaccgggcatttccactcgcagtatgggttgccgcacgacaggcagcggtcagcctgcgctttgggcctgggcttcggaaaacggcttggaaatttcaacaaactcaattttgcggatcttcagcggtttctttggcggatcaacgcggccgaaacgttcacccgcgcggcctgcggcatacagacgaccaccggtcgcgccatacaggcaggtgtgccgataatgctgcttcatggctgcggaaggcggaaccaacggaggacgaatggcgataagccgccgcgtaggctggacccggttaagttggctcgtcgcgtgctgacatatggaatgcggcttgtcgcaccagaggatttctgcacatgttagcttcgctgctcgatagccggcgatatatacgacaacacaggcgtcaatgtgagttatgtacacggcccagatgcagtagaggaaggcaatggtagtaactgccagatatgccgggcgtgctttaccaaagtgaccgtgtccgagcagcagtaacgccgcacaggtgtaaagatatggcaccagtgtaaagatgaccgagacggaagaaaccagaccgaactctttggtcgcgtttggtgaaatgctgctgagctggaagatggtcatcaaaataccgacgataatcagccccgccactggcgtacccgctttatttacacgggcaaaaatcggtgggaacagtccgtcatcggcagcggctttcgccgtttgacccgccagcaacgtccagccgcccagtgaacctaagcaacccgcagctgcgcagaaggaaacaatggccccggcggtgtcacccaacgccatccgtgcggcatcaccgaatggcgaagcagaaacgcgcagtgcggcattagggatcatccccataatcgcggtggtagaaagtacatagcaaacggcggcaatcaataccccaccaatggtggcgatagggacattgcgtttcgggtttttcaccacacctgcggcaacggaggcactttccacaccgatgaacgaccacagcgtaacgttaagggtactttgaattgcaccgaaggtgcccaggccgctgacgttccatgccggcatataggtttcaccacggaaccagaaccagccaaatacggcaatcccgacgatggggatcagcgccagcacggggcactggctgcccacgggtgacat

SEQ ID NO: 24735 - DNA, 2263 bp, Homo sapiens
  SIMILAR (1727)..(2233): 701254mologous to Escherichia coli peptide termination factor,accession number Z26313,Smith-Waterman Score=571.
ttattgaataatgaatggtgtgcctttctcaaagaacatgaattctggttggtatctcgatcgatggcccccaggagttacatgaccgttaagacgcagtaattcaggtaacggtacttttgcaaaagtgatagcagccacgagcgtgatttgccaccgcgtacaattcgcgcagagaactgtaattcagctggctgtgcaggcggtgcgccggatgggcagaaagtacctgcaactgttctggttcggcattgccctgccattcgtccggctccagccacattggatgcccagggcaatccgggtaaccgtaatcggcaatacgctgtttcaaccactgacgaatcagttctgaaaccatatagatgacagaagggccataaccaccgtctgagaatcgatggcggtgtaatgctgggtggaaaaccagtggcaatagccgcgagaaactcatcgtttttccagcggctgtagccaaatcgccgtgcatcaggcgctgattcagcgcctcgataatgcagggggcagtgcaaaatccatgtcgcaacggctttttcgattgagctggcaacttcgctatcgcgccccggggtttcagattgaagcgggtgatagcgaaacggaagatgacgtagtaaacgaaaaccagattgccgccaccactggcaccatgtaccacttggttgacagacatgcaaaataccgaacaccacgaagtcgatgatattgccgtcggtattccgatggtgacgccgagcacagacatgacggtgaagccgaggccggttacagcgcgtggatgacatacagaactggcgctgcgaaaggaaacgcgtggcgctttcagaaaaaccgtgagtggtcgggcactcaattgcgcctggaagatggtcagtgcgccgctgacgtttgaccgcacttcctgcatccgcgtgcgggaccactgggcaaaacgggtgcccccccccttttgggccgcgtaaaacccggttttccctttacgttcagacatcccacacgcaaacctcggggcgtgcgcaaattccccacttttcaccggtcttcgcacagacggtttgcgggcagactcgtccgcaaacttccggcagggtgttggtctggtgcacagttccgccgcttcaaaaatacgcccctcgttggcgagcttcagccattcgggatgtagttgtgtaccgggcatttccactcgcagtatgggttgcgcacgacaggcagcggtcagcctgcgctttggcctggccttcggaaaacgctcgtaaatttcaacaaactcaattttgcggatcttcagcggtttccgtaagctgatggaagttaccgtctgcgcgacacgccgatcctcacctttatgaacaaacttgaccgtgaatccgcgacccgatggagctgctcgatgaagttgagaacgagctgaaaacggctgtgcgccgatcacctggccgattggctgcggcaagctgtttaaagcgtttaccacctttataaagacgaaacctatctcattcaggaagtccgcattgttaaagggctgaataacccggtctcgatgctgcggttggtgaagatctggcacagcagctgcgtgacgaatggaactggtgaaaggcgcgtctaacgagttcgacaaagagctgttcctgcgggcgaaatcactccggtattcttcggtactgcgctgggtaacttcgcgtcgatcatatgttggatggcctttatggcgggtgaccgttcgcacgttgaagaagcgtatcgggcgatatcctcggcccagggtgagatgatgaagttcaccggtattccgaacttcgcccagaactgttccgtcgtatccgcctgaaagatccgctgaagcaaaaacgctgctcaaagggctggtacagctttccgaagagggcgcggtgcaggtgtccgtccaatctccaacaacgatctgatcgttggtgcagttggtgtgctgcagtttgatgtggtggtagcgcgcctgaagagcgaatacaacgttgaagcagtgtatgagtcagtcaacgttgccactgcccgctgggtagaatgtgcagacgcgaagaaattcgaagagttcaagcgtaagaacgaaagccaactggcgcttgatggcggcgataacctcgcttacatcgctaccagcatggtcaacctgcgcctggcacaggaacgttatccgggacgtcagtttcaccagacccgcgagcattaattcttggctccaggccgcggtgacgcg

SEQ ID NO: 24736 - DNA, 760 bp, Homo sapiens
  SIMILAR (179)..(748): 971254mologous to Escherichia coli glycyl-tRNA synthetase beta subunit,accession number J01622,Smith-Waterman Score=958.
cgcaaaattcgaagagaaattcctcgcggtgccggctgaagcgctggtttacaccatgaaaggtgaccagaaatacttcccggtgtatgcgaacgacggcaaactgctgccgaactttatcttcgttgccaacatcgaatcgaaagatccgcagcagattatcgcatccaggcgctggctggctggattgctgaacaagattggcgctgacgttaaccacgctacccgtgcgggtctgctgtctaagtgcgacctgatgaccaacatggtcttcgagttcaccgacacccagggcgttatggggatgcactatgcgcgtcacgatggcgaagcggaagatgtcgcggtggcgctgaatgagcagtatcagccgcgttttgctggtgatgacctgccgtccaacccagtagcttgtgcgctggcgattgctgacaagatggataccctggcgggtatcttcggtatcggtcagcatccgaaaggcgacaaagacccgtttgcgctgcgtcgtgccgcgcttggcgtgctgcgaattatcgttgagaagaacctcaaccttgatctgcaaacgctgaccgaagaagcggtgcgtctgtatggcgataagctgactaatgccaacgtagttgatgatgttatcgactttatgctcggtcgcttccgcgcctggtatcaggacgaaggttataccgttgacaccatccaggcggtactggcgcgtcgtccgactcgtccggctgatttcgatgattggcacgcc

SEQ ID NO: 24737 - DNA, 405 bp, Homo sapiens
  SIMILAR (2)..(223): 941254mologous to Escherichia coli K12 putative activating enzyme,accession number AE000508,Smith-Waterman Score=347.
cggacgcgataatcagcagattaagcgcagcatctatttgctggcagagcgcggcaagctggcggaactgcgtttgctggtgatccctggccaggtggattatttgcaacacatcgaagaactggcggcgtttatcaagggactcggcgatgttccggtacgcctgaacgcgtttcatgcccacggcgtgtatggcgaggcgcaaagggcctacggttcggcacagacttgtaggcctgataagacgcgtcaagcgtcgcatcaggcattgtgcgccaactgccggatgcggcgtaaacgccttatccggcctacggttcggcacaaacctgtaggcatgataagacgcgacaagcgtcgcatcaggcaacggctgccggatgcggcgtgaacgccctatccgac

SEQ ID NO: 24738 - DNA, 1788 bp, Homo sapiens; identical to SEQ ID NO: 14971
  SIMILAR (1441)..(1785): 981254mologous to Escherichia coli similar to ~start codon is not identified yet,accession number D90869,Smith-Waterman Score= 557.

SEQ ID NO: 24739 - DNA, 2025 bp, Homo sapiens
  SIMILAR (940)..(1194): 1001254mologous to Escherichia coli peptidyl-tRNA hydrolase,accession number X61941,Smith-Waterman Score=431.
atgggtcagaaaggcctggttaaaatctttgcttggatgcatacttactattcttatccgcatctgaccacttttcagcatccgttatcggaagtcctgagcaaatgctggatctatttcaatctttaccttgccccctttcgtatgccggtttttttctttatatccggctatttgattcgccgctatatcgacagcgtaccgtggggaaattgtctcgataaacggatctggaacatcttctgggtgctggcgctttggggcgtggtgcagtggctggcgttaagtgcgctgaaccagtggctggcacctgagcgcgatttaagcaatgcctccaatgccgcttatgccgattccaccggtgagttcctgcacgggatgatcaccgccagcaccagcttgtggtatctgtatgcgttaattgtctatttcgtggtatgtaaaatttttagccgtctggcgctgccactattcgccttgtttgtactgctgagtgtggcggttaatttcgttcccacgccgtggtggggaatgaacagtgtgatccgcaatttgccttattacagccttggcgcatggtttggcgcaacaataatgacctgtgttaaagaggtgccgttgcgccgccatctgctgatggcttctttgcttaccgttctggcggtcggtgcctggttgtttactatctcgctgctgttgtcgctggtatcgattgtggtgatcatgaagctgttttatcaatacgagcaacgattcggtatgcgctccaccagcctgctgaatgtgattggctccaacaccattgctatctacaccgtcagcaaaaaccacgcaatgatagtcattgaggatttgaaggtcagcaacatgtcaaagtcagcagcggattgtattctcccaccatggctgaaatcagataaactgggggttttatttaatattgtcggcctggcgaaccccggtgctgaatacgccgcaacgcgacataatgctggtgcctggttcgttgacttactggcagagcgtttgcgcgctccgctgcgcgaagaggctaaattctttggttatacttcgcgagtcactcttggaggcgaagatgtccgcctgttagtcccgactacatttatgaatctcagcggcaaagccgttgcggcgatggccagttttttccgcattaatccggacgaaattctggcagtctgtgttaatgctgtgctgaagaaggtaaagaacatcttccaggaagaagaatccataaggcaaaacagagaggagagtgaaaattgtagaaaagccttttctgagcctgtgctttcggagcctatgtttgctgaaggtgaaatcaaagcaaaaccttatagttatgccgctgaaatcataaaagcccgaatgctggcagaacaaaaagtagaagcggcgcgtgtgctggaaagtctgcacggcgcgctggctgctgatgccgcgctgttaagcgccgcagaacgtcagctcattgagtctttgatcatcgaagcgatttcgctatcggcagccccagatattaaaagaaaactccaaaaactggagggatttgctggaatgaatatcagtcagcttttagaaatagcccaaaaggtttttgacaaccaagagtttgaaaaacaaaaacaattagtaagacagtcggcaggagcgttcgtgtgcattcctaaaatacgatcgagaggcggaacaggtgctattccttacccagactggacaagttgggggacatcaggcttgagattccctaacgcactgtgcctgatacttggggaaaaacgggaagcgcgaatcggcatgcccggtgattggaacgactttgatctacgcttcccacaccaccaaattaaaagccaaagtctgctcaatgtgagtccaatcaaccctaaatcacaggtgaccccagtgccaggaagtcatctggaagacagcattcagccatctccagcgggatcattctccttctttcagaatgcagaaactgattcgatctccataaactag

SEQ ID NO: 24740 - DNA, 3795 bp, Homo sapiens
  SIMILAR (3734)..(3642): 671254mologous to Escherichia coli K12 putative oxidoreductase, Fe-S subunit,accession number AE000372,Smith- Waterman Score=91.
ttataaccagcggtcatcaggtataaagcagccttctgttttgcatcgccagcgacacacggaaacataatccgacattaagtgatcgggttgcgccgcctgcgctttcggatactggccgtatcgggaactcacttcgcgacgccagatttgcgcttcgccctgctgagtctggcttaccggcaaaacaccttctggcgctttgctttcgtgcgcaccaatattttgcgtaaacagtttccctggcaattgcgcctgttcggcagtgccatcaaactgaccgacaaacagcggggtttgcaattttgagtcttcataccagcacagccccgcggcaccgtctaacgccccattcagcttgtcgttttcctggctgatgtgcgaaagcatctcttcggcaataccgtgtgaatacggcaccgccacacagaagctggctccggcaggcatactgttccataccggcgtaaaatcgaaactggcatctacgctggcggattcatcatttaacgccacaaaactgtgccagccgtcgttacccatttcgaagcgtacgccagcaaaagaaggcattaaccgctggtagccaaaccccagccacctggcgctgactacgatgcgctggcgtactggcgttttttcggcagtacgctcttccaggccaaagcttgcttgccagcgttttttgccgctcaacaaatcacctgcgatcgccgtggcttcggtatcctgctgatcatctttaaacaacatatccgtgctggaaaacaccagcatcttgtcctgataagtcgcgaacatcagggcgttattgccgttatagcgcaactgataaacaggaacagtttcactatttatcttgatgctactgatttccgttttgcttaactggctgtcgctggtagcggcaaacaacaatggctccagcagtttgcttaaaccactgcgctggatcagcaccatataatgtgaaagatggccttgtttatcgtgccacagcgctgcctgcgcgggctgatgaccaaagccagtaaagtagaacggtttgtggttaatcaggaactgttcgcccttcactgccactgaccggatgccgacgcgaagcgggtagatatcacactctgtctggcttttggctgtgacgcacagttcatagagataaccttcacccggttgccagaggtgcggattcaccacttgcaaagtcccgctagtgccttgtccagttgcaaccacctgttgatccgcatcacgcagttcaacgctgacatcaccattggccaccacctgccagtcaacagacgcgtggttacagtcttgcgcgacatgcgtcaccacggtgatatcgtccacccaggtgttcggcgtggtgtagagcattacgctgcgatggatcccggcatagttaaagaaatcatggaagtaagactgctttttcttgccgttttcgtcggtaatcaccattcccggcgggatagtctgccagttcagttcgttgttcacacaaacggtgatacgtacacttttcccggcaataacatacggcgtgacatcggcttcaaatggcgtatagccgccctgatgctccatcacttcctgattattgacccacactttgccgtaatgagtgaccgcatcgaaacgcaggcgcaggcagttatgccttatggtccaaaatgtctttatgttcttgcgcaaaacgacgcgctgcaacgcactaggggacctttggacttcagtggctggaggaccctgctcccctggctccttcccagcctgggcatccttgagttccaaggcctcattcagctctcggaacatctcgaagcgctcacgcccacggatctgaagggtgaaatattctccatccagtggtttcttctttggctggggagaggagctggtgttgttgggcagtgctcgcttagtgctccctgggggcagctcgtggtgaggctcccctttcttgcggagattctcttcctctgtgcgccggtctctcccaggacaggcacaaacacgcacctcaaagctgttccgtcccagtagattaccactggagtcttccagtgtgatgatggtgaggatgggcctccggttcatgccgcccatgcaggaactgttacacatgtagttgtagtggatggtggtacagtcagagccaacctcaggcggctcatagggcaccaccacactatgtcgaaaagtgtttctgtcatccaaatactccacacgcaaatttccttccactcggataagatgctgaggaggggccagaccatcgctatctgagcagcgctcatggtgggggcagcgcctcacaacctccgtcatgtgctgtgactgcttgtagatggccatggcgcggacgcgggtgccgggcgggggtgtggaatcaacccacagctgcacagggcaggtcttggccagttggcaaaacatcttgttgagggcaggggagtacgtgcaagtcacagacttggttgtcccaaagtcagaagcccaaggaaagggatctctgagtgactgatgattacacttgactggcgggttaacgatgtgttggagaacctggtacccatatgccatggcggtacgaatcaggcccaccgcagttaaacgcccatcttcgtcacaagcgatatattgcggttgaacattgaactgaaactcgacaccttcctcgcgcgcattaaccacctctttgcgcgagcccggcatactgacttcatcacgacgatacgcgcaggtcacgctggcggcattgaggcggatggaagtccgcaaacaatccattgtcgtatcgccaccggccaataccacgactcgcttaccttccacgtccgtcagcggatactcttcagactccggcaatcccatgagctggcgggtatgggcagtcaggaacggtagagcctgaatgacaccgggcgcatcttcatgcggcagatctgctcgcatcatcccgtaagtccccacgccgatgaaaactgcatcatattcagaagttaaatcgctaaaggtaatatcgcgggcaatttcacagttaagatgaacgtcgattcccattgcggtgaatatctctcgccgctggcttaataccgttttatcgagtttgaaaggaggaatgcccaaagtcagcataccgccaatttctggatggcgatcaaagacatcgacctgaactcctgcgcgcgccagaatatcagcacaccctaaccctgcaggcccagcgccaatcaccgccactttttcgctacggggaacaactttgctgacatcgggacgccagcccatcgccagcgcggtatcggtgatgtagcgttccagattaccgatagagactgcgcccgagtgatctttcaaagtacatgcgccttcacaaagacggtcctgtggacataccctgccgcaaatttctggtaaggaactggtctggtggcaaagttctgccgcttcaataatctttccttcctgtaccagacggatgtaatccggaatagcgttatgcagcgggcaatgccagttgcagttagctttttcggcacaataaacacagcggtcactctcataagtcgcttgttgtggatccagcccgcaatatatttcgcctaagtgggttttccgttcactcgctgaaattttatctgcgcctttacgcgagttaacggggagcacgctgccctgcgagatggctgagcgtctgatgacgcttttcctgctgccgttttgcgcggcgcacgcggtgaagccgaagcgggttatccactggtgatcaatcacgccttgccgcat

SEQ ID NO: 24741 - DNA, 846 bp, Homo sapiens; identical to SEQ ID NO: 14974
  SIMILAR (453)..(19): 1001254mologous to Escherichia coli 4-aminobutyrate aminotransferase (EC 2.6.1.19) (Gamma-amino-N-butyrate transaminase) (GABA transaminase) (Glutamate:succinic semialdehyde transaminase),accession number D90768,Smith-Waterman Score=752.

SEQ ID NO: 24742 - DNA, 2187 bp, Homo sapiens
  SIMILAR (1)..(633): 1001254mologous to Escherichia coli paaZ,accession number X97452,Smith-Waterman Score=1056.
atgccagccatcatcaaaccagctaccgcgacggcccaactgactcaggcgatggtgaaatcaattgtcgatagtggtcttgttcccgaaggcgcaattagtctgatctgcggtagtgctggcgacttgttggatcatctggacagccaggatgtggtgactttcacggggtcagcggcgaccggacagatgctgcgagttcagccaaatatcgtcgccaaatctatccccttcactatggaagctgattccctgaactgctgcgtactgggcgaagatgtcaccccggatcaaccggagtttgcgctgtttattcgtgaagttgtgcgtgagatgaccacaaaagccgggcaaaaatgtacggcaatccggcggattattgtgccgcaggcattggttaatgctgtcagtgatgctctggttgcgcgattacagaaagtcgtggtcggtgatcctgctcaggaaggcgtgaaaatgggcgcactggtaaatgctgagcagcgtgccgatgtgcaggaaaaagtgaacatattgctggctgcaggatgcgagattcgcctcggtggtcaggcggatttatctgctgcgggtgccttcttcccgccaaccttattgtactgtccgcagccggatatcgttacccaggttttgaatgatattactgccggggcggtatgtcatattcgcacgtgtccaagccgcgtactgaccaagtgcgtcaatggtgacatagcattgtaccggtgttatgacttgtgtgaattctggaggatatctgctcaccttttgtacgtggagggggcagccaagatcggctacggttttgatcgggctgtattctgccaccagaatcacttcggctttgggcttcggtggctcgacgcccacgtacaccaaatcagccccggcagcctgggccaaagattggcggaatatccccggcaggatctgcgctggcgctggcatgcggaaagcgaacagtactatttgcatctctttgcaccagaacaggcggatctcaactgggagaatccagcgctcgttctgctggccgaccaaatgctcgccctggacgatcagtacacgtttttacagcgtatcccgcgcagcccatacgggctggcatttggtcctgttcctcatctccattatctccatcagatgcgattgctggatatcgccccgatcgcttttagggctatgtccctcgcctttccggtcaattatctggatgcagtccgcactggcagcatatgttcaaactgcaaccagcggagcaacgattcggcgatgggcatctcaatgaacgtatccaccttgatgagggttcgagccatttgggtatatgctgcttatatggagcgcgtgctggataatttgctcaataacgccctgcggtactgccattcaacggttgaaaccagcctgctactgtcggggaatagagcgacattaattgttgaggatgatggcccagggattgccccagaaaaccgcgaacatatctttgaaccttttgttcgcctcgatcccagccgggatcgctcaaccggcggctgcgggctggggctggcaattgtccactctatagcacgtggcaactgggcgacgagcgatcatcgaagtctgaccggcacgcagccatacgcgcggatcgtagtatttcttgttcggctgatcttcgcctttcgggttacccagctgaccctgcagataagcttcgttcgctttgtagtagttcagaacgccttcccaggttgcccattgggtatcggtatcgatgttcatttttactacgccgtagcttacggagtctttgatttcctgagcagtagaaccggaaccaccgtgttctttgatgacctgaacacgccagatttcgaccgctgttttgcctttatgcaggcggtaggcaaaggctacaccgacgcttatttaccaattgtcgagcgacggaaagcgatggcctacggcgagcgcgagcgcaatttccagttatatcgtcgcggtcgttatgtcgagttcaatctgccgtcggaacttgccgcgactgtgtatcaaagcgaccccaacttcgcaaccggctgttttcgactatacacgtcgtgtaacacgttcaatatgcacaaagcagccacgatgcttgttcgcgcagagttcagccagggttaccagcatcaagtttag

SEQ ID NO: 24743 - DNA, 1671 bp, Homo sapiens
  SIMILAR (1437)..(358): 821254mologous to Binary vector pCAMBIA-1303 GUSA (N358Q)/MGFP5 fusion, hexaHis tagged,accession number AF234299,Smith-Waterman Score=1585.
tcaccctgaagacaccttgtggattttcgctttcctaaggccacaagtcccaggtggctccctgctgtccccatttcccaattttgacaagctatttgagacctgtgttgtgaacacagcctgctctctagagcagtagagagactggtctgcattccgacaccttctggggcctgaaaactgaaaaccactctgcaggcagacagaggctgatttccatatgttgcaaatcgtgtcaagtgtcacagccaagatgcaaggagaactcccagctgtggcgaccagggacaggcgatgggagtcggaggagctgcctttggctctgagacaaagcaggagaaagaggccatgacctccttgtgacccttggcccacgaatgacagattcccccagagcactttcatcttgtcagattccacgcctgtgagctcagccttcacctggaagccaagcaggatgccatgttcatctgcccagtcgagcatctcttcagcgtaagggtaatgcgaggtacggtaggagttggccccaatccagtccattaatgcgtggtcgtgcaccatcagcacgttatcgaatcctttgccacgcaagtccgcatcttcatgacgaccaaagccagtaaagtagaacggtttgtggttaatcaggaactgttcgcccttcactgccactgaccggatgccgacgcgaagcgggtagatatcacactctgtctggcttttggctgtgacgcacagttcatagagataaccttcacccggttgccagaggtgcggattcaccacttgcaaagtcccgctagtgccttgtccagttgcaaccacctgttgatccgcatcacgcagttcaacgctgacatcaccattggccaccacctgccagtcaacagacgcgtggttacagtcttgcgcgacatgcgtcaccacggtgatatcgtccacccaggtgttcggcgtggtgtagagcattacgctgcgatggatcccggcatagttaaagaaatcatggaagtaagactgctttttcttgccgttttcgtcggtaatcaccattcccggcgggatagtctgccagttcagttcgttgttcacacaaacggtgatacgtacacttttcccggcaataacatacggcgtgacatcggcttcaaatggcgtatagccgccctgatgctccatcacttcctgattattgacccacactttgccgtaatgagtgaccgcatcgaaacgcagcacgatacgctggcctgcccaaactttcggtataaagacttcgcgctgataccagaacgttgccggataattacgaatatctggatcggcgaactgatcggttaaaatggtgttacgcggctttccagcaaggtgatcaatcgcaagcttcgaatccgatgtatgccaaggcgccagtttgagtccggtgggttcacggctataaggcgctctccgaaaaagggcacctcgtttatcaaagactgtaccagatttttcaacacgcagaatatcaaacggggaccaacgacgcggaaatatcgacaaagctgtgtctcttctcttcgtctcttcttctcctctcctcttcttcactacaacacagcatcccaccgaatgcctgcttgtagtatgtgctggggatcttagagtgacctgcagcatgcacttcat

SEQ ID NO: 24744 - DNA, 1518 bp, Homo sapiens
  SIMILAR (298)..(999): 941254mologous to synthetic construct beta- glucuronidase,accession number Z32701,Smith-Waterman Score=1177.
atggagcaacaaaataaagctggttccctgcgtttctattatcggtttaagggttatcaccgcatcaataaactggtgctggctttcaaaggttgcttctacgtgtttgagcggatgtgcctgttttattgcttgttgcaatacggcggcagtaaatttccgacctcgcgggcgattgccaacgtcaacggcaaatcagctgcggtagtttgctcaaccggacacgccagcgctattgttcccgtcaatcggcccttgctgtcaaacaacggcgttgcacaaaaggcccagttccagatggcagtgaagggcgaacagttcctgattaaccacaaaccgttctactttactggctttggtcgtcatgaagatgcggacttgcgtggcaaaggattcgataacgtgctgatggtgcacgaccacgcattaatggactggattggggccaactcctaccgtacctcgcattacccttacgctgaagagatgctcgactgggcagatgaacatggcatcgtggtgattgatgaaactgctgctgtcggctttaacctctctttaggcattggtttcgaagcgggcaacaagccgaaagaactgtacagcgaagaggcagtcaacggggaaactcagcaagcgcacttacaggcgattaaagagctgatagcgcgtgacaaaaaccacccaagcgtggtgatgtggagtattgccaacgaaccggatacccgtccgcaaggtgcacgggaatatttcgcgccactggcggaagcaacgcgtaaactcgacccgacgcgtccgatcacctgcgtcaatgtaatgttctgcgacgctcacaccgataccatcagcgatctctttgatgtgctgtgcctgaaccgttattacggatggtatgtccaaagcggcgatttggaaacggcagagaaggtactggaaaaagaacttctggcctggccaggagaaactgcatcagccgattatcatcaccgatacggcgtgatacgtagccggtacatgttcatgtgtgttgtggtgtgtgtttgtagcagtaatgttctggcgctgaaccaggctcgcgggctgatagaaagtacccgcagcgacatcgctaaacgtcagggggaactggcgcaggcgaataatgcattgcaactgttgctgggaagctacgtcaagctgccgcaagcgcagacagtaaacagcgacagcctgcaaagcgttaaattaccggcgggattgtcgtcgcaaatcttattgcagcgcccggatattatggaagctgaacacgcgttaatggcggctaatgccaatattggcgctgcacgcgcggcattttttccgtctataagcctgaccagcggaatatcgaccgccagtagcgatctatcgtcattatttaacgccagcagcgggatgtggaattgtatacccaaaattgagatccccatttttaatgccggacgcaatccagtgccaatctggatatcgccgaaattcgccagcagcagtcggtggtga

SEQ ID NO: 24745 - DNA, 3273 bp, Homo sapiens
  SIMILAR (2961)..(2125): 741254mologous to Binary vector pCAMBIA-1201 GUSA, hexaHis tagged,accession number AF234293,Smith-Waterman Score=1062.
ttacccagtctcagactgttgtaacacgacgggccagtcccaaggctgcaatgcttgcaggtgacttctagagaatccccaagtgtccggcaagcttcgggtaatagtcgagtctccgcatcgaccacagtcgcgtcgtatggtaccgcaatcagctttaacgtcacatccgaacccatctgtagcctgtacacatttcgacgtgttacgctgcaaggattgctctcgaccatacaagcatgggtcgacatcaggtatgctctgcctagaccacggtgcatgaccgtcaggcgtccccaggaaaacgttcgccagcgccgccatagtgcgttcaccgaatacgtgcgcaacaaccgtcttccggagactgtcatacgcgtaaaacagccagcgctggcgcgatttagccccgacatagccccactgttcgtccatttccgcgcagacgatgacgtcactgcccggcgggttgagaagcggtgtaagtgaactgcagttgccatgttttacggcagtgagagcagagatagcgctgatgtccggcagtgcttttgccgttacgcaccaccccgtcagtagctgaacaggagggacagctgatagaaacagaagccactggagcacctcaaaaacaccatcatacacggttttacatcttccgattcgaactcgaacaatgccatttatcagcaattgcccatgtcgtcccttacgcccaaaccgacgtcggagaatatccgaccccttggatggtccatccgttcgttcaaggttttgtacggggtttgtactctgtattcgtaaccaaggggtcagctcgtgacaactatagtaagcgtacgccgtaacggccatgtggtcatcgctggtgatggtcaggccacgttgggcaataccgtaatgaaaggcaacgtgaaaaaggtccgccgtctgtacaacgacaaagtcatcgcgggctttgcgggcggtactgcggatgcttttacgctgttcgaactgtttgaacgtaaactggaaatgcatcagggccatctggtcaaagccgccgttgagctggcaaaagactggcgtaccgatcgcatgctgcgcaaacttgaagcactgctggcagtcgcggatgaaactgcatcgcttatcatcaccggtaacggtgacgtggtgcagccagaaaacgatcttattgctatcggctccggcggcccttacgcccaggctgcggcgcgcgcgcggtcgggctgctgttggtggctcatcggtaagttgtgccaactgtttaaattgtgcccactgcactggggggaccacctggatctcaattgtgcttgtgttgctccgctggaaatctttgtgggaattattatggtcccggtggttgttcaattgtgttgggtacttggttcttggccccataatccctgccatgagggggatgcctgctgagattctgacaaaacaggcatgcagctggctggctgatttttgcctgctaaattctgcccacagtttcgaccagcaggctttgcgcgtaactacgggctgaattcggggggccttgccctcagccctgacggcgcagcttgccgcccgggtttttacgttaaagggtacagcctgagcacgcagttcatccgtcaggcgtggggcaccgtaacgctgttttgaccgggtaaaagccgcgaggacaacgctgtcgcagtgttggcggaactgctgacgcgtgcttatccttgtccgccgctgacaccacgtataccagccgctgcgggccacccggagcacgcggcacattgctttgatgctgaactcagcctgatgtttttcaataaagacatacttcatttcaggcgcttcgcgaagtatgtcgcggcgtgcaatctcggtagacatctccagttcacgttcagaagacgtctgctgattttgctgtttactgcgccagttgtagagttgtgattcatacaggctgagttcacgggctgcggcagtaacaccgatgcgttcagcaagcttcagggcttcactgcgaaattcaggcgaatgctgtacgccaatactatcaccgtaactaacggcggtgtattggatgtgaacgttgatcagttcgatactgaagctttccgtactgacaaactggaactgaccagcggcaacatcgctgaccataacggtaacgtagtatctggtgtgttcgatatccatagcagcgattacgttctgaacgctgatctggtgaacgaccgtacctgggatacttccaagtctaactacggttacggtattgttgctatgaactctgatggtcacctgactatcaacggtaacggcgacgtagacaacggtactgaactggataacagctctgtagacaatgttgttggcgtgttcacagtctggcgcgacatgcgtcaccacggtgatatcgtccacccaggtgttcggcgtggtgtagagcattacgctgcgatggatcccggcatagttaaagaaatcatggaagtaagactgctttttcttgccgttttcgtcggtaatcaccattcccggcgggatagtctgccagttcagttcgttgttcacacaaacggtgatacgtacacttttcccggcaataacatacggcgtgacatcggcttcaaatggcgtatagccgccctgatgctccatcacttcctgattattgacccacactttgccgtaatgagtgaccgcatcgaaacgcagcacgatacgctggcctgcccaacctttcggtataaagacttcgcgctgataccagacgttgcccgcataattacgaatatctgcatcggcgaactgatcgttaaaactgcctggcacagcaattgcccggctttcttgtaacgcgctttcccaccaacgctgatcaattccacagttttcgcgatccagactgaatgcccacaggccgtcgagttttttgatttcacgggttggggtttgatatgaaacgcgggcacagttatcaccagcccgccgaaaaagagagagaatcaggatgcggttaagataccgccaatcatcgcgcgtaatcctgagcaaacgacgcttacgcgccaggtcttccgcttcgatatcggccagtacaccgtaggtcagatccagcagtaaacgtgaagtcattgccgtgttgatgtctgggcttatctcgcctttttgctgggcatcacgcatccgctgggcaacaaattccgtgatcgtcatatgcttatttttaagcatggcgcgacctatggtacgcatcccttccgccat

SEQ ID NO: 24746 - DNA, 688 bp, Homo sapiens
  SIMILAR (154)..(246): 901254mologous to Escherichia coli K12 putative activating enzyme,accession number AE000508,Smith-Waterman Score=135.
tcaaagcgtgggggagcgaatgtcatcaacaactcaccggacgcgataatcagcagattaagcgcagcatctatttgctggcagagcgcggcaagctggcggaactgcgtttgctggtgatccctggccaggtggattatttgcaacacatctgaagaactggcggcgaacatcaaaagactcggcgatgtaacggtacgcctgaacgcgtttcatgcccacggcgtgtatggcgaggcgcaaagcatgggcgagcgccacgccggaagacgttgagccgttggctgatgcgttaaaggtgcgcggggtgagccggttgatatttccggcgctcaattgccggatgcggcgtgaacgccttatccggcctacggttcggcacagacttgtaggcctgataagacgcgtcaagcgtcgcatcaggcattgtgctccaactgccggatgcggcgcaacgccttatccggcctacggttcggcacaaacgattcggggccgtttgtaggcccgataagcgcgccagcgtcgcatcgggcatccgttgtcgcgtaaacgctttatccgccaggcgtacagggccgttatatggaaaaattaacggctctgctttctcacaaatagataaaatatggcgcgccgataaaggttgacagcagccccgcgggatctggaatggaaacagcaccat

SEQ ID NO: 24747 - DNA, 3706 bp, Homo sapiens
  SIMILAR (2339)..(3058): 1001254mologous to Escherichia coli glycine-tRNA synthetase, beta subunit,accession number U00039,Smith-Waterman Score=1225.
atggatcttggggccaatggctggcaaaccttccgctacgtagtgttgccgaatctcagttcggcgttactggcaggaggaatgctggcgtttgccttgtcgttcgatgaaatcatcgttacgacctttacggcagagcaggtcgatgctgctgtgcgcgcggcagatgcagcatttgccgaatgggggcaaaccacgccgaaagtgcgtgcggaatgtctgctgaaactggctgatgttatcgaagaaaatggtcaggtttttgccgaactggagtccagtaataacacggcgtttgcgcgggcgtcatcgaatggtgatctgccgacaaaagcggacctgcaggcgcaacttgactcactaaataaacaaaaagatctttctgctcaggacaaactggtgcagcaggatctgacagatacattagccaccctcgataaaatcgatcgcataaaagaagagacagttcagctacggcaaaaagtcgctgaagcgccggaaaaaatgcgccaggcgaccgcggcgttgacagcacttagcgatgtcgataacgacgaagaaacgcgcaaaattctgagcacgctgtcgttgcgccagctggaaactcgcgttgcccaggcgctggacgatttgcaaaacgcacaaaacgatctggcgtcttataacagccagctggtttcgttacagacgcagcccgaacgcgtgcaaaatgcgatgtataacgcttcgcagcagctgcaacaaattcgcagtcgtctggatgggactgatgtcggcgagacaggcttacgtcccaggcagaaagtgttaatgcaggcgcagcaagcgttgctgaatgcggagatgaccagcagcgcgctggaagcgaaaatcgcccaactggaagcggaacaggcgcgtaagctgaagaaaaccgaaaaagattcgctgaaagacgaagtgctgcactctctgctgccgcgtgctttcagccgttttagccagacaatgatgtggatcgacacggttaacggtttgattatggtggactgcgccagtgccaaaaaagcggaagatacgctggcattactgcgtaaaagcctggggtcgttaccggttgtaccattgagcatggaaaacccgattgaactgacgctgaccgaatgggttcgctccggtagtgcggcacagggcttccagctgcttgatgaagccgagctgaaatcgttgctggaagatggcggcgtgatccgcgcgaagaaacaagatctgaccagcgaagagatcaccaatcacattgaagccggaaaagtggtgactaaactggcgctcgactggcagcagcgcattcagtttgtgatgtgcgacgatggttcgctcaagcgtctgaagttctgcgacgagctgcgcgatcaaaacgaagatatcgaccgtgaagatttcgcccagcgttttgatgccgatttcatcctgatgactggtgactggcagcgtaattcaaaagagatgacagacacacagtatattggccgcttcgccccctctccttccggcgagcttcattttggctctctgatcgccgcgctcggcagctatttgcaggctcgcgcccggcaaggtcgctggctggtacgcatagaagatatcgacccgcctcgtgaagttcccggtgccgcagaaactatcctgcgccagctggaacattacggtctgcactgggacggcgatgttctctggcaatcgcaacgtcacgacgcctatcgtgaagcactcgcctggttacatgaacaaggactaagttattactgcacctgtacgcgtgcgcgtattcaaagcattggcggtatttacgacggtcattgccgggtgttgcatcatggaccagacaacgccgcagtgcgtatccgccagcagcatccggtcacgcaatttactgaccagctgcgcggcattattcacgccgacgaaaaactggcacgggaagattttatcattcatcgccgtgatgggttgttcgcctacaacctggctgttgtggttgatgatcatttccagggcgttacagaaatagtgcgtggggctgatctgattgaaccaacaattaattcccaagggtgtgggtatttccgttgggtgttgtcgaaagtcgaataccagacgtattcgccaggcgtggcacaaccggtcatcgcacccgtattcggccagtgtagcgtaaattcgcgaccatcggccgtaattgaaaattttggggaatgcctaaggacgccccaaagcatgccaccggtagatccttgctggaatttatcgggactggataacgctggcctcgcacacggcaccgttcaatggtttgcttgctccgcgtcgtctggcgctgaaagtagctaacctggcggaagcgcaaccggatcgtgaaatcgaaaaacgcggcccggcgattgcccaggcgttcgacgctgaaggcaaaccgagcaaagcggcagaaggttgggcgcgtggttgcggtattaccgttgaccaggctgagcgtctgactaccgataaaggcgaatggctgctgtatcgcgcccatgtgaagggcgaaagcaccgaagcactgctgccgaatatggttgcgacttctctggcgaaactgccgatcccgaaactgatgcgttggggcgcaagcgacgtgcacttcgtgcgtccggtgcacaccgtgaccctgctgctgggcgacaaagtcattccggcaaccattctgggcattcagtccgatcgcgtgattcgcggccaccgctttatgggcgagccggaattcaccatcgataacgccgatcagtatccggaaattctgcgtgagcgtgggaaagtcatcgccgattacgaagaacgtaaggcgaagattaaagccgatgccgaagaagcagcgcgtaagattggcggtaacgctgacttaagcgaaagcctgctggaagaagtggcttcgctggtggagtggccggtcgttctgaccgcaaaattcgaagagaaattcctcgcggtgccggctgaagcgctggtttacaccatgaaaggtgaccagaaatacttcccgggtattggtgccgggttactgttcggtaagttgctgtcggtgtcatttggtccggcggggcttgggctggcggcaaatttccgccagttgattaccgtgctcggcgtgcttgccggggctggcatctttaacggtgtaaccaaatacgttgcccagtaccatgataatccgcaacagctgcgccgcgtggtcggcacttcatcagcgatggtacttggtttctctacgctgatggcgctggtttttgtgctggcagctgcgccaatcagccagggattgtttggtaataccgactatcaggggctggtgcgtttagtggcgctggtgcaaatggggatcgcctggggcaacctgttactggcgctgatgaaaggctttcgcgatgccgcaggtaatgcgttatcgctgattgtcggcagcttgattggcgttctcgcgtactacgtcagttaccgtttgggcggttatgaaggggcgttgctgggtctggcgctgattcccgcgctggtggtaattcctgccgccatcatgttgatcaaacgtggtgtcatcccgttaagctatctgaaacccagctgggataacggtctggcagggcagttgagcaaatttacgctcatggcgttgattacgtcggtgaccttgcct

SEQ ID NO: 24748 - DNA, 5034 bp, Homo sapiens
  SIMILAR (3389)..(3418): 901254mologous to Escherichia coli glycine-tRNA synthetase, beta subunit,accession number U00039,Smith-Waterman Score=44.
agcaaagtgacatcgatcatcgtggtttccttgccaaaaaataataagcctgcttactttacgcttgctgcagtaagcaagtacaaaatctctgcgttttgcgcataaaaaatcagacgacctgtcctcaaagtgccatttgtgcacggtaacaataacgtgaaaccagctatctcccgggggcatgctatgaccgatcaaatgtttgtcgagacactgattatcacgtcatcgttttttaccattgatgttgtcactggttttgtccgttcttcttatcgaacggaccggctagttacgcagtgcggcggaaattgaccagttctggttgcgcaatgcgcaaataatccgcggttttcaaaataacggatttatccagcatgcctgcattgaaggcgatttcatcaaatcgttcgaagagtagagggtcggcaaccagtttgagttttggatggaagctgaaaggggggatcgcgccgaagacacagcttaacgccgcttctgggctgccatcttttggctgataatcatattcccagcgtaccagtggcggcattgacatcaggatagactcggtgcgcccgccagtttgcaggccaaacagcgtgccgcgatcccagaccagattgaactcgacataacgaccgcgacgatataactggaaattgcgctcgcgctcgccgtaggccatcgctttccgtcgctcgacaattggtaaataagcgtcggtgtagcctttgcctaccgcctgcataaaggcaaaacagcggtcgaaatctggcgtgttcaggtcatcaaagaacagcccgccaataccgcgctgttcgttgcgatgtttgaggtagaagtattcgtcgcaccactttttgtaacggggataaacgtcttcgccaaatggcaggcacaggtcacgggcggtgcgatgccagtgaatagcatcttcttcaaaaccatagaatggggttaagtcgaagccaccgccaaaccaccagacgggatcggcacccggtttttcggcaataaaaaaccgcacattcgcgtggctggtgggaacatacggggttatgcggatgcaactggtgttgtcatccagggatgttactgatttatgaatctcagcggcaaagccgttgcggcgatggccagttttttccgcattaatccggacgaaattctggtggcccacgacgaactggatctgcctcctggcgtcgccaaatttaaattgggcggtggccatggtggtcacaatggacatcagcacgttatcgaatcctttgccacgcaagtccgcatcttcatgacgaccaaagccagtaaagtagaacggtttgtggttaatcaggaactgttcgcccttcactgccactgaccggatgccgacgcgaagcgggtagatatcacactctgtctggcttttggctgtgacgcacagttcatagagataaccttcacccggttgccagaggtgcggattcaccacttgcaaagtcccgctagtgccttgtccagttgcaaccacctgttgatccgcatcacgcagttcaacgctgacatcaccattggccaccacctgccagtcaacagacgcgtggttacagtcttgcgcgacatgcgtcaccacggtgatatcgtccacccaggtgttcggcgtggtgtagagcattacgctgcgatggatcccggcatagttaaagaaatcatggaagtaagactgctttttcttgccgttttcgtcggtaatcaccattcccggcgggatagtctgccagttcagttcgttgccctgttgctgcgtcggttgttcactctgcatcgcgctcggccccagacgggcatatttctgcatcaggtagacttcggcgattaagaacagggtgtaaagccctacgatcatgatcagtgagaaagccagttgtcctgtggttaaagcggagtgcgcggagtatgtcggtaagatgtcctgtatcgcccacggctgacgaccaaactcggtcataaaccacccggcttcaatcgcaatccacggcaacggcaaactccagagcgccattttcagcacacaagcgaggttggtggattttgccacgcagcgtctggacaagcgcaatcagcatcaccagtagcagcagggaaccacagcccaccatgatgcggaaactccagaataccggcgcaacctgaggtatcgcgccacgcatcgccgcctggtactgtgcggctgtgacatgattcatatccggcgcatagcgggagagcaacatgccgtagcccaggtcaccttccagtccccggaatgcctgcaacacatgcggctcacgattgccttgcgatatttcctgcattaacagccaggccatacgtccgcgttgcaagcgtgggtaggtttcagccatcaaattcttcagacccggcacgggtttatctaatgagtgagtggcgaggatcccggacgcgataatcagcagattaagcgcagcatctatttgctgccagagcgcgccaagctggcggaactgcgtttgctggtgatccctggccaggtggattatttgcaacacatcgaagaactggcggcgtttatcaagggactcggcgatgttccggtacgcctgaacgcgtttcatgcccacggcgtgtatggcgaggcgcaaagctgggcgagcgccacgccggaagacgttgagccgttggcattcatctgcaacgacattaaaatcgccaatgaactgggctgttttccccatgtggaaagttacattatcggaggactgattcgcccaggttatttttcggtaggagagagtctggcgctggagatgatcaatgccttttccgtagaacgtgcgtttatctcctgcgatgcgctgtcgctggagacggggatcaccaatgccagccatgtttgaggtcggggtgaaaacacggattattcaacgctcgcgtgaagttattctcatggccgatcactcaaaatttgatgccgttgagccgcatgctgtagcaacactatcatgtattaaaacgatcatcagtgacagcgggttacctgagactattgcacagcgttatcagcgagccggatctagcctgccggaagcgcaaccggatcgtgaaatcgaaaaacgcggcccggcgattgcccaggcgttcgacgctgaaggcaaaccgagcaaagcgtcagaaggttgggcgcgtggttgcggtattaccgttgaccaggctgagcgtctgactaccgataaaggcgaatggctgctgtatcgcgcccatgtgaagggcgaaagcaccgaagcactgctgccgaatatggttgcgacttctctggcgaaactgccgatcccgaaactgatgcgttggggcgcaagcgacgtgcacttcgtgtgtgccggtgcacaccgtgaccctgctgcatgggcgacaaagtcattccggcaaccattctgggcattcagtccgatcgcgtgattcgcggccaccgctttatgggcgagccggaattcaccatcgataacgccgatcagtatccggaaattctgcgtgagcgtgggaaagtcatcgccgattacgaagaacgtaaggcgaagattaaagccgatgccgaagaagcagcgcgtaagattggcggtaacgctgacttaagcgaaagcctgctggaagaagtggcttcgctggtggagtggccggtcgttctgaccgcaaaattcgaagagaaattcctcgcggtgccggctgaagcgctggtttacaccatgaaaggtgaccagaaatacttcccggtgtatgcgaacgacggcaaactgctgccgaactttatcttcgttgccaacatcgaatcgaaagatccgcagcagattatctccggtaacgagaaagtcgttcgtccgcgtctggcggatgccgagttcttcttcaacaccgaccgtaaaaaacgtcttgaagataacctgccgcgcctgcaaaccgtgttgttccagcaacagttggggacgctgcgcgacaaaactgaccgcatccaggcgctggctggctggattgctgaacagagtggcactgacgcgggggaccaaacgggctattccgatgaacgctgggtcccggatgctcacagtgaagcgccgagtccggtcagcgacatgctctccgcgttattgctgttaacgctggtgctggcgggcatggtacggatggctgcgcggctgttaatggcgaaaccgccgcaggccgttaaccggggtgatatcggctggttgaccacctcgccaatggtgattctgctggtcatgatgctggcgatgggaacgcatattccacaacctgtcatcaggatacctggcgggcgcttccactatagtcctcatcagggacgcacagatctgcctgcacaacgtagcacctggcatgatttttgccttcaggcaccgcatctgtttcggagaaacacagtgaacgttaattcatcgtcaaatcgtggcgaagcgattctcgccgccctgaaaacgcagttccccggcgcggtgctggatgaagagcgacaaacgcctgaacaggtcaccattacggtgaaaatcaatctgctgcctgacgttgtacagtatctttattatcaacatgatggctggcttccggtcctgtttggcaacgacgagcggacacttaacggtcattacgcggtttattatgccctttcaatggaaggggccgaaaaatgctggattgtggtgaaggcgctggtcgatgccgacagtcgggagtttccgtcagtcacaccgcgcgtccctgccgcggtctggggcgagcgagaaattcgcgatatgtacgggctgattccggttggcctgccggatcagcgtcgcctggtgttgcccgatgactggccggaagatatgcatccgctgcgcaaagatgcgatggattatcgactgcgccctgaaccgacgactgattccgaaacgtatccgtttatcaatgagggcaacagcgatgcgcgggtgatccctgtcggcccgctgcatatcacctccgatgaaccgg

SEQ ID NO: 24749 - DNA, 531 bp, Homo sapiens
  SIMILAR (531)..(13): 971254mologous to Escherichia coli f177,accession number L10328,Smith-Waterman Score=837.
ttaatacgcccgctgcagcgaactgatcgcaatgctaagttgctgtaacaccgggttatgcaccgactgcagcaccgcctcgtggtagcgaatatccgcttcgttaaacgcttcgcggtcctgattgttggcaatcatctcgttcagcgccgattcaatctgcgccagatcgctggaagtcgcgcgctctgctgcccaacgggcaatcgccggttccaccagatttcgcacttcgctcatggcactgataagccgtgggtcgtagtcattttccagcacccattgcagtacgtcagtgtcgaggtaattccactggttacgcggtgccacaaacgccccgcgataacgtttcatttcaatcagccgcttcgccatcagcgaacggaacacctcacggatgatgttgcgcgaggttgcaaactcctcacagagttccgcctcagccggaagcggcgagcctggcacgtatttgccgtgaacgatctgtttacccagcgtaatgccaatgcgatcggttttattgagagtcat

SEQ ID NO: 24750 - DNA, 1968 bp, Homo sapiens; identical to SEQ ID NO: 9152
  SIMILAR (397)..(1083): 901254mologous to Escherichia coli Hypothtical protein in gltJ 5'region ,accession number D90705,Smith-Waterman Score=1047.

SEQ ID NO: 24751 - DNA, 1555 bp, Homo sapiens
  SIMILAR (476)..(1030): 1001254mologous to Escherichia coli PhoH protein homolog,accession number D90706,Smith-Waterman Score=927.
atggtgatcgggcgcaccaaagaggccaacgaagagatcgacggcgacgaacgtccggaaacctctcacctcacccgcgttgatctgaaagaagatggcaaagggctgaagattgttcgccagagcctgccgtacggcactgccagtggcactcacggtctgtacttctgcgcctactgcgcgcgtctgcataacattgagcagcaactgctgagcatgtttggcgataccgatggtaagcgtgatgcgatgttgcgtttcaccaaaccggtaaccggcggctattatttcgcaccgtcgctggacaagttgatggcgctactgaaccagggagaaattgaaaccctgagaagatcaataatgagttccaaaattgaattagtaatgaaaagcttagcaaccagggaataccccgaaccagatggattcacagccaaattcttccagatgtataaagaagagctgagtatccccgcgggtactggagcaaagcgcggagagcgtgccggagtacggcaaagcggtcaatatcaaaaccaaacgcggcgtaattaagccgcgcacgccaaaccaggcgcagtacatcgccaatattctcgaccatgacattaccttcggcgttggcccggcgggtacgggtaaaacctacctggcagtggctgcggcagttgatgccctggagcgtcaggaaattcgccgtattctgctgactcgtccggcagtagaagccggtgagaaactgggcttcctgcctggcgatttaagccagaaagtagacccgtatctgcgcccgctgtacgacgcgctgtttgaaatgctgggctttgagaaagtcgagaaactgattgagcgcaacgttattgaagtcgcaccgctggcctatatgcgtggtcgtacgctgaacgacgcgtttatcattctcgatgagagccagaacaccaccatcgaacagatgaagatgttcctgacccgtatcggttttaactcaaaagcggttatcaccggcgacgtcacacagatcgacctgccgcatgccgctctggaagattccatcgctcgcttccagcaaaaactttcagacctcggctttcagattgaagaggcctcctggctgaatcccgtgcctaacgtctggtctgtacatattcgcgacaaagagtgcgcactgtgttttaccaacggtaaaggcgcaaccaagaaagcggcgctggcttctgcactcggtgaatatttcgagcgtctctcaaccaactacttttttgcggacttctggctgggcgaaaccatcgccaacggtccgttcgtgcattatcccaacgaaaaatggttcccactgaccgaaaatgacgatgtgccagaactgcatctgcagtcactctaccggatccttttggcgtcttggcaagatgaaaaagaatggcctttctgcagcacagctcagaaatgctccgaagagcaattgacattgcaaactcatttccaagggcttccctccagaagtcttcagaagctgggtttccctcgggaaccgtgccttggcctagacagtccatga

SEQ ID NO: 24752 - DNA, 1061 bp, Homo sapiens
  SIMILAR (1061)..(471): 1001254mologous to Escherichia coli similar to,accession number D90855,Smith-Waterman Score=1026.
atggcgcaagttacgattcgctttgtctgttggtgcaggtggaaagtaaaacggcactggataacctggacgaaatcctcgacgtcgaagggattgatggcgtgtttattggacctgcggatctttctgcgtcgttgggctacccggataacgccgggcacccggaagtgcagcgaattattgaaaccagtattcggcggatccgtgctgcgggtaaagcggctggttttctggctgtggctcctgatatggcgcagcaatgcctggcgtggggagcgaactttgtcgctgttggcgttgacacgatgctctacagcgatgccctggtcacgatcaaagccctgttccagcatgcgcaaagcaattttaatggcttgttcatgcaaaccttctaatttaccttcctgccagccaatttgatgtccttcctgccgcagccgttcagcaatagtcattaatctctccttttaatgacagttcggaatatcagcatcagtgagttgggttgtcgccagcacaatctcacgttcaaagccctgctccagcatgcgcaaagcaattttaatggcttgttcatgcataccttcctgccagccaatttgatgcccttcctgccgtagccgttcagcaatagtcattaatctctccttttgtagtggtgaacgttcggcaatctcctcaataaaacgggtgaaacgggaggtatcgccgcattgcagcagataattaaacagtgtttgtagctggctgtcattagtgaagcctctaaccaaaagcgtggtgatcctgtcgaccatgccgattaaatcgcggtcgcgaatatgcttttgaatcagttccagcagagctatacgccgatgttgcatgatctcatcgtcaggtacgatggtgatatccaccaacagaaaagcttcggtgtacaactgccgggcaagttgcggatcgtcaaactcatccagccagttgagtgagtacgggtaaggcgaggtttcgccatgataaaacagcaacggcaccaccagcgggactctgtcatagcctttgtcctggtgacgctgcat

SEQ ID NO: 24753 - DNA, 587 bp, Homo sapiens
  SIMILAR (62)..(268): 721254mologous to Homo sapiens polymerase (RNA) III (DNA directed) polypeptide K (12.3 kDa),accession number BC001381,Smith- Waterman Score=226.
ggcacgagagaacagcccacgtaggtaggacagctgccccaggtcccataggactgcatgcctcaagcccacgtcatgcagagccactcaactcaccctgctcagggcacgtggtttacctgcattcccctcttgcaggtcctacgtgtggaggacgtaccatctgacctctgcaggagagaaactcacggaagacagaaagaagctccgagactacggcatccggaatcgagacgaggtttccttcatcaaaaagctgaggcaaaagtgagcctccagacaggacaacgctcttcatcactggtggctgagctttttcccagcaggaatgggtcctcgaatcatcgtgcctcttttcacagaaaggacgttgtggtggcctcaccccagggcattgcccaacagggaactgttcagcataaacctgggggggccctcaggactaggacagggtgagccagtgctccctcctttcatgtacttggcctgagactgacctctccctaggtccaaatgccctagtcacatggcagacccacggcctggcccactgtataaaataaacctgtttgcttcttagtttgaaa

SEQ ID NO: 24754 - DNA, 4459 bp, Homo sapiens
  SIMILAR (2747)..(1260): 991254mologous to Escherichia coli K12 putative ATP-binding component of a transport system,accession number AE000185,Smith- Waterman Score=2493.
ttaacgcatcagcagatagatgctttcattgccgcgtacaatttgcagggcgatgatggccggttttgccgccagcactttacgcatttcagcaatcgagttcacccgatcgcggttgacgccaatgatcacatcgtctttttgcaagccagcctgagcagctgggcttcctttgacaacttcatcgattttaatacctttgccgccatcttttagctgaccatcgctcaacgttgcaccttccagcgctggcgtgatcatttcagcgctggccgacgaagaggtgctggtatcgagcgtcacttctacttccagtggtttgccgttacgcagcaggccaagcttcactttcgtgcccggctcggtggtcgccgatacgagagcgcaactcagcaaagctattcagcggtttgccgttgaggctggtaataatatcgcccgctttgacgcccgcttttgccgagccagaacctggcaacacttcgctgacaaacgcgccacgctgcacgtcaaggttgaaggctttggcgatatcggcactcatctcggtgcctttgatgcctaacaaaccgcgtttgatttcaccaaagtcgataagctgctgcgccagtgttcgcgccatattactggggatggcaaatccaatcccgacgctcccgccgccaggcgcaaggattgcagtgttgatgccaattaaatcacaccgcgtaaccagtggaattacctcgacactgacgtactgcaatgggtgctggaaaatgactacgacccacggcttatcagtgccatgagcgaagtgcgaaatctggtggaaccggcgattgcccgttgggcagcagagcgcgcgacttccagcgatctggcgcagattgaatcggcgctgaacgagatgattgccaacaatcaggaccgcgaagcgtttaacgaagcggatattcgctggatgggcgatgaggccaacatgccgcaaacgctccaggaacataaggcgctgttcgatgcgatacgacatcaggacggcgatgcggcagagcaggcggcgcatgatcgccagctcgacacgaaggttaaaggaaatcacatgacagctcgctacatcgcaattgactggggatcgaccaatctgcgcgcctggctttatcagggcgaccactgcctcttcgccacgcagatgaatattgctgggaagatcgtccgacagcagtacacgctgcggtcgttgtcgggacggttcagcgaccggawcttccgccagtaawtttacgcgtataaggatgctgcgggttttcgaagaccgcgcgccgtggaccaatttcaacaatttgcccgagatacatcaccgccacacgatgactaatccgctctaccaccgccatatcgtgggagataaacagatacgcaatgccgaaatcacgctggagatcgagcaacaagttgataatctgcccgcgaatagaaacatccagcgccgaaacggcttcgtcggcaatgatcacttttggattcaatgccaacgcgcgagcaatgcagatgcgctggcgctgaccgccggaaaactcatgcgggtaacgccaggcatgttcaggtaacaggcccacgcgctccagcaaccacgcaacgcgtgcagccgcgtctttacctggcaataaaccgtgtacacgcagcggttcgataatcgaatcaccgatggtctgacgtgggtccagcgaagcgtaagggtcctgaaaaataaactgaatatcccggcgtaatgcctgaagtttgccgggtgacaaggtatcgattcgctgaccgttaaagataatttcgccgccctgcgattcgaccaggcgcagcaacgcccgcccggtagtggatttaccgctgccagactcgcccaccagcgatagcgtttcgccaggccagagatcaaaactgactttctcaacggcatgcacttcccgcgttacgcgattcaacaaaccgctgcgcaaagggaaacgggtgacaagattacgcactcgtaaaacaggttcgccatccaccaccgttttctgctcgatggggggggcctgtttcgctggatgttcaagcgatatcaacgggaaacgtcggggataatctaaccctttcatcgcaccaagttgcggaacagcagctaacagcgcacgggtgtaaggatgttgcggtgcatgaaaaatctgttcgacggtacccgtttccaccgcctcgccctgatacatcaccagtacccgatcggcaatctctgccaccacgcccatatcgtgagtgataaagataacgcccatcgacatctctttttgcaatactttgattaattgcaggatctgcgcctgaatagtgacatccagcgcggtggttggctcatcggcaatcagcaccgccgggcggcatgacagcgccatcgcaatcatcactcgctggcgcatcccgccagagagttgatgcggataacgtgaaagaatggtttgtgcctcaggaatgcgtacctgatccagcatccgcttcgcctcgaccatcgcttcttcacgactggcgttctgatgcagacgaattgattcggcaatctgttcacccacagtaaataccgggttcagcgatgtcatcggctcctgaaatatcatcgccatatccgcaccgcgaacatggcgcatttgtgcagcgttctgctcgctaagttcaatcacttcgcgactgcgccgctgcaacagcattttatcgcactgtactaaaccgcccgcatgttggtttgcgggcgtcatggtcttttgttcggcttcttcccaggcttcataggcgttaacgatacgcgccaccacagggtgacgaaccacgtcttcgctgtggaagaagttaaagctgatctcttcgacatcgggccagcacttcgatggcgtgacgtaagcctgatttagtattacgcggcaggtcgatctgtgtgacgtcgccggtgataaccgcttttgagttaaaaccgatacgggtcaggaacatcttcatctgttcgatggtggtgttctggctctcatcgagaatgataaacgcgtcgttcagcgtacgaccacgcatataggccagcggtgcgacttcaataacgttgcgctcaatcagtttctcgactttctcaaagcccagcatttcaaacagcgcgtcgtacagcgggcgcagatacgggtctactttctggcttaaatcgccaggcaggaagcccagtttctcaccggcttctactgccggacgagtcagcagaatacggcgaatttcctgacgctccagggcatcaactgccgcagccactgccaggtaggttttacccgtacccgccgggccaacgccgaagtaaatgtcatggtcgagaatattggcgatgtactgcgcctggtttggcgtgcgcggctataattacgccgcgtttggttttgatattgaccgctttgccgtactccggcacgctctccgcgctttgctcccgtaccccgggctcttttatcgccaggacgtggccggcacttactctcggagcttctttctgtcttccgtgagtttctctcctgcagaggtcagatggtacgtcctccacacgtaggacgtatctctggatggccttcttcaggtccaggactgtggcactctgcagttcaaagccctgctccagcatgcgcaaagcaattttaatggcttgttcatgcataccttcctgccagccaatttgatgcccttcctgccgtagccgttcagcaatagtcattaatctctccttttgtagtggtgaacgttcggcaatctcctcaataaaacgggtgaaacgggaggtatcgccgcattgcagcagataattaaacagtgtttgtagctggctgtcattagtgaagcctctaaccaaaagcgtggtgatcctgtcgaccatgccgattaaatcgcggtcgcgaatatgcttttgaatcagttccagcagagctatacgccgatgttgcatgatctcatcgtcaggtacgatggtgatatccaccaacataaaaggttcggctgtccggctgccggccaagttgcggatcgtcaaactcatccagccagttgagtgagtacgggtaaggcgaggtttcgccatgataaaacagcaacggcaccaccagcgggactctgtcataacctttgtcctggtgacgctgcatggcggcagtggcatatcgcattagccgaaaagccatattcttttctgcagagctttgatgttcaatcacgcagtacatatagccgtcaccgtcgctggtttccacggaccacaaaacatccgagtagtaagcgcgcaaacttttttcaataaaactagtgggttccaggcgtaaggtttgcaggctgccaagcttgcgcagcggttctggtaaatgtatttcgagaaaatcccgtgcggtttcgggtgtgaacataaagggtttaaataccgcatcatgcggggagg

SEQ ID NO: 24755 - DNA, 1479 bp, Homo sapiens
  SIMILAR (1086)..(544): 981254mologous to Escherichia coli arginyl-tRNA-synthetase (AA 1-577),accession number X15320,Smith-Waterman Score=894.
ttatgtgccacattttctaatccagtctatcattgatgacattgggctgatccagtcttggtccaggtacaaaatgagtggggagattttgcggggcatattatttcgagtggccggggtaatgttagattgaattcggactggacgtaacgaatcgtataagggtgatataagccggtataaatttgtgtcagctcgagctctacggaacgaagtgcgaggtggcagatgccataagacgatccggagggtcagcgttggtaaaaaagtaataggcctcaagttccgccatctggtgccagtggtgacgccggaatcgattgtcattccgcctgcgccagtcgccaacgatacgctggttgccgaagtgagcgacgctccgcaggcgaacgacccgacatttaacaatgaggatctggcttgatttgccgttttatcgacacccactgccattttgatttcatgcccaggccgctggggaccagccgcaggctccgagtgcggggtccgcggagcccacgcccaccgggaactcgcgctgcgggcgttttcctgctgctgcttttccagcaatgcaatcagcataccgaactgagtgccccagtcgccgacgtggtttgcccgaatcactttgtgaccgaggaactccagagtacgcactgctgcgtcaccaataatgtaggagcgcaggtgaccgacatgcatctctttcgccacgtttggcgcagagtagtcaaccacaatggtctgtttttctggcgtagcaacaccgagacgatcggacgccagcgcctgctgaacatgttcagccaggaatgccggatcaaggaaaatgttgataaagcctggaccggcgatctcaactttgctggcgataccgttaagatccagatgagtcagcacctgctctgctaattgtcgcggtgccatacccagttttttagcaactgccatcatgccgttagcctgatagtcgccgaactgaacttttgctgactgacgaacctgcggttcgcaatccgcaggcgcgcctgccgcaatcatggcctgacggactttttctgagagaagagcctgaatattcaccggaataccacaggagttagagcgattattcatttctgtatcaatctctaagcctaatacagccaaatgttccatgaccagacgacgaattaagcttgaattctctcctattccgccggtgaatataattccatccaggcgacgtaatgaagctgcgtgtccggcaatatgacgggcaattcggtgaacaaaggttttaattgccagttgcgcgcgttcgtgaccttcatgccaggctttttccagaacacgtaaatccgaagaaagaccggaaatacctaataatcccgactctttattcactacgcgttccaggtcacccaggctctggttggtttggctggcgacccaggacatcgcaccaaagtcgacatcgccactgcgggtacccat

SEQ ID NO: 24756 - DNA, 1879 bp, Homo sapiens
  SIMILAR (1039)..(1443): 971254mologous to Escherichia coli K12 orf, hypothetical protein,accession number AE000508,Smith-Waterman Score=679.
tcgactggctggtggaggccactgcaagccagatgccgttgcaaatggataccgccgcggttgtttgacagcggcaaatcgttttatatgtgcgcctgtcgtcaggatgactacgcgccgtattactttttaccaaccaaacaaaactggctggatgtgattcgcgcctccagtgcggataccgggctttattcgtagcggagggtcgctggaaaggcgattacctacttggatggcgggatcaggtgatgcgattccggttaaagaggcggcaaggcagggcgctaaaacgttggtcgtcattcgcactgtgccgtcacaaatgtattacacgccccagtggttcaaacgcatggaacgctggctgggtgacagtagcctgcagccgctggtcaatctggtgcagcatcatgaaaccagctatcgtgacattcagcaatttattgagaaaccaccgggcaagctgcggatattcgaaatttatccgccgaagccattacatagtatcgcgcttggcagtcggattccggcgctgcgtgaagactataaacttgggcgtttatgcggtcgttatttcctcgccacggttggcaagctattaactgaaaaagcgccgcttacccgccatctggtgccagtggtgacgccggaatcgattgtcattccgcctgcgccagtcgccaacgatacgctggttgcccaagtgaaccgacgctcctggcgatgaagaggccagcctgcaacgcgcggcacaagcgggcgtaggcaagatcattgttccggcaacagaggcggaaaattttgcccgtgtgttggcattagcggaaaattatcaaccgctgtatgccgcattgggcttgcatcctggtatgttggaaaaacatagcgatgtgtctcttgagcagctacagcaggcgctggaaaggcgtccggcgaaggtggtggcggtgggggagatcggtctggatctctttggcgacgatccgcaatttgagaggcagcagtggttactcgacgaacaactgattctggttataacgctacgaactgccggtgatcctgcattcacggcgcacgcacgacaaactggcgatgcatcttaaacgccacgatttaccgcgcactggcgtggtttacggtttttccggcagtctgcaacaggccgaacggtttgtacagctgggctacaaaattggcgtaggcggtactatcacctatccacgcgccagtaaaacccgcgatgtcatcgcaaaattaccgctggcatcgttattgctggaaaccgacgcgccggatatgccgctcaacggttttcaggggcagcctaaccgcccggagcaggctgcccgtgtgttcgccgtgctttgcgagttgcgccgggaaccggcggatgagattgcgcaagcggtgcttaataacacgtatacgttggttaacgtgccgtaagccggataaggcgttcacgccgcatccggcagttggcgcacaatgcctgatgcgacgcttaacgcgtcttatcatgcctacaggtttgtgccgaaccgtaggccggataaggcgttcacgccgcatccggcagttggcgcacaatgcctgatgcgacgcttgtcgcgtcttatcatgcctacaagtaggtttgtgccgaaccgtaggcccggataaggcgttcacgccgcatccggcagttggcgcacaatgcctgatgcgacgcttgacgcgtcttatcaggcctacagtgaacagaacccgtaggtcggataagcgcgttcacgcccgcatctcgacagctcgttgcgctgatgtgcgacggcgtaaatgcgttcttatcaaggcggctcggttgggcaacgtattctttggttaagtgagcgcctgtcat

SEQ ID NO: 24757 - DNA, 2046 bp, Homo sapiens
  SIMILAR (1983)..(2039): 941254mologous to Escherichia coli topoisomerase IV subunit,accession number U28377,Smith-Waterman Score=94.
tcaatttttataggggatggaagatgagtgaggtggtccaccgatattcccgctacgtccacgtttcgcggttctcccagcggcagtttctttagtggcggactggtagcggaacgtaacggcatcgagagccgattctcggccttgatgtgctgtacatttgccctgcgcgacgaatacccgcgaatgctgaatgtcgacaacaaaggcttgcgcgatcatatcgaactgcaaccgctggctgtggcgcaagttatcctggcggtgatttccgcaagaacgcggtgtatgttccgatgtggtgatccgcgcattgcgagccagaaggtcgatttgcagaaactggttcacgaagatatggcgaagattttgcttcaacggcccccggatttcgccgagcagccaccaggaaaagagtacgccgtaaacggtaacggccatgtgcttaagctggcaatactggcaggcaagtttttcaatacgaacaacattaagctccacgccagtgccgtcgccagaatcgcactgtaggccagcgccataacacagtaagcgaccacactcatcaccagcgccgcatacagcatctgccaggatgttacgacaataaatccacgcgcggatgacgggcatacagacgtttagcgacatcgcgctcgccccccaactgacgccggagaggattgccagcatggcactttcatcgtaagagagatcgagttgccacggttgcaacacgttaagtttaggagagattttacaacgggggaataaccaggacaaataaccgccatgccgacgggttctttttggatcaggcaagacgcataatccagcatcagattgttgatcgtaacgggtacggtaaaggacagagtgttcgccggtaaaaagtttcccatcgcgcaccagttcacgcggatagctgttttcaatcgcgaaccaatccgtttggctaaaccaatcggttgatgctggaagtaaccaatacatcatccgccactggcgcggcttgcgggtaaacatccgcccgcgataccactcctccgcttcccggtggttgagcatcgactgattccaccagcgccaatggtggtaaaacgcagaaaaccgctctcgtcgatgtgggtgacataaagccgacttcatccatatgtccgacaacggcaacttttggaccttattccccttacgggcaacaaagctgcccagaccatcgaaggtgatttcatcacgcaaggttccagcgtgtttatcagaatgtcgcgaacttcctgttctcgccgctgacggcgctggcttcgcacaactgttgcagtaactcaatgtcatggacaagctcctgttgcgcggctttcgctttgcggcgtaaccacaacccaaaccaggtgccagacgtttgattccgaaagcgatcaccagacgccggtaatgccgcccgccagcgtattggcggtaatcatcggcaacgagccaacgatgcagggcggtacccatgttaatggtctgcgtcagtgacctttggacgcgatgcgtgagttctgtgaataccgcaatattctgccgcgcgtgtaaagctgtcggcggaagatatctgggatcgctgcgcctatgtgcgagctgttccttgtggaaggtgacccgcaggcggatctgccaagcaggcgcgcgatcgcgaatatcaggcgatatgccactgaaaggtaagatccttaacacctgggaagtctcttccgacgagtgctggcttcgcaggaagtgcacgatatttcggtagcgatcggtatcatcctcgcggatgcggactctgatggtctgcacattgccacgctgctctgcctttgttcgtaaaacatttccgcgcgttggtgaaacacggtcacgtttagtcgcactgccaccgctcacgcttgatccgaacactcgccgtctgggcagttgactatcgatgatgaagacgatcagcgtactgacgcgatgatgatatgctgctggcgaagaaacgctcggaagatcgccgcaactggttgcagagaaaggcgacat

SEQ ID NO: 24758 - DNA, 1467 bp, Homo sapiens
  SIMILAR (1093)..(1464): 1001254mologous to Escherichia coli Potassium-transporting ATPase (EC 3.6.1.36), c chain (ATP phosphohydrolase (potassium- transporting), C chain),accession number D90708,Smith-Waterman Score=609.
aattgcaattcagggcatacacagaccaggcagtcttcggcatgtccaaagaacaaagagaagattgggagttttattagaaagatcaatgttatgtactgttttgaaagaaatctcatcagcactagagaagctttcgaaagctggcaagctctgactgagccaatagaaaagatatgggaagactatttggaggaacagatgaacagctggaacagaaaggaagaagaagccggggatcctctagagtcacctacgcatggagctgcctgccgcagacagatacaatcgagctcggtaccggaccatgagagaactctggtagttatatcctacatcttgaataggaattgcatacacagctatgaagttactcttaaattccaggcccacagtccccacaatctagtccagatcttggttggctacagtgttgaaacccttaaagactcctctggaaagctcctagatctgataaatgaattcagtgaagtctcaggatacaaaatcaatgtacacaaatcagtagcactgctgtacatcaacaatgacaaagctgagaatcaaatcaagaactcaatctcttttacaacagctacaattcagctcggtaccagacagagaacactgcagagttcaaattccatggttatttttaacatgattagggtccaagaaactggagacattgtcatttcaaatgcatatgtggatcttgcaccaacatctggtacttcagctaagacaccctctgagcaccatcgcgatccacgctcgctggcgttgtccgccagaaagggtatccacgctttgatctgccagatgagttattcccgtggcctgcattgctttcgttaccgcttcttcatcctctttgcgccagcgggtaaacagcggttgatgcggataacgtccacgcgccaccagctcctgcacggtgatatcgcccggcgtggtagcattttgcgccaacagaccaatccggcgtgcaacctctttactggcgcgttcgggactcataccttcctgaagtgtgcgttcagcaacaaacagcgtcgctttaccgtcaaacggtacgctatgagcagtcgtggtcgcccgtcggcaacggcagaaatgccctataatccacaggcttctggcgggagcaatctggcggtcagtaaccctgagctggataaactaatagccgcacgcgttgctgcattacgggccgctaacccggatgccagcgcgagcgttccggttgaactggtgacggcatcggcaagcgggctggacaataatatcaccccgcaagcggcggcctggcaaatcccacgcgtggcgaaagcgcgtaatctcagcgttgaacagctcacgcaactgatcgcaaaatacagccaacaaccgctggtgaaatatatcggccagccggttgtcaacattgttgaactcaatctggcgctggataaacttgatgaataa

SEQ ID NO: 24759 - DNA, 1488 bp, Homo sapiens
  SIMILAR (1041)..(628): 871254mologous to Escherichia coli Outer membrane protein P.69 precursor,accession number D90754,Smith-Waterman Score=640.
tcactccgtgatgaatatcatgttattgttaagtgccagcgaatgtggcgttgaagatccgttgcgccggtccgggtcccggtcatgatgaccgggaccacagagaggcgatggttctgtcagaaggtcacattcacgtgtggcctgaccgttatacccttcagcgctgctgccgctgacgctgtgggcataaccggcctgaacgcccagggtgatattttcccggacacgggcttccagtccggcctgcaggtccagtgatgtgccattctgtgagggagagaacgtcatcccgctgcctgcagtggaagtttctgatatgttgtcgcgcctggacgccccgttgccgctcatgggaagaaatccatcaccacgcttgatctcaatctgctgctttgtctgcaactgctgatgcaggagcgcagcgtaaccaaagcggcgaagcggataaacgtgacaccttcggcggtgagtaagtcgtctgatttcgcaggtcaacccatccgtggcatcagcgtacggtttttcaccaaagttcaataagtaccggacattgagataatgcccgccagcatctccggtcgtgttggttttaggcgtgggagcgggttcaggcgtaggatcggggttgacagcactactcccgctgatattcaataaatcccctttattattaacgccattaccctcgccaacaacatcagcacgcataataaaggtactgttaccgctcaggttctctacgtttaatgtggcaaatgtgccggcagttgacccgtggctggcaaaatcgacagttgaatggctcagcgccagcgtgtcgagattagaattacttgttacgttccagacgctgttattcattgcaacgtccagttttccgccattgacattatcgctgagggaggaacctttggaaagaacgctaccgttgataagcatacgacccgaggcgttgatgcggctggcggcataaccatcgtcatgttgcgttgcgatggccatctggtcgggtgtactcatatcaatgatcacgtcgtttccacgtaccaccgctccaataatcgttcctggcggtagcttgatttcgtcaatgactctgcgagggccgtattttcggtgcaccagcagaccacccctgtaggagatcaagggttcgaatccagcaaccaccaccggacgatgtaagtcgctgccgatacaattataggcgtcggtgcccgataaccagtactgacgtgacccggcgcgaggaacagcatcgataccgttatccggctgttccagcaaagcgctttcgcctgttgcagactgatagcggtggtcggcatagtggatttcaaaacctaacccgaagatacaccactttgacgggttggattttcctgcaccagtttcaacgcatccatcggcgagtaaacgatgcgcacatcggcaccgcgatgcttttgcctgcaacagcgatccctgtttccccggcacgcgcat

SEQ ID NO: 24760 - DNA, 394 bp, Homo sapiens
  SIMILAR (328)..(221): 471254mologous to Escherichia coli similar to Desulfurolobus ambivalens hypoth. 28.3 kDa protein in sor 3' region,accession number U00006,Smith-Waterman Score=85.
ctgtacatttgccctgcgcgacgaatacccgcgaatgctgaatgtcgacaacaaaggcttgcgcgatcatatcgaactgcaaccgctggctgtggcgcaagttatcctggcggtgatttccgcaagaacgcggtgtatgttccgatgtggtgatccgcgcattgcgagccagaaggtcgatttgcagaaactggttcacgaagatatggcgaagattttgcttcaacggcccccggatttcgccgagcagccaccaggaaaagagtacgccgtaaacggtaacggccatgtgcttaagctggcaatactggcaggcaagtttttcaatacgaacaacattaagctccacgccagtgccgtcgccagaatcgcactgtaggccagcgccataaca

SEQ ID NO: 24761 - DNA, 1665 bp, Homo sapiens
  SIMILAR (247)..(1050): 971254mologous to Escherichia coli PepP (proline amino peptidaseII),accession number D90281,Smith-Waterman Score=1362.
atgctggcgctgatggatgcggatggaaacattgcgtggagcggggagtatgatgagtggggcaaccagctgaatgaagagaacccgcatcacctgcaccagccgtaccggctgccggggcagcagtatgataaggagtcggggctgtactacaaccggaaccggtactacgatccgttgcaggggcggtatatcactcaggacccgataggtctggaggggggatggagtctgtatgcgtatccgctgaatccggatgccgcgccagagaaactgggcgttgaccgcgcactggcattcagcgaaatcaatcagcaactttatcaactacttaacggcctggatgtggtttaccatgcccagggcgaatatgcatatgctgatgtaatcgtgaacagtgcgctggaaaaactgcgtaaaggttcgcggcaaaatctcaccgcaccggcaacgatgatcgactggcgtcctgttgttcgtgaaatgcgcctgttcaaatcgccagaagagattgccgtactccgccgcgcgggagaaatcaccgccatggcacatacacgggcgatggaaaaatgccgtccgggaatgttcgagtaccatctggaaggcgaaattcaccacgaatttaaccgccacggtgcgcgctatccgtcctataacaccattgtcggcagcggtgaaaacggctgcattctgcactacaccgaaaacgagtgtgaaatgcgcgacggcgacctggtgttgattgacgcgggttgtgaatacaaaggttacgctggcgatattacccgcaccttcccggtcaacggcaaattcacccaggcccagcgtgaaatctacgacattgtgctggagtctctcgaaaccagcctgcgcctgtatcgtccgggaacttccattctggaagtcactggtgaagtggtgcgcatcatggttagcggcctggtaaaactcggcatcctgaaaagtgatgttgatgaactgatcgctcagaacgcccatcgtcctttctttatgcatgggcttagccactggggaagtgacgctcattttcccgattatcctctggcgtcgcccagtaataatgaaattgatttacttaatctaatctcagttttatggcgggccaaaaaaacggtcatggcggtcgtttttgcgtttgcctgcgcaggcttgctgatctctttcatcctgccgcaaaaatggaccagcgcggcggttgtcacgcctccagaacctgttcagtggcaagagttggagaaatcattcactaagcttcgtgtgctggatctggatatcaaaattgatcgtacagaagcatttaacctgtttatcaagaagtttcagtcggttagcttgctggaagagtacctgcgttcatcaccttatgtgatggaccaattaaaagaggcgaaaatcgacgaactggatttgcatcgcgcaattgtcgcattgagcgaaaaaatgaaagcggttgatgacaatgccagtaagaaaaaagatgaaccgtcactgtatacctcctggacgctaagttttaccgcgccaaccagtgaagaggcgcagaccgttttgagcgggtatatcggattatatctctaccttggtggtgaaagagtcgctagaaacgtccgtaatacactggagatcaaaacccagttttga

SEQ ID NO: 24762 - DNA, 495 bp, Homo sapiens
  SIMILAR (495)..(271): 1001254mologous to Escherichia coli hydrogenase isoenzyme hypD,accession number X54543,Smith-Waterman Score=400.
tcgaaactctatccagttgtgatggcaggtggctccggtagccgcttatggccgctttcccgcgtactttatcccaagcagtttttatgcctgaaaggcgatctcaccatgctgcaaaccaccatctgccgcctgaacggcggtcaggctcggcgtcggtgccgataccatactgacgtgacccggcgcgaggaacgcatcgataccgttatccggctgttccagcaaactgcgcaacgtcgggataagcgtaatgtgctggcagaagaatttcaacgcatccatcggcgagtaaacgatgcgcacatcggcaccgcgtgcttttgcctgcaacagcgatccctgtttccccggcacgcgcatggcgtcgccaaaggtacagaagatgacttccggatggctggcaatctccacgcaggtgtcgattctacccatcggcagtacgcacaccgggcaccccggaccgtggataaactcaacgttttccggcagtaa

SEQ ID NO: 24763 - DNA, 5355 bp, Homo sapiens
  SIMILAR (1429)..(2832): 991254mologous to Escherichia coli 79-kDa multifunctional protein,accession number M74164,Smith-Waterman Score=2400.
atggactggctggctaaatattggtggattctggtgattgtctttttggtaggcgtcctgctgaacgtgattaaagatctcaagcgcgtcgaccataagaaatttctcgccaacaagccggagcttcccccgcatcgtgatttcaacgataagtgggacgatgacgacgactggccgaaaaaggatcaaccgaagaagccaggtaatctgtcttttacatcatttcaatcacatcatcatcgccaggcttaccgccacttagaataccgacagtatgcgcgtgtgcacctgcgcttgcagcagtgccggacaggtccggcaacttccgactccggtatagaagttaaccagaatatagctgtcgccagagcgggtgacattgtaagcgccagattcggcattccatggaacgccaccatccgcatcggcatatgtatccgttgcccttctggcaaaagcagccacatgcgcggcgccaccataaacatcaccttgattggtaagcagcaggaaaaagaagctaatggtctggacccggaagtgctggcggagattaaccgcgaacgcgaggccttcctggcagcacagcagggaagtacttcaacggagttgtttaccaccattgaaggcaactacgctgatgctgtgcgcctgctgacgactgctcatagcgtaccgtttgacggtaaagcgacgctgtttgttgctgaacgcacacttcaggaaggtatgagtcccgaacgcgcctggtcgccgtggatagcggagctggatatctatcgtcaggattgtgcgcatgtggatattatctctccagggacgtttgaaaaaattgggccgattattcgcgcaacgctaaacaggttataccccatgtcatcactgaatattaaacagggaagtgacgctcattttcccgattatcctctggcgtcgcccagtaataatgaaattgatttacttaatctaatctcagttttatggcgggccaaaaaaacggtcatggcggtcgtttttgcgtttgcctgcgcaggcttgctgatctctttcatcctgccgcaaaaatggaccagcgcggcggttgtcacgcctccagaacctgttcagtggcaagagttggagaaatcattcactaagcttcgtgtgctggatctggatatcaaaattgatcgtacagaagcatttaacctgtttatcaagaagtttcagtcggttagcttgctggaagagtacctgcgttcatcaccttatgtgatggaccaattaaaagaggcgaaaatcgacgaactggatttgcatcgcgcaattgtcgcattgagcgaaaaaatgaaagcggttgatgacagtgccagtaagaaaaaagatgaaccgtcactgtatacctcctggacgctaagttttaccgcgccaaccagtgaagaggcgcagaccgttttgagcgggatgttcgcacaaacagcggggaaacattatccggcccccatcaccgcagtaaaaaccattgaagctgcggcccgttttggtcgtgaagaagccttaaacctggaaaacaaaagttttgtcccgctggcgcataccaacgaagcccgcgcactggtcggcattttccttaacgatcaatatgtaaaaggcaaagcgaagaaactcaccaaagacgttgaaaccccgaaacaggccgcggtgctgggtgcaggcattatgggcggcggcatcgcttaccagtctgcgtggaaaggcgtgccggttgtcatgaaagatatcaacgacaagtcgttaaccctcggcatgaccgaagccgcgaaactgctgaacaagcagcttgagcgcggcaagatcgatggtctgaaactggctggcgtgatctccacaatccacccaacgctcgactacgccggatttgaccgcgtggatattgtggtagaagcggttgttgaaaacccgaaagtgaaaaaagccgtactggcagaaaccgaacaaaaagtacgccaggataccgtgctggcgtctaacacttcaaccattcctatcagcgaactggccaacgcgctggaacgcccggaaaacttctgcgggatgcacttctttaacccggtccaccgaatgccgttggtagaaattattcgcggcgagaaaagctccgacgaaaccatcgcgaaagttgtcgcctgggcgagcaagatgggcaagacgccgattgtggttaacgactgccccggcttctttgttaaccgcgtgctgttcccgtatttcgccggtttcagccagctgctgcgcgacggcgcggatttccgcaagatcgacaaagtgatggaaaaacagtttggctggccgatgggcccggcatatctgctggacgttgtgggcattgataccgcgcatcacgctcaggctgtcatggcagcaggcttcccgcagcggatgcagaaagattaccgcgatgccatcgacgcgctgtttgatgccaaccgctttggtcagaagaacggcctcggtttctggcgttataaagaagacagcaaaggtaagccgaagaaagaagaagacgccgccgttgaagacctgctggcagaagtgagccagccgaagcgcgatttcagcgaagaagagattatcgcccgcatgatgatcccgatggtcaacgaagtggtgcgctgtctggaggaaggcattatcgccactccggcggaagcggatatggcgctggtctacggcctgggcttccctccgttccacggcggcgcgttccgctggctggacaccctcggtagcgcaaaatacctcgatatggcacagcaatatcagcacctcggcccgctgtatgaagtgccggaagtcggtgtggcggtgggcctgcacggcgccagtgtgcagcagcaaaaatcattctgtccttctgttagtatctactcacagccgatcccgggcctgcagcaactctgcgccgctccccccccccccggcttagtgcaccgaacggcaatctccgagggggtcggaatgcctttacacgtcgtcaatttaccgccgaaaagatttgcgcgtaaacgcctggagcccaaatgggtacggataacttggcagttcgctgatatgcaagatatcggtaagacgccgctcaccgcctgccgttgccagcaagttttcagcaatgttacgcgccgacatcagcgcccgcagcatcggcataacgccacgtttgcgccagatttgccgataaccatcgaactcttcgactaccacatcccacgcatcgtttcgatatccagcgcgttcagccccatcattgacgttgccagcgcactacgcagggtgttctcacgttcgggcgtcatcaccgcctgcaacaaccaaagcatttcctgcgcttccagagtttcaaaaacactgtcgcggttcgaaagtgtagtgggcgtgaacttcgctacgcgccttcatataagtgaagatatccgcaccccggaatgcatatattgcctgcttcgggtcgccattagcaacaatgcggttcccgctgatggtgccagataccgcgaaaaatcggtactgctgggggaccgggtggccccgagcggcggcgagcggtgcaagagggggaacggaggggcccgtaaaggggggcgcgctagaggaggagcccctagggatccgaagggagcagcaagggcgaaggccaatgcatggccatggacggagccaagagagtgttccttgattgctggcgaaatcgccatcgaatgccagcgtgggattggtcaccaggatcgttttcagcgcctgatcaccacgctacgtcaggtgctggagtgcgatgcgtctgcgttgctacgttacgattcgcggcagtttattccgcttgccatcgacggtctggcaaaggatgtactcggtagacgctttgcgctggaagggcatccacggctggaagcgattgcccgcgccggggatgtggtgcgctttcccgcagacagcgaattgcccgatccctatgacggtttgattcctgggcaggagagtctgaaggttcacgcctgcgttggtctgccattgtttgccgggcaaaacctgatcggcgcactgacgctcgacgggatgcagcccgatcagttcgatgttttcagcgacgaagagctacggctgattgctgcgctggcggcgggagcgttaagcaatgcgttgctgattgaacaactggaaagccagaatatgctgccaggcgatgccacgccgtttgaagcggtgaaacagacgcagatgattggcttgtcccctggcatgacgcaactgaaaaaagagattgagattgtggcggcgtccgatctcaacgtcctgatcagcggtgagactggaaccggtaaggagctggtggcgaaagcgattcatgaagcctcgccacgggcggccaagctgctgagggtgttgcagtatggcgatattcagcgcgttggcgatgaccgttgtttgcgggtcgatgtgcgcgtgctggcggcgactaaccgcgatttacgcgaagaggtgctggcgggcgattgccgcgaccgatttgtttcatcgcctgagcgtgtttccactttcggtgccgccgctgctgccgttgaggcgttgcgtgaccatctcaatacgctgggcggcgagcaccatgaccccgtgcagttgctgaatatttactacgaaacgccggataactggctgcgtgggcacgatatgggcttacgtattcgtggcgaaaacggtcgctatgagatgaccatgaaagttgcaggaagagtgacaggcggcttacatcagcgcccggaatataacgtggcgttgagcgaaccgacgctcgacctggcgcagttaccgacggaagtctggccgaacggcgaattgcccgccgatctcgcctcccgcgtgcagccgctgttcagcaccgatttttatcgcgaaaaatggctggtggcggtcgatggtagccaaattgaaatcgccctcgaccagggggaagtgaaagcgggtgaatttgctgaacctatctgtgagctggaactggaactgcttagcggcgacacgcgcgcggtgctgaaactggcgaaccaactggtatcgcaaaccggattacgccagggcagcctgagcaaagcggcgcgtggctatcatctggcgcagggcaatccggcgcgtgaaatcaaaccgaccaccattttgcatgttgcggcaaaagccgatgtggaacaggggctggaagcggcgctcgagctggcgttagcgcaatggcagtatcatgaagaactgtgggtacgcggcaacgatgcggcgaaagaacaggtgctgcagccattagcggccagccaggaggctggaccaacgcatatgtga

SEQ ID NO: 24764 - DNA, 1890 bp, Homo sapiens
  SIMILAR (1869)..(886): 1001254mologous to Escherichia coli hydrogenase isoenzyme hypD,accession number X54543,Smith-Waterman Score=1727.
ttactcgttatccggtttaagacgacgacgactaataattcgcagcagacgccacagtacccatgccagcaatatcacactgatagccgccagcaccgccagcagaatcggatggtttgccagcgcataccacacgcgctcgaaccacggcagatgacctacgtaataaacgtcgccaacacgtaggctgttgataccggactcgcggatcaccgcgaccgaaccgaacatggtggcgcgtttgccgctatcgttcaccgcatcgttaagcatttcataaccgcgtgggctatctgccaacagcgcaatcacgctgcgctggtcgttatacggcgactggaagccaatcaccgccgccatcgcaccggaagaggtcagcgttgaccgggtttctgccgcgcgatcgctctcgtccggcacaatgccggggaacggggtctggcgcatcggtgttttcacccagctttcgtcgccacccggcggcgttttcacaagttgcggacataaccgttccacgtccgccagcagggttatggcctgtgccattgaccactgcgcatgttcgctcatcagatttcgtgcaatccactgcgcaatattgccaggttcgaatacggactgcttcgccaggtagcctatcagttcaggaatcaagatttgtaaattttgttggcgtaagggtaaaggcactgccctgatggtcacatgctgtgcatctgactggaaatcaatacccaattccgccagggcagactgcgctttttctaatgccgatttttcttcggcagaaacttttagccgcaacggaatcagcagcggctgggcgcaaacgggcgcttcacccggcgtcaattgtgcctgacgcagtgggccagtcaaacgccatttgcccgttaatacctcaccacaacgcgcgcgcgggtcatcgcagacctgctgcggtgccgggcggaaatgtgcttcggcatcgaatcgttgataatccggcgtcaggtgcacgccagaagattcaatcacgcctaagccgcgccattcgctgtcgccgttgacacagaacacatcggcaatcgcctgttgcgccagcaggttaccggcatccggtaccactcgacgatactgattctctaccttgctgtgggccgctattttctgctgcaccagcatgaccacgccttgtagtagatcaaggggttcgaatccagcaaccaccagcggacgatgaaaatcgctggcgataaaattataggcgtcggtgccgataaccatactgacgtgacccggcgcgaggaacgcatcgataccgttatccggctgttccagcaaactgcgcaacgtcgggataagcgtaatgtgctggcagaagaagtaaaaattctgcacatcacgcgctttcgcctgttgcagagtgatagcggtggtcggcatagtggtttcaaaacctaagccgaagaacaccactttgcgggttggattctcctgcgccagtttcaacgcatccatcggcgagtaaacgatgcgcacatcggcaccgcgtgcttttgcctgcaacagcgatccctgtttccccggcacgcgcatggcgtcgccaaaggtacagaagatgacttccggatggctggcaatctccacgcaggtgtcgattctacccatcggcagtacgcacaccgggcaccccggaccgtggataaactcaacgttttccggcagtaactggtcgaggccgaatttaaagatagcgtgggtatgaccgccacacacttccataatccgcagagggcgttcggcggtgtaagagagatgtgaagcacgttcgcgcagatgctcaattaactgcatcacctgttccggcgcgcgatattcatcaacaaacgcattatttttcctcgccat

SEQ ID NO: 24765 - DNA, 8160 bp, Homo sapiens
  SIMILAR (7369)..(8157): 941254mologous to Escherichia coli permease,accession number M58000,Smith-Waterman Score=1216.
atgactaaacactatgattacatcgccatcggcggcggcagcggcggtatcgcctccatcaaccgcgcggctatgtacggccagaaatgtgcgctgattgaagccaaagagctgggcggcacctgcgtaaatgttggctgtgtgccgaaaaaagtgatgtggcacgcggcgcaaatccgtgaagcgatccatatgtacggcccggattatggttttgataccactatcaataaattcaactgggaaacgttgatcgccagccgtaccgcctatatcgaccgtattcatacttcctatgaaaacgtgctcggtaaaaataacgttgatgtaatcaaaggctttgcccgcttcgttgatgccaaaacgctggaggtaaacggcgaaaccatcacggccgatcatattctgatcgccacaggcggtcgtccgagccacccggatattccgggcgtggaatacggtattgattctgatggcttcttcgcccttcctgctttgccagagcgcgtggcggttgttggcgcgggttacatcgccgttgagctggcgggcgtgattaacggcctcggcgcgaaaacgcatctgtttgtgcgtaaacatgcgccgctgcgcagcttcgacccgatgatttccgaaaaccagagccggagcggcgctgttcgtgatgagattcagttctacgccacaggtgcgcgtccggatctggcaaaagagatgggctttatcggtggcaaaatgccgacgcactgggggccacatgatggcgatgcggggatccgcaaagatgccgctatggtcgcggatatgcgtgtaaaatgcgcggaacgttgcgaccgcatctcactgatgcacgccggaaaagtgcttgccagcggtacaccgcaggaactggttgagaaacgcggagccgccagtctggaagaggcatttatcgcctatttgcaggaagcggcagggcagagcaacgaagccgaagcgccgcaccgtgctacagccgccgcgaagcgctggaactgcgacgcgatccagtacgttcggacgctggcgctgatgggaacggtgatcctgatgctgataatgggttacggcatcagtatgatgtggaaaacctgcgctttaaagtgctggagggatttttgtggatcggacttcagattgataaaggggacgccgcgtagctccgacgacagcataaaaatcttgccgccaattttaaaaacatcgaactccgggccaaaaggccagcaaagctcgacaaagggtaactcaagcatggcaactgactcaacacaatgtgtaaaaaaaagccgtggccgcccaaaagtgttcgacagggatgccgcgcttgataaggccatgaaattgttctggcaacacggttatgaagcgacttctcttgcggacctcgtcgaagcgaccggagccaaagcgcccacgctatacgcggaatttaccaacaaagaggggttatttcgtgccgttctcgaccgctatatcgatcgttttgccgctaagcatgaagcacagctgttttgtgaagagaaaagcgtggagtctgcgctggctgactattttgctgccatcgccaactgctttaccagcaaagacaccccggcaggctgcttcatgatcaacaactgcaccaccctctccccagattcaggagatatcgccaatacgttgaaatcacgccatgcgatgcaagagcgcactttgcagcagtttttatgtcaacgacaagcgcgcggggaaatcccgccccactgtgacgtgacacatctggcagaattccttaattgtattattcaggggatgtcgatcagcgcacgcgaaggtgcatcgctggaaaaactgattgcccctgaacctcgcacccctcctgcctcgttcaggaagctccgcacctatccggccgccaccctcagcacaggcacggcagccgatgaaatctacgtatggcgtggacagacgccattcgtgatgtcgatagctgccacaaggcaacggtcttctcacccgacctggttcaacggtaatacgcaacacgcgcccaacttctgccgctttgctcggtttgccttcagcgtcgaacgcctgggcaatcgccgggccgcgtttttcgatttcacgatccggttgcgcttccgccagaatggggtcccaaacgagagattcgacgtaaacgtccgctcccaactaagttctcaggcgctgacaacgacaagaattcctcacacaatacgtagcgcttcaatcactaaaccgctttcacagccctcgacctgccgcgatatgtccgccgcccaccgtcaggccattgccgacattacgccgaaatatatggaagatctggatcaacgctggatggactatggcgttaagttcctcgacaagatggcgaagagcgataaaccattcttcctctactacggcactcaattcgccactttcgctccaggatgccctgccagatccagcgcgtggaggctaacctccacgatttcaattagcggtatggagcttcccatggccccggcttttcccattccgaggcaaaacccttggtcgatggccccagcttgccttttgactggcacttcgggccacaacggcggcagtggcgcgaagggcgaggacaggggggtctttggggggcggcctcctatcacggagtttcccttcggttccacttggaacttccgcgtgtgcggcttacggagtccggtaaccgcgctatgccgaggcgaaggcgggcaaccccagggcgcgcaggtccaacagcggccgggtaaaatcaccggggaaaatttccgacaaggaaactccaggggggggcatcaaaacgcccagggacacggacaccccctggtacaacgccacacagggggccccaggcacaagaagggggccacagaacaccccgggtacaccagcgcacccgcaaatccatccgcagagctgaaaatctacgatacctcatcacaaccacttagccagatcttaagccaggttcagcaggatggcgcgagtattgtggtcggtccgttgctgaaaaataacgttgaagagttgctgaagctttcaaaagccctctacaacattgactggcatcgccacgcgcaggtgaagtgcaacggcttgcagatcaatatgttgatggctgccgccgtctgcgccgtcattgccagcaacctcggcatgttcgtggtaatggccgaaatcatggccctgtgcgcgcaacagcaaagagggcaactgtggtttgcgctggggcgtcttggcactctgctgctggcgattgcttgctggctgctgtggcagcgttacggcacgctggatctgcgcctgctggatatgcgtatgcaacagctgccgctcggttccgatatctggctgctcggagtgattggctttggcctgctggccgggattattccgctgcacggctgggtgccgcaggcacatgcgaacgcctctgcgccagctgccgcgttgttttctacggttcatgtgtacaaacgcgtaattctgaccggtgaccatatcaccgactccacttccagccaggacgaatacaaccaaccgcaggttaacatctcgctcgatagcgctggtggtaacatcatgtctaacttcactaaggacaacatcggcaaaccgatggcaaccctgtttgtggagtacaaagacagcggtaagaaagatgcaaatggtcgtgcggttctggtgaaacaggaagaggtgattaacatcgccaacatccagtctcgtctgggtaacagcttccgtatcaccggcatcaacaacccgaacgaagcccgtcagctgtcactgctgctgcgtgccggtgcgttgatcgcgccgattcagattgttgaagaacgtaccattggcccaaccctgggtatgcagaacatccgatggggctacggccgttcccagcctgcggagctgacaaaactgtcgctgttttgctatatcgccaactatctggtgcgtaaaggcgacgaagtacgtaataacctgcgcggcttcctgaaaccgatgggcgtgattctggtgttggcagtgttactgctggcacagccagaccttggtacggtggtggtgttgtttgtgactacgctggcgatgttgttcctggcgggagcgaaattgtggcagttcattgccattatcggtatgggcatttcagcggttgtgttgctgatactcgccgaaccgtaccgtatccgccgtgttaccgcattctggaacccgtgggaagatccctttggcagcggctatcagttaacgcaatcgctgatggcgtttggtcgcggcgaactttgggggcaaggtttaggtaactcggtacaaaaactggagtatctgccggaagcgcacactgactttattttcgccattatcggcgaagaactggggtatgtcggtgtggtgctggcacttttaatggtattcttcgtcgcttttcgcgcgatgtcgattggccgtaaagcattagaaattgaccaccgtttttccggttttctcgcctgttctattggcatctggtttagcttccaggcgctggttaacgttcgcgcgggggccggggatgtaccgaccaagtacaactcactgagttgcttcaaagaaacgcgaaatgcgatattgggccgcctgatgacgcctgctcatgggcatgtctggctggatggcgagcacattcaacattacgccagtaaagaggttgcacgccggattggtctgttggcgcaaaatgctaccacgccgggcgatatcaccgtgcaggagctggtggcgcgtggacgttatccgcatcaaccgctgtttacccgctggcgcaaagaggatgaagaagcggtaacgaaagcaatgcaggccacgggaataactcatctggcagatcaaagcgtgataccctttcggtccaggctagttaaaaacagaaaggcagcctggcatagtggtagcagagacacagcagcaactctcatgctgtttgtgctggggtggctgggccgacggaggggtctaggctgttgtgggatctggggtggtttcagtcaacaaggtctcccgcctgccatgcagaaagtcatgtataagggactcgtccccgaggataaaacattgagagaaataaaagtgaccagtggggccaagatcatggtggttggctccaccatcaatgatgttttagcagtaaacacacccaaagatgctgcgcagcaggatgcaaaggccgaagagaacaagaaggagcctctctgcaggcagaaactacattgttgcttattcactttagtggcaagtattattgtgccagctgcttttgttttggaagatgtggacttcgaccaaatggtttcactggaagcaaatcgtagttcttacaatgcatcctttccctcaagctttgaactctcagcaagttcccactcggatgatgatgtcatcatagccaaagagggaactagcgtttcaattgagtgtcttctcacagccagtcactatgaagatgtccattggcacaattcaaaaggacagcaactggatggcagaagcagagtaattgctctagtcccagttactccagcgatccagcccaatgcgcgtatacggcgtcaccgagtggttgccgagcgtcagcggcaaataggcgcgaatttcttgcgtggaaaactcaccgttattgcggctgtcgtccatattgaagccgcgctcgagataatagttcactcgcaaggcaaccgtttcgttgaaggacagtaccaagctgtccagcacgctgtcgtgcggataccggtagggccaggccgtggctccggtgcgggttcactggtggcctacgcgctgaaaatcaccgacctcgatccgctggaatttgaccgtgctactgtaagggttctgaatggtgacaatacgcggcagatcgtgtttgtccgccagatgcaggtagcgcattacgccaaatgcagtttcgttcgacacgccgatataacgaatttttcccgcgcgttggtactctgccagtgcgtccagcgtatccagcagcgaaaccgcaggcgcagaatccgtccagctataaccgagtttgccgaagcagttggtcgggcgctgcggccagtgcacctgataaagatcgaggttaatgccctgagcgacggcatagtcgagttgtgcgtgggcgtcggcttcgctgttctgttcattctcagcgggaaatcggccaaacatcggtaccacagaaaactgggaataaacagggtaaacgccaattgtcccggtttttacgtcaatcgcatcttagcgccttacattaatgaagctatccgcatgttgacccaaggtgaacgggtagagcacattgatgccgcgctagtgaaatttggttttccggtaggcccaatccaacttttggatgaggtaggaatcgacaccgggactaaaattattcctgtactggaagccgcttatggagaacgttttagcgcgcctgcaaatgttgtttcttcaattttgaacgacgatcgcaaaggcagaaaaaatggccggggtttctatctttatggtcagaaagggcgtaaaagcaaaaaacaggtcgatcccgccatttacccgctgattggcacacaagggcaggggcgaatctccgcaccgcaggttgctgaacggtgtgtgatgttgatgctgaatgaagcagtacgttgtgttgatgagcaggttatccgtagcgtgcgtgacggggatattggcgcggtatttggcattggttttccgccatttctcggtggaccgttccgctatatcgattctctcggcgcgggcgaagtggttgcaataatgcaacgacttgccacgcagtatggttcccgttttaccccttgcgagcgtttggtcgagatgggcgcgcccctcgatgccgccagtgattccgttcgtcctctgaccactaatggttgtgacgaatctcgcctgatggcgaactggctgaaaggtcaaaaagtggaaatcgaacgcgttctggtgagcccgttcctgcgagccgagcaaacactggaagaagtaggggattgtctgaacctgccttccagtgcagaagttctgccggagttaacgccctgcggcgatgttggtctgatgtggattggcgataaaaaacaactgctgacgccgctgcgcgatcagttcacccgtgcaccgctggataacgacattggcgtaagtgaagcgacccgcattgaccctaacgcctgggtcgaacgctggaaggcggcgggccattaccaggccgaagcagcgttgttgcagtgcacggcagatacacttgctgatgcggtgctgattacgaccgctcacgcgtggcagcatcaggggaaaaccttatttatcagccggaaaacctaccggattgatgcgctggcggtaattatgttctccttcggcggtctggagctgattgggattactgccgctgaagcgcgcgatccggaaaaaagcattccaaaagcggtaaatcaggtggtgtatcgcatcctgctgttttacatcggttcactggtggttttactggcgctctatccgtgggtggaagtgaaatccaacagtagcccgtttgtgatgattttccataatctcgacagcaacgtggtagcttctgcgctgaacttcgtcattctggtagcatcgctgtcagtgtataacagcggggtttactctaacagccgcatgctgtttggcctttctgtgcagggtaatgcgccgaagtttttgactcgcgtcagccgtcgcggtgtgccgattaactcgctgatgctttccggagcgatcacttcgctggtggtgttaatcaactatctgctgccgcaaaaagcgtttggtctgctgatggcgctggtggtagcaacgctgctgttgaactggattatgatctgtctggcgcatctgcgttttcgtgcagcgatgcgacgtcaggggcgtgaaacacagtttaaggcgctgctctatccgttcggcaactatctctgcattgccttcctcggcatgattttgctgctgatgtgcacgatggatgatatgcgcttgtcagcgatcctgctgccggtgtggattgtattcctgtttatggcatttaaaacgctgcgtcggaaataa

SEQ ID NO: 24766 - DNA, 1494 bp, Homo sapiens
  SIMILAR (351)..(4): 1001254mologous to Escherichia coli hypA product,accession number X54543,Smith-Waterman Score=623.
tcactcctggtctatttctatccgccgaatctgtaaaccgtcgtctgccacaatctgcagcatgtcaccatgacactgtggacagcggcggacgcgctgggtcagtagcgtcacatactgttggcatgtttcacaccagcattcggcctcttgttcttcgaggtgcagtttacaaccttccgccacgctgccgcggcaaaccagatcaaaacaaaaggcaagagagctggtttcgacacaagaaaatgcgccaattttgagccagaccccagttacgcgttttgcgccgtgttttgcggcctgctgttcgatcaattccagtgcccgttggcagagggttatttcgtgcatatcgcctcccattaacggtatcagaccagaaatggcaaagaagaaacgcgcgatggcaaagagatacagtaaggtgatcaaatcacccagttgcggcagcggagaaccgacggtcaccaccggcagcgcagtagcgatagtcagcatgacgcccaccatcacatacggcgtcaggcggaacacccagccggaggcatccgggccgacgctctgacgccccagcagtttgataatgtcgcgatactccgccagttcaaccagcgccatccggcggaacagcaacgcactcccctcgcactgccagcccggcaccagagacaccggattcagccatttgcgtagtttcagcaccggcgcaaacgcctgtttcaccggcatggcaaaaccgtgagcggtaatcaccattgatttttcgtggtcgtaaccgcacacccaggccgcaccgcgggaacgcgatggcaaacgatcgcctttgcaaatcgccataatgatgaatggcagcagcgggcaggcaatcagcagcaacgtgatcatcggttgagaaccggtggtgtaagcaggctggtttatcaggcaattcgcggtggactggcgggcagtaccgtgctggatgccaaagcgccgatggtgatggaccgcaacttcaagccgggcttccgtattgatctgcatattaaggatctggcgaatgcgctggatacttctcacggcgtcggcgcacaactgccgctcacagctgcggttatggagatgatgcaggcagtttctgttccggttgccgacggtggcgaaggaacggtggaagcgatgattgcagccacccagtgggctgaacgtcacgcctgggttacagggccgctgggcgagaaagtgatgccagtggggggattccggcgatggcaaaaccggttgatcgaatggcggcggcacggggtggaccggtacttcatccagcgagtaccagccgatatcgtttttgcctgccgcccactgggaaatgagggtggtctttccgtagcccgcaggactcgtgatcagcgccagccggaagttgttcgcgccggaaagtttagccagcaggcgctcacgaaccacggtatggtcgagtcgaaccggacgacttagttttgacggaatcagcat

SEQ ID NO: 24767 - DNA, 2127 bp, Homo sapiens
  SIMILAR (1024)..(1983): 921254mologous to Escherichia coli 46 KD MEMBRANE PROTEIN,accession number D90860,Smith-Waterman Score=1492.
  misc_feature (1)...(2127): n = a,t,c or g
atgaatcgaatgtctggcggttattggcagctatttgctgaaagcggagaaacctgtcgggcgcgcgaactggaacagtgcctggaagatttttatgaccagcgcaaagaatctgtgcgctggcaccttgatctacataccgcaattcgtggctccttgcatccgcagttcggtgtattaccgcaacgcgacattccctgggacgagaaatttctgacgtggctgggtgcggcggggctggaggcgctggtgttccatcaggaacctggtggtacgtttacccatttcagcgccagacattttggcgcgctggcctgtacgctggaacttggcaaagcgttgccctttgggcaaaacgatcttcgccagtttgcagtaactgccagcgcaattgctgcgctgctatctggtgagagtgtcggtatcgtgagaacaccgccgctccgttatcgggtggtttcgcaaattactcgccactcgccgtccttcgaaatgcatatggcaagtgacacgctgaattttatgccgtttgagaaaggaacattgctggcgcaggacggagaggaacgttttaccgtaacccatgatgtagaagtcgctaaaaacgcgataacggagatcaaaacccagtttgaaaaagaaaaactggctcaggatcgcattaaacgaaatcaactgatgcaaacattcagcgcctcaattattcactcgacattgccaacgcggcaggaattaaaaagcccgtttacagtaatgnacggtattgaacgcaaactggaaatagaaaaagcggtcactgacgttgcggaactgaacggtgaattacgtaatcggcagtatcttgtcgagcaattaacaaaagcacatgtcaacgatgtgaattttacgccgtttaaatatcagttaagcccgtcattgccagtgaaaaaagacggtccgggtaaggcgattattgtgatcctttccgcgttgatcggcgggatgttgtattgtcgcgtctgcattaagcggaacgctgacagtccagaagtattttccggcttttctgatcctaacgttgtcctgattgccgccgtgtttattattggcgatggtttggtccgtaccggtgttgccaccgtaatgggaacatggctggtcaaagttgcgggcaatagtgaaatcaaaatgttggttttgttgatgctgaccgtcgcggggcttggcgcgtttatgagttcaaccggcgttgtcgctatctttattcccgtggtgttaagcgttgccatgcgtatgcaaacgtcgccgtcacgtctgatgatgccgttaagttttgccgggctgattagcggcatgatgacgctggtggcgacgccgccgaacctggtagtcaacagtgaattgctgcgtgaaggctatcacggcttcagtttctttagcgtaacacctattggcctggtcgtgctggtgctgggtattttgtatatgttagtgatgcgtttcatgctgaaaggggatacccagaccccgcagcgcgaaggctggacgcgtcgaacctttcgcgatcttatccgtgaatatcgactgaccgggcgtgcgcgacgtctggctattcgccccggatcgccaatgattggtcaacggctggatgatctcaaattacgtgagcgttatggcgctaacgtcatcggtgttgaacgctggcggcgttttcgtcgcgttatcgtgaacgttaatggggtttctgaatttcgcgcgcgtgacgtttcgcttattgctatgtctgcggctgatgtcgatctccggcaattttgtagtgagcgcttgctggagcctgatggtattgcgcgattctctttaattcctgagtcagaactgattggtgaatcggtgcgcgaaataggtttgcgtacccgctacggactgaatgtggtggggctaacgcgcactggcgtggcgctggacggttcgctggcggatgagcctctgctgctgggcgatatctcctggttgtgggcactggaaagtgatcggtatgcggccatgctgggccggagtcggagcctgacttaccggagaggtgatgaacattgccgtgccagcaggtcccctgcattctggcgggcgaaggggggtaagctccgataa

SEQ ID NO: 24768 - DNA, 996 bp, Homo sapiens
  SIMILAR (962)..(837): 531254mologous to Escherichia coli similar to Desulfurolobus ambivalens hypoth. 28.3 kDa protein in sor 3' region,accession number U00006,Smith-Waterman Score=80.
aacccggacgcttcatcagtttgagaatgcgcgggctggcgtgctgcaacggaatgtccagatacggcaggattttgccttctgccatcagtgggatgacgtcgtccacatgcggataaggcaaagacaaattgatcccaagtctgaaagagagcctgcaaaaattgcgtaccgattattggtgcgtgaggcgactatcgatgttaacgcgctggcggcgaagcagcctgtgaccgaacaggagattgccagctactacgaacaaaacaaaaacaatttcatgacgccggaacaattccgcgtgagttacatcaagctggatgccgcaacgatgcagcaaccggtcaggtggagtaccatttacggcgactccacccggaaaagagttccccgcgccagcagggataaaccggcaacgacgcgccagtgccagcacaatcagcacaataccgctaccttcaacggcccccggattctcgccgagcagccaccaggaaaagagtacgccgcaaacgggaacggccagtgtgcttaagctggcaatactggcaggcaagtttttcaatacaaacaaccataagctccacgccagtgccgtcgccagaatcgcactgtaggccagcgcccagaacacggtgggctgccagtcaatttcacgttgcggcaccagtaaagcgaccacactcatcaccagcgccgcatacagcatctgccaggatggtaacgacaataaatccacgcgcggatgacgggcatacagacgtttagcaacaatcgcgctcgccccccaactgacgccggagaggattgccagcatggcacttttcatctaagaagaaatcgaggtggcacggctgcgagaccaaaaatcagccgaaggcggcattcagaatcgcgaatattggcccggtcgcagcggtcaccgagaacaacggggggaaataccacccaaacggttgggttacttaggatggccccttcccggactccgttgcg

SEQ ID NO: 24769 - DNA, 5162 bp, Homo sapiens
  SIMILAR (4323)..(4547): 221254mologous to Escherichia coli transketolase,accession number D12473,Smith-Waterman Score=58.
atggtgaaagaggtgctggatacgatgattgggctggcgcagtcgggtatgacaatgttgtgtgtaacacatgagatggggtttgcacgaaccgtcgctgaccgggtaatttttatggatcgtggggaaatagtggagcaagctgcacctgatgaattttttgcgcatcctaaatcagagcgtacgagggcatttttatcgcagttccctactctcgcatggggagaccccacactaccatcggcgctacggcgtttcacttctgagttcggcatggggtcaggagcagcccccctcagttctccagcgcccacggcagatagggaccgaactgtctcacgacgttctaaacccagctcgcgtaccactttaaatggcgaacagccatacccttgggacctacttcagccccaggatgtgatgagccgacatcgaggtgccaaacaccgccgtcgatatgaactcttgggcggattagccaaccttcgtgctcctccgttactctttaggaggagaccgccccagtcaaactacccaccagacactgtccgcaacccggattacgggtcaacgttagaacatcaaacattaaagggtggtatttcaaggggtcgactcaccctgccccgattaacgttggacaggaacccttggtcttccggcgaaatcgggcgtaaatcgcaacaccactatgaaccatttgtgatgggcgcgagcttccgtcgcaccgaacaaatcctcgctttaaccggctgcgatcgactgactatcgcaccgaatttactgaaggagctgcaggaaaaagtttcgccagtggcattcgtctgttcgccgttgatcaacgcaaactggaagatcttcttgccgccaaactataaaccagccacggagtgttatatgtcccgaaaagaccttgccaatgcgattcgcgcactcagtatggatgcggtacaaaaagccaactctggtcatcccggcgcgccgatgggcatggctgatattgccgaagtgctgtggaacgattttcttaaacataaccctaccgacccaacctggtatgatcgcgaccgctttattctttccaacggtcacgcgtcgatgctgctctacagtttgctacatctgaccggttacgacctgccgctggaagaactgaagaacttccgtcagttgcattcgaaaaccccaggccacccggagattggctatacgccaggcgttgaaaccaccaccggcccgcttggacaaggtttggcgaacgccgtcgggctggcgatagcagagcgtacactggcggcgcagtttaaccagccagaccatgagatcgtcgatcacttcacctatgtgtttatgggcgacggctgcctgatggaaggtatttcccacgaagtctgttcgctggcaggcacgctgggactgggcaagctgattggtttttacgatcacaacggtatttccatcgacggtgaaacagaaggctggtttaccgacgatacggcaaaacgttttgaagcctatcactggcatgtgatccatgaaatcgacggtcacgatccgcaggcggtgaaggaagcgatccttgaagcgcaaagcgtgaaagataagccgtcgctgattatctgccgtacggtgattggctttggttcgccgaataaagcagctcccagcaacctgaccatctggaaaggttctgtttcgctgaaggaagatccagcgggcaactacattcactacggggtgcgtgaatttggcatgacccgtatcgccaacggcatcgcgcaccacggcggctttgtgccgtataccgcgacgttcctgatgtttgttgaatacgcccgtaacgccgcgcggatggcggcactgatgaaagcgcggcagattatggtttatacccacgactcaattggcctgggcgaagatggtccgacgcaccaggctgttgagcaactggccagcctgcgcttaacgccaaatttcagcacctggcgaccgtgcgatcaggtggaagcggcggtgggctggaagctggcggttgagcgccacaacggaccgacggcactgatcctctcaaggcagaatctggcccaggtggaacgtacgccggatcaggttaaagagattgctcgtggcggttatgtgctgaaagacagcggcggtaagccagatattattctgattgccaccggttcagagatggaaattaccctgcaagcggcagagaaattagcaggagaaggtcgcaatgtacgcgtagtttccctgccctcgaccgatattttcgacgcccaggatgaggaatatcgggagtcggtgttgccttctaacgttgcggcttgcgacgtaaaacgcgaggtggtgcatgatttacgtctctcgccgattactcatcacctgtttgctgctggtatctggggattacgcagcggtgccgtcacgctggaaacctcgcaggtattcgccgcgctgatgggcgatgcgccgcgcagtatgacgatggtggtcaccgaatggcgtttaccacgcgtgctgatggcgctgttgattggcgcacgactgggcgtcagtggcgctatttttcagtcgctgatgcgtaacccgctcggcagccctgacgtaatgggctttaacaccggggcgtggagcggcgtgctggtggcgatggtgctgtttggtcaggacctgacggctatcgcgctgtcagcaatggtgggcggcattgtcacttcgctgctggtctggctgctcgcctggcgcaacggcatcgacacctttcggttgattattatcggtatcggcgttcgcgccatgctggtggcctttaatacctggctgttgctgaaagcgtctttagaaacggcgctaacagcaggtttgtggaatgccggatcgctcaacggcctgacgtgggcaaaaacctcgccttccgcacccatcattatattgatgctcattgccgccgccttactggtacgccggatgcgcttgctggaaatgggcgatgataccgcgtgtgcgctgggcgtcagcgtcgaacgttcgcgtctgttaatgatgctggttgcagtgcctcggcggtatttaccttatcgtcttgttaattcaggagtctcgcaaaaaatgaccgaatcagtagcccgtttgcgcggcgaaccagttaaccctgggatatggcaaatataccgttgcggaaaatctgactgtagaaatacctgatggtcacttcacggcaattatcgggccaaatggctgcggtaaatccacgttactgcgtaccttaagccgcctgatgacgcctgctcatgggcatgtctggctggatggcgagcacattcaacattacgccagtaaagaggttgcacgccggattggtctgttggcgcaaaatgctaccacgccgggcgatatcaccgtgcaggagctggtggcgcgtggacgttatccgcatcaaccgctgtttacccgctggcgcaaagaggatgaagaagcggtaacgaaagcaatgcaggccacgggaataactctatgtggcagatcaaagcgtggataccctttctggcggacaacgccagcgagcgtggatcgcgatggtgctggcccaggaaacggcaattatgctgctcgacgaacccacgacctggctggatatcagtcatcagattgatttgctggagttgttaagcgaactgaaccgcgaaaaaggatataccctggcggcggtgctgcacgatcttaatcaggcctgtcgttacgccagccatttgattgcattgcgggaagggaaaattgttgctcagggagcgccgaaggagattgtcactgctgaactgattgagcgcatttatggtctgcgctgcatgatcattgacgatccagttgccggaacgccgcttgtggtgccacgcgtagagctggcgcgctgcgccgacggcaaaattctcgccgacaaagtgaaagataagctggaactgacagcgacgttaaccgggctggattacgggcgcttcacccgttcgatgctgctttcgcaggggcaatttgctgccttcctgaatgccaaacccaaagaacgcgcggaattgctcgaggagttaaccggcactgaaatctacgggcaaatctcggcgatggtttttgagcagcacaaatcggcccgcacagagctggagaagctgcaagcgcaggccagcggcgtcacgttgctcacgccggaacaagtgcaatcgctgacagcgagtttgcaggtacttactgacgaagaaaaacagttaattaccgcgcagcagcaagaacaacaatcgctaaactggttaacgcgtcaggacgaattgcagcaagaagccagccgccgtcagcaggccttgcaacaggcgttagccgaagaagaaaaagcgcaacctcaactggcggcgcttagtctggcacaaccggcacgaaatcttcgtccacactgggaacgcatcgcagaacacagcgcggcgctggcgcatattcgccagcagattgaagaagtaaatactcgcttacagagcacaatggcgcttcgcgcgagcattcgccaccacgcggcgaagcagtcagcagaattacagcagcagcaacaaagcctgaatacctggttacaggaacacgaccgcttccgtcagtggaacaacgaaccggcgggttggcgtgcgcagttctcccaacaaaccagcgatcgcgagcatgtgcggcaatggcagcaacagttaacccatgctgagcaaaaacttaatgcgcttgcggcgatcacgttgacgttacccgccgatgaagtatccttggtgatctgcagctctcagacaccctcaagcacagtgcctcttgcccagcccagcactctcagtggggagccaggtagtggtggctgttctggggagctgcatgggcacagggtgccatggagcatgaggatttccccagagttaacaaggaaatatctcggcgaaaaagccgctgaaaacttacaatcattacaaggctacgatcccagcgaatttacattcgctaacggtgtattttgcgatgttaaagaaaaattatgtcgtgatgatcgttattttggtgtggatggtaagcggagtgggaaaaaatgggggattccttttaaggaccgcgtcttatcaggcctaaagggattctaa

SEQ ID NO: 24770 - DNA, 4550 bp, Homo sapiens
  SIMILAR (1668)..(1889): 951254mologous to Escherichia coli FepE,accession number X74129,Smith-Waterman Score=359.
atgcagtcttcagaggccctggtggctggtttaaggggtgcggccaatgctgagatgaaagcttcactggcgctgctcagcctgctaacggcatttaccagccactccttaaaatctcccgccgttccaccaaccgtggtacaaatccaggccaataccaaccttgccatcgcagacggtgccagacagcaaattggcagcacgctattttacgatccggcgtatgtgcagcttacttatcctggcggtgatgttccgcaagaacgcggtgtatgttccgatgtggtgatccgcgcattgcgcagccagaaggtcgatttgcagaaactggttcacgaagatatggcgaagaattttgctgagtacccgctaaaaatggaagttaaagcgcccggacagcaacatcgatcaccgtcgggtgcctaatctggaaacctggtttagccgccatgataaaacacgccccaccagcaagaaccccagtgactatcaagcgggcgatattgtctcctggcgactggataacgggctggcacatattggggtggtttcagatggcttcgcccgcgacggtacgccgctggtgatacataacattggcgcaggcgcgcaggaagaagatgtgctgtttaactggcggatgcgccagtgccagcacaatcagcacaataccgctaccttcaacggcccccggattctcgccgagcagccaccaggaaaagagtacgccgcaaacgggaacggccagttataccccatgtcatcactgaatattaaacagggaagtgacgctcattttcccgattatcctctggcgtcgcccagtaataatgaaattgatttacttaatctaatctcagttttatggcgggccaaaaaaacggtcatggcggtcgtttttgcgtttgcctgcgcaggcttgctgatctctttcatcctgccgcaaaaatggaccagcgcggcggttgtcacgcctccagaacctgttcagtggcaagagttggagaaatcattcactaagcttcgtgtgctggatctggatatcaaaattgatcgtacagaagcatttaacctgtttatcaagaagtttcagtcggttagcttgctggaagagtacctgcgttcatcaccttatgtgatggaccaattaaaagaggcgaaaatcgacgaactggatttgcatcgcgcaattgtcgcattgagcgaaaaaatgaaagcggttgatgacaatgccagtaagaaaaaagatgaaccgtcactgtatacctcctggacgctaagttttaccgcgccaaccagtgaagaggcgcagaccgttttgagcgggtatatcgattatatctctacgttggtggtgaaagagtcgctagaaaacgtccgtaataaactggagatcaaaacccagtttgaaaaagaaaaactggctcaggatcgcattaaaacgaaaaatcaacttgatgcaaacattcagcgcctcaattattcactcgacattgccaacgcggcaggaattaaaaagcccgtttacagtaatggtcaggccgttaaagatgaccccgatttttctatttctctcggtgcagacggtattgaacgcaaactggaaatagaaaaagcggtcactgacgttgcggaactgaacggtgaattacgtaatcggcagtatcttgtccgagccaattacaaaagcacatgtcaacgatgtgaattttacgccgtttaaatatcagttaagcccgtcattgccagtgaaaaaagacggtccgggtaaggcgattattgtgatcctttccgcgttgatcggcgggatggtggcttgtggtggcgtgctgttgcgctatgcgatggcatccagaaaacaggatgccatgatggcagaccacttagtttaactataatgcggttgaaggtgccgttcgtccgagcggcaccacaagcggcgttccggcaactgggattcgtcaatgatcatgcagcgcagaccataaatgcgctcaatcagttcagcagtgacaatctccttcggcgctccctgagcaacaattttcccttcccgcaatgcaatcaaatggctggcgtaacgacaggcctgattaagatcgtgcagcaccgccgccagggtatagcctttttcgcggttcagttcgcttaacaactccagcaaatcaatctgatgactgatatccagccaggtcgtgggttcgtcgagcagcataattgccgtttcctgggccagcaccatcgcgatccacgctcgctggcgttgtccgccagaaagggtatccacgctttgatctgccagatgagttattcccgtggcctgcattgctttcgttaccgcttcttcatcctctttgcgccagcgggtaaacagcggttgatgcggataacgtccacgcgccaccagctcctgcacggtgatatcgcccggcgtggtagcattttgcgccaacagaccaatccggcgtgcaaactctttactggcgtaaggtgcatgttgtcgccatccaggcagacatgccatgaccagcgtcatcaggcgggttagggtaccataaactggatttaccgagccctgctgcggtgccgggcggaaatgtgcttcggcatcgaatcgttgataatccggcgtcaggtgcacgccagaagattcaatcacgcctaagccgcgccattcgctgtcgccgttgacacagaacacatcggcaatcgcctgttgcgccagcaggttaccggcatccggtaccactcgacgatactgattctctaccttgctgtgggccgctattttctgctgcaccagcatgaccacgccttgtagtagatcaaggggttcgaatccagcaaccaccagcggacgatgaaaatcgctggcgataaaattataggcgtcggtgccgataaccatactgacgtgacccggcgcgaggaacgcatcgataccgttatccggctgttccagcaaactgcgcaacgtcgggataagcgtaatgtgctggcagaagaagtaaaaattctgcacatcacgcgctttcgcctgttgcagagtgatagcggtggtcggcatagtggtttcaaaacctaagccgaagaacaccactttgcgggttggattctcctgcgccagtttcaacgcatccatcggcgagtaaacgatgcgcacatcggcaccgcgtgcttttgcctgcaacagcgatccctgtttccccggcacgcgcatggcgtcgccaaaggtacagaagatgacttccggatggctggcaatctccacgcaggtgtcgattctacccatcggcagtacgcacaccgggcaccccggaccgtggataaactcaacgttttccggcagtaactggtcgaggccgaatttaaagatagcgtgggtatgaccgccacacacttccataatccgcagagggcgttcggcggtgtaagagagatgtgaagcacgttcgcgcagatgctcaattaactgcatcacctgttccggcgcgcgatattcatcaacaaaacgcattatttttcctcgccatacaacagcgcgccgacatccggctccacgttcaacctgtttggttatggcgtccagagtggtgttgctgacgcgggcgatatcggtgttatccaccagatgcagggctttagtcgggcacatccgcacgcaggccggaccttgttcatcaaagctacaaaggtcacatttgacggcgatcgcgcgaatacctggcacccagtcaagcaatgtgctgacacgcgccggagcaggcggtgccggtggcgctttcggggtattggcgtttgccggaatatccagcggacggctgccggaaaattcaattgcgccaaacgggcaggcgatgccgcacagcttgcagcttacgcacaggctttcattcaactgcacggccccatcgacgcgggtgatggcgttaaccgggcagaccaccgcgcagggtgcatcttcacagtggtgacagagctgcggcgcagattctttttcattcagcatcactctcaagcgcggcattgattgcaggccgtgctggcgatgccgttttgaacaggcggcctcacaagtgggggagccgatacagagcggggaggcggcatttacaaaacgattccccagggcattccagttggcttaaattcaccggcacattgttttcaatagcggtgtataagctgtcgtaaacgccagcgattttttcgagatagtgtaccagaacctgttcgcgatcgcggatgttgaccttgccatcaatcatgccgtcaatgctcagttgcgcctgcgcaatccgctgtttgtcttcgccatcttttgtttcgacgtaatactcgatggtgtgggggcactggaattgatcgaacagcaggccgcaaaacacggcgcaaaacgcgtaactggggtctggctcaaaattggcgcattttcttgtgtcgaaaccagctctcttgcctttagtttggatctggtttgccgcggcagcgtggcggaaggttgtaaactggacctcgaagaacaagaggccgaatgctggtgtgaacat

SEQ ID NO: 24771 - DNA, 1897 bp, Homo sapiens
  SIMILAR (10)..(630): 871254mologous to Escherichia coli K12 putative ATP-binding component of a transport system,accession number AE000411,Smith- Waterman Score=981.
  misc_feature (1)...(1897): n = a,t,c or g
atgtggngcgggcggaaagtcggcctggtgggtaaaaacggctgtggtaaatctaccctgctggcattgctgaaaaatgaaatcagcgccgacggcggcagctacacctttccgggaagctggcaactggcgtgggtgaatcaggaaacgccggcgttaccgcaagcggcgctggaatatgtcattgacggcgaccgtgaatatcgtcaactagaagcgcagctacacgacgccaacgaacgtaacgacgggcacgccattgcgaccattcatggcaagctggatgctattgacgcatggagtattcgctcccgtgctgccagcctgctgcacggcctcggtttcagcaatgaacaactggagcgcccggcgctgatttgccgttcagacttgctgctgctcgacgaaccgactaaccacctcgatctcgatgccgttatctggctggaaaaatggctgaagagctatcagggcacgctgatcctgatctctcacgaccgcgacttcctcgatccgatcgtcgataaaattattcatatcgaacaacaaagcatgttcgagtacaccggcaactaccagtcgtttgaagtacagggcggcaccgcgtggattaaagacggcgttatgcacaccgacgacacgctggtggatggcctggaggcggctatcgccatgacacgggtcggtaaatctggtacgtcgcgacctgaatatggacagcggttgtcgcaccagacgatttctgcgacggtgggcgtggctgcggcttttgcggttaaccccattgttggcgcggcagtgtttgccgccagtaaagtgctggggccgctgtggagcaaagtctccattttgcgctatcacatttcgggtccgctggacgatccgcaaatcaacgaagataatcgttgccaaaggccaacgagccagaacataaccgtaggtcggatagggcgttcacgccgcatccggcagccgatgcctgatgcgacgctgtgcgtcttatcaggcctacaaaaggaacataaccgaaggtcggataaggcgtttacgccgcatccggcagccgttgcctgatgcgacgcttgccgcgtcttatcaggcctatcttaaccgttggttaatttttcaaactcttcacacccggtatcaaacccttccatacagctcagcagcatcacgctgccgttggtcgaaaatgagagccgtgcacgcgcaagtgaaggatcagatggacgcaattgatcaccagacaggcgtgcgcccgctggtcttctactccatcgtgttgccggagattcgcgccatcatcttgcaaagtgaaggcttttgccaggatatcgttcaggcgctggttgccccgctacaacaagagatgaaactggatccaacgccgattgctcatcgtacccatggccttaaccctaataatctcaataaatatgatgcgcgcattgcggcgattgattacaccctcgcccacgatgacggcatttcgttgcgcaatctggaccaggctcaggtgatcctgctcggtgtttctcgctgtggtaaaacccccaccagtctgtatctggcaatgcagtttggtatccgcgcggcaaactacccctttattgccgacgatatggataatctggtgctacccgcgtcgctcaaaccgcttcagcataaattgttcggcctgactatcgacccggaacgtctggcggcgattcgcgaggaacgtcgggagaacagtcgctatgcctcgcttcgtcagtgcaggatggaagtcgcggaagtggaagccttgtaccgtaaaaatcagatcccgtggattaacagtaccaattattcggtagaagagattgccaccaagatcctcgatatcatgggccttagtcgccgaatgtactag

SEQ ID NO: 24772 - DNA, 506 bp, Homo sapiens
  SIMILAR (224)..(12): 981254mologous to Homo sapiens Human normal ovarian tissue derived protein 57,accession number Y59780,Smith-Waterman Score= 389.
cccacgcgtccggccttataagctgaggtagtggagaggcccggggccaggaaagcagagacagacaaagcgttaggagaagaagagaggcagggaagacaagccaggcacgatggccaccttcccaccagcaaccagcgccccccagcagcccccaggcccggaggacgaggactccagcctggatgaatctgacctctatagcctggcccattcctacctcgggcctctcatcatgcctatgcccacttcacctctgactcctgccttggttacaggaggtggaggccggaaaggtcgcaccaagagagaagctgctgccaacaccaaccgccccagccctggcgggcaccgaagaggaaactggtgaccaagctgcagaattcagagaggaagaagcgaggggcacggcgcttgagacagagctggagatgaggccagaccatggacactacacccagcaatagagacgggactgcggaggaaggaggacccaggacaggatc

SEQ ID NO: 24773 - DNA, 517 bp, Homo sapiens
  SIMILAR (256)..(2): 761254mologous to Homo sapiens Human normal ovarian tissue derived protein 57,accession number Y59780,Smith-Waterman Score= 352.
ccaggaaagcagagacagacaaagcgttaggagaagaagagaggcagggaagacaagccaggcacgatggccaccttcccaccagcaaccagcgccccccagcagcccccaggcccggaggacgaggactccagcctggatgaatctgacctctatagcctggcccattcctacctcggtaaggcccactcagccatctccacggtccttcctcctctcccgaaatcaggacccacccctcttgtttcctctcatttcctttcctttcctcttcgtttctttctttcttttttttgagagagtcactctgtcacccaggctggagtgcagtagtgtgatcacaacaactcaaacaactcaccgcagcctcgaactcctgggctcaagtgatcctcctgcttcagcctcctgagtggctggaacttcaggtgtacaccacctgcagtggtgagatggggtctcactatgtttcccaggctgatccccaattcctgggctcaagcaattctcctgcctg

SEQ ID NO: 24774 - DNA, 749 bp, Homo sapiens
  SIMILAR (497)..(57): 431254mologous to Homo sapiens Human normal ovarian tissue derived protein 57,accession number Y59780,Smith-Waterman Score= 155.
  misc_feature (1)...(749): n = a,t,c or g
aggagacacagccttataagctgagggagtggagaggcccggggccaggaaagcagagacagacaaagcgttaggagaagaagagaggcagggaagacaagccaggcacgatggccaccttcccaccagcaaccagcgccccccagccagcccccagggcccggaggacgagactcccagccctggatggatctggaccttctattagcctggcccattcctacctcgggaggtggaggccggaaaggacacaccaagagagaaactgctgccaacactcagccgccccagcccttngcggggcacgagaggaaaactgttgacccaaagctgcaagaattcagagaggaagaagcgaggggcacgggcgctgagacaagagctggagatgaggcgcagaccatggacacttacacccagccaatagagacggggactgcggaggaaggaagacccaggacaggatccaggccgggctatgccacacccccccacccctaaggacttattcccgcttgacttgagtctcttgaagggctaccagggaaagcggcttccaacccttagcaaaagtgcaagatggggagtgagaggctgggaatggaaggggcagagccaggaagatcccccagaaaagaaagctacagaagaaacctggggctcctccagggtggcagcaacaataaatagactacgcacggcagccacagcttgggtgtgtgttcatccttgaaaaaaaaaaaaaaaaa

SEQ ID NO: 24775 - DNA, 1110 bp, Homo sapiens
  SIMILAR (265)..(1104): 991254mologous to Escherichia coli high affinity ribose transport protein,accession number L10328,Smith-Waterman Score= 1357.
atggaacaggcaattggtctgctttccggtggcaatcagcaaaaagtggcgattgcccgcggtctgatgacacgccccaaagtgttgatccttgatgaacctacccgtggcgtagatgtcggcgcgaaaaaagagatctatcaactgattaaccagttcaaagccgatggcttgagcatcattctggtgtcatcggagatgccagaagtattaggcatgagcgatcgcatcatcgtcatgcatgaagggcatctcagcggggaatttactccgtggctgatggagcagaaatcgcttatcgctctgctggtgctgatcgcgattgtctcgacgttaagcccgaactttttcaccatcaataacttattcaatattctccagcaaacctcagtgaacgccattatggcggtcgggatgacgctggtgatcctgacgtcgggcatcgacttatcggtaggttctctgttggcgctgaccggcgcagttgctgcatctatcgtcggcattgaagtcaatgcgctggtggctgtcgctgctgctctcgcgttaggtgccgcaattggtgcggtaaccggggtgattgtagcgaaaggtcgcgtccaggcgtttatcgctacgctggttatgatgcttttactgcgcggcgtgaccatggtttataccaacggtagcccagtgaataccggctttactgagaacgccgatctgtttggctggtttggtattggtcgtccgctgggcgtaccgacgccagtctggatcatggggattgtcttcctcgcggcctggtacatgctgcatcacacgcgtctggggcgttacatctacgcgctgggcggcaacgaagcggcaacgcgtctttctggtatcaacgtcaataaaatcaaaatcatcgtctattctctttgtggtctgctggcatcgctggccgggatcattgaagtggcgcgtctctcctccgcacaacccacggcggggactggctatgagctggatgctattgctgcggtggttctgggcggtacgagtctggcgggcggaaaaggtcgcattgttgggacgttgatcggcgcattaattcttggcttccttaataatggattgacatag

SEQ ID NO: 24776 - DNA, 1468 bp, Homo sapiens; identical to SEQ ID NO: 8881
  SIMILAR (406)..(906): 881254mologous to Escherichia coli adenylosuccinate lyase,accession number M74924,Smith-Waterman Score=794.

SEQ ID NO: 24777 - DNA, 2466 bp, Homo sapiens; identical to SEQ ID NO: 14856
  SIMILAR (1)..(516): 991254mologous to Escherichia coli UDP-MurNAc-Tripeptide:D- Ala-D-Ala-Adding Enzyme,accession number U67893,Smith-Waterman Score=865.

SEQ ID NO: 24778 - DNA, 849 bp, Homo sapiens
  SIMILAR (849)..(502): 991254mologous to Escherichia coli L-histidinol dehydrogenase (AA 1-434),accession number X52656,Smith-Waterman Score=563.
ttattcattaagtccaagttgaaacatctgatcagtattatcaggatgggcccgctctgttcgcgtgaaaaacggatgctggggctgatggtaggcgcgctggtgctgtggattttcggcggtgattatatcgatgccgcgatggtcggttacagcgtggtggcactgatgctgcttctgcgcattatcagttgggacgacattgtcagtaataatattgagcttggactggcctcggcaccgatgtttttcctcgcgacgattttttattttattcccttctgtcgtgttagggtggcgcattttatggacatcccgaatatgcaaaacgcaggcagcctcgttgttcttggcagcattaatgctgaccacattcttaatcttcaatcttttcctactccaggcgaaaccgtaaccggtaaccactatcaggttgcatttggcggcaaaggcgcgaatcaggctgtggctgctgggcgtagcggtgcgaatatcgcgtttattgccggcgctggtgatgctatcgaccagttcacgggcgttgcgggtctgaatgatcaggtgctccgggccgtactggttggagatctccacgcactgcgctaaatctttagtcacgatcaggcggctggcgttcagtgcctggcgggcggtttcggcacgcggcagttctgccagttggcgttcgacggcctcggcaacgcgacgcgccatatcagcagcgggcgtcagtaaaatcacctgtgagtccgggccgtgttcagcctgagagagcaaatcagaagccacgaaatccggcgtagcgccgctgtcagcaatcaccagcacttccgacgggcctgcgggcat

SEQ ID NO: 24779 - DNA, 2699 bp, Homo sapiens
  SIMILAR (133)..(357): 1001254mologous to Escherichia coli high affinity ribose transport protein,accession number L10328,Smith-Waterman Score=361.
  misc_feature (1)...(2699): n = a,t,c or g
gcatgagcgatcgcatcatcgtcatgcatgaagggcatctcaacggggaatttactcgtgagcaggccacccaggaagtgttaatggctgccgctgtgggcaagcttaatcgcgtgaatcaggagtaaaaaaatgacaacccagactgtctctggtcgccgttatttcacgaaagcgtggctgatggagcagaaatcgcttatcgctctgctggtgctgatcgcgattgtctcgacgttaagcccgaactttttcaccatcaataacttattcaatattctccagcaaacctcagtgaacgccattatggcggtcgggatgacgctggtgatcctgacgtcgggcatcgacttatcggggctgcatctatcgtcggcattgaagtcaatgcgctggtggctgtcgctgctgctctcgcgttaggtgccgcaattggtgcggtaaccggggtgattgtagcgaaaggtcgcgtccaggcgtttatcgctacgctggttatgatgcttttactgcgcggcgtgaccatggtttataccaacggtagcccagtgaataccggctttactgagaacgccgatctgtttggctggtttggtattggtcgtccgctgggcgtaccgacgccagtctggatcatggggattgtcttcctcgcggcctggtacatgctgcatcacacgcgtctggggcgttacatctacgcgctgggcggcaacgaagcggcaacgcggctntccgggatcaacgtcaataaaatcaaaatcatcgtctattctctttgtggtcagctggcatcgctggccgggatcattaaagtggcgcgtctctcctccgcacaacacacggcggggactggctatgagctggatgctattgctgcggtggttctggccgatgatcgtcaaagcggtggtgattttgctggcggtgctggtagacaacaaaaagcagtaataacgactacaggacatcttgaatatgaacatgaaaaaactggctaccctggtttccgctgttgcgctaagcgccaccgtcagtgcgaatgcgatggcaaaagacaccatcgcgctggtggtctccacgcttaacaacccgttctttgtatcgctgaaagatagcgcgcagaaagaggcggataaacttggctataacctggtggtgctggactcccagaacaacccggcgaaagagctggcaaacgtgcaggacttaaccgttcgcggcacaaaaattctgctgattaacccgaccgactccgacgcagtgggtaatgctgtgaagatggctaaccaggcgaacatcccggttatcactcttgaccgccaggcaacgaaaggtgaagtggtgagccacattgcttctgataacgtactgggcggcaaaatcgctggtgattacatcgcgaagaaagcgggtgaaggtgccaaagttatcgagctgcaaggcattgctggtacatccgcagcccgtgaacgtggcgaaggcttccagcaggccgttgctgctcacaagtttaatgttcttgccagccagccagcagattttgatcgcattaaaggtttgaacgtaatgcagaacctgttgaccgctcatccggatgttcaggctgtattcgcgcagaatgatgaaatggcgctgggccgcgaaaccgtaaccggtaaccactatcaggttgcatttggcggcaaaggcgcgaatcaggctgtggctgctgggcgtagcggtgcgaatatcgcgtttattgcctgtacgggtgatgacagcattggtgagagcgttcgccagcagctcgccactgataacattgatattactccggtcagcgtgatcaaaggcgaatcaacaggtgtggcgctgatttttgttaatggcgaaggtgagaatgtcatcggtattcatgccggcgctaatgctgccctttccccggcgctggtggaagcgcaacgtgagcgtattgccaacgcgtcagcattattaatgcagctggaatcaccactcgaaagtgtgatggcagcgcgaaaatcgcccatcaaaataaaaacggggggtgtgatcacgtcttgttgtgtagacgggccgccacgggttgctggatgtgttccgtggtcgcaacgcaattgtggtttggcaaaggatatttttgccccaggggaacagccggacagcggcaccatcactttgggtgaaacggtgaaactggcgtcggttgatcagttccgtgactcaatggataacagcaaaaccgtttgggaagaagtttccggcgggctggatatcatgaagatcggcaacaccgagatgccaagccgcgcctacgttggccgctttaactttaaaggggttgatcagggtaaacgcgttggtgaactctccggtggtgagcgcggtcgtctgcatctggcgaagctgctgcaggttggcggcaacatgctgctgctcgacgaaccaaccaacgacctggatatcgaaaccctgcgcgcgctggaaaacgccctgctggagttcccgggctgtgcgatggttatctcgcacgaccgttggttcctcgaccgtatcgccacgcacattctggattaccaggatgaaggtaaagttgagttcttcgaaggtaactttaccgagtacgaagagtacaagaaacgcacgctgggcgcagacgcgctggagccgaagcgtatcaagtacaagcgtattgcgaa

SEQ ID NO: 24780 - DNA, 1944 bp, Homo sapiens
  SIMILAR (1030)..(1446): 991254mologous to Escherichia coli NarV protein,accession number D90786,Smith-Waterman Score=712.
atgcacgagcgggaaccggggctgcgtgcggcgcttgcgggccagctggagttccgggtgggcttgggcttgggagtgtggactctgagactcatggagctattgcgccaaagattagaactcgttgtatatactgcgagtgatggccaagaatatgagatggtctctagactgaactgggttaactatctggtccttgaagatgtgcacattatacttcctgatcagatgagaggaattactggatgctacgcgactcaccctcatgagcgaagactacatgctggaactgttcatcgtcagaacattgtcaataatccaccagactgtgtgcccagggatgctggggaagcagaggtggctcctgacccttccctagccagcctccagttgcagaccccagagctgcctggccttatcagctgccacaattctattcaggtcagcaatgaggcgaggctttttgaacttctaatctgccagtggagagattttcgcaagagggtaattgctgcaaagagcatgcaagggagggagctggagggaggacagcgaggccaggataaagccaccaatccattccgagtacttgccctcaaggggagtggtgatcctgatcctcatggtgctgggcgccagggcagtgacctccttctgcatcctgtgagtgatgcccaggttttgcagcattttttccaaagacgagctctgctgtcttcaccatgggattaccatgatgttgttgggctgtgtgcgcaggagccatgtggctacatcatggagcttttcataataaagcaccagtgttcattagcccaaacagctgggagtttggctccagaacaaaagaaagagctcgaaatgacggtcagatattatatcagttctgctgatttaaccgcagagaagttcgccacagcaatccgaaaccctggcatgtggagaataagctgcactggcgtctggacgtgtaaagacagttcgataagcattgctctacagcagattcaaccagaatcttggcaagctttgttcggcatgttaacgccgcactggatgtacgcgtggtttttgccagtggcagcgaaacaactcatggcgatggtgctcggcggtatttgcggtgtgttgacgttgattggcggcgcaggactgctgtggcgcaggctgacaaatcagcgcgtgcgtgccacttccactacgccggatatcatcatcatgagcattttgctgatccagtgtctgttggggctaagtaccataccgttttcagcacagtatcctgatggtagcgaaatgatgaagctggtgggttgggcgcaaagcattgtcactttccgtggtggatcgtcagagatgctcaacggcgtagcgttcgtcttccgcctgcatctggtgttgggaatgaccatcttcctgctcttcccgttcacccgactgcatcattttattgatgtcatcacagggctggcggtaggtatgttgattgactggatggtgcccgtcgaccgtcgttggaattatcagaaacctgatcaacgtcgaatcaaaatagcactgccctatgtcgtaggcgcgggctcgtgcattgtattgatggagctaatgatgatgattcagttatggtgtggcctagtggttcagggaggccttggtcagcagaaccaggagctccccagaggtgatgcgcagcttgttgtagaagatgtggaactagatcttctccatttcattgtatttggtgatgatgtcatgctcaatgtggtgcttcagggtcaggctttcatgcttgctctgggcctagtcaccaatgtaggagtcctggcccatgcccatcatcatgccctggtgtcaggggtgcccaacgatggagggggaacatgggttgggggacgttgtgtccagcaaagccagctttgcacatgctggagccattgtcaatga

SEQ ID NO: 24781 - DNA, 864 bp, Homo sapiens
  SIMILAR (444)..(527): 921254mologous to Escherichia coli H repeat-associated protein,accession number X60998,Smith-Waterman Score=138.
tacgaggagcgagtgctgaaaaaaatccgccggaaaatccggaacaagcagtcggcgcaagaaagcaggaagaagaagaaggaatatatcgatggcctggagactcggtataccggaccaataacgcttttctcacctatgtggaaaccagtgatttcttcattgaatttccgcgaaacagggctggaagagtttgttgagatggttactttttatgtcattaaccgtttacgtcattaccgcgaagaacaggtgattgatgatgtaccgcagtggctgaaaagtacggtagaaaagatgcatgataaagagcagtttagtgaatcggcgctggagaatatggtggcgttgtcagccaaatcacacctgcacgatccagaatcatggagattaggaccaagccagaggggtattaagccaagggcccgtgtccggaccgaaaccattcttcagatgataaagacgtcattgcaattgatggaaaaacgctccggcattcttatgataagagtcgccgccaggggagcgattcatgtcattagtgcgttctcaacaatgcacagtctggtcatcggacagatcaagacggatgagaaatctaatgagattacagctatcccagaacttcttaacatgctggatattaaaggaaaaatcatcacaactgatgcgatgggttgccagaaagatattgcagagaagatacaaaaacagggagtcatcttctctctctgtcctgccagcataattgatgacaaaaaagttacagaccttgctgtagcagttcaaggcaccctaaaaactgggtctggagggattttgccccctgggggagctttgaagaagatatccgagaaactttag

SEQ ID NO: 24782 - DNA, 1770 bp, Homo sapiens
  SIMILAR (3)..(242): 901254mologous to Escherichia coli alternate gene name yhhI,accession number U00039,Smith-Waterman Score=380.
aacatatttctattattcccgattacagataagcctggaaagtagagcataaattgtcaggcatcctactattgactatttttgccgttatttctggtgcagaaagttggaaagatatagaggatttcgggaaaacacatctcgatttctggaagcaatatggtgattttgaaaatggtattcctgttcacgatactattgccagagttgtatcctgtatcagtcctgcaaaatttcacgagttgctttattaactggatgcgtgattgccattcatcaaatgataaagacgtcattgcaattgatggaaaaacgctccggcactcttatgacaagagtcgccgcaggggagcgattcatgtcattagtgcgttctcaacaatgcacagtctggtcatcgggcagatcaagacggataagaaatccaatgagatcacagctatccctgaacttcttaacatgctggatattaaaggaaaaatcatcacaactgatgcgatgggttgccagaaagatattgcagagaagatacaaaaacagggaggtgattatttattcgctgtaaaacagcgcaatggtgctgtcgagaaccgcgcgaaaacccagacgcggatcgcttttggcgaccattttttccgccgacaggtgagtcagcgtatccggcttttttgccaccggctggcgacacagttcgcagcacgcctgcggatgttcatcgctactggtcagcccatgaacgggctgcggctgctgctgttcatcgtcaacaaacaggcggccctgctcgtcaataaacttgatgcgcagatggcggctttccagcaactcccgggcagagggcgtcaggcgactgtccgcagggagatggatctctgcgccttcgctgagcgtatgggattgccagttagccggccaggcgacatacaggaatttcacgctggatgtcgtaccaaattcgatgctggagcctttcgggataaacatcacgtcgcctgctttggcgatcatggtttggccttcgtggcgaacatgcagctccccttccagcaccatgtcgatttcgtcgtagttcagggtccacgggaagaatgcgttctcccactgcataaaaccggcggccatgctgctgccgtcgtctccggtcacaagatcagtcaagcccacgcaatgcggctctgcgccgtcgaaacgaccaaacttgacgctactggcatcaatcactttgatgccgcctttgccggtcaccgatttgaaagctcggttgattgcgcctgctccgcgactgtttccttcatcacttttccatcagtgtgcgaccggttcggtaactggcttcgcagtggcagatgttcgcatgcggctcgcaagaacgaaatcaccctaactaacacccggcgcagcctgagacctaaacgcaacaccgagaggcacgacatgcaaacaagggccaccgttatcgctgccggtgaaaaactactgccttatgcagaaacgctcatgagcacctggcaggccgcccgtaaggaggtggcgcatacctcacgacataacgagttttctatcggtgccagcgcctcgttgtgggacatggtgatgacatccgccggggctgttgtcacgaccgtcgtcgttgctgtacgaccttcctctttctatattctctgctctcacaagaagaagcgaacactacacaccaagagagagaagacagtagacagaaggaaagagtacgaaacgagagcgaagagatcagaaacagatacacaatag

SEQ ID NO: 24783 - DNA, 1433 bp, Homo sapiens
  SIMILAR (143)..(1027): 921254mologous to Escherichia coli alternate gene name yhhI,accession number U00039,Smith-Waterman Score=1432.
ttcccttttcgacgatttcgtactttttgtactagacaattcgcattttatgtttaaaaattgagatattccttattacctaaagctgttttttattgcttacacatgatcaaatactccttacataattaaggagaacaaaatggaacttaaaaaattgatgggacatatttctattatccccgattacagacaagcctggaaaatggaacataagttatcggatattctactgttgactatttgtgccgttatttctggtgcagaaggctgggaagatatacaggattttggggaaacacatctcgattttttgaagcaatatggtgattttgaaaatggtattcctgttcacgataccattgccagagttgtatcctgtatcagtcctgcaaaatttcacgagtgctttattaactggatgcgtgactgccattcttcagatgataaagacgtcattgcaattgatggaaaaacgctccggcactcttatgataagagtacagccgcaggggagcgattcatgatcaataatgcgttctcaacaatgcacagtctggtcatcgggcagatcaagacggataagaaatccaatgagatcacagctatccctgaacttcttaacatgctggatattaaaggaaaaatcatcacaactgatgcgatgggttgccagaaagatattgcagagaagatacaaaaacagggaggtgattatttattcgctgtaaaaggaaaccaggggcggcttaataaagcctttgaggaaaaatttccgctgaaagaattaaataatccagagcatgacagttacgcaatgagtgaaaagagtcacggcagagaagaaatccgtcttcatattgtttgcgatgtccctgatgaacttattgatttcacgtttgaatggaaaggactgaagaaattatgcgtggcagtctcctttcggtcaataatagcagaacaaaagaaagagccagaaatgacggtcagatattatatcagttctgctggatttaaccgcagaaaagttcgccacagcaatccgaaaccactggcacgtggagaataagctgcactggcgtctggacgtggtaatgaatgaagacgactgcaaaataagaagaggaaatgcagcagaattattttcagggatacggcacattgctattaatattttgacgaatgataaggtattcaaggcagggttaagacgtaagatgcgaaaagcagccatggacagaaactatctggcgtcagtccttgcggggagcgggctttcgtaatcttgccctgaatacaggactgagtatcaaaaagccggttaactgaaactgtccaggttttgggggtcagttcataaacgccttatccggcctaaaaacaactaaaattcaataaattgcaccgatgcgtagtccctataagcttacgcg

SEQ ID NO: 24784 - DNA, 782 bp, Homo sapiens
  SIMILAR (412)..(254): 921254mologous to Escherichia coli Anaerobic dimethyl sulfoxide reductase chain A precursor (EC 1.-.-.-) (DMSO reductase),accession number D90801,Smith-Waterman Score=249.
gataacaatcattttggcgttcgatttctcgcgcgctttttcaagaagataagtgatgccaccaccgctcatgcgggtttctgccgggttgttaccaaacatcacgaccagcttgctgttttcaatatccgcggtgctgttgccatcattactgccgtaggtgtagggcatggcacaggaaatttgcgcagtgctgtaggagccatactggttgagtgaaccgccgtagcagttcatcaggcgtttgaccgccggaggctgatggcgaagagcgggtcatattgccgccaacgatccccgaagagtactgaatatatacagcctcattgccatattgttcgacggttttcttcaggctactggcgatagtatccagggcttcatcccagctaatacggtcgaaatttgccttcgccgcgtttgcccacgcgtttcattgggtaattcaagcgatcgggatgattaatacgccggcggatggagcgaccgcgcaaacaggcgcgtacctgatggttgccgtactcatcgctgccggtattgtcagtttccacccaggtcacttcattatctttaacatgtagacgaagtgcacagcggctaccacagttgacggaacaggcaccccagaccactttttcgcgggcctgttgtaccgctgctgctgcattgcgcagggtaaacggcaaagaaaaaccgcctgcagccagcgccagagaacctatcgcggtagatttaacgagtgttctgcggctgatgcccaccattcgttcatttttggacat

SEQ ID NO: 24785 - DNA, 3063 bp, Homo sapiens
  SIMILAR (2062)..(3060): 911254mologous to Escherichia coli hydH,accession number U00006,Smith-Waterman Score=1512.
atgactgagattgaggagaatatgctactcccaatttctggccaggaactgcccattcgttggcttgctcaacacggcagcgaaaaaccggtaacgcacgtttcacgcgacggactccaggcattacacattgctcgggctgaagaactaccggctgttactgccctggctgtttcccacaaaaccagcctgctcgacccgctggaaattcgcgaactccacaaactggttcgtgacactgacaaagttttccctaatcctggtaattcaaacctgggactgataactgcttttttcgaagcatacctgaacgctgactacaccgatcgaggactgctgacaaaagagtggatgaagggtaatcgtgtttcacacatcactcgcacggcttccggtgctaatgcttgcggcggaaacctcaccgatcgcggcgatagtttcgtccacgatctgacgtcaatggcgcgctacgtagccactggcgtactggcccgttcaatgggacttgtcatctatagcttcatccagcacacgttaacgcttgaggaatatcgcgaaattaccgcctttctgtttcgcgaattcacacatgctgcggcggcacgctacaccggtgaacaagaaacacttccgcttagcccgcagtggatcctccgccagtgtaaagaggtcgcctccctgtgtgatggcgacaccttctccggcgagcagctaaacttaatgctgcagcagcgtgaatggcgcgaaggtttcctcgctgaacgtatgcaggatgagatccttcaggagcaaatcctgattgaaaccgaagcgaacgcatcgggcaaattaacgccctttcggtcattgaatttccgggtcatccacgcgcttttggcgaaccttctcgcattagctgcgttgtgcatattggcgatggtgaattcaccgacatcgaacgcaaagcgacttggcggcaatatccatgcgaaagggatgatgatcatgcaagcgttcctgatgtcggaactacagcttgagcaacagatccccttctcagcatcgctgacatttgagcagtcatacagtgaagttgatggagatagtgcctcgatggctgaactctgcgccctgataagcgccctcgccgatgtgccggtgaatcagagtatcgctatcacaggttcagtcgatcagttcggtcgcgcccagccggtcggtggtttaaatgagaaaatcgaaggcttctttgctatttgccagcaacgtgagttaaccgggaaacaaggtgtcattatccccacagctaacgttcgccatttaagtcttcacagtgaactggtgaaagcggtagaagaaggcaaattcaccatctgggcagtagacgatgtgactgacgcactgccgttattattaaatctggcacgccatctggtgcgtttaatgccggtgctgcgcttgcgtgatgcccgttttatgcgccgtattcgtaacggcacggtgccaaatgtccctaatgtggaagtcaccgcgcgccactcgatttcctcgcccattcgtcagggactttccgcaatggtacagctgcttgagcattatttctctgagcagggggccggacaggcgcgatatcgtttaatgcggcggcgagccagcaatgagcaacgaagctggcgctatctggatatcatcaaccggatgattgaccgacctgttgcctggcatctgttgaatcttctgccattgcagcgcattgccaccaccaactcgggtgagttgctttcgttaacgccggtagagcatgtttgccgactggtacgtgagtcctcgcgcgttgccgcctggcgtctggggccgagtggcttgagtaccgaagatagccgacgcatatcctttcacattcgttttaaccgtccgtcatcgctgtttgcacgctgctggttgctggtggaaggggaaacggaaacctgggttatcaatgaactggcgcgtcagatcaaggtcattgagtttgcccagtccgggctaaagccactggttaaatttgcccgccgaatggggattgaatggcatgtactggtcgatggcgatgaagcagggaagaaatatgccgctacgaaattaaagccagaggaaaactcccgctggcggctgcttgggaaaacggaaactacgcctgcacttgaggtctatcgtttgttccagccaatgtcagcgccctggcggcatggaatgcacaatatgccgcgctgtaacggcaaagctgtgccacaagtagatgcacaacaggctatttttatcgccgttgatgccagtgatctggttgcaacccagagtggggaaaagcgcaataccctgattatcctcttcgccctggcgacggtcttgctggcaagcgtattgtcattcttctggtatcgccgctatctgcgctcgcgccagcttctacaagatgaaatgaagcgcaaagagaagctggtggcgctggggcatcttgcggcaggcgttgcccacgaaatccgtaacccactttcctcgattaaaggactggcgaaatactttgccgagcgcgcgcctgcagggggagaagcgcatcaactggcgcaggtgatggcgaaagaggccgaccgtttaaaccgcgtggtaagcgagttgctggaactggttaagccaacgcatctggctttgcaggcggtggatctcaacacgctgattaaccactcattacagctggtaagtcaggatgcaaacagccgggagatccagttacgctttaccgccaacgacacattaccggaaattcaggccgacccggacaggctgactcaggtcctgttgaatctctatctcaatgctattcaggcgattggtcagcatggcgtgattagcgtgacggccagcgaaagcggcgcgggcgtgaaaatcagcgttaccgacagcggtaagggaattgcggcagatcagcttgatgccatcttcatccgtacttcaccactaaagcgaaggcaccggattggggctggcggtctgcataatattgttgaacaacacggtggtacaattcaggtcgcaagccaggagtga

SEQ ID NO: 24786 - DNA, 967 bp, Homo sapiens
  SIMILAR (443)..(952): 991254mologous to Escherichia coli hydH,accession number U00006,Smith-Waterman Score=877.
ggccactcacctgtatgtgcatcagcctgctgatctcctcctgctgccgctgcagaatcacctgcttctctcccatgagcatctcctgctgctccaacatcagctctcgctcaaactttctgatggagtcctagagagtcagacgatggagggctccatcagcaaggttcagcatgatctgatcatggtgcagcaggagtttctcatctgggataagcatgctattcttcagcgtcagagtgtggggatcaccaggctgtttcacattcagaggcttataacctcctcggtcagtgaacttggaccatggcttctttgctatccctgtgttcccagcagtagacttgtccctattttctggttccacgggttggttattcgagtattgcgccacactgatgactgggtttatcctgaaagggatgagtcagcaaagaagaagatgcgttttatgcaacgttctaaagactccttagctaaatggttaagcgcgatcctccccgtggtcattgttgggctggtgggattgtttgcggtaactgtgattcgtgattatgggcgggcaagcgaggcagaccgccaggcattactggaaaaaggtaatgtgcttatccgcgctctggagtcgggaagccgcgtagggatggggatgcgaatgcaccatgtacagcaacaggcgcttctggaagagatggcgggacagccgggagtgttgtggttcgcagtcaccgatgcgcagggcatcattattcttcatagcgaccccgataaggtcgggcgtgcgctctattcgccggatgaaatgcagaaattaaagccagaggaaaactcccgctggcggctgcttgggaaaacggaaactacgcctgcacttgaggtctatcgtttgttcccaccaatgtcagcgccctggcggcatggaatgcacaatatgccgcgttgtaacggcaaagtgtggcacaagtag

SEQ ID NO: 24787 - DNA, 1776 bp, Homo sapiens
  SIMILAR (655)..(1479): 991254mologous to Escherichia coli rep helicase,accession number M87049,Smith-Waterman Score=1410.
atgtttgaccaactggtgtgccgcgtgatgttccaccagatgcgctatgaaggcattttcaccccgccatctgaacagggtacgctggtcttcccgggtaacctggggatgttcgaatggggcgggatttccgttgatccaaatcgtgaagtggcgattgccaacccaatggcactgccgtttgtttcgaaactgatcccgcgtggtcctggcaacccgatggagcagccgaaagatgcaaaggcacgggtacggaatccggcattcagccacagtggttttatcgttctggctttggcgctgctcaaaggcgacctgcgagcagaagcccagcagcgtgttatcgcctgcatgtttggtttatgggtgctgatgggcattggctttatcgcctctatgctccatcttggttcaccaatgcgcgcttttaactcgctcaaccgggtaggggcttcagcactcagtaacgaaatcgccagcggttcgatcttttttgccgtaggcggcatcggctggttgctggcaatgctgaaaaagctgtcaccggcattgcgtacgctgtggctgatagtgacgatggttcttggcgtcatctttgtctggatgatggtgcgtgtgtataaccccagatgcacagaagttctgtttggtccagggctgattgaagatgacaaagttctcctgcaacaactgatttcgaccatctctaactggaagaatgatctcaaaacaccgtcccaggcggcagcaagtgcgattggcgagcgggaccgtatttttgcccattgttatgggctgtatgatgcacacctgaaagcctgtaacgttctcgacttcgatgatctgattttattgccgacgttgctgctgcaacgcaatgaagaagtccgcaagcgctggcagaacaaaattcgctatctgctggtggatgagtatcaggacaccaacaccagccagtatgagctggtgaaactgctggtgggcagccgcgcgcgctttaccgtggtgggtgacgatgaccagtcgatctactcctggcgcggtgcacgtccgcaaaacctggtgctgctgagtcaggattttccggcgctgaaggtgattaagcttgagcagaactatcgctcttccgggcgtattctgaaagcggcgaacatcctgatcgccaataacccgcacgtctttgaaaagcgtctgttctccgaactgggttatggcgcggagctaaaagtattaagcgcgaataacgaagaacatgaggctgagcgcgttactggcgagctgatcgcccatcacttcgtcaataaaacgcagtacaaagattacgccattctttatcgcggtaaccatcagtcgcgggtgtttgaaaaattcctgatgcaaaaccgcatcccgtacaaaatatctggtggtacgtcgtttttctctcgtcctgaaatcaaggacttgctggcttatctgcgcgtgctgactaacccggatatcaccaaatatatgggttactaccagcttaaaatcggctatcacctcggtgatgcggtgctcagtgcgaaaggacagtacaactggaacaccggctacggcggcgcggagttaggcttaagttacccgatcaccaaacatgtgcgcctttatactcaggtttacagcggctatggcgaatcgctcatcgactataacttcaaccagacccgtgtcggtgtgggggttgcgctaaaccacctgcaggcatgcaatattcgccgcccggtttacgtcccgctaatgcgggatcggtaa

SEQ ID NO: 24788 - DNA, 900 bp, Homo sapiens
  SIMILAR (286)..(864): 981254mologous to Escherichia coli leucyl-tRNA synthetase,accession number X06331,Smith-Waterman Score=963.
tccccgtcccgtcccctctacgactggtgtactccctccggtgtgttcaccctccacccggatccccggtcggtcgacgacggtcagtcgggtatcggtcctgtgggggtctacgaccgtcacacggacatgaagaacgacaggaacctcccgcagatacgggctaacagtcaggcaggccgggtagatgtggcgattgggggcgacggaccccgagtcccgacgggcggggggcgtcgtcgggggaggattttgattccgacggggagtagggggcggccgttccgcttcctgaaacgtgtctggaaactggtttacgagcacacagcaaaaggtgatgttgcggcactgaacgttgatgcgctgactgaaaatcagaaagcgctgcgtcgcgatgtgcataaaccgatcgctaaagtgaccgatgatatcggccgtcgtcagaccttcaacaccgcaattgcggcgattatggagctgatgaacaacctggcgaaagcaccacccgatggcgagcaggatcgcgctctgatgcaggaagcactgctggccgttgtccgtatgcttaacccgttcaccccgcacatctgcttcacgctgtggcaggaactgaaaggcgaaggcgatatcgacaacgcgccgtggccggttgctgacgaaaaagcgatggtggaagactccacgctggtcgtggtgcaggttaacggtaaagtccgtgccaaaatcaccgttccggtggacgcaacggaagaacaggttcgcgaacgtgctggccaggaacatctggtagcaaaatatcttgatggcgttactgtacgtaaagtgatttacgtaccaggtaaactcctcaatctggtcgttggctaagcgcgggaggaagcgtgcgatatctggcaacat

SEQ ID NO: 24789 - DNA, 2001 bp, Homo sapiens
  SIMILAR (438)..(22): 921254mologous to Escherichia coli No definition line found,accession number U00039,Smith-Waterman Score=642.
ttaaaacatcacaatcatcaggaaattcgacgccttcataaaaggcattagctcaagattgcaggtttttagcgataaggtgatatcaccgatatctttaattttatcgattacatgtttggataaataggtaattatgccggttggggcgtagatggtgacccgaccacgtttctcatgcttataatctgcaataaaattattaagttgctcgtttctgtccagcatgtcgttgatgtacggtaacagcccggtgccaaaaggtgtgagcatcagctgccgggtggttcggtcaaagacttttaaacccacttttgattcaaaatcagcaagatatttgctgacgttggcctgtgcgatgccaagtacagtcgcggcatggctgatattttcactggcagcgattaccgagataatttttaactcccggtacaccagcaaatgcgcatgcataatgtcgctggccgggcgaccgtgcgccagcaaatcagccattgctttaagatatggcggtagatggcggaaataacgctgatacccggcacacaaataattcagtcccggtttgccgctggcatcgagcatgaagcggtgtttcgggcagcctccccagcacgcttttaacacgttacaactgcgacactgcgccggtaactgcttaaatttatcttcaccaaacgcctgctgttgcggggaatcgatcatttctgcaattgtttgctggtgcatattccccagccgatattgcggataaacatagtgatcacaggggatcctttggttaacaccattcgcctgagcctgctgccgctggccggtctctcgttttccgcttttgctgcacaggttaatatcgcaccgggatcgctcgataaagcgctcaatcagtatgccgcacacagcggatttaccctctcggttgacgccagcctgacgcgcggcaagcagagcaacggcctgcacggcgattacgacgtcgagagcggcctgcaacaactgctggacggcagcggactgcaggtaaaaccggagatcaggcgtgagcagggagccatcttccagttgttgacggctgactgtgcctttggcggtgcggtaatctgcccgcagaccttcgccggtttccgactgccagagctgccagcctccgccagcgccgagcaacagcagtaatcctttcatcacgtgacggcgggtgaggcgggtatcgtgcaacgcccggctggcaacgtcgccaggcacaccgccaagctggttgcgcaggttttcaacctgctgccaggcccactggttatcctgatcctgttcataccactgttgccagcgcgcttcctgttgtgggctgacgcgctcgccgcttagcacggcataccagtgggaagctgaacgcagcgcctgacggcgggaatcggttaacaaaggattcataacccatactccagacggaacagcaggcagtgctcgacggctttcgccacgtattttttcacggagttcccgattgaacgcgatctggtggtcgatatgacccacttcatcgaaagtctggaagcgatcaaaccgtacatcatcggcaactcccgcaccgcggatcagggtagtacgcgtgcatgcgacgtcatagctcttcgatagtgtctcatgatctctacccatgtgcagaacgtgcaggtttgttacataggtgaccatgtgctgtgccacttcactggctgcataatttcctcttttaaaaagtgtctgttcatattttttgcccactttttgatgttttttttttttcttgtaaatttgtttaagttccttatagattctggatattagccctttgtcagatggatagattgcaaaacttttctcccattccataggctgcctgttcactttgatgatagtttcttttgctatgcagaagctcttcagtttaattagatcccatttgtcaattttggcttttgttgcaattgcttttggcgttttagtcatgaagtctttgcccat

SEQ ID NO: 24790 - DNA, 5052 bp, Homo sapiens
  SIMILAR (1)..(1014): 841254mologous to Escherichia coli GLYCINE BETAINE/L-PROLINE TRANSPORT ATP-BINDING PROTEIN PROV,accession number D90891,Smith- Waterman Score=1348.
atgggattatccggctcgggtaaatccacaatggtacgccttctcaatcgcctgattgaacccacccgcgggcaagtgctgattgatggtgtggatattgccaaaatatccgacgccgaactccgtgaggtgcgcagaaaaaagattgcgatggtcttccagtcctttgccttaatgccgcatatgaccgtgctggacaatactgcgttcggtatggaattggccggaattaatgccgaagaacgccgggaaaaagcccttgatgcactgcgtcaggtcgggctggaaaattatgcccacagctacccggatgaactctctggcgggatgcgtcaacgtgtgggattagcccgcgccattaatccggatatattattaatggacgaagccttctcggcgctcgatccattaattcgcaccgagatgcaggatgagctggtaaaattacaggcgaaacatcagcgcaccattgtctttatttcccacgatcttgatgaagccatgcgtattggcgaccgaattgccattatgcaaaatggtgaagtggtacaggtcggcacaccggatgaaattctcaataatccggcgaatgattatgtccgtaccttcttccgtggcgttgatattagtcaggtattcagtgcgaaagatattgcccgccggacaccgaatggcttaattcgtaaaacccctggcttcggcccacgttcggcactgaaattattgcaggatgaagatcgcgaatatggctacgttatcgaacgcggtaataagtttgtcggcgcagtctccatcgattcgcttaaaaccgcggctgtccctcctgttcagctactgacggggtggtgcgtaacggcaaaagcaccgccggacatcagcgctatctctgctctcactgccgtaaaacatggcaactgcagttcacttacaccgcttctcaacccgccgggcagtgacgtcatcgtctgcgcggaaatggacgaacagtggggctatgtcggggctaaatcgcgccagcgctggctgttttacgcgtatgacagtctccggaagacggttgttgcgcacgtattcggtgaacgcactatggcgacgctggggcgtcttatgaaattaaagcaggacttacttaaccatctctttttcaatcaactggatcaggatatggatcactttaatgtgaatctcctgaatgcggtcggcataaccaaagtgcggtacgcgaatttcgatatccgccgtgccagccattttgccgccgtctttaccggtcagggtgatcactttcattcccttctcacgcgccgctgcgatcgctttgatcacgtttgcagagttaccggaggtggagatccccagcagtacatcgccttcgcgacctaccgcttcaacgtagcgggagaaaatatcattgaaaccgaaatcattaccgacgcaggaaatatgactaacgtcagaaatagcaatcgccggcgactggacggtgaaatcgccgaaaacggcagtcaggacggaacgttgctgggctactcgctattgcaggagtcggtggatcaggccagctatatgtacagcgataaccattatctggcggagatggcaaccatcctcggtaagccagaagaggccaaacgctatcgccagttggcacagcagctcgcggactacatcaacacctgtatgttcgacccgactacccagttctactatgacgtacgtattgaagataaaccactggcgaacgctgcgcgggcaaaccgattgttgagcgcgcgttgtttcaccctcggttattttttcatgtacaaacaagctgttattctcctgctgatgctgtttaccgcaagtgtcagtgccgcgttacctgcccgttatatgcaaaccatcgaaaatgctgcggtctgggcgcaaattggtgacaagatggtgaccgtggggaatattcgggccggacaaatcattgccgtggagcccactgccgcaagttattacgcatttaattttggctttggcaaaggttttatcgataaaggtcatctcgagccggttcaggggcgacaaaaagttgaagacggtttgggcgacctcaacaagccgctgagtaatcagaacttagttacctggaaagatacgccggtctataacgcgccgagtgcgggaagtgcgccatttggggtactggcggacaatttgcgctacccgattttgcataaactgaaagacaggttaaatcaaacctggtatcagatccgtattggcgatcgactggcctatatcagcgcactggatgcccaacccgataatggcctgtcggtgctaacctatcaccatattctgcgcgacgaagaaaacacccgttttcgccatacttcgacgaccacatcggtacgcgctttcaataaccagatggcctggctgcgtgacaggggatacgcgacactgagcatggtgcagctggaaggctacgtgaagaataagatcaatctccctgcgcgagcggtggtgattacctttgatgatggcctcaagtcggtgagccgctatgcgtatcctgtgttgaaacaatatagcctgtgtgattatcatgtgttcccaacctgggacctgcaggcatcgggtgagcagcgtctgctgggcgagttaaccggcgcagcttgtgcaacgctggtagcggaaattgccgaacgtcacgccggtccggtggtactcattgcaccagatatgcaaaatgctctgcgtttgcatgatgaaatcagccagtttaccgatcaaatggtgatgaatctggcggactgggaaactcttccctacgacagtttttcgcctcatcaggacattatctcctcgcgcctttccaccctttaccagctaccgacgatgcagcgtggcgtactgattgttccggtgaatacgcttatgcagcgcgtttgcccacacagttttctccacggtcatgcgctggtgatgaaaaaaggtcagcgcctgtcacgagatgcattacgaacccaactggacagcgccggttatcgccatgttgaccaggtgatggagcacggcgaatacgccacgcgcggcgcgttgctggatctcttcccgatggggagtgagctgccttatcgtcttgcaatcggggtgaatgtggcgcaggcggaagtgttgaatctggagtccggagctaaacaggttttacaagaaacctttggctaccaacagtttcgccccggccaggaagaaattatcgacactgtgctttccggccgcgattgcctcgtcgtcatgcccactggtggcggaaaatccctttgctatcaaatccctgccttattgctaaacggccttaccgtggttgtttcaccgctgatttcgttgatgaaagatcaggtggatcaactgcaagccaacggcgtggcggcggcgtgccttaactcgacgcaaacccgcgaacagcaacttgaagtgatgacgagaccgcgcattggggatggaactggagcgttacgaaaaagagtcgcacagctggcctttaaaaatcagccaatgatggtgggcaactgggcgcaaagcattttgcacggcggggtcattgcgtcggcgctggatgtcgccgccggtctggtgtgcgtgggaagtaccttaacccgccacgaaaccatcagtgaagatgaactacgccagcggtatcgcggatggggaccattgatcttcgcgttgattatctgcgcccaggcaggggcgagcgttttactgctactagtagcctgttgcgtgcaggcaataaagtcgccgtcgcccgcgttgaattacacaatgaagaacagctttatattgccagtgccaccgccacctatatggcaatgtaggcaacataaacgctcgggcatcttcattgggaaaacccgctttcatggaaaggtaaatgcctacgccaacgaagaccgcgtcgtattgttccaaaagcgaatccaaagagacatctttacccacatcacaattgagttcgaagtgaatccccatcgcgctgaagatttcccgacggcgtgccaacagggatttatccagtttgaaagaaggtatgccgatagtgagcaagccaccgatttctggatggcgatcgtacatcgtcacccccacgccatagcgggtcaaaacatccgcacaggccagccctgccggacctgctacgataatcgtcacccgattgtccactttggtgacatgagcttatcgttcaatgttgacgatagttaccgcgccgtgctcatcgcgaatagtacaggcgccttcacacaaacggtcttgcgggcagacgcgtccggtaatatgcggcaggttgttggtctggtgagaaagctcgacggcggcgtcgagtgtttccggctttcaccagttcattccactgcggtatatggttatgctgcgggcaggacaggccaccacgcaggatttacagccaatacacttttgctgattgacctgaatgctgtcatcaacgtgtctgcaaaatctgaccatcgaaaacacgctgggcgatacgtagatgcaggtaaccatccggcggtggcactgcgtactgatggtgaccagaaccgtctggaaacgaatcgtcagccgcgtacgctggtgaccaacagctacattgaaggggatgtggatatcgtttctggtcgcggcgcagtggtgttcgataacaccgaattccgcgtggtgaactcacgtactcagcaagaagcgtatgtgtttgcaccggctacgctgtccaacatttactacggtttcctcgccgtaaacagccgtttcaatgctttcggtgatggtgtggcgcaactgggccgctcgctggatgttgatgccaataccaacggtcaggtggtgatccgtgatagcgccatcaacgaaggttttaacacggctaaaccgtgggccgatgcggtgatctctaatcgtccgtttgcgggtaataccggcagcgtagatgataacgacgaaatacagcgcaatctgaatgacactaactacaaccgcatggtggaatacaataacggtccagaatag

SEQ ID NO: 24791 - DNA, 993 bp, Homo sapiens
  SIMILAR (61)..(897): 871254mologous to Escherichia coli FecA,accession number M63115,Smith-Waterman Score=1222.
atgtttgctgtgtatgcccacgccgttatgcattggtatggacgctattgtggaatgtgggttaatatcgcaccgggatcgctcgataaagcgctcaatcagtatgccgcacacagcggatttaccctctcggttgacgccagcctgacgcgcggcaagcagagcaacggcctgcacggcgattacgacgtcgagagcggcctgcaacaactgctggacggcagcggactgcaggtaaaaccgctgggaaataacagctggacgctggagcccgcgcccgcaccaaaagaagatgccctgaccgtggtcggcgactggctgggtgatgcgcgtgaaaacgacgtatttgaacatgctggcgcgcgtgacgtgatccgccgtgaggatttcgccaaaaccggcgcaaccaccatgcgtgaggtacttaaccgcatccctggcgtcagcgcgccggaaaacaacggcaccggcagccacgacctggcgatgaactttggcatccggggcctgaacccgcgcctcgccagccgctcgaccgtcctgatggacggcatcccccgtccccttcgccccttacggtcagccgcagctttcactggctcccgtttcgctcggcaacatggatgccattgtacgtggtacgcggtggtggtgcggtgcgttacggacacgcagagcgtgggcggcgtggtgaactttgttacccgtgccattccgcaggactttggtatcgaggcgggcgtggaaggtcagctcagcccaacctcttcacaaaacaacccgaaagagacgcacaacctgatggtgggcggcacagcggacaacggttttggcaccgcgctgctctactccggcacgcgcggcagtgactggagcgagcacagcgccacccgcatcatcagggacgcacgtcttcgagtgttacaggatatgcgtcgcgtgcaaacaaagattattcagggggctgtgcatggaaacttatccagacccact

SEQ ID NO: 24792 - DNA, 2560 bp, Homo sapiens
  SIMILAR (1154)..(1180): 1001254mologous to Homo sapiens Human glycophosphatidylinositol-anchored protein GPI-122,accession number Y50125,Smith-Waterman Score=50.
atgaaccctaatgtgagctatggactctgggtgataatgatgtgtcactgtaggttcatcagctgtagcaaatgttccactctggcgcaggatgttgatgatgggggacgctgtgcatcaccttatttagccactctgcagcttgatagcagcctattgataccacctaaataccagaccccaccagcagcagcacagggacaagctacgccagggaatgctgggcccttagctccaaatggatcagcagctcccccagctggcagtgcatttaatcccacctcgaatagtagttctacaaatcctgcagcaagtagttctgcatctggttcctctgtgccaccggtctcatcgtctgcctctgctcctggtattagccagataagcactacctcttcttcaggattcagtggtagtgttggagggcagaaccccagcactgggggcatttctgcggatagaacgcaagggaacataggctgtggtggagacactgaccctgggcagagctcttctcagccctcacaggatggacaagagagtaacgtgcctagtgttgggagcctagcagatccagactatctgaacacaccacagatgaacacacccgtgacgttgaacagcgctgccccagccagcaatagtggggcaggagtcctaccatctccagcaacccctcgcttctctgtccccacaccacgaacccccaggaccccaagaactcccagaggtgggggcactgccagtggtcaagggtctgttaagtatgatagcaccgatcaaggatcaccagcctccaccccctctactacacggcccctcaactctgtggagcccgccaccatgcagccaattcccgaagcccacagcctctatgttaccctgattctctccgattccgtgatgaatatctttaaagacagaaactttgacagctgttgcatctgtgcctgcaacatgaacatcaaaggggcggatgtcgggctttacatccccgattcttccaatgaggaccagtaccgctgtacctgtgggtttagtgcgattatgaaccgcaaacttggctacaattcaggactcttccttgaagatgagttggatatttttgggaagaattctgatattggtcaggctgcagagaggcgcttaatggatgtgtcagtccactttccttcctcagtgcgctgctttgagcgtaaaagtcattatggattttctgccacgctgtctgttgttcgctggtcaaaggcgcggcattttgctgccacataccgtgtccgccgtgagcaaatgcagatgtcgatcccatcgccattgctgaaacgccatcattaccagggcaattttcgtgttccgtttcatgaaagggatgagcaggcaaagaagaagatgcgttttatgcaacgttctaaagactccttagctaaatggttaagcgcgatcctccccgtggtcattgttgggctggtgggattgtttgcggtaactgtgattcgtgattatgggcgggcaagcgaggcagaccgccaggcattactggaaaaaggccgcgtaaatcgccgccgtgaaaagtgccaatttccgccataccgtctttatgacgtccgtaactctggtcattactgggatcgccgttttcgaaacgatctgtcagcacaaagtaaaccgtggcgttatgccagtcgaaaggggcggatgtgtcagtttctgcccgttccagcaggagtaaaccgttgctggtggcagcgggttgtaacattatttgaccgttcttcactatcgcaatttgctggctgtaataatcccgtacggcggctccttccgggaaagtggcgctgacatccactgtgagcgcacatcttctctggcggcacaatctttacgtttcggttatgaaacatcacaaaccgactcgcaacatattgcggcgaaaaaattcaatgatttattgcaggagagaaccaaaggcgagctgaaattaaaactgttcccggacagcactctcggtaacgcgcaggcgatgatcagcggcgtacgtggcggcaccatcgatatggaaatgtccggctcgaataactttgccgggttatcaccagtgatgaacttgcttgatgtccctttcctgttccgcgataccgctcacgcgcataaaacgctcgacggcaaagtcggtgatgatctgaaagcctcacttgaagttgtacgcatccagattcagcgaactttctttgctgctggtagaaatcggcctcgctggcacatctttacgccggtttgcgcctgcgcctggttgatcaatccggcgttaagatcggcgtcaatcgcaatgtgtttcgagacctgcaggcatgaagttcgcatcctcgcgcgccgcagatgtgcatctctaaagctttcatcttcttgtagtttcaacggcaaaagcgccagcgcgaaaagcctgtttaaactgcagactctgggcctgactcaaggtaccgttgtgactatctccgcagaaggcgaagacgagcagaaagcggttgaacatctggttaaactgatggcggaactcgagtaa

SEQ ID NO: 24793 - DNA, 3402 bp, Homo sapiens
  SIMILAR (1162)..(1917): 981254mologous to Escherichia coli hydH,accession number U00006,Smith-Waterman Score=1266.
atgttgccagatatcgcacgcttcctcccgcgcttagccaacgaccagattgaggagtttacctggtacgtaaatcactttacgtacagtaacgccatcaagatattttgctaccagatgttcctggccagcacgcaggcccgcgccagtggtgccccactccagcgcctctttcgcgccataggcggcaacgcctgggaacgacctttcagaatggtgttttgcagcgccgctttctccgaagagtcttcaccgtttcgtgaaaccaactacgaaccgcaattgttcctcggttttgccaccgattaccgttttgcaggttggacgctgcgcgatgtggagatggggtataaccacgactctaacgggcgttccgacccgacctcccgcagctggaaccgcctttatactcgcctgatggcagaaaacggtaactggctggtagaagtgaagccgtggtatgtggtgggtaatactgacgataacccggatatcaccaaatatatgggttactaccagcttaaaatcggctatcacctcggtgatgcggtgctcagtgcgaaaggacagtacaactggaacaccggctacggcggcgcggagttaggcttaagttacccgatcaccaaacatgtgcgcctttatactcaggtttacagcggctatggcgaatcgctcatcgactataacttcaaccagacccgtgtcggtgtgggggcaatcggggtgaatgtggcgcaggcggaagtgttgaatctggagtccggagctaaacaggttttacaagaaacctttggctaccaacagtttcgccccggccaggaagaaattatcgacactgtgctttccggccgcgattgcctcgtcgtcatgcccactggtggcggaaaatccctttgctatcaaatccctgccttattgctaaacggccttaccgtggttgtttcaccgctgaattcgttgaaggaaaaatcagctaatccgttcgaatttaccttcgccgcgtttgcccacgcgtttcattgggtaattcaagcgatcggaatgattaatacaccggcggatggatcgacgcacaaacaggcgcgtacctcatggctgccgtactcatcgctgccggtattgtcagtgtccacccaggatgagaaggcaaagaagaagatgcgttttatgcaacgttctaaagactccttagctaaatggttaagcgcgatcctccccgtggtcattgttgggctggtgggattgtttgcggtaactgtgattcgtgattatgggcgggcaagcgaggcagaccgccaggcattactggaaaaaggtaatgtgcttatccgcgctctggagtcgggaagccgcgtagggatggggatgcgaatgcaccatgtacagcaacaggcgcttctggaagagatggcgggacagccgggagtgttgtggttcgcagtcaccgatgcgcagggcatcattattcttcatagcgaccccgataaggtcgggcgtgcgctctattcgccggatgaaatgcagaaattaaagccagaggaaaactcccgctggcggctgcttgggaaaacggaaactacgcctgcacttgaggtctatcgtttgttccagccaatgtcagcgccctggcggcatggaatgcacaatatgccgcgctgtaacggcaaagctgtgccacaagtagatgcacaacaggctatttttatcgccgttgatgccagtgatctggttgcaacccagagtggggaaaagcgcaataccctgattatcctctatgccctggcgacggtcttgctggcaagcgtattgtcattcttctggtatcgccgctatctgcgatcgcgccagcttctacaagatgaaatgaagcgcaaagagaagctggtggcgctggggcatcttgcggcagcgttgcccacgaaatccgtaacccactttcctcgattaaaggactggcgaaatactttgccgagcgcgcgcctgcagggggagaagcgcatcaactggcgcagcatgttcaaatacgtcgttttcacgcgcatcacccagccagtcgccgaccacggtcagggcatcttcttttggtgcgggcgcgggctccagcgtccagctgttatttcccagcggttttacctgcagtccgctgccgtccagcagttgttgcaggccgctctcgacgtcgtaatcgccgtgcaggccgttgctctgcttgccgcgcgtcaggctggcgtcaaccgagagggtaaatccgctgtgtgcggcatactgattgagcgctttatcgagcgatcccggtgcgatattaacctgtgcagcaaaagcggaaaacgagagaccggccagcggcagcaggctcaggcgaatggtgttaaccaaagcaacacgccgcctcaatggcgattgttcaggcacggcgaatatacgctgcaaatagacacccgctccggtacgccaacattgatgatttccatccagaacgccgccgaaccggtagcaagcctggtccgtgaatgcccgaaatgggatggattaccgctcacagtggatgtcagcgccactttcccggaaggagccgccgtacgggattattacagccagcaaattgcgatagtgaagaacggtcaaataatgttacaacccgctgccaccagcaacggtttactcctgctggaacgattatataaaaataaaatagaaaagagggaacagatgcgatatccggttgatgtatacacaggcaagattcaggcttatcccgaaggcaaacccagcgcaattgctaaattccaggttgatggtgagttgatgctgacggagctggggctggaaggtgacgagcaggcggagaaaaaggttcacggcgggccagacagagcgctgtgtcattatcctcgtgagcattatctctactgggcgcgggaatttccggaacaggcggagttgtttgttgcgcctgcgtttggtgaaaacctctcaaccgacggcctgacggaaagtaatgtttatatgggcgatattttccgctggggagaggcattaattcaggtcagccagccgcgctcgccttgctataaactcaattaccattttgatatcagcgatatagcgcagttgatgcaaaacacaggtaaggtggggtggttgtatagcgtgatagcgccagggaaagtgtctgcggacgcgccgctggagttggtttcccgtgtcagcgatgtgaccgtgcagtgcggccgccagcgtatttggaacggggttcatgggttgacgggcaacagaaagcgaaccgtccgatacattgctacaattatgcttgtccgactactggacatggatgcttttaatacctggcgctacgtgcgcggcagtcgcctgctgaacaggttcactcatacgcgctga

SEQ ID NO: 24794 - DNA, 2359 bp, Homo sapiens
  SIMILAR (867)..(1430): 891254mologous to Escherichia coli K12 putative transport,accession number AE000163,Smith-Waterman Score=809.
cggccatatccttgaagtccaatcccacattcgcgttcacaccgacgccttcacagtcataagccaggcgtcgcaacacagaagcgtcgggtattcaggtcaccggataacaatctccccaccgatttttacgctttgatcccacgtttcccgggactcaggggttcctggttgcgattatccggataaaaaaagagggggtcccaggcttaaacgggaatttatatggcccttttttctcgtctccccttttctggtgaacccttgtattctgctggcacgcaaaattactttcacatggagtctttatggatatcatttctgtcgccttaaagcgtcattccactaaggcatttgatgccagcaaaaaacttaccccggaacaggccgagcagatcaaaacgctactgcaatacagcccatccagcaccaactcccagccgtggcattttattgttgccagcacggaagaaggtaaagcgcgtgttgccaaatccgctgccggtaattacgtgttcaacgagcgtaaaatgcttgatgcctcgcacgtcgtggtgttctgtgcaaaaaccgcgatggacgatgtctggctgaagctggttgttgaccaggaagatgccgatggccgctttgccacgccggaagcgaaagccgcgaacgataaaggtcgcaagttcttcgctgatatgcaccgtaaagatctgcatgatgatgcagagtggatggcaaaacaggtttatctcaacgtcggtaacttcctgctcggcgtggcggctctgggtctggacgcggtacccatcgaaggttttgacgccgccatcctcgatgcagaatttggtctgaaagagaaaggctacaccagtctggtggttgttccggttgaagatttagcgggtattgagatcgatcacaccacctcgatggtgatgattttcggtattatttttctgaccgccgtcgtggtgcatattattttgcattgggtggtactgcggaccttcgaaaaacgtgccatcgccagttcacggctttggttgcaaatcattacccagaataaactcttccaccgtttagcttttaccctgcaggggattatcgtcaatattcaggcggtattctggctgcaaaaaggcaccgaagcggcagatattctgactacctgcgcgcagttgtggatcatgatgtatgcgctgctttcagtcttctcgttgctggatgttattttgattctggggcaagaaatttccggccagcatttcagttaccgctgaaaggggatatttcaggggattaaactgatgggcccgattctggtcggcattttgatgatctcgctgctgattggtcagtcgccagcgattctgatcagcggtcttggtgcaatggctgccgtgctgatgttggtatttaaagatccgattcttggtctgggtggcaggtattcagctttccgcgaacgatatgctgaaactgggcgactggctggagatgccgaaatacggcgcggatggcgcggtgatcgatattgggttacccaccgtcaaagtgcgtaactgggacaataccattaccactattcccacctggtctctggtttctgactcctttaaaaactggagcgggatgtcagcatctggcgggcgacgtattaagcgcagtatcagtattgatgtcaccagtattcgttttcttgatgaagacgaaatgcaacgtctgaataaagcgcatttgttaaagccttatttaaccagccgccatcaggaaattaatgagtggaatcgccagcaaggttctagggaatccgttatttaatctgcgccgaatgccgcaatattggaaaccttttgtgcctatctaaacaaaatatctgggtacccattccgcggattcgtaaagatatgaccttaatggtacgccaactggctccaggtgataacggtttaccgttcgagatctacgcgtttactaacaccgtggtgtggctggaatatgaaagcattcaggctgatatattcgatcacatatttgcgattgtcgaagagtttggtctgcgacttcatcagtcgccaaccggcaatgatattcgctctctggcgggtgcatttaagcagtaattaaaaaaaaccgctctcatcgaatggatgagaacggttttgcatggttgaccatccgtttggaagcaaaagaccggaatagccttatttttcgtccggcaggattttatatggccgtaaccgggggatcgctcgggcaccggccggcaggaaccgttcggaaccgcatattatccccattgggccggtttagggaagcaaaaggaatggggaaggcaaggcaactcgccacggagtcgcccccc

SEQ ID NO: 24795 - DNA, 757 bp, Homo sapiens
  SIMILAR (462)..(503): 851254mologous to Escherichia coli ribonuclease I,accession number M55687,Smith-Waterman Score=74.
atgaaagcattctggcgtaacgccgcgttgctcgcggtttctctgcttcccttctcttctgccaacgccttagcgttgcaggcaaaacagtatggcgattttgatcgctatgtcctggccctctcctggcaaaccggattttgccagagtcaacacgatcgaaatcgtaacgaacgagatgaatgtcgcctgcaaaccgaaacgaccaacaaagctgattttctgaccgtacatggtctgtggccaggattgcctaaatcggttgctgcccgtggtgttgatgaacgccgctggatgcgcttcggttgcgctactcgcccaatcccgaatctaccagaagcgcgcgccagccgaatgtgttcatcgccggaaaccggattatcactggaaacggccgctaaactaagtgaagtcatgccaggagctggcggacgttcctgcctggaacgctacgaatatgccaacacggtgcctgcttttggtttgatccggacgcatacttcgatttgtcagatctgcctgactgaacgcctgatagccgcctttcagtttatccgggaacggaatggattcgatctggcctttcttgtgataagccagcgtacaggcagctaccgcctggaaggattccgcacgaccagtaccgagattgaagatgccggaaacgccattttccaggaaccacagattcacatcagccacgtcgcccacatagacgaatcctgtttgaagttctcgctaccttcaaacagcttcg

SEQ ID NO: 24796 - DNA, 2025 bp, Homo sapiens
  SIMILAR (2025)..(1369): 961254mologous to Escherichia coli ribonuclease I,accession number M55687,Smith-Waterman Score=1117.
ttagtgaacgcggttaaaaataaaaggcatcacggtggtgaataatgccgctttcggccaagccggattaatcgccgtcaattcagcgcgagcagactcatattgcgcaacctccccgagtcccgcggacgccagcatcgccaccatcaggcatttttctttatgctgctgttgtaaatcgccatacagcgacaacaagtcaggttgcgagacggcaaagaaatccgcttcgatactggttttcgccatctcttgcgcccactgtttcatttcactaaacagttgctgtgcggtttgttgttcgcccagcagtcgcagcgccatcccttgccagaagagataatcaaccggctgatcgttgtaataactgtgaatgttaatagtgcgatcgccggtcgccgccagacgtaaacaacgcgtcgcttcagtttcatcgccctgcgcgttggcgcatatcgcctgccagaaccagatgtcgttatcagtttgccccggtaaacggccttcgcttaaattctccggataatgcagcgcggcatgaagcagttcgcaggcctgctgcggctgtctggcatcaagatgctgcgatatcgaccaatacgttccttcgcgtttaatctgcaatttacagccgagcgcatacccggaatcagttgggataacgatcaccccgcctttacgcacgatctccccgcctggtggatcagacgttggcgcaagggccgccagctgggtacgttcattgggcgattgctggcactgcgcgacttccatcgcgtcaccgtggtgttcggcaaaatgcgcaaccaatcttttcagccatttagcactaagattgtaccgcccaggatgagctagcaccgccttaccgccagaatgatgaatgacatcaatagcttgttctattgtacaccactgtggcggaacgtatccggttttcccgcgcgccagatactttttaaagacatccgccattgaactggctttgccgcactcaacaaggaaacgcgcaaaatgaccgcgcgtcactgcgccgccctgcgccagtcgttgtgcgccttccagcgccccaggtatttgcgctttttcaagtctttcggcaatcagctgcgcccgctgattgcgccgttctgtctgctgcgcgaggaactcacacattagcggatgagtaatatcaatattcagcccgacaatatgaatttcatgattttcccagaccgtggaaatttccacgccgggaataagattcaacgccagtcccgaacgtgatatttcctctgccaaactctctataccttcttcggggtatatccatttattgttgctctttgaaggtgcagaaggatccatgcggctactgtatgtttgcgttaggttactggctttcacgttctctggtccccagcttttggcaaagccggcgtcaaagtcacggcggctcactgttttaccgtaattatccgcaaggaattttccggcttcgctctctggaatttcttgattcaggcgtaccatcgtaccgaagtatgcgtccggatcaaaaccaaagcaggcaccgtgtttggcatattcgtagcgttccaggcaggaacgtccgccagctcctggcatgacttcacttagtttagcggccgtttccagtgataatccggtttccggcgatgaacacattcggctggcgcgcgcttctggtagattcgggattgggcgagtagcgcaaccgaagcgcatccagcggcgttcatcaacaccacgggcagcaaccgatgtaggcaatcctggccacagaccatgtacggtcagaaaatcagctttggtggtcgtttcggtttgcaggcgacattcatctcgttcgttacgatttcgatcgtgttgactctggcaaaatccggtttgccaggagagggccaggacatagcgatcaatatcgccatactgttttgcctgcaacgctaaggcgttggcagaagagaagggaagcagagaaaccgcgagcaacgcggcgttacgccagaatgctttcat

SEQ ID NO: 24797 - DNA, 3294 bp, Homo sapiens; identical to SEQ ID NO: 24626
  SIMILAR (2604)..(2026): 1001254mologous to Escherichia coli K12 putative synthetase,accession number AE000181,Smith-Waterman Score=1014.

SEQ ID NO: 24798 - DNA, 1452 bp, Homo sapiens
  SIMILAR (934)..(1449): 1001254mologous to Escherichia coli K12 putative PTS system enzyme IIC component,accession number AE000501,Smith-Waterman Score =845.
atgaaaggtgatactaaagttataaattatctcaacaaactgttgggaaatgagcttgtcgcaatcaatcagtactttctccatgcccgaatgtttaaaaactggggtctcaaacgtctcaatgatgtggagtatcatgaatccattgatgagatgaaacacgccgatcgttatattgagcgcattctttttctggaaggtcttccaaacttacaggacctgggcaaactgaacattggtgaagatgttgaggaaatgctgcgttctgatctggcacttgagctggatggcgcgaagaatttgcgtgaggcaattggttatgccgatagcgttcatgattacgtcagccgcgatatgatgatagaaattttgcgtgatgaagaaggccatatcgactggctggaaacggaacttgatctgattcagaagatgggcctgcaaaattatctgcaagcacagatccgcgaagaaggaaaaagcatttaccaggagcagacaacagcaatgaaacgcccggactacagaacattacaggcactggatgcggtgatacgtgaacgaggatttgagcgcgcggcacaaaagctgtgcattacacaatcagccgtctcacagcgcattaagcaactggaaaatatgttcgggcagccgctgttggtgcgtaccgtaccgccgcgcccgacggaacaagggcaaaaactgctggcactgctgcgccaggtggagttgctggaagaagagtggctgggcgatgaacaaaccggttcgactccgctgctgctttcactggcggtcaacgccgacagtctggcgacgtggttgcttcctgcactggctcctgtgttggctgattcggctatccgcctcaacttgcaggtagaagatgaaacccgcactcaggaacgtctgcgccgcgggcgaagtggccgcgcgggcctgctgcccatctccgacggtgcaagaaagttcttccagaaatatttcaaaggacgtgaagtgtatatcggtctggatactgctgtgacgctggggcatccaaccaccattgctgtcggtctgctactgatacccattatgttaattctggccagcattttaccgggcaacaaagtgttacccctcgcagacctgccggtagcaccgttctttatctgtatggctacggttatccaccgcggagacctggtcaggacgttgataagcggggtcatcgtgatgattaccgtcctgctgatcgccacccagttcgcgccttacttcactgaaatggcgctcaaaggcggtttcagttttgccggtgaaagtgcgcaaatctcagcgttgtccgtgggcaatatgttcggttggtcgatttctgaattgatgtcgcttgggattattggcgttgtcgtggcggtcggtattgtcgccagcgtcgtgctgttcttacgtaaacgtgaattatcggaataa

SEQ ID NO: 24799 - DNA, 4023 bp, Homo sapiens; identical to SEQ ID NO: 24479
  SIMILAR (1038)..(130): 991254mologous to Escherichia coli flagellin,accession number M14358,Smith-Waterman Score=1490.

SEQ ID NO: 24800 - DNA, 3939 bp, Homo sapiens
  SIMILAR (1765)..(2385): 981254mologous to Escherichia coli K12 putative membrane protein,accession number AE000234,Smith-Waterman Score=980.
atgccagagcacaaatttgtcaccctggaagatacgccgctgattggtgttacccagagctactcctgttcgctggagcaaatctctgatttccgccatgaaatgcgttatcagttctggcacgattttctcggcaacgcgccgaccattccgccggtgctctacggcctgaatgaaacgcgtccgagtcaggataaagacgacgagcaagaggtattctataccaccgcgttacgccaggatcaggcagatggctatgtactgacggggcatccggtgatgctgcagggcggcgaatatgtgattgttacctatgaaagtctgggaaccggcgtgcaagagtttatcctgacggtatacggaacgtgcatgccaatgctcaaccttgacgcgccggccgagtacgaacggacgctcgccacggtcaacaaaacgcagcagttccggaccgtactgttcccaacgaccactctcttgccacaaatcggctggctgaaccaccggcatcgacacctcgatcgcaccggcgttgttcatctcttcacgcacgatgttttcgacttttttcagaacgcgcacgccggtcggcagccaggttggttgttcgcggctggctggaacaagtggaaggtcagcagttgcgcgacgccagttgaagaatacggtaacgctattcgccagcttgccgctgctaacattttccctggcgacatgctgtttaaaaacttcggtgtcacccgtcacgggcgtgtggttttttatgattacgatgaaatttgctacatgacggaagtgaatttccgcgacatcccgccgccgcgctatccggaagacgaacttgccagcgaaccgtggtacagcgtctcgccgggcgatgttttcccggaagagtttcgccactggctatgcgccgacccgcgtattggtccgctgtttgaagagatgcacgccgacctgttccgcgctgattactggcgcgcactacaaaaccgcatacgtgaagggcatgtggaagatgtttatgcgtatcggcgcaggcaaagatttagcgtacgaatttgtcagccaggtgtcaagcagatccgccgtatcaagcattttgtcataagcatcggcttcctttttgctgcaactcgcgtgatgttattaggctccggtgaactgggtaaagaagtggcaatcgagtgtcagcgtctcggcgtagaggtgattgccgtcgatcgctatgccgacgcaccagccatgcatgtcgcgcatcgctcccatgtcattaatatgcttgatggtgatgcattacgccgtgtggttgaactggaaaaaccacattatatcgtgccggagatcgaagctattgccaccgatatgctgatccaacttgaagaggaaggactgaatgttgtcccctgcgctcgcgcaacgaaattaacgatgaatcgcgagggtatccgtcgcctggcggcagaagagctgcagctgcccacttccacttatcgttttgccgatagcgaaagccttttcccgcgagcggttgctgacattggctatccctgcaatgtaaaccgggtgatgagctcttccgcaaagggcaaacgtttattcgttctgcaaagcaccttgctccagcatggcacggggcgcgtaaattgtgaaagccgcgttaagtttgactccgaaattaccttgctaaccgtcaacccggttgatggcgtcaattcctgtgcaccagtaggcaatcgccaggaagtttgcggacttttttgtggggtgaatatggcagtaaagatttcaggtgtactgaaagacggcacaggaaaaccggtacagaactgcacaatccagctgaaagcaaaacgtaacagcaccacggtggtggtgaacacgctggcctcagaaaatccggatgaagccgggcgttacagcatggacgttgagtacggtcagtacagcgttattctgttggtggaaggattcccgccgtcacatgccgggaccattaccgtgtatgaagattctcaacccggtacgctgaatgattttctcggtgccatgacggaggatgatgcccgtccggaggcactgcgccgttttgaactgatggtggaagaggtggcgcgtaacgcgtccgcggtggcacagaacacggcagccgcgaagaagtcagccagtgatgccagcacatcagcccgtgaggcggcaacccatgcggctgatgctgcggactcagcacgcgcacgcagcacgtcagccggacaggccgcgtcgtcggctcagtcagcgtcttccagcgcaggaacggcatcaacaaaggccactgaagcatcaaaaagtgctgccgctgcagagtcctcaaaaagcgcggcggccaccagtgccggttgcatgaaagcattgacttatcacggcccacatcacgttcaggtagaaaatgttcccgatccgggcgttgaacaggcagatgatattattctgcgtattacggcaacggcgatctgtggctctgacctccatctttatcgaggcaaaatacctcaggttaaacatggcgatatttttggtcatgaatttatgggggaagtagttgaaaccggaaaggacgtaaaaaatttgcaaaaaggcgaccgagtggtaattccgttcgtcattgcttgtggcgactgttttttctgtcgattgcaacaatatgccgcctgcgaaaataccaatgcgggtaaaggcgctgcgctcattaaaaacgttacacgctcacgggattggatttctgattatggcggcgattatcgtcatggctgtcctttacctcgaaaaccactcctgacgatcatattgttccccccggcatcgcattcaccagacctgaaaccgccttctgcgccgcctctgcgctttgtgcaccggccatgcgtgaacgtgggtctgtcccattttaaacgacaaccctttatcaaaggcgtcgccaaacaggaaaccgtgaataaatccagcgtagacgcccggtacgctaacaatgccgccacgcctgaccgccgcaatagcactgagcgcaacgctttaccgctgctgccctccagtttcaggtgtttatgcttgatgaaaaaagttcgaataccgcgtctgtcgtggtgctatgtacggcaccagatgaagcgacacccaggatttagccgccaaagtgctggcggaaaaactggcggcctgcgcgaccttgatccccggcgctacctctctctattactgggaagcacttccgtttttgccggattattcgacgcgccgggacgttcacaatttgtccccgcggatcaagcctttgcttttgattttcagcaaaaccaacatgaccttaatctgacctggcagatcaaagacggttactacctctaccgtaaacagatccgcattacgccggaacacgcgaaaattgccgacgtgcagctgccgcaaggcgtctggcatgaagatgagttttacggcaaaagcgagatttaccgcgatcggctgacgcttcccgtcacatcaaccaggcgacgaatggtcgccacaacgcagcgcacagctgtgtctgttcgcagcagacagccacgcgcaatgccttttcgcgtctggcgtgtgatcgtatggacgactctagaagatccccaccagcatcgatccggcaataatcccacctttagtcagcagcacgatcacagtaaagaacgttttcagcggtcgtgcaccgagatccagcgctgcttccaccagcgaataatcaatacgaatcaacgcggtataaatcggcagtaccataaacggcacaatgtgatcccccacgcgtataaccttgcggcggctcaacagttttcgggcaccgagttccgcctattcacgatgtcgtgcttgcggtcccccgggaattcctgcttctatcttgagtactcaacgttctgcgtaatgccttag

SEQ ID NO: 24801 - DNA, 2242 bp, Homo sapiens
  SIMILAR (1072)..(1803): 981254mologous to Escherichia coli Glutathione-dependent formaldehyde dehydrogenase (EC 1.2.1.1) (FDH) (FALDH),accession number D90701,Smith-Waterman Score=1264.
atgcgcagccccatgacccgcaacagtcgaaacggcaaacacgactacaaacccccaccccgcaagcgacgccaacccccccacgaccacacagcacccaacagcacccccgcaagaaaccaacgcggcagaccccaccgacccaaccgacaggccggacaaagagaacaaagagctaacaaccccaccccgaacacccccagcccccccccaaccaacgaccccgctgaaccacaccaaacccgccacgacagccgccaaccgcacaacaccccaccagcctacgcagagctagtagctgctgcgcttttaaccacggatacaaatgttacccgccgacggcttcggtatatgcaacctgacacaaaattgtgtcatagtgcaggaaaaagcatttaccaggagcagacaacagcaatgaaacgcccggactacagaacattacaggcactggatgcggtgatacgtgaacgaggatttgagcgcgcggcacaaaagctgtgcattacacaatcagccgtctcacagcgcattaagcaactggaaaatatgttcgggcagccgctgttggtagaagatgaaacccgcactcaggaacgtctgcgccgcggcgaagtggtcggcgcggtgagtattcaacatcaggcgctgccgagttgtcttgtcgataaacttggtgcgctcgactatctgttcgtcagctcaaaaccctttgccgaaaaatatttccctaacggcgtaacgcgttcggcattactgaaagcgccagtggtcgcgtttgaccatctggacgatatgcaccaggcctttttgcagcaaaacttcgatctgcctccaggcagcgtgccctgccatatcgttaattcttcagaagcgttcgtacaacttgctcgccagggcaccacctgctgtatgatcccgcacctgcaaatcgagaaagagctggccagcggtgaactgattgacttaacgcctgggctatttcaacgacggatgctctactggcaccgctttgctcctgaaagccgcatgatgcgtaaagtcactgatgcgttactcgattatggtcacaaagcagatgatattattctgcgtattacggcaacggcgatctgtggctctgacctccatctttatcgaggcaaaatacctcaggttaaacatggcgatatttttggtcatgaatttatgggggaagtagttgaaaccggaaaggacgtaaaaaatttgcaaaaaggcgaccgagtggtaattccgttcgtcattgcttgtggcgactgttttttctgtcgattgcaacaatatgccgcctgcgaaaataccaatgcgggtaaaggcgctgcgctcaataaaaaacagataccagctccagcggcattgtttggttatagtcacctgtatggcggcgttcctggtgggcaggcggaatatgtccgcgtccctaaagggaatgtggggccgtttaaagtaccgcctttgctttcagatgataaagcgcttttcctttctgatattctgccaacggcatggcaggcagcaaaaaatgcgcagatccaacaaggttcaagcgttgcagtctatggtgctggtcctgtgggattgttgacaatcgcctgtgcacggttgctcggtgcggaacagatttttgttgttgatcatcatccctaccgcttgcatttcgccgccgaccgatacggcgcgatcccgattaattttgatgaagacagcgatccggcacagtcaattattgaacaaacggcaggtcaccggggcgtggatgcagtaatagacagccgtcggttttgaagcgaaaggcagcaccacggaaacggtgctgactaacctgaaactggagggcagcagcggtaaagcgttgcgtcagtgtattgcggcggtcaagcgttgcggcattgttagcgtaccgggcgtctacgctggatttattcacggtttcctgtttggcgacgcctttgataaagggttgtcgtttaaaatgggacagacccacgttcacgcatggctgggagaattattaccgttaattgagaaaggattactgaaaccagaagaaattgttacccactatatgccgtttgaagaggccgcccggggatatgagattttcgacaaacgtgaagaggagtgccgtccggtgattctggtacccggtgcacaaagcgcagaggcggcgcagaagacggtttcaggtctggtgaatgcgatgccgggcggaacaatatga

SEQ ID NO: 24802 - DNA, 2101 bp, Homo sapiens
  SIMILAR (959)..(2074): 991254mologous to Escherichia coli RhsB core protein with unique extension,accession number U00039,Smith-Waterman Score=2010.
ggtgacatgcagataacaataaccgctaagtctgtggcactggaagagggcgctattcttgcgcgcttcgactccactgacacccagttgcgcgctcgtgaagcattaatgggcgttatgggtgacaaatacgtcggggcttaaccttgccccggcaacgccgcgctggctggcagctattcacgctgagccgatgaagctcggccttgacctgcgtggcggcgttcacttcctgatggaagtggatatggacaccgcgcttggcaaactccaggaacaaaatatcgatagcctacgcagtgacctgcgcgaaaagggcatcccgtataccactgttcgtaaagaaaacaactacggcctgagcatcactttccgcgatgctaaagctcgtgatgaagccattgcgtatctgagcaagcgccatccggacctggtgattagcagccagggcagcaaccagctgcgtgcggtaatgagcgatgctcgtctgagtgaagcgcgtgaatatgcggtgcagcagaacattaatatcctgcgtaaccgtgtaaaccaacttggcgtggcggagccggtggttcagcgtcagggtgctgaccgtatcgttgttgaactgccaggtattcaggacactgcgcgtgcgaaagagattctgggtgcgacggcaacgctggaattccgtctggtaaacaccaacgttgaccaggccgctgcggcatccggtcgcgtaccgggcgactctgaagtgaaacagacccgcgaaggtcagccagttgtgctgtacaaacgcgtaattctgaccggtgaccatatcaccgactccacttccagccaggacgaatacaaccaaccgcaggttaacatctcgctcgatagcgctggtggtaacatcatgtctaacttcactaaggacaacatcggcaaaccgatggcaaacctgtttgtggagtacaagacagcggaaactgcccctgacggcgatatcacccgctaccgttatgataatccacacagtgacttaccctgcgcaacggaagatgccaccggcagccggaaaaccatgacgtggagccgttacggtcagttgctgagcttcaccgactgttccggttatgtaacccgttatgaccatgaccgcttcgggcagatgacggcggtgcaccgcgaggaagggctgagtcagtaccgcgcatacgacagccgtggacagttaattgccgtgaaagacacgcagggccatgaaacgcggtatgaatacaacatcgccggtgacctgaccgccgtcattgccccggacggcagcagaaacgggacacagtacgatgcgtggggaaaggccgtccgtaccacgcagggcgggctgacgcgcagtatggaatacgatgctgccggacgggtcatccgcctgaccagtgaaaacggcagccacaccaccttccgttacgatgtacttgaccggctgatacaggaaaccggctttgacggccgcacacagcgttatcaccacgagctgaccggcaaacttatccgcagcgaggatgagggtctggtcacccactggcactatgacgaagcagaccgcctcacgcaccgcaccgtgaagggtgaaaccgcagagcggtggcagtatgacgaacgtggctggctgacagacatcagccatatcagcgaagggcaccgggtggcggtgcattacaggtatgatgagaaaggccggctgaccggtgagcgtcagacggtgcatcacccgcagacggaagcactgctctggcagcatgagaccagacatgcgtacaacgcgcaggggctggcgaaccgctgtataccggacagcctgcccgccgtggaatggctgacctacggcagcggttacctggcaggcatgaaactcggcgacacaccgctggtggagtacacccgcgaccgcctgcaccgggaaacgctgcgcagcttcggccgttatgaactcaccaccgcttatacccctgccgggcagttacagagccagcacctgaacagcctgctgtctgaccgcgattacacctggaacgacaacggcgaactcatccgcatcaatcggtaccacccctgcggtgtactctga

SEQ ID NO: 24803 - DNA, 510 bp, Homo sapiens
  SIMILAR (309)..(365): 891254mologous to Escherichia coli No definition line found,accession number U00006,Smith-Waterman Score=101.
atgcgggtgatatggtctggctctgtgtccgcacacaaatctcatattgaattccgcggacccacccggctgttgggataccgcgggagcgcccgctcaggggagccgacaccccgcaacgtggagctagccatagaattagaggagaagggaaaaggaaataaaagagatgggctctgctctgttgtccaggctgcaatatctgaagacacttttgtcatcacaactaagagaggtacttctggcatctactgggttgaatccacgggtgctgttaaacatttgcaaaacacaggccattggcttaacgctggtgcgcttcctgttcgtcggccccggaaatcagtaactggcagtatcgcccgccagcgtatcggtgccaatcagcgcaagggcgcttttggcttgcccttgcggtcagtgcgcaggttatgccactcaatttgtgatgaaaagtattacacagcgtttcaacgtggcttgccggacgcgcatgtacgccgtaggtag

SEQ ID NO: 24804 - DNA, 2316 bp, Homo sapiens
  SIMILAR (1161)..(829): 951254mologous to Escherichia coli No definition line found,accession number U00039,Smith-Waterman Score=566.
tcagcacagcccgcaaggttgaaaggcccaggaccagagcggtgcaacgctgtacgccagctcccgcagtgcgcaagggaccgctggcccggatttccgactggagatggaaggcttgcagtacagcgaaatcccgatgctggcaggcggtaatctacccgttaaagcaataccagaaccgccgttaacacccgcgcgtaattcgctggtctggtgtttttgcggcgcttgccttcgcagttgtgtgtccgtattccgtgtcctcgctcgctcgctgttgttcttgtgttcttccattgtgtgttctccgggtgctggtgtgtgtgggtcctttctccctgttcccgacgctttttgcgggcgttgctttgggcgggccggcttgcgctccggtttctcccggtttggcgtggggcccttggtgccggtgcctctctgttcgtctggttctcttcgctgtctttttctgtcttttctgtgagcgtcccctgtcttcccctcgcttccgttgcggtcctgtacttgtgggttccctttccgtccttcttgcgccagaggactaataccacggtcggcgcgatcgccaagccctgttggactaataatcgataaattacgtggtgtttgagtctgtttatattcgtcagcaagagcagtaattaacgtggtggcttccagaataccgccgccagcgcctaacacacaaagtgttgcttcgtcgggaatataattcaccgcttcctgtgccgacaggaccggcactcgtccattaatacgaggtggttttacaggtttcattgttaattcctgattcagatgtgattttcccacttcgctacgcaatctgaagtcaccattgcccttctcgcactcatccaccagcatgtcgacaatctgctgcgcggagtcatcgcagaagagttgccctaacgttttctcgtgccaggcgatgccgtgtttattgaccagatcaatgaaatcccactgggtaaaacgtgcgagtgcagacttacaaaaatgcggattctggctcagataagcgcctggttcgacataaaggttggtaaagttgcagcgcccaccgccagacataaggattttgcgccctggttttttaccattatcgatcagcagaacccggcgtcctgcctgaccacgaaggatggtctctgccttctcttgtcggtgtatgccatctgaaccttgcattgctgtcacagcaccttgtatgatggcaggacaggctccagcagagagaactgcacagtgaccactgtatttttcacgctcttccagggatccctgtccccgacatgaagagaggtcggttggcccctggggcctgcggggatgtgacttgtcatttaattctccttcaccactagacccccagggcctggtatgtggtgatcgctcagggcccattttcttcctttcctcctcctccaagggtggggaaagagcatcagaaggtataggtggccccaggcccaaacaatcctcctctatggggatgtagagcatgaatcctggctctcctgtgtgcgtcatgctcatcacccggatcccatttgcatagcccacactcatctcattacttgtcacatccgcgactgccagcagtgcttcaagtttgcgcagcatgcgatcggtacgccagtcttttgccagctcaacggcggctttgaccagatggccctgatgcatttccagtttacgttcaaacagttcgaacagcgtaaaagcatccgcagtaccgcccgcaaagcccgcgatgactttgtcgttgtacagacggcggacctttttcacgttgcctttcattacggtattgcccaacgtggcctgaccatcaccagcgatgaccacatggccgttacggcgtacgcttactatagttgtcacgagctgacccctgctcaccttctgggcctcggcacctgtgacagccacaatcctccggatacccttggcaatggcttcttccgtcacgatcacaaaagctcctgcatgactcgagttccgcaggtgcctgaatggcagaacacaaagtccatagtgaaagaggccctggcagcccttggctggggggtcacagcctgccagtaaatgttcgcgcagggaagtatcgccagccagggatcggtgagcttccagaatcgcgctggtagcaccgtcgctatccagcagacgaaactcaatgtttttcagtaccagcgtcaggccgttttccagtgcggattgctcggcgtcaacgcctttggctgcgggaagattacccagcgcatatgctctatttaactcccggtaaatcat

SEQ ID NO: 24805 - DNA, 2293 bp, Homo sapiens
  SIMILAR (2233)..(1370): 891254mologous to Escherichia coli Nucleotide-binding protein UgpC,accession number D90769,Smith-Waterman Score=1292.
ctgtaggccggataaggcacttgtgccgcatccggcaatcaatgcctgatgcgacgctgtcgcgtcttatcaggcctacaactattgccgacccgcggcgactcaaaatttctttctcataagcccgcacgctctccagccattcgctacctgctggcgtatcgtgacgttggcaatacatttcccagaccgcctgccacggcaacgatttctgctcttccagcagtgccagacgcgcagtgtaatcgcccgccgcttccagcttgcgcagctcagcggtaggttccagcaacgcacgcagcagggcttttttcatattgcgtgtaccaatgacccacgcgggcaggcggtgatagaggctcgaagaagtcaggccgattgcaccggtcaaacgattggacgccaactccgggcatgcctggctcacatccacgcctattatcggggagccgccgccgcctggcggtggccctatcgggcgcggttccgccacgtcggcatagggttcacccgtcccgggcggtccctctgtgcccttctgtcttgttctccgttctccccgcccagccacgacgcgccggcgcggccgctgatctccccgcgcccctgccgcggcgccccgcgcccactctttgttgcagcggtctggccgggaactcaaaggagactgccagtgataaacatctttcttcccgccgcgtggtccggtagtgccgaacaaaatatccttcaatccaccaagaatgccgtcatccaccgctacctctttccctttcgcgggaggattattttgctgctcggtactggcctgaaagcctttttgcaacatctcataggcggattcccggtccacctcatcctcatatttgccatacaccggagagtgattaatcaagccattacgctcatcttccgtcaccggccccatccgcgaacaaggcgcgatcaccatcgcacgctccaccacagaagggcttcctttcgcatccagaaaagagatcaacgcctcgccggtgcccagttcctgaatcgccttttcggtatcaaacgccggattggcccgcatggtttgcgccgctgccttcactgctttctgatctgccagcacgcagatccgcaactggctctcgccactcacgccaatatccgccagaatatcactattgcgctggggctgaaagggatcttcctcgtcaccacgtttacgaatcaaataacgataaggcagtccatccgtctctttagcaaccagttcgtgttccataaaggtacaaaacccaggaatatcgcgggtagtggccggatcgtcggcgataatcagcaacgtttcgccaggctgcatattgcgcacggttttgcgcaccatcatcaccggttccgggcagcgcaggccaagcgcgtcgagtgtgtggtcagggcacacttcctgtgttttcagaaccgctaatttctcttcgggaatggttaatttaagcgtttccgtaacgaatttatcgccatcgatcgtgccgcgaataaaattcatcgctggtgatccaataaatccggaaacaaacatattcgcgggttggttataaacggttttcggcgcacctacttgctgaacaatcccgtctttcataatcacaatccgcgtcgccatggtcatcgcttcggtctgatcgtgggtcacgtagatcatggtggtgttcagtttctgatgcagcttgctgatctctgcgcgcatttgcacgcgcagcttggcatcaaggttagagagcggttcatccattaaaaacacgcccgcttcgcgtacaatcgcccgcccaagcgccactcgctgacgttgcccgccggaaagcgcccccggcttacgtttcaggtactcacgcaggccgagaatttgcgccgcccagttcacccgctcatcaatcacctctttggcgattttttgcatcttcagaccaaacgccatgttgtcgtaaaccgtcatatgcggatacaacgcgtagttctggaacaccatcgctatattgcgtgctttggctggaacgtcattcattcgtttgccgtcgatcaacagatcgccgccgctgatctcctcaagcccggcgatcatgcgcagggtggtcgacttaccgcagtccgacgggccgtacaacacgatgaactcttgatcgggcatttccaggttgcagttccttaccaaatgcacctggttatcgtagatatctcgactatgtggaacgacaagtgagcctgttgattcctttgctaacgatttgccagaaggcgataacgcggacggtgacat

SEQ ID NO: 24806 - DNA, 4590 bp, Homo sapiens
  SIMILAR (3004)..(4095): 991254mologous to Escherichia coli putative glycosyl transferase,accession number U38473,Smith-Waterman Score=1860.
ctggatagcgccttgccggaccgcaccaccatcatgaatttccgccacctgctggagcagcatcaactggcccgccaattgttcaagaccatcaatcgctggctggccgaagcaggcgtcatgatgactcaaggcaccttggtcgatgccaccatcattgaggcacccagctcgaccaagaacaaagagcagcaacgcgatccggagatgcatcagaccaagaaaggcaatcagtggcactttggcatgaaggcccacattggtgtcgatgccaagagtggcctgacccacagcctggtcaccaccgcggccaacgagcatgacctcaatcagctgggtaatctgctgcatggagaggagcaatttgtctcagccgatgccggctaccaaggggcgccacagcgcgaggagctggccgaggtggatgtggactggctgatcgccgagcgccccggcaaggtaagaaccttgaaacagcatccacgcaagaacaaaacggccatcaacatcgaatacatgaaagccagcatccgggccagggtggagcacccatttcgcatcatcaagcgacagttcggcttcgtgaaagccagatacaaggggttgctgaaaaacgataaccaactggcgatgttattcacgctggccaacctgtttcgggcggaccaaatgatacccattcgctacctgctggcgtatcgtgacgttggcaatacatttcccagaccgcctgccacggcaacgatttctgctcttccagcagtgccagacgcgcagtgtaatcgcccgccgcttccagcttgcgcagctcagcgaggcatcgaagaagtcaaggccgatatgcacccggtcaaacagatcgtgacgcacaatctcactggcaattgcctgggtttcatcatccagcagcactacgtgatcgctgtcccagcgaacctggactggcttgaacgttgcaagcaaagcaactcgggtggaagtgcccggcgtccaggcacagcgcagtctggctggctggttggcataccccatgtaaaactcattggagccaaccgtgtagctctctgcgccaatgccaaacaattggctctcaacggcgtcgatattgggtttagcttctcgcctgatcacctcatccagtgctgccagcagacgctgacgcggggcgagacggtcaacggtgatatctttcataccatccgggatccagatgttcatcaccgatggtgtgccgagttgctcgccaaaataggccgaaacgcgacggctggctttgcagtgatcaatccagaactggcgaatgctgtcctcactggcattacgcgctttgcccggataattgcctgtggcctgaatccccccggtcagcgaaccttccgggttttcaaaaccggaaacatcatcgcctgccagcagtgcattgaaacggctgcgccagctcatgcaacacatcggcatacagcagcgccagctgtcgaaaatgcagcgcgcaggcttggcaataatttgcggttggagatcctctggcaggttgggttgactggaaatcataaagcgaaagatctcaatgcggcgcaactggatgcactcgcacacgcgttactggagattcctcgattttcctacgctacgcgggggcaggtggatgagaataagcatcatggggcgctgtttcgctttaaggtttttcatcgagatggcgaacccccccacgccatacccgcacaaatagccagcagagcaaaaatcgacagcaggatttgcggtagcgggcgtagtgcccgcagtaagatttgtttatcgaaaccaagaccaatccgccagccaattgccatatacgccatcgccagcagccattccggtagttcgatgcatcgggatgagcatcgtgccggaaggaagacgcagcaggcatcccactgtaccggcaacgaccgcgagcaaaatagtaagcaggagattaatgctcactggcgggaaccagacgatatgctggttaaccgcttcagcgttatcgcccagcatcatgcgggtgaccagaacagcggcccccggcgacgaacagcactccgcagattttgccataaacgccaccaggcgaattatcttgcgcccggaaagaagaaatctccggagacgaagaacggccacaggtgggtgcgggaacctttgaaccgaccggttttggccaaagctcggctctttcgccttttccagcgcgcgcacctttctttcggcatcacaagccaattggaaaccagtggagtcaatggtgtaaccgtcacgctcagcttggtacagctcacgttttacggtaacgttagtgagatcatcagacatcaatgtcaacttacacggcacggcaatcacccgctgccactgacggcaatccagggtatcgccctctttagtgacaatcaggctgcctatcgcttccgggctgaccagcgcacgttgcggccctttggtctgccagtagcccgccagccagtccggcgcgggggttttcacgacattgttatagttttcgacttcggcacagcccgccagcaacaagagcgcgcctgcaattgcgagttttttcatcattcgtcctgcatgagaagaaaagaggattgtggcattaaagccctgatgtcgccagcctttcaagaggctacattcatgtcatggcagcaattcaaacacgcctggttgattaaattctgggcccccatccctgcggtcatcgcggcgggtattctctctacttactattttggcattactggcaccttttgggctgtcacgggtgaatttacccgttggggcggccagctcctgcaactgttcggcgtccatgctgaagagtggggttactttaaaattatccatctggaaggatcgccattaacccgcatcgacgggatgatgatcctcggtatgtttggcggctgctttgccgcagcgctgtgggccaacaatgtagcggtaccgacatggtgtaatggctgcggcacaagtcatgaggtgcgggtcattaccgcaccgccttactacccgcaatggcaggtgggcgagaactattccgcctggcgctacaaacgagaagagggggccgccacggtgtggcgctgcccgctgtatgtgccaaaacagccgagcaccctgaaacgcctgttgcatctgggcagttttgccgtcagcagtttctttccgctgatggcgcaacgtcgctggaagccggatcgcattattggcgtggtgccaacgctgttttgcgcgccgggaatgcgcctgctggcgaaactctctggtgcgcgtaccgtgctgcatattcaggattacgaagtggacgccatgctggggctgggccttgccggaaaaggcaaaggcggcaaagtggcacagctggcaacggcgttcgaacgtagcggactgcataacgtcgataacgtctccacgatttcgcgttcgatgatgaataaagccatcgaaaaaggcgtggcggcggaaaacgtcatcttcttccccaactggtcggaaattgcccgttttcagcatgttgcagatgccgatgttgatgcccttcgtaaccagcttgacctgccggataacaaaaaaatcattctttactccggcaatattggtgaaaagcaggggctggaaaacgttattgaagctgccgatcgtctgggcgatgaaccggtgaattttgccattgtcggccagggcggcggcaaagcgcggctggaaaaaatggcgcagcagcgtggactgcgcaacatgcaatttttcccgctgcaatcgtatgacgctttacccgcactgctgaagatgggcgattgccatctggtggtgcaaaaacgcggcgcggcagatgccgtattgccgtcgaaactgaccaatattctggcagtaggcggtaacgcggtgattactgctgaagcctacacagaactggggcagctttgcgaaacctttccgggcattgcggtttgcgttgaaccggaatcggtcgaggcgctggtggcggggatccgtcaggcgctcctgctgcccaaacacaacacggtggcacgtgaatatgccgaacgcacgctcgataaagagaactcgaaactctatccagttgtgatggcaggtggctccggtagccgcttatggccgctttcccgcgtactttatcccaagcagtttttatgcctgaaaggcgatctcaccatgctgcaaaccaccatctgccgcctgaacggcggtcaggctcggcgtcggtgccgataccatactgacgtgacccggcgcgaggaacgcatcgataccgttatccggctgttccagcaaactgcgcaacgtcgggataagcgtaatgtgctggcagaagaatttcaacgcatccatcggcgagtaaacgatgcgcacatcggcaccgcgtgcttttgcctgcaacagcgatccctgtttccccggcacgcgcatggcgtcgccaaaggtacagaagatgacttccggatggctggcaatctccacgcaggtgtcgattctacccatcggcagtacgcacaccgggcaccccggaccgtggataaactcaacgttttccggcagtaa

SEQ ID NO: 24807 - DNA, 1497 bp, Homo sapiens; identical to SEQ ID NO: 24676
  SIMILAR (1159)..(1494): 991254mologous to Escherichia coli K12 flavodoxin 2,accession number AE000373,Smith-Waterman Score=607.

SEQ ID NO: 24808 - DNA, 2640 bp, Homo sapiens
  SIMILAR (130)..(1032): 1001254mologous to Escherichia coli K12 putative kinase,accession number AE000393,Smith-Waterman Score=1541.
atgctgcacttattgccaaaacgctatgagttcctgggcacaaatggccggaaaagcggaaaaaagcaacaccgattaaatgctctggataaggattatccgattctagaaaaaaagcccggacgactctacgaaggtgcattgaaggcaattgcatttgaactggaaaaacggaatttaaatgacagtgtggccttaattggccaccgcatcgctcacggcggcagtatttttaccgagtccgccattattaccgatgaagtcattgataatatccgtcgcgtttctccactggcacccctgcataattacgccaatttaagtggtattgaatcggcgcagcaattatttccgggcgtaactcaggtggcggtatttgataccagtttccaccagacgatggctccggaagcttatttatacggcctgccgtggaaatattatgaagagttaggtgtacgccgttatggtttccacggcacgtcgcaccgctatgtttcccagcgcgcacattcgctgctgaatctggcggaagatgactccggcctggttgtggcgcatcttggcaatggcgcgtcaatctgcgcggttcgcaacggtcagagtgttgatacctcaatgggaatgacgccgctggaaggcttgatgatgggtacccgcagtggcgatgtcgactttggtgcgatgtcctgggtcgccagccaaaccaaccagagcctgggtgacctggaacgcgtagtgaataaagagtcgggattattaggtatttccggtctttcttcggatttacgtgttctggaaaaagcctggcatgaaggtcacgaacgcgcgcaactggcaattaaaacctttgttcaccgtattgcccgtcatattgccggacacgcagcttcattacgtcgcctggatggaattatattcaccggcggaataggagagaattcaagcttaattcgtcgtctggtcatggaacatttggctgtattaggcttagagattgatacagaaatgaataatcgctctaactcctgtgtggatatggacaccgcgcttggcaaactccaggaacaaaatatcgatagcctacgcagtgacctgcgcgaaaagggcatcccgtataccactgttcgtaaagaaaacaactacggcctgagcatcactttccgcgatgctaaagctcgtgatgaagccattgcgtatctgagcaagcgccatccggacctggtgattagcagccagggcagcaaccagctgcgtgcggtaatgagcgatgctcgtctgagtgaagcgcgtgaatatgcggtgcagcagaacattaatatcctgcgtaaccgtgtaaaccaacttggcgtggcggagccggtggttcagcgtcagggtgctgaccgtatcgttgttgaactgccaggaaacagacccgcaagtcagccagttgtgctgtacaaacgcgtaattctgaccggtgaccatatcaccgactccacttccagccaggacgaatacaaccaaccgcaggttaacatctcgctcgatagcgctggtggtaacatcatgtctaacttcactaaggacaacatcggcaaaccgatggcaaccctgtttgtggagtacaaagacagcggtaagaaagatgcaaatggtcgtgcggttctggtgaaacaggaagaggtgattaacatcgccaacatccagtctcgtctgggtaacagcttccgtatcaccggcatcaacaacccgaacgaagcccgtcagctgtcactgctgctgcgtgccggtgcgttgatcgcgccgattcagattgttgaagaacgtaccattggcccaaccctgggtatgcagaacattgaacaggggctggaggcttgccttgccggtctgctggtttctattctgttcatgatcatcttctataagaagtttggtctgattgcgaccagtgctctgattgccaacttgatcttaatcgtcggcattatgtcgctgttgccaggcgcaacgctgagtatgccaggtatcgcgggtatcgtcttaacccttgcggtggcggtcgatgcgaacgtactgatcaacgaacgtattaaagaagagttgagcaacggacgtactgttcaacaggcaattgatgaaggttattcgtggcgcattcagttctatcttgcgaagagaccaacgagcgccgtaatgttttttgtgttgtttcctttttatatttttttgtttttccacagtagcccagaaaccagcgcccaatacgagaaatatgcccccccccggggaaggaggcagcaggtccccggtgcagttatatttcacatcccgcactcacgtaagatgtacacccttttaggcggtacatccgtctcccgtatcactctccaatggaagttcgcagcgttgatacgctgcagatccacgcgttcggcattcccggcatatatttcggagcagtcgaagcagcctaaacgaatccaaagagctattcgggccaaaactcacgagctgcctaaacgtgtgcggcacaactgtgcttcaccttggaagcaattcaattacagcgggtatcggcaaagtatatgtatttggaccgctaactggcagtgccagcccctcgcaccgccgtgtcccgttcgcataggctag

SEQ ID NO: 24809 - DNA, 5956 bp, Homo sapiens
  SIMILAR (2038)..(1346): 951254mologous to Escherichia coli cell division protein ftsW,accession number D10483,Smith-Waterman Score=1125.
ttcgggcaggatgcgttttgcatcgttatcgtcggcaataccgatgggatgacgtccacggcggccagcgcatcggcgaacgagagttccagcacacaatccgttgtggcgttttttcgagtgtaaacgtgccgtgttcgtccgaaccgtggcggcaaaggcgtggctgatcaccagcagcaggccttcaacgaatacgcttgccttgcgagtgaactattatctcgagcgcggcttcaatatggacgacagccgcaataacggtgagttttccacgcaagaaattcgcgcctatttgccgctgacgctcggcaaccactcggtgacgccgtatacgcgcattgggctggatcgctggagtaactgggactagagcaattactctgcttctgccatccagttgctgtccttttgaattgtgccaatggacatcttcatagtgactggctgtgagaagacactcaattgaaacgctagttccctctttggctatgatgacatcatcatccgagtgggaacttgctgagagttcaaagcttgagggaaaggatgcattgtaagaactacgatttgcttccagtgaaaccatttggtcgaagtccacatcttccaaaacaaaagcagctggcacaataatacttgccactaaagtgaataagcaacaatgtagtttctgcctgcagagaggctccttcttgttctcttcggcctttgcatcctgctgcgcagcatctttgggtgtgtttactgctaaaacatcattgatggtggagccaaccaccatgatcttggccccactggtcacttttatttctctcaatgttttatcctcggggacgagtcccttatacatgactttctgcatggcaggcgggagaccttgttgactgaaaccaccccagatcccacaacagcctagacccctccgtcggcccagccaccccagcacaaacagcatgagagttgctgctgtgtctctgctaccactatgccaggctgcctttctgtttttaactagcctggaccgaaagggtatcacgctttgatctgccagatgagttattcccgtggcctgcattgctttcgttaccgcttcttcatcctctttgcgccagcgggtaaacagcggttgatgcggataacgtccacgcgccaccagctcctgcacggtgatatcgcccggcgtggtagcattttgcgccaacagaccaatccggcgtgcaacctctttactggcgtaatgttgaatgtgctcgccatccagccagacatgcccatgagcaggcgtcatcaggcggcccaatatcgcatttcgcgtttctttgaagcaactcagtgagttgtacttggtcggtacatccccggcccccgcgcgaacgttaaccagcgcctggaagctaaaccagatgccaatagaacaggcgagaaaaccggaaaaacggtggtcaatttctaatgctttacggccaatcgacatcgcgcgaaaagcgacgaagaataccattaaaagtgccagcaccacaccgacataccccagttcttcgccgataatggcgaaaataaagtcagtgtgcgcttccggcagatactccagtttttgtaccgagttacctaaaccttgcccccaaagttcgccgcgaccaaacgccatcagcgattgcgttaactgatagccgctgccaaagggatcttcccacgggttccagaatgcggtaacacggcggatacggtacggttcggcgagtatcagcaacacaaccgctgaaatgcccataccgataatggcaatgaactgccacaatttcgctcccgccaggaacaacatcgccagcgtagtcacaaacaacaccaccaccgtaccaaggtctggctgtgccagcagtaacactgccaacaccagaatcacgcccatcggtttcaggaagccgcgcaggttattacgtacttcgtcgcctttacgcaccagatagttggcgatatagcaaaacagcgacagttttgtcagctccgcaggctgggaacggccgtagccccatcggatgttctgcatacccagggttgggccaatggtacgttcttcaacaatctgaatcggcgcgatcaacgcaccggcacgcagcagcagtgacagctgacgggcttcgttcgggttgttgatgccggtgatacggaagctgttacccagacgagactggatgttggcgatgttaatcacctcttcctgtttcaccagaaccgcacgaccatttgcatctttcttaccgctgtctttgtactccacaaacagggttgccatcggtttgccgatgttgtccttagtgaagttagacatgatgttaccaccagcgctatcgagcgagatgttaacctgcggttggttgtattcgtcctggctggaagtggagtcggtgatatggtcaccggtcagaattacgcgtttgtacacatgaaccgtagaaaacaacgcggcagctggcgcagaggcgttcgcatgtgcctgcggcacccagccgtgcagcggaataatcccggccagcaggccaaagccaatcactccgagcagccagatatcggaaccgagcggcagctgttgcatacgcatatccagcaggcgcagatccagcgtgccgtaacgctgccacagcagccagcaagcaatcgccagcagcagagtgccaagacgccccagcgcaaaccacagttgccctctttgctgttgcgcgcacagggccatgatttcggccattaccacgaacatgccgaggttgctggcaatgacggcgcagacggcggcagccatcaacatattgatctgcaagccgttgcacttcacctgcgcgtggcgatgccagtcaatgttgtagagggcttttgaaagcttcagcaactcttcaacgttatttttcagcaacggaccgaccacaatactcgcgccatcctgctgaacctggcttaagatctggctaagtggttgtgatgaggtatcgtagattttcagctctgcggatggatttgcgggtgcgctggtgtacccggggtgttctgtggcccccttcttgtgcctggggccccctgtgtggcgttgtaccagggggtgtccgtgtccctgggcgttttgatgcccccccctggagtttccttgtcggaaattttccccggtgattttacccggccgctgttggacctgcgcgccctggggttgcccgccttcgcctcggcatagcgcggttaccggactccgtaagccgcacacgcggaagttccaagtggaaccgaagggaaactccgtgataggaggccgccccccaaagacccccctgtcctcgcccttcgcgccactgccgccgttgtggcccgaagtgccagtcaaaaggcaagctggggccatcgaccaagggttttgcctcggaatgggaaaagccggggccatgggaagctccataccgctaattgaaatcgtggaggttagcctccacgcgctggatctggcagggcatcctggagcgaaagtggcgaattgagtgccgtagtagaggaagaatggtttatcgctcttcgccatcttgtcgaggaacttaacgccatagtccatccagcgttgatccagatcttccatatatttcggcgtaatgtcggcaatggcctgacggtgggcggcggacatatcgcggcaggtcgagggctgtgaaagcggtttagtgattgaagcgctacgtattgtgtgaggaattcttgtcgttgtcagcgcctgagaacttagttgggagcggacgtttacgtcgaatctctcgtttgggaccccattctggcggaagcgcaaccggatcgtgaaatcgaaaaacgcggcccggcgattgcccaggcgttcgacgctgaaggcaaaccgagcaaagcggcagaagttgggcgcgtgttgcgtattaccgttgaaccaggtcgggtgagaagaccgttgccttgtggcagctatcgacatcacgaatggcgtctgtccacgccatacgtagatttcatcggctgccgtgcctgtgctgagggtggcggccggataggtgcggagcttcctgaacgaggcaggaggggtgcgaggttcaggggcaatcagtttttccagcgatgcaccttcgcgtgcgctgatcgacatcccctgaataatacaattaaggaattctgccagatgtgtcacgtcacagtggggcgggatttccccgcgcgcttgtcgttgacataaaaactgctgcaaagtgcgctcttgcatcgcatggcgtgatttcaacgtattggcgatatctcctgaatctggggagagggtggtgcagttgttgatcatgaagcagcctgccggggtgtctttgctggtaaagcagttggcgatggcagcaaaatagtcagccagcgcagactccacgcttttctcttcacaaaacagctgtgcttcatgcttagcggcaaaacgatcgatatagcggtcgagaacggcacgaaataacccctctttgttggtaaattccgcgtatagcgtgggcgctttggctccggtcgcttcgacgaggtccgcaagagaagtcgcttcataaccgtgttgccagaacaatttcatggccttatcaagcgcggcatccctgtcgaacacttttgggcggccacggcttttttttacacattgtgttgagtcagttgccatgcttgagttaccctttgtcgagctttgctggccttttggcccggagttcgatgtttttaaaattggcggcaagatttttatgctgtcgtcggagctacgcggcgtcccctttatcaatctgaagtccgatccacaaaaatccctccagcactttaaagcgcaggttttccacatcatactgatgccgtaacccattatcagcatcaggatcaccgttcccatcagcgccagcgtccgaacgtactggatcgcgtcgcagttccagcgcttcgcggcggctgtagcacggtgcggcgcttcggcttcgttgctctgccctgccgcttcctgcaaataggcgataaatgcctcttccagactggcggctccgcgtttctcaaccagttcctgcggtgtaccgctggcaagcacttttccggcgtgcatcagtgagatgcggtcgcaacgttccgcgcattttacacgcatatccgcgaccatagcggcatctttgcggatccccgcatcgccatcatgtggcccccagtgcgtcggcattttgccaccgataaagcccatctcttttgccagatccggacgcgcacctgtggcgtagaactgaatctcatcacgaacagcgccgctccggctctggttttcggaaatcatcgggtcgaagctgcgcagcggcgcatgtttacgcacaaacagatgcgttttcgcgccgaggccgttaatcacgcccgccagctcaacggcgatgtaacccgcgccaacaaccgccacgcgctctggcaaagcaggaagggcgaagaagccatcagaatcaataccgtattccacgcccggaatatccgggtggctcggacgaccgcctgtggcgatcagaatatgatcggccgtgatggtttcgccgtttacctccagcgttttggcatcaacgaagcgggcaaagcctttgattacatcaacgttatttttaccgagcacgttttcataggaagtatgaatacggtcgatataggcggtacggctggcgatcaacgtttcccagttgaatttattgatagtggtatcaaaaccataatccgggccgtacatatggatcgcttcacggatttgcgccgcgtgccacatcacttttttcggcacacagccaacatttacgcaggtgccgcccagctctttggcttcaatcagcgcacatttctggccgtacatagccgcgcggttgatggaggcgataccgccgctgccgccgccgatggcgatgtaatcatagtgtttagtcat

SEQ ID NO: 24810 - DNA, 3777 bp, Homo sapiens
  SIMILAR (2972)..(2892): 371254mologous to Escherichia coli rpoC,accession number V00339,Smith-Waterman Score=54.
atggcgaagcgggcggtcagcatctgctgtggcctgactcttggggaggcggccccgcgaggcagcggggctgagggcccctggttaatatctaactgcaatctcgcctccagcctggctcgcagttctgtgaacccgcccccagctcagggagacatatttgagcatttcttcctttctccttgccgacatgcaggcatggcggtcagcgcctcgtcgttgttctacgtgcgctatgtgttaaatgataccgggctgttcactgtgctggtactggtgcaaaacctggttggtactgtggcatcggcaccgctggtgccggggatggtcgcgaggatcggtaaaaagaataccttcctgattggcgctttgctgggaacctgcggttatctgctgttcttctgggtttccgtctggtcactgccggtggcgttggttgcgttggccatcgcttcaattggtcagggcgttaccatgaccgtgatgtgggcgctggaagctgataccgtagaatacggtgaatacctgaccctgatgaatcccctaatgatttttatcaaaatcattaagttaagtctggcaaaaacgctgctgttctgcggttccggcaatgtactgctcaagtacggcacgcgcgatctcaacgtcgtctgtgggatgctcaaaatcatgccatttaccgccgtgctgtttggcggcggtgcgctggcgctggcagggatgccgcccttcaacatttttcttagcgaatttatgaccattaccgccggactggcacctgcatgctctgcacgtcccagcgaagcggagctgctggagcttatcgatacgctgaatgccgacaacaccatcgatggcattctggttcaactgccgttaccggcgggtattgataacgtcaaagtgctggaacgtattcatccggacaaagacgtggacggtttccatccttacaacgtcggtcgtctgtgccagcgcgcgccgcgtctgcgtccctgcaccccgcgcggtatcgtcacgctgcttgagcgttacaacattgataccttcggcctcaacgccgtggtgattggcgcatcgaatatcgttggccgcccgatgagcatggaactgctgctggcaggttgcaccactacagtgactcaccgcttcactaaaaatctgcgtcatcacgtagaaaatgccgatctattgatcgttgccgttggcaagccaggctttattcccggtgactggatcaaagaaggcgcaattgtgattgatgtcggcatcaaccgtctggaaaatggcaaagttgtgggcgacgtcgtgtttgaagacgcggctaaacgcgcctcatacattacgcctgttcccggcggcgttggcccgatgacggttgccacgctgattgaaaacacgctacaggctcgggtcccagtttgcaacggtttcgccgccagcaacctgttcgccatcgcctttcgccagtaccgcaccgtaaggtactttgtagctttctttagtacgaccgaattcgtcgatcagtttcagttcagtattacgggaagtgataaccagtttaccgctggagttcacaaccgacttcacgttgctgagcttgatgctacctttgtttttcacttggatgctggattcagcagccgcacgagatgccgcaccaccgatgtggaacgtacgcatggtcagctgtgtacccggttcaccgatggactgtgccgcgataacaccgattgcttcacccttgttgatgatgtggccacgcgccaggtcacgaccgtagcagtgcgcacatacaccaaagtcggtgtcacaagatacaacagaacgtactttaaccgcgtcgacagagttctcttccagcaggtcacaccactgttcgtgcagcagcgtgttgcgcggaacgaggatatcagcagtacccggcttcagaacgtcttcagcagttacacgacccagtacgcgatcgcgcagcggctctttaacgtcaccaccctcgataaccggagtcatcatgataccttcatgggtaccacaatcgtcttcggtaaccaccaggtcctgcgccacgtcaaccagacgacgagtcaggtaaccggagttcgcagttttcagtgcggtatccgccagacctttacgagcaccgtgggtggagatgaagtactggagtacgttcagaccttcacggaagttcgcggtatgcaatggctggcatccggcgtgctggaatgggtgagaaaactgttctggacggctgaaacaccctggcaaatgttgattgaagaagctcgtctgatcgcgcctggcgcggatggcgtaaaaatgcagtgtgatttattgtcgtgtcagaacgctggctggcaaggagtgacgcttaataccacgcgggggcatttctatcgcgcggcgctggaagggttaactgcgcaattacagcgcaatctacagatgctggaaaaaatcgggcactttaaggcctctgaattattgttagtcggtggaggaagtcgcaacacattgtggaatcagattaaagccaatatgcttgatattccggtaaaagttctcgacgacgccgaaacgaccgtcgcaggagctgcgctgttcggttggtatggcgtaggggaatttaacagcccggaagaagcccgcgcacagattcattatcagtaccgttatttctacccgcaaactgaacctgaatttatagaggaagtgatccgcgctgatggcctgttggtgagcgacttgctccaggcgattatcccgttatttgaactggacagttatgcaccgccgctggtgatgatggcggcggtagaaggtccggcggcatcagccattatggcggggatttccgaaccggcgttatatggcgtggcgatccgcctgaaacgtccgcttatcgccagtcttatcagcggttttatttgcggcgcggttgccggtatggcggggcttgccagccactcaatggcagcgccggggctatttaccagcgtgcagttcttcgatccggcgaatccaatgagcatcgtctgggtgttcgcggtcatggcgctggcggtggtgctgtcgtttatcctcacactgttgctcggctttgaggatattcctgttgaggaagcggctgcccaggcgcgaaagtatcagagcgtacaaccgaccgtcgccaaagaatctgaaggtgcgttccgtgaaggtgacaaaggtctgaccactgtcgatatgatcccacacggcgagcatcgaatggcggtgaaactggggctggaaaaacgttttcagttgcgagatgacgagttttatcccagccatgaggcgacggatttttatcatcgttataaagaagatatcgccctgatggcagagatgggattcaaggttttccgtacctcaattgcctggagccgtctctttccgcagggcgatgaaatcacgcccaatcagcagggcattgctttttatcgttctgtctttgaagagtgtaaaaagtacggtatcgaaccgctggtcacgttgtgccacttcgatgtgccgatgcatctggtcaccgaatatggctcctggcgtaaccgcaagctggtggagtttttcagccgctacgccagaacctgctttgaagcatttgatggtctggcaggtcttccgcttggatatcggccagtacacggcttcatgggtgagagagacaatggactcgaccatatagtcaacgaaatgaatcccttcaatcggttcccggaaacgggccagcgccctctcctggtcctgtaa

SEQ ID NO: 24811 - DNA, 2952 bp, Homo sapiens
  SIMILAR (706)..(2196): 951254mologous to Escherichia coli similar to phosphotransferase system enzyme I,accession number U00006,Smith- Waterman Score=2392.
atggggacttgggaggtcgatggcttgaactttgctttgcaatatcagggtaataatgaaagtggtggaccattcgggcaggaaggttccggtagtggtgatggccgtagcctttccaaagaaaatggtgatggtttcgcccaggctgttggcgcagctgacagtctgaaaacgtttatggaaaccccgctcgcccatccgcaacgtggtgaggcggaattagcatcgaccgatccggtgaccattgaggccgaggagctgtttatcacgtcgccggaaggtaaaacgctggccggaccgctgaactttactttgccagcaggccaacgtgcggtgttggttggtcgcagcggttcaggtaaaagctcactgctgaacgcgctttctggttttctctcatatcagggatcgctacgaatcaacgggatagaattacgcgatttatcaccagaatcatggcgtaaacatctctcctgggttgggcaaaacccacaattaccggcagcaacattgcgggataacgtactactggcgcgacctgatgccagcgaacaagaattacaagcagcgctggataacgcctgggtcagcgagtttctaccgctcctcccacaaggcgttgatacgcctgttggcgaccaggctgcccgcctttccgtggggcaggcgcagcgcgtggcggtggcccgtgcgttactaaatccgggtgccgagctcagggtcgtatcacttggagatctcaatgcgctgggtaatcttcccgcagccaaaggcgttgacgccgagcaatctgcattggaaaacggcctgactttggtcttgaaaaacattgagttttgtttgctggatagcgacggtgctaccagcgcgattctggaagctcaccgatccgtggctggcgatacttccctgcgcgaacatttattggcaggcgtcagcgccggattaagctgcgccgaagcaattgttgccagcgcgaatcacttttgcgaagagttttcccgttccagcagcagctacctgcaagaacgtgccctggacgtacgcgacgtctgcttccagttactccagcaaatctacggtgagcaacgcttcccggcaccgggcaaactgacgcagcccgccatttgtatggctgatgaactgacccccagccagttcctcgaactggataaaaatcacctcaaaggattgttgctcaaaagcggcggcaccacctcacatacggtgatccttgcccgttcgttcaacattccaacgctggttggtgtggatattgatgcccttactccgtggcagcaacaaacgatttatatcgacggcaacgccggggcgattgtggttgagccaggggaagccgtagctcgttattatcagcaagaagcccgcgtacaggacgccctgcgtgagcaacagcgtgtctggctgacccaacaagcccgtaccgctgacggtatccgcattgaaattgccgctaacatcgctcactccgtggaagcgcatgccgcattcggcaatggtgcggaaggcgttggtttgttccgcactgaaatgctctatatggatcggaccagcgcaccgggcgaaagcgagttgtacaacattttttgtcaggcgctggaatccggcaacggacgcagcattattgtgcgcactatggacattggcggcgacaaacccgttgattatctgaacattcccgcaaaggcaaacccgttcctcggttattgtgccgcgcgtatttatgaagagtacgcgtcgttgtttaccacgcagctacggtcgatcctccgcgcctccgctcacggcagcctgaaaatcatgatcccgatgatctcctcaatggaagagatcttatgggtgaaagaaaaactggcggaagccaaacagcaactacgtaacgaacacattccgtttgatgagaaaatccagctcggcatcatgctggaagtgccgtcggtgatgttcatcatcgatcaatgctgcgaagagattgatttctttagtattggtagtaatgacctgacgcagtatctgctggcggtggatcgcgataacgctaaggttactcgtcactacaacagcctgaatccggcattcttgcgggcgctcgattacgccgtgcaagcggtgcatcgccagggcaaatggattggtctgtgcgcgcctgcaagcgagtggtatactcttttgccgcgacaggatcatgaattgagcatgggccaatcacaaccaacaaggcgatcagtcattacctttcaggatcttatggatcgcttttcgggcatgggcaaccgtattcgcggcattttcagtagcggggaatttttccagcaatgcgacaggaggaaccttgccagcggtgccgcactggctgccgatagcggagcgcaaactaataacggccaggcaaacgccgcagctgatgcgggccaggtagcccctgacgcccgtgaaaatgtcgcgccaaataacgtcgacaataacggggtaaataccggttctggcggcacaatgctgcattcggatggttcttcaatgaacaatgacggaatgaccaaagatgaagagcacaagaacaccatgtgcaaagatggtcgctgtccggatatcaataaaaaggtacaaaccggtgatggcatcaataatgatgtcgataccaaaaccgacgaagataataatgctcgtccggactcccctgataacttccacgactacctacaggacgtgactgacgtgcacggacgacactctgctatgacacccacggagacgtgcggacgggttgtagacatgacgactgacgactatgtgggtgtacccgacgactacgacacttctgatcacatccattggctccatcagcatagtattcccttgatggttgcacacatttgtatcatcgctgcatccaccacatatcccaccaccacaccatcacagcagacctga

SEQ ID NO: 24812 - DNA, 2568 bp, Homo sapiens; identical to SEQ ID NO: 22449
  SIMILAR (1228)..(1154): 441254mologous to Escherichia coli similar to phosphotransferase system enzyme I,accession number U00006,Smith- Waterman Score=44.

SEQ ID NO: 24813 - DNA, 2323 bp, Homo sapiens
  SIMILAR (1592)..(2320): 971254mologous to Escherichia coli secD protein,accession number X56175,Smith-Waterman Score=1133.
atgttcacatacccgcattcgaagttccgcgtcaaccgctttgtgggtcaagtactactgatcgagttttcgattttactagacgggggtcgtaccggcttgggtcattccttatctgtttggtgcatctccggcgattgttcttctttcctgcaaggaaaaccaacgtcgctgccgttgagaaaaccgagtgcgattatttgttctgatagtctttcaggatctgccgacctgctacgtaatcataatttcgtctgtaccgccgccgatacgttcacaacggacatcacgccagaagcgggagacgcgcgcctcatcggtatagcccagaccgtccgtcatctagaggatcccatgcgggcatggaagagcattcacaaaagttgtgaaatcctggacccgatccacagggctcctgtcaaggaaaacacccacccagcacgcaagattaatatatccgacccggctgctggcgctgtagcccgcattcggtacgaaggtgtgttatctgtatgtcgtgcatcagcatcagcttatgtgtcgcgctcacggacgattactgtcgcctgttggtacgttagcaacacaggggtgacgggcgctaccattggtgtaaaacgacagcatcgccacgcgcggctcttctccggtgatggcgcgccaggtttcggcactggcaagcgcgatatccgccagctgcgccgccttgtacgcatccagattcagcgaactttctttgctgctgtacttcacgtcccgacgccttggtccagggctattgatgccgccgcccttctgaccgtcatcgacgttaaagtgctgactgcctgcgcctgccaggcttgccgtacgctggctcttcgcgtagctcaggtgatcgaccggtgcagcaaccctggtgacatcatgtctagcgtcgcgcggaggtactggttcatctcgcgttggtctgctaagcgggactgcgcggtgagctacgatcaagaccctggtcaggcgcagcgttcatgtcggtcatgtctggtcgcggttgatcgggggctatggctgtccgcgtattgccggtcactcatgacgcagactctgctacctgacgatgtgccacgcatattgccgaatgcttcttcgccgagccgtttgcggtgcctgcagcatctgggtaattaccgcctgctggatttgcgcaaactcatctggcttcatcgctcgcaatttagcctctgcggttgggaaaaacgccttgttaaggatctcacgcgtattcaggacactgggcgtgcgaaagagattctgggtgcgacggcaacgctggaattccgtctggtaaacaccaacgttgaccaggccgctgcggcatccggtcgcgtaccgggcgactctgaagtgaaacagacccgcgaaggtcagccagttgtgctgtacaaacgcgtaattctgaccggtgaccatatcaccgactccacttccagccaggacgaatacaaccaaccgcaggttaacatctcgctcgatagcgctggtggtaacatcatgtctaacttcactaaggacaacatcggcaaaccgatggcaaccctgtttgtggagtacaaagacagcggtaagaacagatgcaaatggtcgtgcggttctggtgaaacaggaagaggtgattatcatcgccaacatccagtctcgtctgggtaacagcttccgtatcaccggcatcaacaacccgaacgaagcccgtcagctgtcactgctgctgcgtgccggtgcgttgatcgcgccgattcagattgttgaagaacgtaccattggcccaaccctgggtatgcagaacattgaacaggggctggaggcttgccttgccggtctgctggtttctattctgttcatgatcatcttctataagaagtttggtctgattgcgaccagtgctctgattgccaacttgatcttaatcgtcggcattatgtcgctgttgccaggcgcaacgctgagtatgccaggtatcgcgggtatcgtcttaacccttgcggtggcggtcgatgcgaacgtactgatcaacgaacgtattaaagaagagttgagcaacggacgtactgttcaacaggccattgatgaaggttatcgtggcgcattcagttctatcttcgatgcgaacatcaccacgctgattaaagtcatcatcctgtacgcagtgggtaccggggcaattaaagggttcgcgattactaccggtatcggtgtggcgacgtcgatgtttaccgcgattgtcggtacgcgtgccatcgtaaacctgctatatggcggcaagcgcgtcaagaagctgtcaatctga

SEQ ID NO: 24814 - DNA, 1373 bp, Homo sapiens
  SIMILAR (1154)..(1219): 391254mologous to Escherichia coli L-rhamnose isomerase,accession number X60472,Smith-Waterman Score=41.
atgtgcagcgaaattcaagctgcgtgtcgggaaacggcgcaaccgatcccggaaagtgatgctgaactggcgcgctgcattttcgacagtctggcgctggtgtatgccgatgtgttgcatgagctggcgcatctgcgcggtgaagatttctcgcaactgcatattgtcggcggaggctgccagaacacgctgctcaaccagctatgcgccgatgcctgcggtattcgggtgatcgccgggcctgttgaagcctcgacgctcggcaatatcggcatccagttaatgacgctggatgaactcaacaatgtggatgatttccgtcaggtcgtcagcaccaccgtgaatctgaccacctttacccctaatcctgacaattcactctacacgacagacaaaggagctttgcgcatgaccactcaactggaacaggcctgggagctagcgaaacagcgtttcgcggcggtggggattgatgtcgaggaggcgctgcgccaacttgatcgtttacccgtttcaatgcactgctggcaaggcgatgatgtcagcttgcacttcgtttatagctcacgcctacatatgccgacctgtagccggataggcacttgtgccgcatccggcaatcaatgcctgatgcgacgctgtcgcgtcttatcaggcctacaactgttgccgacccgtaggccggataaggcgctcgcgccgcatccggcagtgtttacccgcggcgactcaaaatttctttctcataagcccgcacgctctccagccattcgctacctgctggcgtatcgtgacgttggcaatacatttcccagaccgcctgccacggcaacgatttctgctcttccagcagtgccagacgcgcagtgtaatcgcccgccgcttccagcttgcgcagctcagcggtaggttccagcaacgcacgcagcagggcttttttcatattgcgtgtaccaatgacccacgcggcaatgcggttgatagaggcatcgaagaagtcaaggccgatatgcacccggtcaaacagatcgtgacgcacaatctcactggcaattgcctgggtttcatcatccagcagcactacgtgatcgctgtcccagcgaaccggacggctgacgtgcagcagcaactgcggcacatacagcatggcggcggaaatctggtcggaatcaactcgtcgggtgaaatgccgggtccagcaaggcagctggggtccattggcacagtccagcagtccatcatcaaccacccttactggcagtgcacaggcaacaactccccatattaccgtagccgtagcaacattgtccatagggccatatgcagcaccccagccacatcgtcacaatccccacaccgcaggccagtgcaca

SEQ ID NO: 24815 - DNA, 3441 bp, Homo sapiens
  SIMILAR (628)..(1593): 971254mologous to Escherichia coli L-rhamnose isomerase,accession number X60472,Smith-Waterman Score=1642.
atggctatctcttctccgctgctggaagatatcgacctgtctggcgcgcgcggcgtgctggttaacatcacggcgggcttcgacctgcgtctggatgagttcgaaacggtttctgtgacgttccaggtcgatattcacccggcagcaaaaattggtcgcggtatcatgcttgaccacgcgacaggcatcgtcgttggtgaaacggcggtgattgaaaacgacgtatcgattctgcaatctgtgacgcttggcggtacgggtaaatctggtggtgaccgtcacccgaaaattcgtgaaggtgtgatgattggcgcgggcgcgaaaatcctcggcaatattgaagttgggcgcggcgcgaagattggcgcaggttccgtggtgctgcaaccggtgccgccgcataccaccgccgctggcgttccggctcgtattgtcggtaaaccagacagcgataagccatcaatggatatggaccagcatttcaacggcttcatacaccactaccgacaccgcattggacagattcatgctgcggctgtccggcacacatcggaatgcgattatctgatgttcggcccaggaaacacgcggcactgccagcctggcttccggcaaatcgtcaccggtgatcacgatgtaccgatagccacgtcggctgacgggatcaaaccagagcacttcaaaaactgggttgaatgggcgaaagccaatcagctcggtctggattttaacccctcctgcttttcgcatccgctaagcgccgatggctttacgctttcccatgccgacgacagcattcgccagttctggattgatcactgcaaagccagccgtcgcgtttcggcctattttggcgagcaactcggcacaccatcggtgatgaacatctggatcccggatggtatgaaagatatcaccgttgaccgtctcgccccgcgtcagcgtctgctggcagcactggatgaggtgatcagcgagaagctaaaccctgcgcaccatatcgacgccgttgagagcaaattgtttggcattggcgcagagagctacacggttggctccaatgagttttacatggggtatgccaccagccgccagactgcgctgtgcctggacgccgggcacttccacccgactgaagtgatttccgacaagatttccgccgccatgctgtatgtgccgcagttgctgctgcacgtcagccgtccggttcgctgggacagcgatcacgtagtgctgctggatgatgaaacccaggcaattgccagtgagattgtgcgtcacgatctgtttgaccgggtgcatatcggccttgacttcttcgatgcctctatcaaccgcattgccgcgtgggtcattggtacacgcaatatgaaaaaagccctgctgcgtgcgttgctggaacctaccgctgagctgcgcaagctggaagcggcgggcgattacactgcgcgtctggcactgctggaagagcagaaatcgttgccgtggcaggcggtctgggaaatgtattgccaacgtcacgatacgccagcaggtagcgaatggctggagagcgtgcgggcttatgagaaagaaattttgagtcgccgcgggtaaacactgccggatgcggcgcgagcgccttatccggcctacgggtcggcaacagttgtaggcctgattaccaccaggagcgatatcccacgggtgagcaattaacttcacctgcgagagcaccgggcagttctggatagcggtaaacaacggcgcatcctgacggaactctggcgtacggcccatgactgccgccagatcaaagcggaaaccatcgacgtggcaggttactacccaataacgcaggcaggcgctggcgtaatccaccaccgccggatgactcaaattgagcgtgttgccgcaaccggtccagttgtgataatcgccgtcttctccgctaacaaacatacgccggattagaacaaacatcgcgcccggctgtaacacattggtgcttttcccctgcgtttctataaggggtaatttccacatgtacaatgggtatcgttttaagtggtgtaccctatcgtgcttttgcagcaactgaaaaaagctgcggcgctcgaagatttccagctgatagcccgcactgccactggcgaaaatgcgggctttgccgttaagggtgaagttgagatagtcaatatcacgcaggatggtcctgcctgaaacgccagtctgttgcgccagctcgccaggcgtgcgcggctgttgctccagcagatcgacaatctgacggaactggctaaacgcgttgactttctccgcagttaaggtcgtcagaaaaccccgtatcagcgtgagcagagcttcgtaatcggcttttgaaatcataccgctgttggcgtgcagataacgagttggcagacacagcgcgacaaccggacgcccgccgcccatcacgttgtagcgcccgccatccgtcgcaccggttttcatggtggaaaattgcagcggtaaatcgttatgtgcggcacagctttttaacgctgctaccaatttctggttggggaagtagcgcttgtcaaacagcatcaagccccgcccctggcccaagtttagcgggtatttaatggtatcaatgcccggaacatctcccgcttcgggggtattcaacacgatcacgacgtccggtttaatggtgttccgcttacagccatgcctgaaaccctgtgtagcccactggatttgtgtgtgccaagcaccaagcaaggcatcatagagtccggtaagctgccggtccagggataggtcactttgacacagctcttgccaggctgctaaaagctgcacgttcatctttgaaataaacaacagctgttgtttgatgcgcatgaacaccggaatcgaagccaactggtgggcctgctggttaaacccaatcaacgctgctcgaggtgcagccaaccaggttgtgggtgcttgaccctttttccgtatggtttccagccagtaaaccgcctcttcacctaacggcaccagacgctctttgttgcctttaccaatgacccgtaccacgccctgacgcaggctgatatcactcattgtcagtccgaccagttcagagacacgcagcccggtagcatacaacacttcaagcatggctttatcgcgtagctccagtggctgatcgattaatggtgcctgtaataaacgttcgacctgcgcttcgcttaaatcttttggcaaacgctggggcaatttcggtgaagcgagatgcgcactgggatcgtcttcacgaaacttttcgcgataaagatactggaacaatcggcgcactgcactcagcaaacgcgctgagctggtggctttatacccgccctccagccgttctgccagtaatgcctgcaaatcgtcactttgcgccgtcgccagcgtcaacccgcggtgatgcaaccactccaccat

SEQ ID NO: 24816 - DNA, 6000 bp, Homo sapiens
  SIMILAR (5224)..(5985): 931254mologous to Escherichia coli similar to phosphotransferase system enzyme I,accession number U00006,Smith- Waterman Score=1223.
ctatgcgtatgtgaacgcggaaatccgcgagaaaggcgacacctacggcaatctggtaccattctccccgaaacataaaggcacgctgggcgtggactacaagccaggaaactggacgttcaatctgaacagcgatttccagtccagccagtttgcggataacgccaatacggtgaaagagagcgccgacggcagtaccggccgcattcccggcttcatgctctggggcgcacgcgtggcgtatgactttggcccgcagatggcagatctgaacctggcattcggtgtgaaaaacatcttcgaccaggactacttcatccgctcttatgacgacaacaacaaaggcatctatgcaggccagccgcgcacgctgtatatgcagggctggaatgtgattatgttggcatttatccgttttctttttgcaggcctgctgctggtgatcagccacgcctttgccgccacggttcaggacgaacacggcacgtttacactcgaaaaaacgccacaacggattgtggtgctggaactctcgttcgccgatgcgctggccggcgtggacgtcatcccgatcggtattgccgacgataacgatgcaaaacgcatcctggcccaattgtgtggcacctgaaaccgtgggatccggggaaacagacggcacgatgcttgaaaacacatgggcaaccagcagccaggcaggattgaccgcagcagttgctcccagccgatggacggatggagcaaccggcatcgaagggaacgttcagcccagagaggcaaagctgccgtccagtcccgatttcacgtggattgctgtccgtgaatggcaaggcctgttcctttgtggtcgtcgtgggggctgcgcacctcttatttgccaaagccgctctcggttaacccatcgcgtaacgatggatccgcgttgcgggaacccatccgcttggggtgacccgggggactctggcagggcctgcctttgtgcgtctgtcgctcgtcttcttgctccgccgcgtgctcgctggttcatcgcttctgccattgctgatggggtaacagaaacagaggttttacttcctgacggcgcttcagaacatgattattcactgcgcccatcggatgtaaaacgcttacagaacgcggacttagtcgtttgggttggcccggagatggaagcgtttatgcaagaaaccggtaagcaaattaccaggagcgaagtcagcccgctctgtcgccgcgtggcgtttaataagtttaaccgcgacccacaaccgcgttatgattggggtcgactcaccgttctttactctggctcgtcgctgtctggcggccgttatgttgttatcatccgtgagtgccactgccaattgtcaaaaccattgagactggaacagaacgaaattcgttcgctcttacctgaagccagtgagccgattgatcaagctgcacaagaagatgaagccattccccaggacgaactggatgacaaaatcgccggtgaagcgggcgtgcatgaatatgttgtttccactggcgatacgctaagcagcattctcaatcagtatggtattgatatgggtgatatcacccaactggctgcggccgacaaagaattgcgtattacaagttgaagttagcggccgtctgggcggcagcggaaatcgcacgtaccgaatgatcgaagcagcacgtcgtgctatgacccgtgcagttaagcgtcaagacggtgatgtaatgaaagcaaaagagctgcgtgagaagagcgttgaagagctgaacaccgagctgctgaacctgctgcgtgagcagttcaacctgcgtatgcaggctgcaagtggccagctgcaacagtctcacctgttgaagcaagtgcgtcgcgatgtcgcacgcgttaagactttactgaacgagaaggcgggtcgcgttgttagcgacaaaatggagaaatccattgttgttgctatcgaacgttttgtgaaacacccgatctacggtaaattcatcaagcgtacgaccaaactgcacagaaagcggttcctgagcatcactttccgcgatgctaaagctcgtgatgaagccattgcgtatctgagcaagcgccatccggagctggtgattagcagccacggcagcaatccagctgaccgcgtgaatatgtcggtgcagcagaacattaatatcctgcgtaaccgtgtaaaccaacttggacgtggctggagccggtggttcacgcgtcagggtgctgaccgtatcgttgttgtaaactgccagtgtattcaggacactgcgcagcgctggtgtgtaacgatcatgtctaacttcactaaggacaacatcggcaaaccgatggcaaccctgtttgtggagtacaaagacagcggtaagaaagatgcaaatggtcgtgcggttctggtgaaacaggaagaggtgattaacatcgccaacatccagtctcgtctgggtaacagcttccgtatcaccggcatcaacaacccgaacgaagcccgtcagctgtcactgcctgctgcgtgccggcgcaacgctgagtatgccaggtatcgcgggtatcgtcttaacccttgcggtggcggtcgatgcgaacaagcaagcctgacaggtgcaggtgcaaccttccctgcgccggtgtatgccaaatgggctgacacttaccagaaagaaaccgctacctggcgaaagtgaacgaagagtggaaaaacaacgttggtactggctctaccgtaaaatggccgatcggtctgggcggtaaagctggaactctttcgggtaaagccgctggatatcccacagcaacgggttgggcagcaacacgttttgctgaaagcgtttaatcgcagactggcaatgcagtttatccagctcatcgccaccgacgtgacggaaatcctgccccttcacgtagtagaagatggtaccgacagcctttattgcctggcgctgtcccatctgcgttgtgggcgtttgtcactccggtggcggcgtgagcttcctcgcgggctgggcgttaatgttagttggtgctatccgtttaaagcgcaagggcagtgcgccgcagaaattaccgataaagccggccagcgggaaattttcggttttgcccgcgtgaaagagaatgcgggttatgtcatttatgaatgttatcaacctgatgatggcgataagttaatccgtgagctgccgttcagttcattaatttttgcccgccagtggtttgtggtgggggaactcctgcagcatttgccgccagaagatcgtattacccccattgtcggcatgttacagggcgtagtagagaagggcggtgaactgcgtgttgaagttgccgataccaacgaaagcaaagagttactgaaattctgccgtaaatttactgttccgctacgcgctgccttgcgcgatgccggggtgctggcgaactatgaaacgccgaagcgtccggttgtgcatgtattctttattgcaccaggctgctgctataccggttactcatacagcaacaataattcgccgttctatatgggcattccgcgcctgaaatttccggcagatgcgccgagtcgttccacgctcaaactggaagaggcatttcatgtgtttattcctgcggatgagtgggatgaacgcctggcgaacgggatgtgggcggtggatttaggcgcttgccctggcggctggaccttccaactggtgaagcgcaacatgtgggtttattccgtcgaccacggctcgatggtccaatcctctggattacgacagggacctgctggggaacacggttccattccgcccgaggccagaaatttccggaagtgttacaggggtcccagaccttacccgctgctacggatcctccaggtatgcaatggctggcatccggcgtgctggaatggaagctcgtctgatcgcgcctggcgcggatggcgtaaaaatgcagtgtgatttattgtcgtgtcagaacgctggctggcaaggagtgacgcttaataccacgcgggggcatttctatcgcgcggcgctggaagggttaactgcgcaattacagcgcaatctacagatgctggaaaaaatcgggcactttaaggcctctgaattattgttagtcggtggaggaagtcgcaacacattgtggaatcagattaaagccaatatgcttgatattccggtaaaagttctcgacgacgccgaaacgaccgtcgcaggagctgcgctgttcggttggtatggcgtaggggaatttaacagcccggaagaagcccgcgcacagattcattatcagtaccgttatttctacccgcaaactgaacctgaatttatagaggaagtgatccgcgctgatggcctgttggtgagcgacttgctccaggcgattatcccgttatttgaactggacagttatgcaccgccgctggtgatgatggcggcggtagaaggtgacactctcgatcctgaagtagaacgacgttaccgtaatgcgctttcactacaagccccgtgtcctgacatcatccgcatcaatcgttttgcgttttatgaacgggcgcaaaaagcctttgcgttcggttatcacaggcgaacgagcgaagtacgggaatattcttttaaaaaaaggggcctacaactgttgccgacccgtaggccggataaggcgctcgcgccgcatccggcagtgtttacccgcggacgactcaaaatatctttctcataagcccgcacgctctccagccattcgctacctgctggcgtatcgtgacgttggcaatacatttcccagaccgcctgccacggaaacgatttcatgctctaccagacagtgccagacgcgcagatgtaatcgcccgaccgcattccagacattgcgcagctacagcggaacagaccaacgtgggtcatgcgcgtccggcaagccacgttgaaacgctgtgtaatactttttcatcacaaattgagtggcataacctgcgcactgaccgcaagggcaacgccaaaagcgcccttgcgctgattggcaccgatacgctggcgggcgataactgccagttactgatttccggggccgacgaacaggaagcgcaccagcgtttaagccaatggctgcgcgatgaattcccccactgcgatgcgccgctggcggaagttaaatctgacgacctggaaccactgccggtttccccgaccaatctgaatccgcaaattatccgcgcccgcaccgtgtgcagcggtagtgcaggcggcattctgacgccgatctcttctttagatctcaatgcgctgggtaatcttcccgcagccaaaggcgttgacgccgagcaatccgcactggaaaacggcctgacgctggtactgaaaaacattgagtttcgtctgctggatagcgacggtgctaccagcgcgattctggaagctcaccgatccctggctggcgatacttccctgcgcgaacatttactggcaggcgtcagcgccggattaagctgcgccgaagcaattgttgccagcgcgaatcacttttgcgaagagttttcccgttccagcagcagctacctgcaagaacgtgccctggacgtacgcgacgtctgcttccagttactccagcaaatctacggtgagcaacgcttcccggcaccgggcaaactgacgcagcccgccatttgtatggctgatgaactgacccccagccagttcctcgaactggataaaaatcacctcaaaggattgttgctcaaaagcggcggcaccacctcacatacggtgatccttgcccgttcgttcaacattccacgctggttgcaacaaacgatttatatcgacggcaacgccggggcgattgtggttgagccaggggaagccgtagctcgttattatcagcaagaagcccgcgtacaggacgccctgcgtgacccacagcgtgtctggctgacccaacaagcccgtaccgctgacggtatccgcattgaaattgccgctaacatcgaggctcgactctag

SEQ ID NO: 24817 - DNA, 522 bp, Homo sapiens
  SIMILAR (229)..(519): 351254mologous to Escherichia coli O157:H7 putative antiterminator of prophage CP-933Y,accession number AE005492,Smith- Waterman Score=166.
atggtaaagttcgcctgggtgcagtatgtcagcatcctgcttatcttcctctgggtgtttgaaagaatcaagatcttcgtgtttcagaatcaggtggtgaccaccattcctgtgacagtgacgccccggggagacttgtggcgggagatgaacacggacgcaagtgttcacccgccagggtctcaacccccagggggagacccccttacggggtcgaaaatttacgggtgccgctgcgcccaagggactgggaagagctggaacccaggcaaaggaaaggcgctggacaaggcagaaagcgatcgccagggcgttccagtaatgaaagcctgcgaccgctgcggtggtagaggttacgccaggcttaagttctcaacggtaaatgagggcgttaagactgttgcggagataaagaaaacggcggcatatgagcaacttcagccgctatttgaggagttggtcgccgaatgccataaacaggagtctatggctgattccattctctcaaaagtaacgagatga

SEQ ID NO: 24818 - DNA, 906 bp, Homo sapiens
  SIMILAR (37)..(525): 951254mologous to Escherichia coli Tail fiber assembly protein G,accession number D90775,Smith-Waterman Score=811.
atggtaaaaataatcaaacccaaggcgattcagattggcacagcttccataccagggcaggtgggcccggcaaccagtaccgatattgcaccgccagatatcccggctggcttcgtggctgttttcaacagtgatgagtcatcgtggcatctcgttgaagatcatcggggtaaaacggtttatgacgtggcttccggcaacgcgttatttatttctgaactcggtccgttaccggaaaatgttacctggttatcgccggaaggggagtttcagaagtggaacggcacagcctgggtgaaggatacggaagcagaaaaactgttccggatccgggaggcggaagaaacaaaaaacaacctgatgcaggtagccagtgagcatattgcgccgcttcaggatgctgcagatctggaaattgcaacggaggaagaaatctcgttgctggaagcatggaaaaagtatcgggtattgctgaaccgtgttgatacgtcaactgcacaggatattgaatggccagcactgccgattattcaagaagtgctgccagcactcgaaaatgtgattgctgtgatggtggcggatttacagaggcgcaagtgtttaccaacaaggtctcatacccatgggggaaaccgccttactggtcgaaaatgtcgcgtgccgttcgcccaagcgactgggagagctggacacaggcgcacagaatcgccagtcactatggcgtgctgtagcgctatatgcgatgatgcaaaatctatgcgaacccgaacacgcaacataaaacaagtacaacaaccgccgccaagtcctgcaacgtcgctacttggagccactatcgactacgcgatcatggcgaccacacccgtcctgtggatctacccactagtcaattcaccatcttgttga

SEQ ID NO: 24819 - DNA, 1057 bp, Homo sapiens
  SIMILAR (983)..(1054): 371254mologous to Escherichia coli O157:H7 antitermination protein Q homolog of cryptic prophage CP-933M,accession number AE005288,Smith-Waterman Score=41.
atgaggttatgtccagaaaagacaactaaagcaaagagggtgaaggcagttcttgcctggtcaaaagaggaaccatggctttcagagtggtcagaggaagtgttagagatgggctataaaaaattaggagatttttcaacagcaggtgccatcttggaaacagagatcaggccctcgcctgccagtgccttcaccctggactctcagcctccagaatcgaataatttaagtgaagcgaaatatgcgccaaataatatcgaatcaatcgctaaatactttgcgcctaaatcaccgatgttcagtgaatctcctagcggaaccgccttagacagtttcaaccggaatgaacgccgccgttggcctttgtggcccaacaagtcggggtttggttccgatcttaccctctcgaaaatcggcattagcagcccagatatagcactggagagactctatgagcaggcacgtaagttatcaggtaaattcagagcactgtctgaactcgatgaatcagctcggtcaggcgtgcttaaggttctctgcgcttttgcataccaggattattcaagaagtgctgccagcactcgaaaatgtgattgctgtgatggtggcggatttacagaggcgcaagtgtttaccaacaaggtctcatacccatgggggaaaccgccttactggtcgaaaatgtcgcgtgccgttcgcccaagcgactgggagagctggacacaggcgcgtgaggtggtgcgagttaagtgcaagccgtgtaacggaaaaggcgttatcagcaattcgtgtcgttgccatggcaaaggtaaggtgctggcaaagcatgaaagcgatcgcaggggcgttccagtaatgaaagcctgcgaccgctgcggtggtagaggttacgccaggcttaagttctcatcggtaattgagggcgttaatactgttgcggagactaaagaaaacggcggcatatgagcaacttcagccgctatttgaggagttggtcgccgaatgccataaacaggagtctatggctgattccattctctcaaaagtaacgagatga

SEQ ID NO: 24820 - DNA, 1718 bp, Homo sapiens
  SIMILAR (297)..(1115): 851254mologous to Escherichia coli nfrA,accession number L16945,Smith-Waterman Score=1123.
ctctgaagcaccattcaaattacggcgtagcacccgccatccgcgaatttggatatatacaccaccagttcccggataatattccgctgactttataccttgcggaagcctatcgccattttggtcatgatgaccgggctcgtctgttgcttgaggatcaactgaaacgtcacccaggagatgcccgacttgagcgcagtctggcggctattccggttgaagtgaaaagcgttacgacagttgaagaactgcttgcccagcaaaaagcgtgcgatgctgctccgaccctgcgttgtcgcagtgaagtcgggcagaatgccctgcggctggcacagttacctgtcgccagagcgcaactgaacgatgcgacgtttgctgcatcgccggaaggattttactctgcgaaccgatctgctgcaacgggcaatctacctgatacaatgctggacgatcggatcctggcactgcaatcacaggggatcttcaccgatcctcagtcatatattacttacgcgaccgcgctggcttatcgtggcgaaaaagcacgcctccagcattatctcattgaaaataagccactatttaccacggacgcacaagagaaaagttggctctatctgttatctaaatacagcgctaaccccgttcaggcgttggcgaattatacggtacagtttgccgacaaccgccagtatgttgttggcgcgacgctaccggtgctgttaaaagaaggtcagtacgacgcagcgcaaaaactgctcgccaccctccccgccaatgaaatgcttgaggagcgttatgctgtcagcgtggcgacccgtaacaaggctgaagctctgcgtctggcacgattgctgtatccccaagaaccggcaaatcttacccgcctggatcaactaacctggcaactgatgcagaacgagcagtcacgcgaagctgccgatttattgctgcaacgctatcctttccagggcgatgcgcgtgtcagccagactttaatggcgcgactggcgtctctgctggaaagtcatccttacctggcaacgccggcgaaggtggcgattttatcgaaacccttaccgctggcggagcaacgtcagtggcaaagtcagttgcgggcgaccagtgcacaaccggttcccggtccgacgcccgtcgccaacggttctattttccagtctgctcagccgattaactatggctatcaaccgctgtttgaagatcgtcgaccacgcaatattggcgatacgctgaccatcgtgttgcaggagaacgtcagcgccagcaaaagctcctctgcgaatgccagccgtgacggtaaaactaattttggctttgatactgtgccgcgctatttgcaggggctgtttggtaacgctcgtgccgatgtcgaagcctccggtggtaacacgttcaacggaaagggcggggccaatgccagcaatacctttagcggcacgttgacggtgacggttgaccaggtactggtcaacggcaacctgcatgtggtgggtgaaaaacagattgccattaatcagggtaccgaatttattcgcttctctggcgtggttaatccacgcactatcagcggcagcaataccgtaccgtctactcaggtggcggatgcgcgcattgaatacgtaggcaatggctacattaacgaagcgcaaaatatgggctggttgcagcgtttcttccttaacctgtcgccaatgtaa

SEQ ID NO: 24821 - DNA, 1739 bp, Homo sapiens
  SIMILAR (114)..(956): 931254mologous to Escherichia coli nfrA,accession number L16945,Smith-Waterman Score=1318.
aaaggctcgcgctcctggcctattaaacgggaattaacaagtttcgatcgcaatcctttttattccaaacaggttttaaccccagaccaggttggcgcaactgagttccgaaaataaaggagaatacccttaatcgggtcatcggaagttttggtttactgctgacgtctttattgagtaccagcgcactcgcagacaatatcggcaccagcgcagaagagctggggctgagcgattatcgccattttgttatttatccccgtctcgataaagcgctgaaggcacagaaaaataacgacgaagcaaccgccatccgcgaatttgaatatatacaccagcaggtgccggataatattccgctgactttataccttgcggaagcctatcgccattttggtcatgatgaccgggcgcggctgttgcttgaggatcaactgaaacgtcacccaggagatgcccgacttgagcgcagtctggcggctattccggttgaagtgaaaagcgttacgacagttgaagaactgcttgcccagcaaaaagcgtgcgatgctgcgccgaccctgcgttgtcgcagtgaagtcgggcagaatgccctgcggctggcacagttacctgtcgccagagcgcaactgaacgatgcgacgtttgctgcatcgccggaaggaaaaacgctgcgaaccgatctgctgcaacgggcaatctacctgaaacaatggtcccaggcagatacgctatacaatgaagcacgccagcagaacacattaagcgcggcagaacgccgtcagtggtttgacatacttcttaccaggcaactggacgatcggagtctagcactgcaatcacagaggatcgtcaccgagtctcagtcatatatgacttacgcgaccgcgctgacttatcgtggcgaaaaaagcacgctgcagcattatcgcattgaaaataaaccactaggaactggatattggtgcagtcgcgattaccgatcgagagaaattgctggccttaccggaattggtgacgaccaccatttacccggcaaaccgatttcttcaacttatactttaaaagcgattgaaaccggtgaagtggtctacgctgatggcaacgaagtaccttaccgttgctctttgaatccgcaatgcaaactggggtcaacgctggaaatcccgttgcgtggtgaaaatcagcgggttatgggcacatcaaattgtatgacgccaaaaaccgtttattcagttcaatcaaccgcactttgggccagccagctggtgcagtatctttccacttttttccgcaaaaacttaaagcggccttcggagtttgttactctcgccgacgaaattgaacatgtgaatgcttatctgcaaattgaaaaggcgcgcttccagtcgcggttgcaggtcaacattgctattccgcaagaattatcccagcagcaattgcccgcgtttaccctgcaaccgatagtggaaaacgccattaaacatgggacatcacaactgctggatacagggcgagtggcaatcagcgcccgacgtgaggggcaacatttgatgctggagatcgaagacaatgccggtttgtatcaaccggtaaccaatgccagtgggctggggatgaatctggtggataagcgtttacgtgaacggtttggcgatgactatggaataagcgtcgcctgtgagcctgatagttacacccgaataacgttacgactaccatggagggacgaggcatga

SEQ ID NO: 24822 - DNA, 2046 bp, Homo sapiens
  SIMILAR (124)..(672): 931254mologous to Escherichia coli K12 putative general protein secretion protein,accession number AE000409,Smith-Waterman Score=914.
atggacgtggtgatccttgataccggctgcgccaacctgaactcggtgaagtctgccattgcgcgtcacggttatgaacccaaagtcagccgtgacccggacgtcgtgttgctggccgataaactgtttttacccggcgttggcactgcgcaagcggcgatggatcagctgcccaacgccaaatacaaactcaccgcacaaacattacaatggctggcagaggagacgttacccgacaacacccaggactggcactggacggttgtcgataaacaaaacgaaagtgtcgaggtgataggcattcagtcggagaaactcagtcgctatcttgagcgtttacatactgccggactcaacgtgacgcgggttttgccagatggctgctatcttccctgggaagtagatagctggactctggttaaccagcaaacaagctggctcattcgcagtgccgcacatgccttcaacgaactggatgaacactggttacagcatcttgctgcccagtttccgcctgagaatatgctttgttatggtgtagtacctcacggcgttgcagcggccaatccacttatccagcatcctgaaataccatcactgagtttgtattctgccgatattgcattccagcgctatgacatgctgcatggtatttttcgtaaacagaaaactgcgctgcattatgagattttcgacgacgccaattttatggtgctggtggaaccggagattatcctcaatgcaccgcaacaatatctgctggcggggatcggtgacacgctggcgaaatggtatgaagcggtggtgctggctccggcagggacggcggatgtggtcgcttctgccgcgcaggtacagtatctggtcgatggtctggaagagattggcgttgtctgccagcaggcgggcggtcacgcggcattcgttgatgccggtaaactgttgccgcatatcccggcagaccagttcccggcacaggcgctggcctgcgagctgtatacagtcgcgctggaaggcgcattgaagttgaaagagatctcttacattcacgctgaagcctacgctgctggcgaactgaaacacggtccgctggcgctaattgatgccgatatgccggttattgttgttgcaccgaacaacgaattgctggaaaaactgaaattcaacattgaagaagttcgcgcgcgtggcgcgatatacatgcacatcatcgagatgccgcatgtggaagaggtgattgcaccgatcttctacaccgttccgctgcagctgctggcttaccatgtcgcgctgatcaaaggcaccgacgtgaccagccagcacactgcacgcctcactcactggcgacagcgagagccgcccctccgcgcttacggcgttgctgggcgcagaggcaaaatgaccggcaatcagccgtttggtgagttcatgcagcggcgatgccagcacatccgcggtgctgccctgctgaccctttcctaccttggcgctgagcgcgctatcccgaactacaacgttatgggtctggcaaaagcgtctctggaagcgaacgtgcgctatatggcgaacgcgatgggtccggaagatctttggataccccctgggacaattcccgagtttaaactagcaacacggacctgcatgaaacacggatcatcccgtgggccaggcttgaccatttatgactacagaaagggctatacgccaacccggaatccattcaaacccaacaaaaccgacgaccaaagaacacacacaaaggcgagccctacggcggaacttcaggattcgaacttgcattcctgtttggtcagccaagaaggaccaattgacaatcgccccgccccgctgacggcgaaactggttcatggtttgctggaacaggttaaacgcaccgccgacgctgcgcaggtcgcgcaagtgtgtcagcgactgttagctgaaacggagcgactggacgcgctggtcaatgcggcgggaattttacgcatgggcgcgaccgatcagctcagtaaagaggactggcagatctggactcatcactaa

SEQ ID NO: 24823 - DNA, 2634 bp, Homo sapiens
  SIMILAR (560)..(522): 761254mologous to Escherichia coli Uracil transport protein,accession number D90737,Smith-Waterman Score=49.
ttactgctgctgtgcagactgaatcgcagtcagcgcgatggtgtagacgatatcgtcaaccagtgcgccacgggacaggtcgttaaccggcttgcgcataccctgcagcatcggcccgatggagatcaggtcggcagaacgctgtaccgctttgtaggtggtgttaccggtgttcagatccgggaagatgaacacggtagcgcgacctgcaaccggagagttcggcgctttggatttcgcaacgtcagccattaccgcagcgtcgtactgcagcggaccgtcgatcatcaggtcaggacgtttttcctgcgccagacgagttgcttcgcgaactttttctacgtcgctacctgcaccagaagtaccggtggagtaggagagcatagcaacgcgcggttcgataccgaaggccgcagcggaatcagcggactgaatcgcgatttctgccagctgttcagcggtcggatccgggttgatcgcacagtcaccgtaaacgtaaacctgttccggcagcagcatgggggatctgtatgaatcagcgcaccaaatttccggtgaaaagcccaacagcatggcgatgacggcagcagcaacaaacaccagcgtcgagtagactttggtcacggccatcacaccgatattttcagcataggtggtcacgccgctaccgccgacagagccggaaagcatcgttgccagaccatcgcctacgaatgcccgccccatatacgggtccatattgcgtccggtcatcccggcgactgccttgagatgacctaagttttccgccaccagaatcaccgccacgggcgcaatcagcatcattgcctgaccattaaaagcaggagtggaaaaatgtggcagaccgaaccaggcagcatggctgacgagagtaaaatcgacggcttttcccagccctaaaacgttggtcatcacgccatacagcagacaggcgacaattaatcctacgagaatcaataaccgctggatcatgccacgggtaaacaccgccaccagcccaatacacagcaccgtcattaccgccatccagctatcaaaggccgaagccgatacacttttcactgcgataggcgctaagttcaggccaatcgccatcaccaccgcacccgtcaccaccggcggcatcagtcgttcaatccagcgcgtaccgattttcatcaccaccaggccaatgacggtataaaccagcccacaggcgataatcccgcccagcgcaatgctgatattcgggttaatgccctgaccgttaaagcccgtcgcggcgatcaccacgccgacaaaagccgcgctggagccgagataactggggacgcgcccgccggtaataaagaaaaacagtaacgtgccgatccccgacattaaaatggaaagattgggatccagccccatcagaatcggcattaacaccgtcgcgccaaacatcgccaccgcgtgttgaacgcccattactgccgtctgagcaaacggcaatcgttcatccggcgcgaccacgccgctctctgtagaggtcgattttaacacctggctgatacggcagtcaaacgaaaccagagcctcttccagttgcgggcatccggtcacccccgtctgccagcgggcggcggcaaagcggtgttccatgggcgttttgcgccaaaaaggtttgaaagcggctccagtaatgtggggcgcgtatcggtcacactgcagacggctccgttgccgctgcccgccggagaacgcatgaggcaggcggtcgagatactccggacgaatacccacctgcacagccaactcctctgccaacgctcgccgctgttgttcactactacgcttagctatccagagcggttctgtgatgatgcgccacaccggtaagcgcggattaagcgaagagagcgggtcctgaaacaccatctgcataatgcgttgtgagccagaacggatgtactgcccgtggctcggttgcagcatacccattaaaagctgtgcgagggtgcttttgccgcagcctgactcgccgacgatccctaaggtttcaccacggcggatctgcaactgcaccgtgacgtccagcgccgtagtcggttcgtcggcaataatcaattgcggctcgcaggagaatgccagcgcaatcattacccgctggcgcataccacctgaaagctcaaacggatagcgcgacataacttccacggcatccgggatttgcatctcttccagcaggtcaatcgctttagctctggcttcccgacgacttattggttgatgatggcggatcacgtccatcatctgaagacctattcgacgtgtcggattgagggcggtcatcggttcctgaaagatcatcgccactcgtgcgccgcgccactgacgaagctgtttttcccgcgcgttaagaacatcttctcccagcagggaaatctgcccccgatgtacgcaataactgcccgtcggtagcagacgcataatcagcattgcggtgactgatttacctgagccggattctcccaccagaccgacaatttcaccgcggataatctgcaaggacacattgttgagcgcgtgaacatcaccgctagaaccggggatactcaaatgcagctgttgaatgtccagaacgggttgggtcat

SEQ ID NO: 24824 - DNA, 2577 bp, Homo sapiens; identical to SEQ ID NO: 4037
  SIMILAR (343)..(951): 1001254mologous to Escherichia coli K12 putative oxidoreductase,accession number AE000165,Smith-Waterman Score=1024.

SEQ ID NO: 24825 - DNA, 1524 bp, Homo sapiens
  SIMILAR (487)..(1278): 841254mologous to Escherichia coli ostA/imp,accession number AB013134,Smith-Waterman Score=1138.
atgttgttgtcagctatttcaagtacagccaaaaactggaccacagtgcagatgtcccatcaacagcatagtcttctccggttgatcagcattttccgaaaggccacggtcgctgaccggggttggcaccagccactcgaaggtctacgcctgggcggttcaatgctgatgcaggggctgattagcgccgagcagctggcacaggcgctggcagagcaaaacggcgtggcgtgggaatccatcgatgcctggcagatcccttcctcgctgattgccgaaatgccggcctccgtggcgctgcattatgcggtactgccgctgcgtctggaaaatgacgagttaattgtcggcagtgaagatggtattgacccggtttcgctggcggccctgacgcgtaaagtcggacgcaaagtgcgttacgtcattgttctgcggggacaaattgtcacagggttacgtcactggtatgcacgccgacgcggtcacgatccgcgggcaatgagcctgaccgggagttatagcagtgtctgggctgaagacgacattcagtttgattcccgttttctggaattaaaaggcgacacaaaaattgatctgaagcgtttttccagccaggggtatgttgagcccggaaaatacaatttacaggtgacgaccggtgtcacatctcgcatatatgatgatgctgccgttgaacgttttaatatttccgttggtcaaatctactatttcacggagtctcgcactggcgatgacaacataacatgggagaatgacgacaaaacgggttcactggtgtgggcaggcgatacttactggcgtatctccgagcgttggggattgcgtggcgggattcagtacgatacacgtctggataacgtagcgaccagtaactccagcattgaataccgtcgggatgaagaccgtctggtacagctgaattaccgttacgccagcccggaatatattcaggctacgctgcctaagtactattccactgctgagcaatataagaatggtatttcgcaggtaggtgctgtcgccagctggccaattgccgatcgttggtccattgttggggcctactactacgacaccaatgctaacaagcaagccgactctatgttaggtgtgcaatacagctcctgctgctatgcaattcgcgtcggttacgagcggaagctgaacggttgggataacgataaacaacatgcggtatatgacaacgcaatcggctttaacatcgaacttcgcggcctgagctccaactacggtctggaaccaaatgttcaaatcgaggggatttctatggaagcgcgggaagcaaccgctacgggtgaatcatgcatgcgcgtcgatgccattgctaaggtcaccgggcgggcacgatatactgacgattatgttatggcgggcatgtgttatgcgaaatatgttcgtagccctatcggacatggttatgccgtaagtatttatgatgaacaaagccaaaattttgccggggcgtaccgggcgaaattttaa

SEQ ID NO: 24826 - DNA, 3150 bp, Homo sapiens
  SIMILAR (1016)..(1234): 981254mologous to Escherichia coli K12 putative oxidoreductase,accession number AE000165,Smith-Waterman Score=363.
ttatctgtatttttcttgtgggtattttggtgcataaagcgcgtattggtttgccccatgtgcaacgtggtgcgccagccgctcctgtaaatagcgcggaccatcaaaatcaggaaagccttgcgacaggttaatcgcctggtgttgctgcgccagcgcgctcatctgacgaagttgcgtgttgaaggcactataacacgatgctagtatttggcaatcaagacgtttagatgtctgcacgattttttcactgatgaacaactttctcgcgcggtgtggatctacggcaaacgcgccattgctgcggcgcaaaccaaacttccgccagcgtttggactgccaggggcaaagcatattttgtttcgcggtcattgcagcgaaagcgatgtacaacaactggcggctgagtccggtgacgaccgcagcgtggtgattggcgtcggtggcggtgcactgctcgacaccgcgaaagccctcgcccgccgtctcggtctgccgtttgttgccgttccgacgatcgccgccacctgcgccgcctggacaccgctctccgtctggtataatgatgccggacaggcgctgcattatgagattttcgacgacgccaattttatggtgctggtggacccggagattatcctcaatgcaccgcaacaatatctgctggcggggatcggtgacacgctggcgaaatggtatgaagcggtggtgctggctccgcaaccagaaacgttgccgctaaccgtgcgactggggatcaataatgcgcaagccattcgcgacgtcttgttaaacagtagcgaacaggcgctgagcgatcagcaaaatcaacagttaacgcaatcattttgcgatgtgggggatgctattattgctggtggtgggatggtttggggtctgggcgatcgttttacgcgtgtggaggcagctcatgccgggcctaacggactgaccgggctgccgcaaaccgagaagtttctccacggcaccaaagtcgcctacggaattctggtggcaaagcgccttgctgggtcaggatgatgtgctggcgcaattaactggagcgtatcagcgttttcatctgccgactacactggcggagctggaagtggatatcaataatcaggcggagatcgacaaagtgattgcccacaccctgcgtccggtggagtccattcattacctgccagtcacgctgacaccagatacgttgcgtgcagcgttcaaaaaactaatacagggcctgattagcgccgagcagctcgcacaggcgctggcagagcaaaacggcgtggcgtgggaatccatcgatgcctggcagatcccttcctcgctgattgccgaaatgccggcctccgtggcgctgcattatgcggtactgccgctgcgtctggaaaatgacgagttaattgtcggcagtgaagatggtattgacccggtttcgctggcggccctgacgcgtaaagtcggacgcaaagtgcgttacgtcattgttctgcggggacaaattgtcacagggttacgtcactggtatgcacgccgacgcggtcacgatccgcgggcaatgttgtacaatgcggttcagcatcagtggctcacggaacagcaggccggtgaaatctggcggcaatatgtgccgcatcagttcctgttcgccgaaatactgaccacgctcggtcatattaatcgttcagcaattaacgtgttgttattgcgccatgaacgcagttctctgccgctcggcaagtttttggtcaccgaaggcgttatcagccaggaaacgttggatcgcgtcctgacaattcaacgcgaattacaagtttcgatgcaatcactattactcaaagcaggtttaaacacagaacaggttgcgcaactggagtccgaaaatgaaggagaataaccttaatcgcgtcatcggatggtctggtttactgctgacgtctttattggagtaccagcgcactcgcagacaatattcggaccagcgcagaagagctggggctgagcgattatcccattttgttatttatccccgtctcgataaagcgctgaaggcacagaaaaataacgacgaagcaaccgccatccgcgaatttgaatatatacaccagcaggtgccggataatattccgctgactttataccttgcggaagcctatcgccattttggtcatgatgaccgggcgcggctgttgcttgaggatcaactgaaacgtcacccaggagatgcccgacttgagcgcagtctggcggctattccggttgaagtgaaaagcgttacgacagttgaagaactgcttgcccagcaaaagcgtgcgatgctgcgccgaccctgcgttgtcgcaagcgcaactgaacgatgcgacgtttgctgcatcgccggaaggaaaaacgctgcgaaccgatctgctgcaacgggcatctacctgaaacaatggtatggcacttcggtttttgaaggcatccgttgctacgactcgcacaaaggaccggttgtattccgccatcgtgagcatatgcagcgtctgcatgactccgccaaaatctatcgcttcccggtttcgcagagcattgatgagctgatggaagcttgtcgtgacgtgatccgcaaaaacaatctcaccagcgcctatatccgtccgctgatcttcgtcggtgatgttggccgggcagctccctggtatcttccgtgttcttcatgctgctgccggaacaggtttacgtttacgctggcagaaatcgcgattcagtccgctgattccgctgcggccttcggtatcgaaccgcgcgttgctatgctctcctactccaccggtacttctggtgcaggtagcgacgtagaaaaagttcgcgaagcaactcgtctggcgcaggaaaaacgtcctgacctgatgatcgacggtccgctgcagtacgacgctgcgcagaaaaaagcatcagacagtggttttattcagcagcaaaccaaagataatcagacacgcgacggtgagccagattggcgcaggcagaccgaaccagttggcgtaaccaagggcaaagaagctttcatcttcgataccgaccgtttaccgtctgaaatgatgtacgccagacctcgaacaatctctgaaagcggccggattcccggaaaaacaaatttatcag

SEQ ID NO: 24827 - DNA, 326 bp, Homo sapiens
  SIMILAR (290)..(174): 721254mologous to Escherichia coli K12 carbon starvation protein,accession number AE000165,Smith-Waterman Score=133.
ggtcggcgtggtcccagaagagatcagcgcatggaagccagacaccgcgccacaggcgatggtgataaacaggaacgggaacaggttaccggtccataccgggccagtgccatcgacaaatttggtcagcgcaggcatggtcagcgtcgggcgcataatcaaaatgcctaccgccagaccgacgatagtcccgattttcaggaaggtagagaggtcggactttctgccacccagccgccagagataatggcgaaaatcaggaataccagaccgatgaccgacacttcgccatatacgtccccggacaaagatagggcagggaccag

SEQ ID NO: 24828 - DNA, 410 bp, Homo sapiens
  SIMILAR (3)..(131): 971254mologous to Escherichia coli K12 carbon starvation protein,accession number AE000165,Smith-Waterman Score=216.
gctggcagaaagcgtttagcccggatgcgaaagtcggcttcctggccattgctaataagtaccaggcaatgatcgacagcggcaatattccgtcgcagtatactgagtcacagctggcgcaactggtgttcaaacaaaatggcgaagtgataccagaacgccacatccatcatgccgcccagcgcgccgtgcagaatggtcggcgtggtcccagaagagatcagcgcatggaagccagacaccgcgccacaggcgatggtgataaacaggaacgggaacaggttaccggtccataccgggccagtgccatcgacaaatttggtcagcgcaggcatggtcagcgtcgggcgcataatcaaaatgcctaccgccagaccgacgatagtcccgattttcaggaaggtagagag

SEQ ID NO: 24829 - DNA, 780 bp, Homo sapiens
  SIMILAR (1)..(513): 931254mologous to Escherichia coli K12 carbon starvation protein,accession number AE000165,Smith-Waterman Score=806.
  misc_feature (1)...(780): n = a,t,c or g
atgctggtgggttacggttttgtggcggcggtgctgccggtgtggttactgctggcnccgcgtgactacctctctaccttcctgaaaatcgggactatcgtcggtctggcggtaggcattttgattatgcgcccgacgctgaccatgcctgcgctgaccaaatttgtcgatggcactggcccggtatggaccggtaacctgttcccgttcctgtttatcaccatcgcctgtggcgcggtgtctggcttccatgcgctgatctcttctgggaccacgccgaagatgctggcgaacgaagggcaggcgtgctttatcggctacggtgggatgttaatggaatccttcgtggcgattatggcgctggtttccgcctgtatcatcgatccgggcgtgtattttgccatgaacagcccgatggcggtgctggctccggcagggacggcggatgtggtcgcttctgccgcgcaggtgttttggtcagttggagaagcgcagtctctgctggagcagattcgccatattgacggtgattttgaattcgaaacctattactcgctctcttgccacaactgcccggacgtggtgcaggcgctgaacctgatgagcgtactgaacccgcgcatcaagcacactgcaattgacggcggcaccttccagaacgaaatcaccgatcgcaacgtgatgggcgttccggcagtgttcgtaaacgggaaagagtttggtcagggccgcatgacgttgactgaaatcgttgccaaaattgatactggcgcggaaaac

SEQ ID NO: 24830 - DNA, 1703 bp, Homo sapiens
  SIMILAR (462)..(503): 851254mologous to Escherichia coli ribonuclease I,accession number M55687,Smith-Waterman Score=74.
atgaaagcattctggcgtaacgccgcgttgctcgcggtttctctgcttcccttctcttctgccaacgccttagcgttgcaggcaaaacagtatggcgattttgatcgctatgtcctggccctctcctggcaaaccggattttgccagagtcaacacgatcgaaatcgtaacgaacgagatgaatgtcgcctgcaaaccgaaacgaccaacaaagctgattttctgaccgtacatggtctgtggccaggattgcctaaatcggttgctgcccgtggtgttgatgaacgccgctggatgcgcttcggttgcgctactcgcccaatcccgaatctaccagaagcgcgcgccagccgaatgtgttcatcgccggaaaccggattatcactggaaacggccgctaaactaagtgaagtcatgccaggagctggcggacgttcctgcctggaacgctacgaatatgccaacacggtgcctgcttttggtttgatccggacgcatacttcgatttgtcagatctgcctgactgaacgcctgatagccgcctttcagtttatccgggaacggaatggattcgatctggcctttcttgtgataagccagcgtacaggcagctaccgcctggaaggattccgcacgaccagtaccgagattgaagatgccggaaacgccattttccaggaaccacagattcacatcagccacgtcgcccacatagacgaatcctgtttgaagttctcgctaccttcaaacagcttcgtggtctgcggaagaagcgtacaggaacgggatttcacgctccaggcagtagtgcagcagctccttggagtattgatagttgttatccatcatatacttgccgtcccactcggtggtggaagagcacgcgccttcgtggaaaatcgcttcgacatcgccgaactcttcgccagccataatctggatcaggaagtcttccttatccatatagtcttcgatattcagatccaccaggttcacaaactttggtgcggttgtccaccaccagaatatcggggattccgtcttgccatgccatgcatggtcgactcctatgaggatccccacgtttatctctccaccgcttacacctacgccaaacatcgccctgaccacgctgacgatgaaaccacctctttcatgcagtttggtatctggtacgaatacggcggcggacgtttcgccacggcttttgatagccgcttctacatgaaaaatgcctctcacgatcccagcgaccaaatcttcctgatgcaatatttctactgtttttccgcccatgccgctaacgccgacaattataaaaacgtgattaaccgtactggcgcgccgcagtacatgaaggattacgattacgacgatcaccagcgttttaatccgtttttcgatctcggagcctggcatggtcatctgttgccagacggccctaacaccatgggcggctttccgggcgttgcgctgctgacggaagagtacatcaactttatggccagcaatttcgaccgcctgaccgtctggcaggacggcaagaaagtcgactttacgctggaggcatacagtattcccggtgcgctggtgcaaaaactgacagcaaaagatgtgcaagtcgaaatgactctgcgcttcgccacgccgcgcacgtcactactggaaaccaaaatcaccagcaataaaccgctggatctggt

SEQ ID NO: 24831 - DNA, 3261 bp, Homo sapiens
  SIMILAR (2278)..(3237): 981254mologous to Escherichia coli Acriflavin resistance protein F (EnvD protein),accession number D90845,Smith-Waterman Score=1551.
atgtgcgaactcgatattttacacgactctctttaccaattctgccccgaattacacttaaaacgactcaacagcttaacgttggcttgccacgccttacttgactgtaaaactctcactcttaccgaacttggccgtaacctgccaaccaaagcgagaacaaaacataacatcaaacgaatcgaccgattgttaggtaatcgtcacctccacaaagagcgactcgctgtataccgttggcatgctagctttatctgttcgggcaatacgatgcccattgtacttgttgactggtctgatattcgtgagctaaaacgacttatggtattgcgagcttcagtcgcactacacggtcgttctgttactctttatgagaaagcgttcccgctttcagagcaatgttcaaagaaagctcatgaccaatttctagccgaccttgcgagcattctaccgagtaacaccacaccgctcattgtcagtgatgctggctttaaagtgccatggtataaatccgttgagaagctgggttggtactggttaagtcgagtaataggaaaagtacaatatgcagacctaggagcggaaaactggaaacctatcagcaacttacatgatatgtcatctagtcactcaaagactttaggctataagaggctgactaaaagcaatccaatctcatgccaaattctattgtataaatctcgctctaaaggccgaaaaaatcagcgctcgacacggactcattgtcaccacccgtcacctaaaatctactcagcgtcggcaaaggagccatgggttctggtccatgcggcgagcggcgaaatcctgggtttgtttgtctacgtttttaatcgcttgttcgatggcgtcaacatcatcgccctgcgccacttcactcagaccgtaagacggtttgacctgaatagacgcctcaacgccggtggatttctccatcgccgtcacgctcaaaagaccgtcggcatcgacctggaacgtcacgcgaatatgcgcaccgccagccgacatcgccgtctgaccatctttaaaggtggtgaaatcctgagcgcgggccaccggaatagtggtattacgcggaatcactttctccaccaggccgcccatcgtttcgaggcccagcgacagtgggatcacatcaagcaacagcatttcgctgtctggcttgttacccaccagaatatccgcctgaatcgccgcgccaatagcgacgactttatccgggtcgatggaagtcagcggtggacgaccgaaaaattcgcctacccgttcacgcaccagcggcacgcgagtagaaccgcccaccatcaccacttccagcacttcatcagcttctacacccgtcgtctttcagagcgcgacgacaagccatggcgcgatcagttcattgaattgttcacggctgatttcgccctgccagcccgcaacgttaacggtcacggagtccgcatgtcagcgcgattttgctcaatgcgcatccagcagttcactgaccgttacgtcgatcaggatggaatcttagagtcgactctggatgaagaaatgttgcaggatctgctgggcgtggtgtctcctggcctgaagcggaccgattcactgcctgctaacctgctggcaacagcgctgtgcgtactggcgtggggctactttctccatcagggcgtggtcgatccgctgggcggcattaacactctgtggccgctgtttggtattgccaaccagatgctggcagggatggcgctgatgctctgtgccgtggtgttgttcaagatgaaacgtcaacgttacgcctgggtggcgctggtaccaacggcctggctgctgatttgtaccctgaccgcaggctggcagaaagcgtttagcccggatgcgaaagtcggcttcctggccattgctaataagttccaggcaatgatcgacagcggcaatattccgtcgcagtatactgagtcacagctggcgcaactggtgttcaacaaccgtctggatgccgggttaaccatcttctttatggtggtcgtggtggttctggcactgttctcgattaagacggcacttgcggcattgaaagatccgaagccaacggcgaaagaaacgccgtatgaaccaatgccggaaaatgtcgaggagatctccgcagatgaaaacgctgatacgctccagttaattgcggcagcacatcatcctgacccagcaaagcgctttgcaccagaattccgtaagcgaattgggtgcgttggagaacatctccggttgcggcaaaaggtcgattttccggtgattatcgtcagcgcctcgctgcccggtgcgtcaccagaaacaatggcgtcttccgttgccacgccgctggagcgctcacttgggcgcattgccggagtcagtgaaatgacctccagcagttcgctcggcagcacgcgtattattttgcagtttgattttgaccgggatatcaacggcgcacgcgcggcgatcaacgctgcacaaagtttgctgcccagtgggatgcccagccgcccgacctatcgcaaagcgaacccgtcggatgcgccaattatgatcctcacgctgacgtccgatacttattcgcagggtgaactgtacgatttcgcctcgacgcagctggctccgacgatttcgcaaatcgacggtgttggtgatgtcgatgtcggaggcagctcactgcccgccgtacgcgtcgggctgaatccgcaggcgctgtttaatcagggcgtgtcgctggacgacgtacgcaccgccgtcagcaatgccaacgtgcgtaaaccgcagggcgcgctggaagatggcactcaccgctggcagatccagaccaatgatgagctaaaaaccgccgctgaatatcagccgttgattattcactacaacaacggcggcgcggttcgtctgggcgatgtggcgacggtgaccgactcagtgcaggatgtgcgcaacgccgggatgaccaacgccaaaccggctattttactgatgatccgcaaactgccggaagccaatattatccagacggttgacagcatccgggcaaaattaccggagttgcaggaaaccattccggcggcgattgatctgcaaattgcccaggatcgctcccccaccattcgcgcctcgctggaagaagtcgagcaaacgctgattatctcggtggcgctggtgattctggtggtgtttttattcctgcgctcgggtcgcgccactattattccgccgtttcggtgccggtttcgctga

SEQ ID NO: 24832 - DNA, 522 bp, Homo sapiens
  SIMILAR (127)..(393): 671254mologous to Escherichia coli K12 carbon starvation protein,accession number AE000165,Smith-Waterman Score=284.
atgcggaacgaggcaggcgtgcttatcggctacgggggatgtaatggaatccttcgggcgatatggcgctggttcgcgtatcatcgatccgggcgtgtattttgccatgaacagcccgatggcgggctggctccggcagggacggcggatgtggtcgcttctgccgcgcaggtgtcgatcatttcccgtgcgggcggtgcgccgacgctggcggtggggatggcctacattctgcacggcgcgctgggcggcatgatggatgtggcgttctggtatcacttcgccattttgtttgaagcactgtttattctgacggcggtggatgcaggtactcgtcctcacaagtgcccagactgcgacatggcctttgtgaccagtggagaattggttcggcatcgtcgttacaaacacacccacgagaagccattcaagtgttccatgtgcgattacgccagtgtagaagcagaccatgatttatttcaatacaaagctataactactacccaaacggacttaagatga

SEQ ID NO: 24833 - DNA, 2151 bp, Homo sapiens
  SIMILAR (442)..(1254): 801254mologous to Shigella dysenteriae TyrR,accession number AF153317,Smith-Waterman Score=1071.
atgagcgagcgttttaagctcaacgacgttgaagatattctgccggagtcattgccgctcggcattcgccagcggctttcgctggcggtggcgttttcatcaacaatcgcgctgcgcgaacgatcaggtatcttcatgttccacgccttcaacgggcgtaacagacgatatgcccgccacgatattgagcatatcgatctcaacgcgccggaagaagaaatccgccagttgctggagcgaaatcagcatacgcggctggtggttaccgaccgcgggaaaaccacgtcgattcttcatctgttagcccataaagatcccaacgaaaaatgggcggtactggttaatgaatttggggaagtcggaattgatggtgctttgctcgccgatagcggcgcattgctgaaagagatccccggcggctgcatgtgctgcgttaatggtttacccatgcagagccatgatttacgcggtatggagatggatcccattgggcgaatctacctcaattttgctgaactggagtttgagagtttcagcagtctgatggccgaaatacgccgtattgcgggtgttaccgatgtgcgtactgtcccgtggatgccttccgaacgtgagcatctggcgttgagcgcgttactggaggcgttgcctgaacctgtgctctctgtcgatatgaaaagcaaagtggatatggcgaacccggcgagctgtcagctttttgggcaaaaattggatcgcctgcgcaaccataccgccgcacaattgattaacggctttaattttttacgttggctggaaagcgaaccgcaagattcgcataacgagcatgtcgttattaatgggcagaatttcctgatggagattacgcctgtttatcttcaggatgaaaatgatcaacacgtcctgaccggtgcggtggtgatgttgcgatcaacgattcgtatgggccgccagttgcaaaatgtcgccgcccaggacgtcagcgccttcagtcaaattgtcgccgtcagcccgaaaatgaagcatgttgtcgaacaggcgcagaaactggcgatgctaagcgcgccgctgctgattacgggtgacacaggtacagagcgtgaggcggattgtttcagcacagccgtacggttaaccgagcatgtggggaggataaacagtgtttctgtggaaggtagtgtcaggttttgcgcccacgcacaaagcgcctcaacgttctgtttttgcaccgcatgcagcaccagtggcggcagcgagaactggtacacaatatgtgcttcgtcatcgcctgcgccaaaagaaagcgagcgccattcgttcaggccgcggaagaagtaccggccaggacagcatgacgacgaattcccgctggctatctggcagaccggctccggcacgcaaagtaacatgaacatgaacgaagtgctggctaaccgggccagtgaattactcggcggtgtgcgcgggatggaacgtaaagttcaccctaacgacgacgtgaacaaaagccaaagttccaacgatgtctttccgacggcgatgcacgttgcggcgctgctggcgctgcgcaagcaactcattcctcagcttaaaaccctgacacagacactgaatgagaaatcccgtgcttttgccgatatcgtcaaaattggtcgtactcacttgcaggatgccacgccgttaacgctggggcaggagatttccggctggcctgcctcacgtagcggaactggctcttggcggtacagcggtgggtactggactaaatacccatccggagtatgcgcgtcgcgtagcaagatgaactggtactcgacccgtgcgagcgacggcggacacgcgagcgatgctgtgcggactgcgcaagcagctgacagggaattgcgggctcccgtaagagacgaactcaacgcgagcattacgagcaaaacacgattggccgagagcacgagccttgccgagtgggtgaaagcctcgccgcatgatgatgataagccgattttgctaccgggcgagtgggaagtgaacacgcgtcgcgaacggcagaagcaggggattccactggatgcgggaagctggcaggccatttgtgatgcagcgcggcagattggtatgccggaagagacgttgcaggctttctgtcagcagtag

SEQ ID NO: 24834 - DNA, 2235 bp, Homo sapiens
  SIMILAR (1459)..(2232): 1001254mologous to Escherichia coli Ferredoxin I,accession number D90724,Smith-Waterman Score=1354.
cgccgggcaagaatccatgggctgtttgtttttaccgcccctaccgtcgcctcctggttaaatggtcacaaaaaaaaattggccaacccccggggtgattccgctggtggcccccttatatccaaaggccacataccccgcaaagcggcgaaaatattggtgtaaaaccccttctctaatagcccgtgggaaacatacccggttgcgttcaccattccgctggcgctgtttatggggatctacctgcgctatctgcgtccggggcgtattggcgaagtgtcggtcatcggtctggtattcctgattttcgccattatctctggcggctgggtggcagaaagtccgacctgggcaccgtactttgactttaccggcgtgcagttgacctggatgctggtgggttacggttttgtggcggcggtgctgccggtgtggttactgctggccccgcgtgactacctctctaccttcctgaaaatcgggactatcgtcggtctggcggtaggcattttgattatgcgcccgacgctgaccatgcctgcgctgaccaaatttgtcgatggcactggcccggtatggaccggtaacctgttcccgttcctgtttatcaccatcgcctgtggcgcggtgtctggcttccatgcgctgatctcttgtgggaccacgccgaagatgctggcgaacgaaggcaggcgtggctttatccgcttcggtgggatgttaatggaatccttcgtggcgattatggcgctggtttccgactgtatcatcgatccgggcagtcattgctcccatcgctttggcgttgatcgcctcgcgccagtgactctctttactgataccgtagctctcttcatagacaaagagcttgatatcatcaatgtcatcaatatcttcgccgccggtgtagcggaaaatctgactaccgccgcccagatcgatgtggctgacggcggctaccgtaaattcctcacccggcagcgcaatcagcaattcatcttccagcaaacgatacgcttacgtgtcgagcgcgctgggaaaaaccagacctatttattcttattgacagccgtatcctatatgtgctctaaagatgtacaaggttggagagcagaacagcgtctgtatgtcctgtcatctgccggaacagttgcaaaaagcgttctggccgcacgatgtccacgagcagccatgacctggtctcgtcgccagtttctcaccggcgtcggcgtgctggcagccgtcagcggcaccgcagggcgcgtggtggcgaaaacgttgaatatcaatggggtgcgttacggcatggtgcatgacgagtcgttatgcatcggctgtaccgcctgtatggatgcttgtcgggaagtgaacaaggtgccggaaggcgtctcgcgcctgacgattattcgtagcgagccgcagggcgaatttcctgatgtgaaatatcgcttcttccgcgtgagtgaatatatcaccctgaccgtgcggcggattgatgacggtgtcggctcccagtggctgacgcgcgatgtaaaacgcggtgattatctctggctttcggacgcgatgggggaatttacctgcgacgataaagcagaagataaattcctgttgctggcggcaggctgcggcgtcacgccgattatgtcgatgcgtcgctggcttgcgaagaaccgtccacaggccgatgtgcgggtgatctacaacgtgcgtacgccgcaggatgttattttcgccgatgagtggcgtaactatccggtaacgctggtggcagaaaataacgttaccgaaggctttatcgctggtcgtctcactcgcgaactgctggcaggtgtacctgacttagcttcacgtaccgtgatgacctgcggcccggctccgtatatggattgggtagagcaggaagtgaaagcgctcggcgtgacgcgtttctttaaagagaaattcttcaccccagtagcagaagcggcgaccagcggtctgaaattcaccaaactgcaaccggcacgagaattttacgccccggttggcaccacgctactggaggcgctggaaagcaataacgttccggttgtcgctgcctgccgtgcgggtgtttgcggctgctgtaagacaaaagtggtttccggtgaatatacggtgagcagcacaatgacgctgaccgacgccgaaatcgctgaaggttacgtactggcctgctcctgccatccgcagggggatttggttctcgcataa

SEQ ID NO: 24835 - DNA, 541 bp, Homo sapiens
  SIMILAR (225)..(1): 1001254mologous to Escherichia coli fumarase,accession number X00522,Smith-Waterman Score=387.
  misc_feature (1)...(541): n = a,t,c or g
ttccggatattcaacacattccaggctcttaatacttccctgcgccaatacagcggccggaccaccgatactgccaaggtagaagccgccgtgttttttacaggcatccgtcacctgctggctgcggttgcctttcgccagcatgatcatacttccgccctgcgcttgcagttgatcgacataagaatccatccgtccggcggtcgttgggccaagagaaccggagggcataaccttccggcgttttggccggacccgcgtagtaaatcggatgatctttgatgtactgcggcacctcttcaccgttatccatccgctctttcagtttggcgtgacatatatcacgaccgacgataatccgngtagaaacgggatactgcgacaactgtgcgaggatctctttcatcggacggttaaggtcaacgcgcaccgcttcgccttctcccgctttgcgcacgtcttccgggatatatttgcctggattatgttccagtttttcgatccagatcccctgacggttgatcttcgctttgatattacg

SEQ ID NO: 24836 - DNA, 1053 bp, Homo sapiens
  SIMILAR (805)..(86): 991254mologous to Escherichia coli K12 carbon starvation protein,accession number AE000165,Smith-Waterman Score=1219.
cggacgtaatccgaagactggcgataaagtacaactggacaggcaaaataccgtttcccttcaccttttttacaaacccttgcgctttcgccgttggcttcggatctttcaatgccgcaagtgccgtcttaatcgagaacagtgccagaaccaccacgaccaccataaagaagatggttaacccggcatccagacggttgttgaacaccagttgcgccagctgtgactcagtatactgcgacggaatattgccgctgtcgatcattgcctggaacttattagcaatggccaggaagccgactttcgcatccgggctaaacgctttctgccagcctgcggtcagggtacaaatcagcagccaggccgttggtaccagcgccacccaggcgtaacgttgacgtttcatcttgaacaacaccacggcacagagcatcagcgccatccctgccagcatctggttggcaataccaaacagcggccacagagtgttaatgccgcccagcggatcgaccacgccctgatggaggaagtagccccacgccagtacgcacagcgctgttgccagcaggttagcaggcagtgaatcggtccgcttcaggccaggagacaccacgcccagcagatcctgcaacataaagcgcgcagcacgcgtacctgcatccaccgccgtcagaataaacagtgcttcaaacaaaatggcgaagtgataccagaacgccacatccttcatcccgcccagcgcgccgtgcagaatgtaggccatccccaccgccagcgtcggcgcaccgcccgcacgggaaatgatcccagggcaggctcatgggccagaggaatatctgagcccgtcttctgagctcttctcagatgcgtccatcaatagctggtgttctcttggttactcacttgatcacctcacccaacccatggcagatgggagggagaagaggcttggagccatctcatgacttaaatagcctactcacaaacatatcccaaaacggaagtgtcaggaggctgaggtatgccccttctcttcccgtacaagaatacagt

SEQ ID NO: 24837 - DNA, 3019 bp, Homo sapiens
  SIMILAR (190)..(1032): 1001254mologous to Escherichia coli K12 carbon starvation protein,accession number AE000165,Smith-Waterman Score=1441.
atgtcacaagatcctttccaggaacgcgaagctgaaaaatacgcgaatcccatccctagtcgggaatttatcctcgaacatttaaccaaacgtgaaaaaccggccagccgtgatgagctggcggtagaactgcacattgaaggcgaagagcagcttgaaggatatgctcccgtgttggcccccgaaagcggcattttgattatgcgcccgacgctgaccatgcctgcgctgaccaaatttgtcgatggcactggcccggtatggaccggtaacctgttcccgttcctgtttatcaccatcgcctgtggcgcggtgtctggcttccatgcgctgatctcttctgggaccacgccgaagatgctggcgaacgaagggcaggcgtgctttatcggctacggtgggatgttaatggaatccttcgtggcgattatggcgctggtttccgcctgtatcatcgatccgggcgtgtattttgccatgaacagcccgatggcggtgctggctccggcagggacggcggatgtggtcgcttctgccgcgcaggtggtgagtagctggggctttagcattacaccagatacgctaaaccagattgccagcgaagtgggtgaacagtcgatcatttcccgtgcgggcggtgcgccgacgctggcggtggggatggcctacattctgcacggcgcgctgggcggcatgatggatgtggcgttctggtatcacttcgccattttgtttgaagcactgtttattctgacggcggtggatgcaggtacgcgtgctgcgcgctttatgttgcaggatctgctgggcgtggtgtctcctggcctgaagcggaccgattcactgcctgctaacctgctggcaacagcgctgtgcgtactggcgtggggctacttcctccatcagggcgtggtcgatccgctgggcggcattaacactctgtggccgctgtttggtattgccaaccagatgctggcagggatggcgctgatgctctgtgccgtggtgttgttcaagatgaaacgtcaacgatcagtcggtaccgatcatgctggtgaaaggacgcagcagcaggtgacggatgcctgtaaaaaacacggcggcttctaccttggcagtatcggtggtccggccgctgtattggcgcagggaagtattaagagcctggaatgtgttgaatatccggaactgggaatggaagccatctggaaaattgaagtggaagatttcccggcgtttatccttgtggatgataaaggaaatgacttcttccagcagatacaactcacacaatgcacccgctataagctgtggggcgcacaaactcaacgctcgctggagcatttccgcatttcgacggagaaaatgcccacctcactgattcatgcgctggcgctaaccaagcgtgcagcggcaaaagttaatgaagatttaggcttgttgtctgaagagaaagcgagcgccattcgtcaggcggcggatgaagtactggcaggacagcatgacgacgaattcccgctggctatctggcagaccggctccggcacgcaaagtaacatgaacatgaacgaagtgctggctaaccgggccagtgaattactcggcggtgtgcgcgggatggaaccggaactggctcttggcggtacagcggtgggtactggactaaatacccatccggagtatgcgcgtcgcgtagcagatgaactggcagtcattacctgtgcaccgtttgttaccgcgccgaacaaatttgaagcgctggcgacctgtgatgtcgattttgtgatccggcgcaggttccgccttatatcatgcggctaccggagtaaggcccaaatagacaccgcaacgcagtcccgtaaggctcccgcgcaccggtattatcgttgttgcaaggcgattgcgatatttcccgtaggttttgtcgctttcgacagtcgcgactggcgcgaatattctgacccatcatttgttataacgtcgccggtattgttatcttccttggctgtgcgtggagaagaagcacgtccggcagaacatgacgacacaaaaacacccgcaattacctcgacatcttctccttcatttcgtttttacggcgaattaggggttggtggatatatggatttagagggtgagaataaacataaatacagcgacggtacctatattgaaggtggcctggagatgaagtacggctcctggttcggcctgatttacggcgaaggctggacccgtgccaggccgacccacgacggcaatgcctgggtgcctagaccatagctggggtggtttcgagggcggaattaaccgtttctatggcggttatcgtaccaatgatggcaccgaaatcatgctcagtctgcgtcaggattcctcgctggatgacctgcaatggtggggcgatttcacccccgatctgggctacgtcattcccaatacccgcgacattatgactgcgctgaaggtacagaacttaagcggcaactttcgttatagcgtcaccgcgactcctgccggacatcatgatgaaagcaaagcctggctacatttgggcaaatacgatcgctatgacgacaaatacacctatccggcaatgatgaacggttacatccagtatgaccttgccgaaggcatcacctggatgaacggtctggaaatcaccgacggcacaggacagctctatctcacgggcctgctaactcctaactttgccgctcgcgcctggcaccataccggacgcgccgacgggctggacgtaccgggaagtgaaagtgggatgatggtgagcgccatgtatgaagcgttaaagggcgtttatctctccaccgcttacacctacgccaaacatcgccctgaccacgctgacgatgaaaccacctctttcatgcagtttggtatctggtacgaatacggcggcggacgtttcgccacggcttttgatagccgcttctacatgaaaaatgcctctcacgatcccagcgaccaaatcttcctgatgcaatatttctactggtaa

SEQ ID NO: 24838 - DNA, 2913 bp, Homo sapiens
  SIMILAR (916)..(1680): 941254mologous to Escherichia coli No definition line found,accession number U00039,Smith-Waterman Score=1275.
atgagccagactttttaccgctgtaataaaggagaaatcatgagcaaaactatcgcgacggaaaatgcaccggcagctatcggtccttacgtacagggcgttgatctgggcaatatgatcatcacctccggtcagatcccggtaaatccgaaaacgggcgaagtaccggcagacgtcgctgcacaggcacgtcagtcgctggataacgtaaaagcgatcgtcgaagccgctggcctgaaagtgggcgacatcgttaaaactaccgtgtttgtaaaagatctgaacgacttcgcaaccgtaaacgccacttacgaagccttcttcaccgaacacaacgccaccttcccggcacgttcttgcgttgaagttgcccgtctgccgaaagacgtgaagattgagatcgaagcgatcgctacgaggcaaaatgctgaataccgcgtcaatgccgtactggtgcaccacttccacgccatcacccaatacgccagcaatcccaatcaccggtacattaaactgcttcgccaccgacgccacacccagcggcgctttaccgcctgccgtttgcgagtcgatgcgcccttccccggtaatcaccagtgctgcgccctgcactgcctgcgcaagattgaccgcattcaacacaatttcaatgcccggtttaatatccgcattgagaaataccgccgccgcaataggaggaagagaccaggcttggaaaagttcagtcgccggaaacagggccccacgcctccggaagccccccgtgaaatccatgccgccaaagacccaagagcgaacgcccgcgaaaccggtgacggacaatccgaggatccccccgaaagctgcttgcggggagccaaccccggagcaattgcccgaccccgcgatgaatcggtctcgctgcagaagaggcacccggaaactgtacccctgaccgaccaacctggtgaccgggcatccgtgtcgctgttacgctggctgaaagaccccgaaccagaacgctacgcgcaaattggctgcgtgatgatgacgcacgactacctgcgctggtgtttaactggcgtcaaaggctgtgaagagagcaatatttccgagtccaacctctacaacatgagtcttggggaatatgacccgtgcctcaccgactggctggggatcgctgaaatcaatcacgccctgccgcctgttgtcggatctgccgaaatctgcggggagatcaccgctcagacagccgccctgaccggtctgaaagcgggtacgcccgttgttggcggcctgtttgatgtggtttccaccgcactctgcgccgggatcgaagacgaatttaccctcaatgcggtgatggggacctgggcggtgaccagcggcataacccgcggtttacgtgacggtgaagcgcatccgtatgtctatggtcgctacgttaacgatggtgaatttatcgttcacgaagccagccctacctcttccggcaacctcgaatggtttaccgcacagtggggagaaatctcgtttgatgagatcaatcaggccgttgccagcttgccgaaggctgggggcgatctctttttcctgccgttcctgtacggcagcaacgccggactcgagatgaccagtggtttctacgggatgcaggccattcacacccgcgcgcacctgttgcaggccatctatgaagggtgtgcgaatgacgaccaacgttttagcgccctgccttgccgcctctttaaccggaatcgcatcactgatcccgccatccaggtagttaatgccttccagcgacactccgctacgataaaagccagaaaattaaggcagtaccttaatttaagcgtcaggtggatgtttttgctcttatttcgatcaatgaataaacaggaaaacaggggggttttatatcagcaggatctatgtgaacgctattcaggacgggtcacacgcgcaaaaaaaagccagcctgtttccagactggcttttgtgcttttcaagccggtgttacatcgcttttttggtcaactcgataacgcgcagctgcgcgatcgctttggccagttccgcagacgcctgagcgtaatctacgtcgccgtgagagctgctaatgtgctcttcagccttacgtttcgcttccatggctcgcgcttcgtcgagatcctggccgcgaattgcggtgtcggccagaacggtcacgttgccaggctgcacttcaagaatgccgccagacagatagataaactcttcgtgaccgtgctgtttcacgatgcgaatcataccaggcataatgtcgtttctgttctagcgcgctatgtgatgagtgcgtgtcttagtctgctcctccgccacgaaaaagatttcgagcatacccccgtgttacaccgcctgatattttacagcggcctagcggtatacgtgcgagaaccgctctgttatagagaatgtccgagaaacccgtggtggtgcgactattttacacgcaccctttattaccgcgttattattccccttacgtgtttttggcataggcctgataccaggttcctccttatgacctttctggccaaagcgtcaatgccaaacgtgtttcaaatttcggggagttatcgcctgaccaccaaatttattgccgtcgggcagaaggcgctgtcttcgctgaatatcattcatatcgccgctccgcatcttgaggcactgaacatcgccactggtgaaaccattaacttctccagccgcgaagacgatcacgctattttgatttataagctggaacccacaaccgggatgctgcgaacccgtgcctatattggccagcatatgccgctctactgttccgcaatgggcaagatctacatggcgtttggtcacccggactacgtgaagtcatactgggaaagccatcagcatgagatccagccgtaa

SEQ ID NO: 24839 - DNA, 982 bp, Homo sapiens
  SIMILAR (1)..(735): 911254mologous to Escherichia coli Protease II (EC 3.4.21.83) (Oligopeptidase B),accession number D90827,Smith-Waterman Score= 1180.
atggcgatgccgagccgtttgtttttctgccgcggccgcaaagatcacgaatacagccttgatcactaccagcatcgtttttatctgcgttccaaccgccacggcaaaaactttggcttataccgtacccgtatgcgtgatgagcaacagtgggaagagttaattccgccacgcgaaaacatcatgctggaagggtttacgctgtttaccgactggctggtggttgaagagcgtcagcgcgggttaaccagtttgcgccaaattaaccgcaagacccgggaagtcattggtattgcctttgatgatccggcctatgtgacctggattgcctacaatccagaacctgaaaccgcgcgattgcgttatggttattcttccatgactacaccagacactttgtttgaactggatatggataccggtgagcgtcgtgtattaaaacaaacggaagttcctggtttttatgcggcgaattaccgcagtgaacacctgtggatagtcgcccgtgatggcgtcgaagttccggtttcgttggtctaccatcgcaaacattttcgcaaaggacacaacccgttgctggtgtatggctatggttcttacggcgcaagtattgatgccgatttcagttttagccgcttgagtttgttagatcgtggctttgtctacgccattgtccatgttcgcggcggtggttgcaaaatcaacctggtcgtcgataacggcaaaatcgtccgggcggaggcagcgcaggggaaaaccaaccagggtaccctgtgtctgaagggttattatggctgggacttcattaacgatacccagatcctgaccccgcgcctgaaaacccccatgatccgtcgccagcgtggcggcaaactcgaacctgtttcctgggatgaggcactgaattacgttgccgagcgcctgagcgccatcaaagagaagtacggtccggatgccatccagacgaccggctcctcgcgtg

SEQ ID NO: 24840 - DNA, 3868 bp, Homo sapiens
  SIMILAR (1825)..(2811): 831254mologous to Escherichia coli Protease II (EC 3.4.21.83) (Oligopeptidase B),accession number D90827,Smith-Waterman Score= 1437.
atgaaagaattctcatcagaaaaaatatatgattacatcgatataatcattgaagattatgaaaataccaaagaaaatgcttatctggtcgtcccccaaattaattatactatggatttaaacatagaagactctagctcagaagagttactttcagataataccctcgagaaagacgaaaattctccggacaatggctttgagcttttgtctgctcgtcgtcctttcacattgcgactgcctgtgcgtctgcatcgcccttaccttgcggcgaatcttagccgtaagcaattgctggaggcgttacgttaccattatgcgttactccgcgaatgtatgtcggcggaagaattcagcttatatttgaatacccccgggctgcaactggcgaagctggaaggcaaaaacggcgagcagttcacgcttgagctgaccatgatgatctcaatggataaagaaggtgacagcacaatcctgttccgcaacagcgaaggtattcctctggcagagatcacgtttaccctgtgtgaatatcaggggaaaagaacgatgtttattggcggactgcaatggcgcaaaatgtggaaattccacatcaggaaatccagaatgcgacgaaagcctgccacgggctatttcccaaacgcctcgtgatggaagcggcctgtctgtttgcccaacgtttgcaggtagagcagattattgccgtcagcaatgaaacgcatatttaccgcagcctgcgttatcgcgataaagaaggcaagatccacgctgattacaacgctttctgggaatcggttggcggcgtatgtgatgctgaacgccattaccgccttccagcacagatagcacgaaaagagattgccgaaatcgccagtaaaaaacgggctgaataccgtcggcgctatgagatgctcgacgctattcagccacaaatggccacgatgtttcgcggttatccccgcgaacgcgcgcccgccccagagcgcgttttacctctttttccgcgcgtcttttcgggtctcccccgaggtctccgccatgattgggggatttgcggtccttggatgatttttatcaccctgatgctgccggttgaagtacgtatcttcccgacggtggaagtcatcgccaacctgcagatgctcgacagctacgccggtttaacgctgccgctgatggcctcggcgaccgctactttcctgttccgccagttctttatgacgctgccggatgagctggtggaagccgcgcggatcgacggcgcatcgccaatgcgcttcttttgcgacatcgtttttccgctctccaaaactaatctggcggcgctgtttgtgatcacctttatctacggctggaatcagtatttgtggaccgttgttgattattaccgatgtggatctcggcaccaccgtggcagggatcaaagggatgatcgctacaggcgaaggcaccacggaatggaactcagtgatggtggcgatgttgttaacgcttatccctccggtggtgattgttttagtgatgcagcgtgccttcgtgcgcggcctggtcgatatgagaaataagatggcaggactgaaattacaggcagtaaccaaaagctgggatggtaaaacccaggtcattaaaccgctgacccttgatgtggcggatggcgaatttatcgtgatggtcgggccgtctggctgcgggaaatcgacgctgctgcgcatggttgccgggctggagcgggtgacagaaggcgatatctggatcaacgaacagcgcgtttccgaattacgccttatcgggtatatgtcgagaaaaatgggtggggggaaaaaccggagggaaccacatatcgacgttaaaaggggcatctttgggctgtccataacccccgaattcagtgagccactggcagaagattttctttcccgacgccagtacggcattcgttttcgtaatctggaaactggtaactggtacccggaactgctggataacgttgaacccagctttgtctgggcaaatgactcctggattttctactatgttcgcaagcatccggtgacgctgctgccttatcaggtctggcgtcacgccatcggtacgccagcatcgcaagataaactgatctacgaagaaaaagacgatacctattacgtcagcctgcataaaacgacctcgaagcactatgtagtcattcatttggccagcgccaccaccagtgaagttcgcctgctggacgcggaaatggccgatgccgagccgtttgtttttctgccgcgccgcaaagatcacgaatacagccttgatcactaccagcatcgtttttatctgcgttccaaccgccacggcaaaaactttggcttataccgtacccgtatgcgtgatgagcaacagtgggaagagttaattccgccacgcgaaaacatcatgctggaagggtttacgctgtttaccgactggctggtggttgaagagcgtcagcgcgggttaaccagtttgcgccaaattaaccgcaagacccgggaagtcattggtattgcctttgatgatccggcctatgtgacctggattgcctacaatccagaacctgaaaccgcgcgattgcgttatggttattcttccatgactacaccagacactttgtttgacctggatattgataccggtgagcgtcgtgtttttaaaccaccggaggtccggcttttatgcggcgagtaccgccgtgaaccccgttggttgtttccgctgatggggtcaagtactcgttcgtcggcaccacggcaacattttcgcagggacgcacccgtgctgtcgtttttattgttttcggaccgggcccccttcaggaacaacggcccgcgggttgtgcttctgcttgggtactaccaccctgaactactcggcgtgacctactctcaactctcagtccacgaggctcgaccgaagccactccccatcccccactccaggcaccgccacgttcccacgcgcaacgagatggcgcaggaaaaagagcgtccagccggaagccagagtctgtttcgcgggttgatgctgattgagattttgagcaactatccaaacggttgtccgttggcgcatctttcggagctggctggtttaaataagagtaccgtccatcgcttattgcagggattacagtcctgcggctatgtgaccaccgcgcctgccgcagggagttatcgcctgaccaccaaatttattgccgtcgggcagaaggcgctgtcttcgctgaatatcattcatatcgccgctccgcatcttgaggcactgaacatcgccactggtgaaaccattaacttctccagccgcgaagacgatcacgctattttgatttataagctggaacccacaaccgggatgctgcgaacccgtgcctatattggccagcatatgccgctctactgttccgcaatgggcaagatctacatggcgtttggtcacccggactacgtgaagtcatactgggaaagccatcagcatgagatccagccgttaacccgcaataccattaccgagctgcccgcgatgttcgacgaactggcgcacattcgtgaaagcggagcgggcgatggacagagaagaaaacgaactcggcgtctcctgtattgctgttccggtgtttgatattcatgggcgggtgccgtacgcccgtgtcgatttcgctttcgacatcacgtctgaaaccggtgggggagaaaatctccttgaacccgtggttaacgcgcgggtattctatgaacgcggttaccgtgcgggttcgtgctttatcatagccagtggaatcctggacatcgagtctgtgggaaaaatccacaagatattttcagattcattgtctttctacatttag

SEQ ID NO: 24841 - DNA, 248 bp, Homo sapiens
  SIMILAR (162)..(245): 961254mologous to Escherichia coli K12 putative acetyltransferase (EC 2.3.1.18),accession number AE000464,Smith- Waterman Score=146.
ctgcctgcacaatggaggtgcggctctgcagcggcgtgggcgtggctggctggctgtgccgggaaaccatctgtgatggcagggcagggcccctttgccaagtacccccttccactgaaaacgaggacggcagggcccaaacagtccgaaccacgaaacacccccctgcagtgtttgaaggcacgtatatcgttctgcccgcgaagccatttggcccgtatgaagagggcgggaacgaagaagagtag

SEQ ID NO: 24842 - DNA, 2712 bp, Homo sapiens
  SIMILAR (1047)..(493): 951254mologous to Escherichia coli K12 low-affinity phosphate transport,accession number AE000381,Smith-Waterman Score=903.
tcagactggtaaaatgccctgcgcggtaagcagcacgtggactttatcttttgcttcttcagatgcttcaagaatcggtggtaagcaatatgtctctacaggcagcccgacacactgcatgctgtatttgatcagtgagacaaacggtgtttcgagggcgtaaatagcgggcagttgtagtagttttttattcagcgtcgcagcggtcgccagatcgccttcacgccaggcgcggtagatgccgacggagagttccggagcaaagttagcgctggcggttatcgcaccgtcgccgcccagcagcatcgtattcagcaaatgatcatcgtaaccgcagaataccgaaaacgacgggcgtaccgacttaactgtgttgatcatcgtacgcaagtgaccaacgctgtcgatggtgtctttgatgccaacgatattctcgttttgcagagccagacgcgtcacggtttccggggttaagtcctgacccgtcagatcccgaaagttgtacaggatcacccggaagggtgaactgacgcctggcagtttcgctagcttcgcggaggtatcagagatgcacagcataatgcggcgcagctggctgcgctgactcacgcttaacggctcgtaactttccatattgcctggcagcatcgttttaacgcgcgcaatagcatcaaaggtatttgccggatgacagtgaaactctgttacttgcgtgccatcagtcgatgctgcaggcaatggaggttccatcgcaatcaacttctgcggcagttcaggatgctgttgcaggtagtgttcgaagttggtaacggcatcgcgggtacgggtaatttcatagccggacgcattcatattgacgacgaagccagcaggggcaatccccaccagtaccagcattaccaggccgatccctttttgtccgtcgttcgcgccgtgcgaaaacgccacgcccgcagcggaaacaatcagcgcaatacgcgtccagaatggcggtttacgtttgccttttttctttttgcgatcttccggaatgcggtgaatacggtcaccatgtccattcgtaaagggattggcgttcatcacaatgcagccaatcttgttccctggatgacgaaattttttcagcgattcggcatagcgtttcagtcgcgtggcgctgttttccatcagcaccatcacgccgggtacgctggtcagcgtggaaaaaccgcactggcggaacagcgcctcgtattcggttttggtataaataaacagatgcgtgctgtgccgctcataggcgaggtttatcaattcagtggctaatgtcagcgccagtccttcaccgcggacggattcactgatagcaacgcatttaataatatttccggcaattccaccgcacgcgataagcttttcatcgcgggttacggtaatagatacttccactgtggtgtcaacgctcaaataattttcatgcaggaattgggcgatttccgccattttgttattttccgcaaaaaggtaacgaataccatggagatacgcgtatttcgccaggaagatttcgaagaggtcatcaccctttgggagcgttgcgacttgctgcgtccgtggaacgatccggaaatggacatcgagcgtaagatgaaccatgacgtcagtttgtttttggtcgctgaggtaaacggtgacgtggtcggaacggtgatgggcggttatgacgggcatcgcgggtctgcttattatcttggcgtgcatccagagtttcgtgggcgtgggattgccaatgcgttgcttaatcggctggagaaaaagctgattgctcgtggctgcccgaaaattcagatcaatgtgcccgaagataacgacatggggctcggaatgtatgaacgccccgagcgtgcgttcggcatattcacgtgccaccgtgttgtgtttgggcagcaggagcgcctgacggatccccgccaccagcgcctcgaccgattccggttcaacgcaaaccgcaatgcccggaaaggtttcgcaaagctgccccagttctgtgtaggcttcagcagtaatcaccgcgttaccgcctactgccagaatattggtcagtttcgacggcaatacggcatctgccgcgccgcgtttttgcaccaccagatggcaatcgcccatcttcagcagtgcgggtaaagcgtcatacgattgcagcgggaaaaattgcatgttgcgcagtccacgctgctgcgcccattttttccagccgcgcttttcgcacacgggacttagcgccagaccgtctttggcgcgcataattggcacaccgacaatctcaatatcgaagcccatatcggcaaccattttgcggatcagcgccagttgctgaaaatctttttcaccgaagcaggcgatgtccggctggaccaggttgaacagcttgctgacaatagtcgaaacgccgcgaaaatgtcccggacggctggcaccttccagcatggtcgaaaggccaggaacgtcaacgtaagtgtgggtttcagtaccgttcgggtagatctcttttaccgaaggggcgaaaactaaatccactttacgtttgtttagcttctcgcagtcctcctgcaaggtccgtggataacgagccagatcttccgggcggtcgaactgcatcgggttaacgaaaatactgacgacgaccacatcggcgcgggctttggcttcgtcgaccagcttcatatgggccat

SEQ ID NO: 24843 - DNA, 3397 bp, Homo sapiens
  SIMILAR (402)..(364): 921254mologous to Escherichia coli K12 putative lyase/synthase,accession number AE000500,Smith-Waterman Score=55.
ttacatagtgtggatttttttccgtctggtaacgcgtccgtggcgatagaaccccggctcccgcaggcggattttcctgaacatcatcatgattttcatgaaattgtgattgtcgaacatggcacgggtattcatgtgtttaatgggcagccctataccatcaccggtggcacggtctgtttcgtacgcgatcatgatcggcatctgtatgaacataccgataatctgtgtctgaccaatgtgctgtatcgctcgccggatcgatttcagtttctcgccgggctgaatcagttgctgccacaagagctggatgggcagtatccgtctcacattttgccgatgaggtgaattgggatgcgcgtggcgtagtagttttttattcagcgtcgcagcggtcgccagaatcgccttcacgccaggcgcggtagatgccgacggagagttccggagcaaagttagcgctggcggttatcgcaccgtcgccgcccagcagcatcgtattcagcaaatgatcatcgtaaccgcagaataccgaaaacgacgggcgtaccgacttaactgtgttgatcatcgtacgcaagtgaccaacgctgtcgatggtgtctttgatgccaacgatattctcgttttgcagagccagacgcgtcacggtttccggggttaagtcctgacccgtcagatccggaaagttgtacaggatcaccggtagggtgacgctacgggcgatctgctggtaatagtcgtcaagatttcgtggtgcgactttccagtagtaggggttgatggcgacgataccatcagcgccgtaggcttgcgcatgctgcgccagtttgaccgcttcgtcagtggaaggggaaccgacgccaatcaataccggcactcgcccgtcgacaatggttacagcttcttcggcgagtgccatgcgctgggctgtattcatttggctaaattcaccaccggtacccagataaaacagcccgtcgacccctttattaatcaggaagtcggcaacttcgcgcattgcctttttatcaagggttccgtcacgatgaaacgtgctggataccggtggaataatgccgctgaattttttcattacctcagtttccttttcgtaagtgctcattttcgtttccgcgtaatagttgccgccaaccggaacacgaccgtagcgcggattatggtactgtttcagttcgtcgatattagggtcaacaggggcccggccggtttttgccttaggggcggtgcagcttgctgctgtggtcactctagaggatcccccgaagctgggatggtcgacgtaggcgtcgcccgtgacgatgatgacgtcgcagctgtcccagccgagctgctccatctccgcccggctcatgggcaggaagggtgcggggccgaaacgcttggcccagaaggggcggtaagcggtcagggccttcggggcggcaacgggcagtgcggacataagaggtggattgtcgacggcaggcccagaaagcacaaagcccgcgcagggcgcgggctgggcgccttcggccagagtgcggaagccgccgttgttcttgatttcgctgtgatgggcgaacaggtccttgccgccgtcggcgggggtgatgaagccgaagcccttgccgtcgtcaaaccacttgacgatgccggattgcatggtgctcatgaaaatttcccaacaatcttctcgctgggcattaagaatctcggccaggacaccaaatatggttcgtccttcatcgttatgaccattattggcggcggtattgtcactccggtcatgggttttgtcagtgacgcggcgggcaacatccccactgctgaatttttcttcgcaagcagcggcttcagccatacccgcgatacaggtatcggaaatgacacactcgacggcagctccgcaggcatggcgcagtttctcggtcagctcggtaccatttctcgtttgctctgagtatatttccgggtggaaaatatggggaatactatgctgtgctacagagtcaatagctaagaccagtaatatctcttcgtgtagaaacattcctttgtcagatgtcgtgcgtttcatctctactagggttgaaacattcatgtcattgagcagtttggaaagtcttatttgtagaataccgcttctcaacccggtacgcaccagaaaatcattgatatggccatgaatggcgttggatgccgggcaaccgcccgatccttccagcacatccagactgcggttgattttctcccgctggcgtaacaattcatcttcagactgctgcgccgctggacgcgcctgttcacgcaccgataccagcccggcatccataatgccatccgccagtgcctcaattttgcgcacccgcaacgactccagcggatcgcgcggcaacatcgccggagcgacattcattaattcaatatattcagcgatgatcggcgaatcaaaccagcattcgccctcttcggtcaccagcaccggcacttttcctaacgggttaaattgcgccacgccgttgtccgcgttatagggcagttcattaataaattcgaaagttatgcccttttctaacaacagaatagaaagtttgcgtacaaacgggctggtgtagctaccgacgagtttcatgccgagtcctttgtgcgaggtcgtgctccaatgaaaagaaaactttaactctttatgcagctcggtggcgatgtaattcagccattcgatggttttatagcgggaaatactgtttaccggtgccagcaactggcggtcggggacgctgtcggcaagatactgcataatcgctacgccttccgtcagcaaagtaccgtcatccagcagcaatgcaggcacctgcccctttaattcgtacaagatgatgcgctggcgcagccgcacgtggacgtccccgcagagaccgaagtcccaggccgagaacacccggtggctgtagctggtcagagcctcggactccgccagcagtgtctgcttcagcccagacaccgagcagcttttggtactgagcctgtatatagttgaattagtaatgtgatcctccagcttgttctttggctcaggattacttcgcgatgcggctcctttttggttccatatgaactttaaagtagttttttccaattctttgaagaaagtcattggtagcttgatggggatggcattgaatctataaattaccttggccagtatggccattttcacgatattgattcttcctaaccatgagcatggaatgtacttccatttgtttgtatcctcttttatttccttgagcagtggtttgtagttctccttgaagaggtccttcacatcccttgtaagttggattcctaggtattttattctctttgaagcaattgtgaatgggagttcactcat

SEQ ID NO: 24844 - DNA, 1284 bp, Homo sapiens
  SIMILAR (205)..(957): 1001254mologous to Escherichia coli EnvZ protein,accession number J01656,Smith-Waterman Score=1276.
ctcgaggttttgttccattcgatcggcaatcttaaacagaatcgccgcacgatcctgcaccgaggtgtgcgcccatttatctttcactttgtgcgcagcatccagcgccagatcgatgtctcgtttgcccgaagacgccacttcgcacagcagctgccgcgcgcgaaatgtccgcgaagacgagccgatgccgctcaccagcgcatgaggcgattgcgcttctcgccacgaagttcatttgcccgtacgttattgctcatcgtcaccttgctgttcgccagcctggtgacgacttatctggtggtgctgaacttcgcgattttgccgagcctccagcagtttaataaagtcctcgcgtacgaagtgcgtatgttgatgaccgacaaactgcaactggaggacggcacgcagttggttgtgcctcccgctttccgtcgggagatctaccgtgagctggggatctctctctactccaacgaggctgccgaagaggcaggtctgcgttgggcgcaacactatgaattcttaagccatcagatggcgcagcaactgggcggcccgacggaagtgcgcgttgaggtcaacaaaagttcgcctgtcgtctggctgaaaacctggctgtcgcccaatatctgggtacgcgtgccgctgaccgaaattcatcagggcgatttctctccgctgttccgctatacgctggcgattatgctattggcgataggcggggcgtggctgtttattcgtatccagaaccgaccgttggtcgatctcgaacacgcagccttgcaggttggtaaagggattattccgccgccgctgcgtgagtatggcgcttcggaggtgcgttccgttacccgtgcctttaaccatatggcggctggtgttaagcaactggcggatgaccgcacgctgctgatggcgggggtaagtcacgacttgcgcacgccgctgactcgcagacctgccggtagcaccgttctttatctgtatggctacggttatccaccgcggagacctggtcaggacgttgataagcggggtcatcgtgatgattaccgtcctgctgatcgccacccattcgcgccttacttcactgaaatggcgctcaaaggcggtttcagttttgccggtgaaagtgcgcaaatctcagcgttgtccgtgggcaatatgttcggttggtcgatttctgaattgatgtcgcttgggattattggcgttgtcgtggcggtcggtattgtcgccagcgtcgtgctgttcttacgtaaacgtgaattatcggaataa

SEQ ID NO: 24845 - DNA, 2182 bp, Homo sapiens
  SIMILAR (757)..(1497): 991254mologous to Escherichia coli EnvZ protein,accession number J01656,Smith-Waterman Score=1252.
atggagaccctcaatctgtacgcggatttgcgcagcgtcaccggcgaggcactgttgctgctcgatgaacccggcgtcggcgttgaccctatctcacggcgcgaactgtggcagatggtgcatgagctggcgggcgaagggatgttaatcctctggagtacctcgtatctcgacgaagccgagcagtgccgtgacgtgttactgatgaacgaaggcgagttgctgtatcagggagaaccaaaagccctgacacaaaccatggccggacgcagctttctgatgaccagtccacacgagggcaaccgcaaactgttgcaacgcgccttgaaactgccgcaggtcagcgacggcatgattcaggggaaatcgaatatcgttggcatcaaagacaccatcgacagcgttggtcacttgcgtacgatgatcaacacagttaagtcggtacgcccgtcgttttcggtattctgcggttacgatgatcatttgctgaatacgatgctgctgggcggcgacggtgcgataaccgccagcgctaactttgctccggaactctccgtcggcatctaccgcgcctggcgtgaaggcgatctggcgaccgctgcgacgctgaataaaaaactactacaactgcccgctatttacgccctcgaaacaccgtttgtctcactgatcaaatacagcatgcagtgtgtcgggctgcctgtagagacatattgcttaccaccgattcttgaagcatctgaagaagcaaaagataaaaaccgaccgttggtcgatctcgaacacgcagccttgcaggttggtaaagggattattccgccgccgctgcgtgagtatggcgcttcggaggtgcgttccgttacccgtgcctttaaccatatggcggctggtgttaagcaactggcggatgaccgcacgctgctgatggcgggggtaagtcacgacttgcgcacgccgctgacgcgtattcgcctggcgactgagatgatgagcgagcaggatggctatctggcagaatcgatcaataaagatatcgaagagtgcaacgccatcattgagcagtttatcgactacctgcgcaccgggcaggagatgccgatggaaatggcggatcttaatgcagtactcggtgaggtgattgctgccgaaagtggctatgagcgggaaattgaaaccgcgctttaccccggcagcattgaagtgaaaatgcacccgctgtcgatcaaacgcgcggtggcgaatatggtggtcaacgccgcccgttatggcaatggctggatcaaagtcagcagcggaacggagccgaatcgcgcctggttccaggtggaagatgacggtccgggaattgcgccggaacaacgtaagcacctgttccagccgtttgtccgcggcgacagtgcgcgcaccattagcggcacgggattagggctggcaattgtgcagcgtatcggggataaccataacgggatgctggaacttggcaccagcgagcggggccggcctgtccattcgcgcctggctgccagtgcccggtacgcgggcgcagggcacgacaaaagaaggcgcccgtgaagacgcggtggagtttttcgccaagctggggtttgttaatcagggagaaatcaccacgccaaccaccacgccgattcgccattttttgatgattaagcccgtcgccactctggatgacattctgcatcgcggcgactggtgcgcgcagctgcaacaggcgtggtacgaacatatcccgcttagtgaaaaaatgggcgtgcgcattcagcaatataccgggcaaaaatttatcactaccatgccagaaaccggcaatcagaatccgcaccatacgctgtttgccgggagtttattctcactggcgacgctcactggttggggacttatctggctgatgctgcgtgaacgccacctcggcggaacgattattcttgcggatgcgcatatccgctacagcaagccgattagcggtaaacctcatgcggtagccgacctcggtgccttaagcggcgatctcgaccgtctggcgcgcggacgaaaagcacgggtgcagatgcaggtcgaaatctttggcgacgagacgccgggtgcagtgtttgaaggcacgtatatcgttctgcccgcgaagccatttggcccgtatgaagagggcgggaacgaagaagagtag

SEQ ID NO: 24846 - DNA, 1902 bp, Homo sapiens
  SIMILAR (1695)..(1763): 861254mologous to Escherichia coli PII Uridylyl- transferase,accession number Z21842,Smith-Waterman Score=103.
atgtgtcaaatgatcttccagccattgctggtattgcggttgcgccatttcaagtgggtaacctggacgccgacagacgatcaaatcgttggctgggatgatgcctttgacaatgggatctctgcagaacagttgattgaggcgcgcaccgagtttatcgaccagctcctgcaacgattatggattgaagcgggattcagccagattgccgacctggcattggtcgccgtcggtggctacggtcgtggcgagctgcatccactttcagacgtcgatttactgattttaagccgtaaaaagctcccggacgatcaggcgcaaaaagtgggcgagctgttaacgctgctctgggatgtaaagctggaagtcggtcatagcgtgcgcacgcttgaagagtgcatgctggaagggttatcggatttaaccgtcgccaccaatttaatcgaatcccgcttattaattggcgatgttgcgctgttcctcgaactgcaaaaacatattttcagcgaaggattctggccttccgacaagttctacgcggcgaaagttgaagaacagaaccagcgccatcagcgttaccatggcaccagctacaaccttgaaccagacatcaaaagcagccctggcggcttgcgcgatatccacactctgcaatgggtggcccgccgtcattttggcgcaacatcgctggatgaaatggtcggcggacgggcggaattaaacgaatgtctgcatatattgtggcgtattcgctttgccctgcatctggtcgtcagccgttacgataatcgcctgttattcgatcgccagcttagcgtcgcccagcgtctgaattacagtggtgaaggtaacgaaccggtcgagcggatgatgaaggattacttccgcgttacacgccgcgtcagtgaactcaaccagatgctgctgcaactgttcgatgaagccatcctcgcccttcccgccgacgaaaaaccacgtccaatcgacgatgagtttcagctacgcgccatcttgcgtatgttctacaccatggtgcacaacagtgcgatcaccggcatttactccaccacgctgcgccagttacgccatgcccgtcgccatctgcaacaaccgctgtgtaatattccggaagcacgaaaactgtttttgagcattctgcgtcaccccggagcggtgcggcgcgggctattgccaatgcatcgccatagcgtgctcggcgcgtatatgccgcaatggtcgcatatcgtcgggcagatgcagtttgatctgttccacgcctacacggtggatgaacatactatccgcgtgatgctgaaactggagagttttgccagtgaagaaacgcgccacgccatccgttgtctgattttcatcgccgcgctgtttcacgatatcgccaaaggacgcggcggcgaccactccattctcggtgctcaggatgtagtgcattttgccgaactccacgggctgaactcacgcgaaacacagctggtcgcctggctggttcgccagcacctgttgatgtcggtgaccgcccaacgccgcgatattcaggacccggaagtcatcaagcagtttgccgaagaagtgcaaacggaaaatcgtctgcgctatctggtatgcctgactgtggctgacatttgcgccaccaacgagacgctgtggattagctggaagcaaagtctgttgcgtaactctactttgccaccggaaatcagctacgacgcggaatgcgaaacacgccggatatgcgcgaacgggtttatttggctggctgttttcttgcgcaaaccacgctttaacgatcggcgcaacgaaccggaatacaccggatcggtactgacgaaattcacgccatccagttgcgcggcggtgatctctttttcatgtgctaaagggtga

SEQ ID NO: 24847 - DNA, 2358 bp, Homo sapiens
  SIMILAR (717)..(13): 971254mologous to Escherichia coli similar to,accession number D90854,Smith-Waterman Score=1206.
tcattgttcaatttcgttacgcagcagtttcgctattccttgtggattgatatagagcggaacgatgccatcagtgggtattacatccaccattgccgggcgggttttattcagtgtttgcagcgcgttattaaccagcgtgtcatcgagggagaaaagcagcgttttgttttgcatcgccagcgacacacggaaaaaataatccgacattaattgatcgggttgcgccgcctgcgctttcggatactggccgtatcgggaactcacttcgcgacgccagatttgcgcttcgccctgctgagtctggcttaccggcaaaacaccttctggcgctttgctttcgtgcgcaccaatattttgcgtaaacagtttccctggcaattgcgcctgttcggcagtgccatcaaactgaccgacaaacagcggggtttgcaattttgagtcttcataccagcacagccccgcggcaccgtctaacgccccattcagcttgtcgttttcctggctgatgtgcgaaagcatctcttcggcaataccgtgtgaatacggcaccgccacacagaagctggctccggcaggcatactgttccataccggcgtaaaatcgaaactggcatctacgctggcggattcatcatttaacgccacaaaactgtgccagccgtcgttacccatttcgaagcgtacgccagcaaaagaagacaaaaccgaccggtaggaacggggaacggtgaaccaatagatgccaacgccggaagcttttacccgcccgatcaaatcgaaagcgcctggctgccatgaacaggttagcagtttatcccgtcccgtctcgcttaaggcctgctgcaaacgtagtgattcgtcggcaggcacaacgtcatcgtcgaggccatgccacagcagtagaggtctgtcactaagttgttccaggtggtttgtcgcttcccactcgtggggtggcgagcggtaatccccagtgccgtcatcgcgcccatcgacgcgccaccgactgccagacgggtcatcaagcagccagttttcttcggctattgccgcacgtaaagtagtgaattcctgcatactttgtagcaagatttgccagaattgatttaaccgccgcgctgcgtcaccactaaaacggctaccgtgatcgggcgcatccggcatgatcacccgcaaaccagcctgcgccagcgcaacggcaaaatagctatacaccagactggatgaagtaaagccgtgataaaaaattacgcacggtaacggggtatctttttgcccgacaggataagcatgaagaacgggaatatctgccagctcgcgtgatttggaggtgcagagcaaaaagcgcagttttccagcattgaattggtcggcagtgtattgctgcagtgccctcggtagcgcgccaaaatgcaagccaataccgtttctcggcaaggcgtacagtttgatgaagtgcttgatttgtccgcacctgcccgccgatgagtgcgactgccgtaagccgaaagtaaaactggctggcacgttatctggcatttcgcactcttccaggccggatttggcgctggcttgctgttgcaggcaggcggtcaactccgctttacggctctggtcatacagttcgctgtcgccgagtttctcttccgcctgcgccagttgcgcgttcagcttctccatctctttttccagacgggcaatctctttacgcagtggctgggtttgcgcacgcagctcagcttcccgacgcttctgatctttacgtgcctgggcgctgttcgcattctcttttggcgcttcgtcggtctggttttcctgcttttgtacgtcgctcaaccactgttgataatcttccagatcgccgtcgaacggttcgactttacgatcgtgaaccaggtagagatcgtcagtggtggaacgcagcaaatgacggtcgtgcgaaacgacaaccagcgcgccttcaaactcgattaatgcttcggtgagtgccgctttttccagcatcaacgccactgaacaatatttctcggcagagagatcaaccgcacgcgcaaccgctgcgtctttcaggtcgcgaccggtgacgataaaatgcagattaatgtgcgtaaacaggcgtggtgcctcttcgcggcgttcagaggtcaattttacttcacaatcgaccacatcctgacgccctttttgcaggatcgaaaccacatcgatggcactgcaaccacccgccgccatcaacaccatttccatcggacttggtgctttatcgcctgagttgccgtccattaaaatctgatgaccagaggcggattcgcccagaaaagttaacccttcgacccacttcactcgcgcttgcat

SEQ ID NO: 24848 - DNA, 1006 bp, Homo sapiens
  SIMILAR (79)..(1005): 951254mologous to Escherichia coli PII Uridylyl- transferase,accession number Z21842,Smith-Waterman Score=1527.
atgtgtcaaatgatcttccagccattgctggtattgcggttgcgccatttcaagtgggtaacctggacgccgacagacgatcaaatcgttggctgggatgatgcctttgacaatgggatctctgcagaacagttgattgaggcgcgcaccgagtttatcgaccagctcctgcaacgattatggattgaagcgggattcagccagattgccgacctggcattggtcgccgtcggtggctacggtcgtggcgagctgcatccactttcagacgtcgatttactgattttaagccgtaaaaagctcccggacgatcaggcgcaaaaagtgggcgagctgttaacgctgctctgggatgtaaagctggaagtcggtcatagcgtgcgcacgcttgaagagtgcatgctggaagggttatcggatttaaccgtcgccaccaatttaatcgaatcccgcttattaattggcgatgttgcgctgttcctcgaactgcaaaaacatattttcagcgaaggattctggccttccgacaagttctacgcggcgaaagttgaagaacagaaccagcgccatcagcgttaccatggcaccagctacaaccttgaaccagacatcaaaagcagccctggcggcttgcgcgatatccacactctgcaatgggtggcccgccgtcattttggcgcaacatcgctggatgaaatggtcggcggacgggcggaattaaacgaatgtctgcatatattgtggcgtattcgctttgccctgcatctggtcgtcagccgttacgataatcgcctgttattcgatcgccagcttagcgtcgcccagcgtctgaattacagtggtgaaggtaacgaaccggtcgagcggatgatgaaggattacttccgcgttacacgccgcgtcagtgaactcaaccagatgctgctgcaactgttcgatgaagccatcctcgcccttcccgccgacgaaaaaccacgtccaatcgacgatgagtttcagctacgcg

SEQ ID NO: 24849 - DNA, 1884 bp, Homo sapiens
  SIMILAR (79)..(648): 921254mologous to Escherichia coli hydrogenase-1 small subunit (hyaA) precursor,accession number M34825,Smith-Waterman Score=956.
atgcgggcaggattcacaagtaacgtcctgaccttcctgacgtgcacgagtcacttcctcaacaccttccgggctgctgacgtggcaaacgtgcagacggcaaccagcaactttcgccagatacaagtctttgaagacatcatcacgcaatacaatggcaaatatatcctcgcagtagaaggtaatccgccgctgggcgagcaggggatgttctgtatcagcagcggtcgaccgtttattgagaaactcaaacgtgccgctgccggagccagcgcgattatcgcctggggaacctgcgcgtcctggggctgcgtgcaggccgcgcgacccaatccgacgcaggcaacgcctatcgacaaagtcatcaccgacaaacccattatcaaagtacctggctgcccgccgatcccggatgtgatgagcgccatcattacttacatggtgacctttgatcgcttgccagatgtcgacagaatgggccgtccgctgatgttctatggtcagcgaatccacgataaatgctatcgccgcgcccacttcgacgccggagagttcgtccagagttgggatgatgacgctgcccgcaaaggttactgcctgtacaaaatgggctgcaaagggcctaccacctataacgcctgttcctcacacgctggaatgatgggtctggtcacggctgctggctggcggaaatggtttggatcggggtcgtttcagcggtgtcgattcgagttggataagctatctatccagcgccatcagcgttaccatggcaccagctacaaccttgaaccagacatcaaaagcagccctggcggcttgcgcgatatccacactctgcaatgggtggcccgccgtcattttggcgcaacatcgctggatgaaatggtcgggtttggcttcttaacctcagcggagcgggcggaattaaacgaatgtctgcatatattgtggcgtattcgctttgccctgcatctggtcgtcagccgttacgataatcgcctgttattcgatcgccagcttagcgtcgcccagcgtctgaattacagtggtgaagtgaactcaaccagatgctgctgcaactgttcgatgaaaccatcctcgccctttccgccgacaaaaaaccaccgtccaatcgacgatgagtttaagctacgcggtacgctaatcgacctgcgtgatgaaaccattattatgccgccagccggaagccatcttgcgtatgttctccaccatggggcacaacagggcgacaaccgcttttactccaccacgttggcccatttcgccatgcccgtggcctttggaaacaccgttgtgtatattccggaagcccaaaactgttttgagcatcttggtcaccccggtgagcgacttagctctaaagattttttctacgacgacggtgagtttgccgccattcttgaggatgtgcgcacggtccgcgaattaggttttcctggactggtgacgggcgttctcgatgttgacgggaatgtcgatatgccacgaatggaaaaaataatggctgctgccggtccgctggcagtgacttttcatcgcgccttcgatatgtgcgctaaccctttatatacactcaataatcttgcggaattgggcattgcccgggtactgacatcagggcaaaaatcagacgcactgcaaggtttatcaaaaattatggaacttattgcccatcgtgatgctccaatcattatggccggagcaggagtccgtgcagaaaacctgcaccacttcctcgatgccggagtgctggaagtccatagctccgcgggagcgtggcaagcctcaccgatgcgttatcgtaatcaaagattgtccatgtcatcagatgaacacgcggaccagtattcgcgttatatc

SEQ ID NO: 24850 - DNA, 1761 bp, Homo sapiens
  SIMILAR (1)..(615): 1001254mologous to Escherichia coli ETHANOLAMINE UTILIZATION PROTEIN EUTH (PUTATIVE ETHANOLAMINE TRANSPORTER),accession number D90874,Smith-Waterman Score=1032.
ggagtaaaggcgatgggaattaacgaaatcatcatgtacatcatgatgttctttatgctgatagctgccgtagacaggatcctgtcgcagttcggcggttctgctcgtttcctcggtaagttcggtaaaagtatcgaaggatcaggcggtcagttcgaagaaggctttatggcaatgggcgcactgggcctggcgatggtcggtatgaccgcgctggcaccggtactggctcacgttctcgggccggtaattattccggtttacgaaatgctcggcgctaacccatcgatgttcgccggaacactgctggcgtgcgatatgggcggcttcttcctcgccaaagagctggcgggcggcgacgtagccgcgtggctatactctgggttaattctcgggtcgatgatggggccaacgattgtgttttccattccggtggcgctcggcattatcgaaccttctgaccgtcgttatctggcgctcggcgtgctggcgggcattgtgaccattccgattggttgtatcgctggtggtctggttgctatgtactccggtgtgcagatcaacggccagccggtggaattcactttcgccctgatcctgatgaacatgatcccgcaaacgccagaaggtgttttgccggtaagccagactcagcagggcgaacgcaagatctggcgtcgcgaagtgagttcccgatacggccagtatccgaaagcgcaggcggcgcaacccgatcaattaatgtcggattattttttccgtgtgtcgctggcgatgcaaaacaaaacgctgcttttctccctcgatgacacgctggttaataacgcgctgcaaacactgaataaaacccgcccggcaatggtggatgtaatacccactgatggcatcgttccgctctatatcaatccacaaggaatagcgaaactgctgcgtaacgaaacgttgaccagtctgccgaagaatctcgaaccggttttttataacgccgcacaaactttattaatgccgaagctggacgctttatctcaacaaccgcgttatgtcatgaagctggcccagatggaacccgtggctacccataacctggcagccgctatgaggcacgggctgctggcgctgatttgctggctgtgttgtgttgttgcccatagcgaaatgctgaatgtcgaacaatccgggctgtttcgcgcctggtttgtacgcattgcacaagaacagctccgccaggggccaagtccacgctggtatcagcaggattgtgcgggcctggtgcgatttgcggcgaacgagacgctgaaagttcacgacagtaaatggctaaaaagtaacggtttatctagccagtatttgccgccagagatgacgctaacacctgaacagcgtcaactggcgcaaaactggaatcaggggaacgggaaaaccggcccctatgtgaccgcgattaatttgattcagtacaacagccagtttattggccaggacataaaccaggcgctgcctggcgatatgatttttttcgatcagggcgatgcccagcacttaatggtctggatggggcgttacgtcatctaccacaccggaagcgccacgaaaactgacaacggaatgcgcgcagtcagtctgcaacaacttatgacatggaaggacacccgatggatacccaacgattccaatcccaatttcattggcatttatcgtttaaattttctggcgcgatacagcgtgcttgtccctgtctcttgtggggacaggggctgctaa

SEQ ID NO: 24851 - DNA, 2443 bp, Homo sapiens
  SIMILAR (721)..(131): 991254mologous to Escherichia coli fepD,accession number X57471,Smith-Waterman Score=957.
ttaaaacactttctccccggtgaatctgaggaagatcagcaccggtgcaccaataaacgcactgaccacagaaacgcgcagttcgccgggcacaatcacgcgcccgatgatatcggcaaacagcagcaggggcaggggtagcaagtagcgtgacgggcagcgaccagcgatgatcggcacccaccagccaacgcgccatatgcggcatcatcaggccaataaaggcaatcgggccaactattgccgtcgcactaccacaaagcacggtaatcgccagcagaccaatcaactgtgtgcgcgccacgcgactgcccagcgccgtcgcggtgtcgctgccgaggctcaaactgttcagcgcgcgactcagtaatagcgcagttgctccggcgatcagcaccgggatcagcaccacttttaaggtatgtagattgcgaatatccagcgaaccggcttgccagaaacgcaactgatcgtagacgtcaggattaagcagggcgatgccgctggtcagtccttccagcaccgccgccagcgccacgcccgccagggttaaacgcaccggacttaactgcccgccgccctgactgccggtaaaggcaacaatcaatgaggccaccagcgccccggcgaaggccatcgccagttgttcctgcgcggaagagtaaccaaacagcgccgcacccagcacaatggcaaagctggctccggcgttcacgcccattctctgcccgcggatcgtcatattgctggtctgcgccagtgacatccctcgagtctccggggcaaacgctacggaaatcaacaagccaaacagcgagatacccgcccccattagcatcgtgttactgataccgtaattattgataaagatcggtagtgcccaggtcgaaacaatggtgccaatacgacttaaggacataatcacgcccacggcagaggcgcggatatctgtcgggaagagttcattaggatagagccactggcaggtccagatggcggcaacaaacagaacaaaaggaaaatggcggcgattaaacagatcgcgaaaacgggtttgctgcggctgctcttcatcgaaagccaccggttcgccaaacagtttgatcatcatctcttcgcactcttttactcgccgaggcaacagatgctcagaaatcttcttcgcccactcgtacgcttccgcgtgcagctgcgactcgtaagggttcgaggtgcagagtacgttacggttcatgtcgttagctgtcgccagcgcatcaagaccgaccgagtgcagcatctggtgcaccggtttgacgttctttttcagaatgccgtggaactgaaacgtctggcggttggtcaggcgaatgctgccatagatggtgttttcaccggcaaatttgtcgatcgcctgccactgtttagtggtaatcaccccacccggcagacgacagcgaacgagcatcgcgtggcgcggctccagcttctgttcagcacgttcggcgcggatgtcgcggtcatcctgctgatacatgccgtggaagcgaatcagcaggaagttgtcgcccttaaagccgccggtcagaccgtcgtttaaatcttccgcaatggtgccgcgcaggtagttgcttccatgcttcatgcgctcggcgtctgtcagttttccttcgacaactaaaggccctgaatgttttccgctcattagtagacatctcgctgataacggcgctttcgcctgacgtttctggaactcgctggcggctttcacaaagcctgcaaacagcgggtgaccatcacgtggagtagaagtaaactccggatggaactggcaagccacgaaccgacgggtgattcggaacttcgatgatctcgaccaactgatcatccccggaacggcccgcaacgcgcagacctgcatcttcaatttcgtaacggtgacgatgacgctcaacaattgtcggcgcattgtacagctggcgaaccaggctatcgtcaaccaactggcactgctgtcgccgagacgcatggtaccgccgagatcgctcttctcgctacgaacttcaacgttgccgttttcatcgcgccactcggtaatcagcgccacaaccgggtacttacagtctggcacaaattccgtagagttggcgttctccatgttggcaacatggcgagcgtaatcaattaacgccacctgcatacccaggcaaatgcccagataaggaatattgttctcacgcgcaaaacgcgcggtcgtaatcatgccttctacgccacgatagccgaaaccgccaggtacgaggattgcgtccagacctttaaggatttcaacgccgcgcgtttcaacatcttgtgaatcgatcagtttgatgttgacgctgacacgattcttcagcccaccgtgtttcagtgcttcgatcactgatttataagcatccggcagttcaatgtacttgccgaccat

SEQ ID NO: 24852 - DNA, 1458 bp, Homo sapiens
  SIMILAR (1047)..(139): 941254mologous to Escherichia coli K12 putative regulator,accession number AE000455,Smith-Waterman Score=1460.
tcaccaggaaaaatcaggccggtcattgctgccgccatgaagcagattaaagaattcatgagcccggatagcgatttcttccgctacatgaagacgccgacttccgcaacgcgttaatataacgactgcggtacaggtcaataaagccaccgcatcctcagggatgtcggtggttttctttttcaatcgatgctcggtaccaatcgacggcagctcgatacgcccggctttcgccagaggcgctaacgcatcgtagtagttttgccacagcgccagacgttgctggttgatacgatccgctgcttccagttgcgcccacaggtatgcagcttgcagatcggacatcaaatagctggagccaatatcgcgccaggtatatttatcgacctgaccacggaagaactggctgcggttagtgcccttttcacggatgatctcggctcgttcgattaacgctttatcgttaatcagcgtcgcgccgccttcaccgcccgccgtgtagtttttggtttcatggaagctaaagcagccaatatgaccaatggttcccagtgcacgccctttgtaagtggacatcacgccctgagcggcatcttctaccacaaacaaattatgctttttcgccaacgccataatggtgtccatttcgcaggccacacccgcgtaatggaccggcacgataacgcgcgttttgtcggtgatcgccgcttcaatcagcgtttcgtcgatgttcatggtgtccgggcgaacatccacaaaaacgatttttgcgccacgcagcacaaaggcattggcggtggagacaaaggtgtagctcggcatgatcacttcatcgccaggctggatatcgagcagcagcgccgccatctccagcgaagcggtgcaggacggcgtcagtaacactttggcgctgccaaaacgttgctccagccactgctggcagcgacgggtaaaaccgccatcgccacacagtttgccgctacccattgccgactgcatatagtcgagttcggttcccaccaccggcggtgcgttaaatggaatcatgtgatcaccgcgagcatacgcccagtttagcgccgtttgcatcagctcagcacctgcaccgcgtccagccagcaggccaattcgcgcatctgtcgcattgagttcccgtaaagagacatagccgcgaatatcgccggacgccgcacgtaaaatcagacattgatgatcaaaggtgccgcgcacggcattttcaatccactgtgcataaaagcgactgctggcgtcaggcgcataccacggcgcacgaaaacggctttgcgcaaatgcggcgctggctaactgacgtaatgcgggaatatcggtctcttgtgccactacagcaccgctatcactggcattgttcacgggtgcaggccaaattgcggcatcaaatacgggtgaactggatgtcctgcaacagctgggattctc

SEQ ID NO: 24853 - DNA, 2353 bp, Homo sapiens
  SIMILAR (1312)..(1914): 991254mologous to Escherichia coli similar to human protein that oxidizes 11-cis retinol into 11-cis retinaldehyde,accession number U82664,Smith-Waterman Score=1035.
  misc_feature (1)...(2353): n = a,t,c or g
atgcctgacttcgacgttgacttctgtatggagaaacgcgatcaggttatcgagcacgtagcggacatgtacggtcgtgatgcggtatcgagatcatcaccttcgntgatccgcgacgtaggccgcgtgctggggcatccgtacggctttgtcgatcgtatctcgaaactgatcccgcccgatccggggatgacgctggcgaaagcgtttgaagccgagccgcagctgccggaaatctacgaagcggatgaagaagttaaggcgctgatcgacatggcgcgcaaactggaaggggtcaccgtaacgccgcacgccggtggggtgtttatcgcgccgaccaaaattaccgatctaagcgcgctttactgcgatgaagagggcaaacatccggtcacccagtttgataaaagcgacgttgaatacgccggactggtgaagttcgacttccttggtttgcgtacgtcaccatcatcaactgggcgcttggagatgatcaacaagcggcgggcgatttctatccggacgtacattgcagatgtaacctctaaccggtattggagcaccttcaggattatcctgttcaggaaagttatcaatttcccagtgcgttccggtaaccccgggttgctcaaagcaggattagtcaccagcaaaaaagcggcgaaggtggagagaacggcgaaaaaatcgcgcgttcaggcgcgtgaagctcgggcggcggtagaagaaaataaaaaggcacagcttgagcgtgataaacagcttagcgaacagcaaaaacaagcggcgttggcgaaagaatataaagctcaggtgaagcagcttattgaaatgaaccgaatcaccattgccaatggcgatattggttttaacttcactgacggcaatctgattaagaagatttttgtcgataagctcacacaggcgcagttgattaatggtcgtctggcgattgcccgcttgttggtcgataacaatagcgaaggtgaatacgccattattcccgccagcgttgccgataaaattgctcagcgcgatgccagcagtatagtgttgcacagcgcgctcagcgccgaagagcaggatgaagacgacccgtatgccgacttcaaagtgcctgatgatttgatgtggcctacggtttatgggcgaagtgtagaccggataaggcgttcacgccgcatccggcaccggctcaattctgcaaaaccgatgacaccagcagctgtgtatacggatgatgcgggtcgtcgagcacgcggtcggttaacccactctccaccacttgcccctgcttcatcaccagcaaacggttgccggaacccggatgatgttgagcgcatgaacagcatgggatttaccggcgtgttgatcgatctggattcaccagaaagtgttgatcgcgcagccgacgaggtgatcgccctgaccgataattgtctgtatgggatctttaacaatgccggattcggcatgtatggccccctttccaccatcagccgtgcgcagatggaacagcagttttccgccaactttttcggcgcacaccagctcaccatgcgcctgttacccgcgatgttaccgcacggtgaagggcgtattgtgatgacatcatcggtgatgggattaatctccacgccgggtcgtggcgcttacgcggccagtaaatatgcgctggaggcgtggtcagatgcactgcgcatggagctgcgccacagcggaattaaagtcagcctgatcgaacccggtcccattcgtactcgcttcaccgacaacgtcaaccagacgcaaagtgataaaccagtcgaaaatcccggcatcgccgcccgctttacgttgggaccggaagcggtggtggacaaagtacgccatgcttttattagcgagaagccgaagatgcgctatccggtgacgcatggtgacctgtggcggtaatggtgcttaagcgcctgctgccggggcgcgtgatggacaaaatattgcaggggtgagttgaagcgcgcgcttaagcccccatgtcaaagaaaatatcgacaacagagagcgactccatgtccgtagaaaaaattgtcaacattaacgaatctaacctgcaacaggttcttgaacagtcgatgaccactccggtgctgttctatttttggtctgaacgtagccagcactgtttgcagttaaccccaattctggaaagcctcgcggcgcagtacaacgggcaatttattctggcgaagctggactgcgacgcggagcagatgattgccgcgcagtttggtctgcgtgcgattccgcccgtgtatctgttccagaacgggcaaccggtagatggcttccaggggccgcaaccggaagaggc

SEQ ID NO: 24854 - DNA, 4719 bp, Homo sapiens
  SIMILAR (3307)..(4185): 951254mologous to Escherichia coli D-lactate dehydrogenase (EC 1.1.1.28) (D-LDH),accession number D90776,Smith-Waterman Score= 1425.
atggacaccattatggcgttggcgaaaaagcataatttgtttgtggtagaagatgccgctcagggcgtgatgtccacttacaaagggcgtgcactgggaaccattggtcatattggctgctttagcttccatgaaaccaaaaactacacggcgggcggtgaaggcggcgcgacgctgattaacgataaagcgttaatcgaacgagccgagatcatccgtgaaaagggcactaaccgcagccagttcttccgtggtcaggtcgataaatatacctggcgcgatattggctccagctatttgatgtccgatctgcaagctgcatacctgtgggcgcaactggaagcagcggatcgtatcaaccagcaacgtctggcgctgtggcaaaactactacgatgcgttagcgcctctggcgaaagccgggcgtatcgagctgccgtcgattcccgatggctgcgtgcagaacgcgcatatgttctacattacactgcgggatattgatgaccggagcgcgttgattaactttctgaaagaagcggacatcatggcggtgtttcattacattccgctgcacggttgccctgcgggggaacactttgacgctttcagcaacagccaggtattaaaggccaccagcatggcgcgaacgccgataccgataataatcaaccgaaaggtgtcgatgccgttgcgccaggcgagcagccagaccagcagcgaagtgacaatgccgcccaccattgctgacagcgcgatagccgtcagtgctgcgccaatcaacagcgccatcagcacgcgtggtaaacgccattcggtgaccaccatcgtcatactgcgcggcgcatcgcccatcagcgcggcgaatacctgcgaggtttccagcgtgacggcaccgctgcgtaatccccagatacctgcaaccacacaggcggaaaccagcagcaaacaggaagatcagcaccggtgcaccaataaacgcactgaccacagaaacgcgcagttcgccgggcacaatcacccgcccgatgatatcggcaaacagcagcagggcagggtccactctagaggatccccattggtcgccgtcggtggctacggtcgtggcgagctgcatccactttcagacgtcgatttactgattttaagccgtaaaaagctcccggacgatcaggcgcaaaaagtgggcgagctgttaacgctgctctgggatgtaaagctggaagtcggtcatagcttgcgcaacgctttaagagtgcatgctggaagggttattcggatttaccgtccgccacccatttaatcgaatcccgcttattaattggcgattgttgcgctgttcctcgacctgcaaaaccatattttcagcaaaggattctggccttccgacaagttctacgcggcgaaagttgaagaacagaaccagcgccatcagcgttaccatggcaccagctacaaccttgaaccagacatcaaaagcagccctggcggcttgcgcgatatccacactctgcaatgggtggcccgccgtcattttggcgcaacatcgctggatgaaatggtcgggtttggcttcttaacctcagcggagcgggcggaattaaacgaatgtctgcatatattgtggcgtattcgctttgccctgcatctggtcgtcagccgttacgataatcgcctgttatgtgtacaccctactcttttgacgacgctcgacatacacggcgaagcgcaaatctggcgtcgcgaagtgagttcccgatacggccagtatccgaaagcgcaggcggcgcaacccgatcaattaatgtcggattattttttccgtgtgtcgctggcgatgcaaaacaaaacgctgcttttctccctcgatgacacgctggttaataacgcgctgcaaacactgaataaaacccgcccggcaatggtggatgtaatacccactgatggcatcgttccgctctatatcaatccacaaggaatagcgaaactgctgcgtaacgaaacgttgaccagtctgccgaagaatctcgaaccggttttttataacgccgcacaaactttattaatgccgaagctggacgctttatctcaacaaccgcgttatgtcatgaagctggcccatattgaacccgtggctacccataacctggcagccgctatgaggcacgggctgctggcgctgatttgctggctgtgttgtgttgtttcccatatccaaatgctgaatgttgaacaattctggccttttttccgcctggtttttcaacattatacaaaaacaaattccttcattgtgccaattccacactgttttaaccatgattttacggtcccctcgaaactgatcccgcccgatccggggatgacgctggcgaaagcgtttgaagccgagccgcagctgccggaaatctacgaagcggatgaagaagttaaggcgctgatcgacatggcgcgcaaactggaaggggtcacccgtaacgccggtaagcacgccggtggggtggttatcgcgccgaccaaaattaccgattttgcgccgctttactgcgatgaagagggcaaacatccggtcacccagtttgataaaagcgacgttgaatacgccggactggtgaagttcgacttccttggtttgcgtacgctcaccatcatcaactgggcgctggagatgatcaacaagcggcgggcgaagaatggcgagccgccgctggatatcgctgcgatcccgctggatgataagaaaagcttcgacatgctgcaacgctcggaaaccacggcggtattccagcttgaatcgcgcggcatgaaagacctgatcaagcgtctacaacctgactgcttcgaagatatgatcgccctagtggcacttgtccgccccgtgaatattcaaattgccgacggcaaagcgacggtcactggtgacggcctgagtcaggaggcgaaggagaaaatccttgttgcggtggggaatatttccggtattgccagtgtcgatgatcaggtgaaaacggcgacaccagccactgccagccagttttataccgttaagtctggcgacactctgagtgccatttccaaacaggtctacggtcaccagcgtcaccggatagcgcatcttcggcttctcgctaataaaagcatggcgtactttgtccaccaccgcttccggtcccaacgtaaagcgggcggcgatgccgggattttcgactggtttatcactttgcgtctggttgacgttgtcggtgaagcgaggcgatcacctcgtcggctgcgcgatcaacactttctggtgaatccagatcgatcaacacgccggtacctgcaacaggtgaacgagtcctttggctttgagctggaattttttgactttctgctgacggaaaaaaccgctaaaactgccaatggctgcgaagcggtatgtattttcgtaaacgatgacggcagccgcccggtgctggaagagctgaaaaagcacggcgttaaatatatcgccctgcgctgtgccggtttcaataacgtcgaccttgacgcggcaaaagaactggggctgaaagtagtccgtgttccagcctatgatccagaggccgttgctgaacacgccatcggtatgatgatgacgctgaaccgccgtattcaccgcgcgtatcagcgtacccgtgatgctaacttctctctggaaggtctgaccggctttactatgtatggcaaaacggcaggcgttatcggtaccggtaaaatcggtgtggcgatgctgcgcattctgaaaggttttggtatgcgtctgctggcgttcgatccgtatccaagtgcagcggcgctggaactcggtgtggagtatgtcgatctgccaaccctgttctctgaatcagacgttatctctctgcactgcccgctgacaccggaaaactatcatctgttgaacgaagccgccttcgaacagatgaaaaatggcgtgatgatcgtcaataccagtcgcggtgcattgattgattctcaggcagcaattgaagcgctgaaaaatcagaaaattggttcgttgggtatggacgtgtatgagaacgaacgcgatctattctttgaagataaatccaacgacgtgatccaggatgacgtattccgtcgccctgtctgcctgccacaacgtgcttgtttaccggggcaccaggcattcctgacagcagaagctcttgaccagtatttctcagactacgctgcaaaacttaaagcaatctggaaaaaggcgaaacctgcccgaacgaactggtttaatcttgccgctcccctgcattccaggggagctgattcagataatccccaatgacctttcatcctctattcttaaaatagtcctgagtcagaaactgtaattgagaaccacaatgaagaaagtagccgcgtttgttgcgctaagcctgctgatggcgggatgtgtaagtaatgacaaaattgctgttacgccagaacagctacagcatcatcgctttgtgctggaaagcgtaaacggtaagcccgtgaccagcgataaaaatccgccagaaatcagctttggtgaaaaaatgatgatttccggcagcatgtgtaaccgctttagcggtgaaggcaaactgtctaatggtgaactgacagccaaagggctggcaatgacccgtatgatgtgcgctaacccgcagcttaatgaactcgataacaccattagcgaaatgctgaaagaaggtgcacaagt

SEQ ID NO: 24855 - DNA, 789 bp, Homo sapiens
  SIMILAR (286)..(786): 911254mologous to Escherichia coli K12 probable nadAB transcriptional regulator,accession number AE000509,Smith-Waterman Score=799.
atgggttttgacgatacccgtgaccgcgcgttgttcgaagacagtgccatgtcgcagcagccgaccgtgccggatcgtctgcgttggttattgcaaacttttaaatatcagaaaaatattcgcattcatgctttcaacgaagagggcatggagccgtatccgcacggctgggatgtgtggagcaacggcatcaaaaagtttatggctgaaaaagggatccagccggatctgatctacacctcggaagaagccgatgcgccacagtatatggaacatctggggatcgagacggtgctggtcgaatccgaaacgtacctttatgagtatcagcgtgcgtgggaatatggccgcgattatgtcttttcacacctcggcggtgatgagatcgcattgcagtattctgactacgataaaatcgcgctgggccacgctcaatacattgattttgcggtgaaatatgccaataaagtggcatttatcgataccgattttgtcaccactcaggcgttctgcaaaaagtacgaagggcgggaacatccgttcgtgcaggcgctgattgatgaataccgtttcgatctggtgatcctgctggagaacaacacgccgtgggtggcggatggtttacgcagcctcggcagttcggtggatcgcaaagagttccagaacttgctggtggagatgctcgaagagaacaatatcgaatttgtgcgggttgaagaggaagattacgacagtcgtttcctgcgctgcgtggaactggtgcgggagatgatgggggagcagagataa

SEQ ID NO: 24856 - DNA, 330 bp, Homo sapiens
  SIMILAR (294)..(4): 981254mologous to Escherichia coli K12 probable nadAB transcriptional regulator,accession number AE000509,Smith-Waterman Score=499.
ttatctctgctcccccatcatctcccgcaccagttccacgcagcgcaggaaacgactgtcgtaatcttcctcttcaacccgcacaaattcgatattgttctcttcgagcatctccaccagcaagttctggaactctttgcgatccaccgaactgccgaggctgcgtaaaccatccgccacccacggcgtgttgttctccagcaggatcaccagatcgaaacggtattcatcaatcagcgcctgcacgaacggatgttcccgcccttcgtactttttgcagaacgcctgggatgtggggggagtgatatctttaacattgagttcccacat

SEQ ID NO: 24857 - DNA, 1998 bp, Homo sapiens
  SIMILAR (524)..(571): 621254mologous to Escherichia coli K12 probable nadAB transcriptional regulator,accession number AE000509,Smith-Waterman Score=49.
atggttatggacaacggacaaatcgtcgaaacccaggtggtgggagagaaattaaccttttcctctgacgatccgaaacgtacctttatgagtatcagcggtgcgcagatccgcgaaaacccgttccgctactgggaatatattcctaccgaagtgaagccgttttttgtgcgtaccgtggcgatccttggcggcgagtcgagcggtaaatccaccctggtaaacaaacttgccaatatcttcaacaccaccagtgcgtgggaatatggccgcgattatgtcttttcacacctcggcggtgatgagatcgcattgcagtattctgactacgataaaatcgcgctgggccacgctcaatacattgattttgcggtgaaatatgccaataaagtggcatttatcgataccgattttgtcaccactcaggcgttctgcaaaaagtacgaagggcgggaacatccgttcgtgcaggcgctgattgatgaataccgtttcgatctggtgatcctgctggagaacaacacgccagttccagaacttgctggtggagatgctcgcgatccccaatttgtcgagcctgctatagcccgcaaaatatattcatcggcttttccgttggtggatattaccgtggtgccggatgacgagattatgcaacaccgcaaaatggcgctgttggagttaattcagaaacatattcgtcagcgcgatctgttgggattagtcgaccaaattgtttcgctgctagttacagggaacactaatgacagacagctaaaagccctgtttaattacgtattacaaacaggggatgcccagcgttttcgtgcatttattggtgagatagcggaacgcgcaccacaagaaaaggagaaactgatgaccattgctgacagattacgtgaagaaggcgcaatgcagggcaaacacgaagaagccctgcgtattgctcaggagatgctggatagaggtttagacagagagttagttatgatggcccatgccggtccctacgccaaacagtttttcatctttaacagacgggccaccgaatttgtaatctttaccgacaggttgtttgaggaaaccttcgctggcagcgacctcatcctggaacgcggcatcaatacgtccggcagtcagctttgccgttacagcgcggcatattgtgcattccatgccgccagggcgctgacattggctggaacaaacgatagtattggccttcatccgatcccggatcgttccggcctgtggcgctatctcagcaccacattgctgctactgacgatgctgggtagcgccatttacaatggcgtacaggatggcgtcgataatggcgcggaaaaccatccgccatttgagatccctaaagagatttatcacgcctgggatctcaaatggcggatggtgccagcccagtttttgccgtgccagcgccacttcttcttcccccagtggtgcgccgtgcgcctcttccttacctgctttattcggcgaaccaaagccaatcaccgtacggcagataatcagcgacggcttatctttcacgctttgcgcttcaagtgttactgcgaaggggggacggagaaggctatgttggccgggcgacggttgtcccggtttaagcgtccaggcaaagatagctatgagctgcgcaaggctggcgcggcacaaaccatcgttgccagccagcaacgatgggccttgatgacggaaacaccagacgaagaagagctggatctacagtttctcgcaagtcgaatcgcaggtcacgatattcacgaactgccgtctggcggtcgcgatccgctctcctatgatgatccattgcgtcaaatcacccgcatgatccaaaaattcccgaaaccgatcatttcgatggtggaagggcggaaattcaccggttattccaacagaattcagggagatacacgcacggaacagaacaatgtgacgcaaacacggccagacaaaaaggacacggacacccgctaa

SEQ ID NO: 24858 - DNA, 2196 bp, Homo sapiens; identical to SEQ ID NO: 21760
  SIMILAR (301)..(771): 951254mologous to Escherichia coli L-rhamnose isomerase,accession number X60472,Smith-Waterman Score=768.

SEQ ID NO: 24859 - DNA, 3117 bp, Homo sapiens; identical to SEQ ID NO: 9168
  SIMILAR (2479)..(3114): 1001254mologous to Escherichia coli K12 putative glutamine synthetase (EC 6.3.1.2),accession number AE000228,Smith-Waterman Score=1134.

SEQ ID NO: 24860 - DNA, 2412 bp, Homo sapiens
  SIMILAR (1387)..(1322): 721254mologous to Escherichia coli O157:H7 putative L-serine deaminase,accession number AE005540,Smith-Waterman Score=80.
tcacggccactctgcctgtatgtgcccgtttcgatggcggtacagcaggttttcgctcaagcaacagcgcattctggcgcatgatccggtaaacacgtttggcattgatcgcaggcataccatcaagttctgcctgtctgcgaagcagcgcccataggccagttcgtcatccagtgttttccatgtctgcttgtattcgcgatgaatggcagcaatgaccgggctgatttttcctgttgaattttcagtgtactgttgattggctctggcgcgggcgagatcaacaacagacgtgtattttccggtttccttgcgttcaccttcgcgacgttttttccagatgcgcatctctgcctgaatttcgggccatttagcaccaggaatacatttatgcttaacccacccaatggcgtgcaacttaagctccggatacatggcgttaacttctggcattttcatcaacgcttcaacgatatgtccgtcgaatgttgccatgtcttcctgcaacaattcctgtgcgctaataaccatatcaacggtgatgtttccatgtggtccaccgagggttttgaacgctttaatgcgctgtaaatgcggggagatattcttgaatttgtgcgtctgctcttcgtcccagacaatctcgtaataatgatgcaactcttcagatgtccgctggctgttaagcgcttcatcattacgcgacaaaatcaccaggcaacgatcgcgattcttctcacggaagttggtcacacacttagtggcaatatcggcatactcttccgggcgatcaatcttgccttccatgttctgcgccggactgccgcccagtagttcagttaaccctgccgccgccattgaacaggccacgccaatctccccctgacagccgacttccgcgccagagatggaggcgttcattttatacagcgcgccaatagcccccgcggccagaaaatagcgggcaattgaccgctcgtttaccggacgacggaacttatcgtaataagccagtactgccggaataatgccgcacgcaccgttagtcggtgccgttaccacgcgcccgccagctgcgttttcttcactaaccgccagcgcgtacatgttgatccagtcgatgacattcatcggatcgttagagatgttatcgctggaaaccagctgacgacgcagcgctacggcacggcgcggcacattgagcggaccaggcagcacgccttcagtgttcatcccacgttcaataccgtcatgcatcacttgccagatacgggcaaaaccggcgtcaatttccgctttgctgcgcagcgctgctgagtggaaatcgtaaggtaacggaacgttcgacatcgtgcgacaggccgaagtgtttttcttcgacaataaaccggcgccaagagtaaaagttatattcggacgcatactacgcatcttgatagccatcatcatgtgcatatgttcccgcagattttcccgattgttgccaggtttgcggcagagcagggcattgcgttgcgggcggatcgtcagatggcgtttgatttgccggtcaacctgcgcactacccagggattcagcagtgcattctacggtgaagagatcagtgagtcgctgttcctgcaagtgctggatgacgcaggccatcggggtgatcgttcgctggaggtgatgtgtcatccggcgtttatcgataatactatccgtcagagtgcttactgtttcccacgtcgacttctgtaataccccggtcagggttaattcgctgtagcgtgccacgtctttgatttcgtggccgttaattcgataaggaatggtattgagtaccgagttttcccgcaccacgccacgttgcaacgcggtcatcaccaccatcggtttaaccgttgagccaggttcaaacacgtcggtgatggtacggttacgcatcgcctctttcggcgtgccgctcagattgttagggttgtatgacgggctgttagccatcgccagcacttcaccggtgttgacatccaccagcacggcgctaccagattcagccttgttaaaggccaccgcattgttcagttcgcgataaaccagcgcctgcaggcgttcatcaatactcagcgccaggttgtgcgcagcctggctgtcagtagaagaaatatcttcaattacgcgaccatagcggtctttacgcacaatgcgctcacccggctgcccggtaagccatttatcgaaactcttctcaacgccctcaatcccttgacggagcatgcagcacgcgatctggaggattctccggtacgcatcacggcctatattgaagatgttgatgcgctggcgcaggcgggcgcggacattatcgccattgacggcaccgaccgcccgcgtccggtgcctgttgaaacgctgctggcacgtattcaccat

SEQ ID NO: 24861 - DNA, 3441 bp, Homo sapiens; identical to SEQ ID NO: 24679
  SIMILAR (2814)..(1849): 971254mologous to Escherichia coli L-rhamnose isomerase,accession number X60472,Smith-Waterman Score=1642.

SEQ ID NO: 24862 - DNA, 3020 bp, Homo sapiens
  SIMILAR (334)..(1002): 931254mologous to Escherichia coli deaD,accession number M63288,Smith-Waterman Score=1046.
atggctgcattacggcaatcgttctggtcgcagctgtttgaccgggtgcatatcggccttgacttcttcgatgcctctatcaaccgcattgccgcgtgggtcattggtacacgcaatatgaaaaaagccctgctgcgtgcgttgctggaacctaccgctgagctgcgcaactggaagcggcgggcgattacactgcgcgtctggcactgctggaagagcagaaatcgttgccgtggcaggcggtctgggaaatgtattgccaacgtcacgatacgccagcaggatcaccagatcgaaacggtattcatcaatcagcgcctgcacgaacggatgttcccgcccttcgtactttttgcagaacgcctgagtggtgacgaagatctgggcctgaaggctcctatccttgaagcccttaacgatctgggttacgaaaaaccatctccaattcaggcagagtgtattccacatctgctgaatggccgcgacgttctgggtatggcccagacggggagcggaaaaactgcagcattctctttacctctgttgcagaatcttgatcctgagctgaaagcaccacagattctggtgctggcaccgacccgcgaactggcggtacaggttgctgaagcaatgacggatttctctaaacacatgcgcggcgtaaatgtggttgctctgtacggcggccagcgttatgacgtgcaattacgcgccctgcgtcaggggccgcagatcgttgtcggtactccgggccgtctgctggaccacctgaaacgtggcactctggacctctctaaactgagcggtctggttctggatgaagctgacgaaatgctgcgcatgggcttcatcgaagacgttgaaaccattatggcgcagatcccggaaggtcatcagaccgctctgttctctgcaaccatgccggaagcgattcgtcgcattacccgccgctttatgaaagagccgcaggaagtgcgcattcagtccagcgtgactacccggtccctgacatcagccagagctactggactgtctggggtatgcgcaaaaacgaagcactggtacgtttcctggaagcggaagattttgatgcggcgattatcttcgttcgtaccaaaaacgcgactctggaagtggctgaagctcttgagcgtaacggctacaacagcgccgcgctgaacggtgacatgaaccaggcgctgcgtgaacagacactggaacgcctgaaagatggtcgtctggacatcctgattgcgaccgacgttgcagcccgtggcctggacgttgagcgtatcagcctggtagttaactacgatatcccgatggattctgagtcttacgttcaccgtatcggtcgtaccggtcgtgcgggtcgtgctggccgcgcgctgctgttcgttgagaaccgcgagcgtcgtctgctgcgcaacattgaacgtactatgaagctgactattccggaagtagaactgccgaacgcagaactgctaggcaaacgccgtctggaaaaattcgccgctaaagtacagcagcagctggaaagcagcgatctggatcaataccgcgcactgctgagcaaaattcagccgactgctgaagaggtgtatgaacagcagacctcctggccgctgattctggaaaacagccaggttgtggtgctgtggggaatgaacccgctgaataccttaaaaattgcctggagcagtaccgatgagcaagggctggaatacttccatcagctgaaaaaatctggcaaaccagtgattgccattgatcctatccgctccgaaaccatcgaattctttgacgataatgccacctggatcgcgccgaatatgggcaccgacgtggcactgatgttagggattgcgcataccctgatgacacaaggcaaacacgataaagtgttccttgaaaaatacactaccgggtatccgcagtttgaagagtatctgacaggtaagagcgataatacgccgaagagcgcggtctgggcggcggaaattactggcgtaccggaagcgcagatagtcaaactcgctgaactgatggcggcgaatcgcacaatgctgatggcaggctggggaattcagcgccagcaatatggtgaacagaaacactggatgctggtgacgctggcggcgatgttagggcagattggtacaccgggcggcggttttggtttctcttatcattactccaacggtggcaacccgacgcgtgttggcggcgtgctgccggaaatgtctgcggcgattgccggacatgccagcgaggccgctgatgatggcggaatgacggcgattcctgttgcccgtatcgtcgatgcgctggaaaatcctggcggcaaatctcagcataacgcaggtgaactgctgaaaatgtgtgattacaacggcctgtctatatctggtctgatgatgcacaacgagctagcgctgcgcacaaagcaggaaattgacgccggttttgcccgtatctggcaagtgatgcatgacggtattgaacgtgggatgaacactgaaggcgtgctgcctgctggtttccacgataacatctctaacgatccgatgaatgtcatcgactggatcaacatgtacgcgctggcggttagtgaagaaaacgcagctggcgggcgcgtggtaacggcaccgactaacggtgcgtgcggcattattccggcagtactggcttattacgataagttccgtcgtccggtaaacgagcggtcaattgcccgctattttctggccgcgggggctattggcgcgctgtataaaatgaacgcctccatctctggcgcggaagtcggctgtcagggggagattggcgtggcatgttcaatggcggcggcagggttaactgaactactgggcggcagtcaggcgcaggtacaaatcccgtgcattgaacgtaatgccattaatgccgtgaaagcagtaaacgccgcgcggatggcgatgcgccgcacctcggcaccgcgtgtttcactcgataaagtgatcgagacgatgtattaa

SEQ ID NO: 24863 - DNA, 1191 bp, Homo sapiens; identical to SEQ ID NO: 10699
  SIMILAR (681)..(827): 751254mologous to Escherichia coli K12 putative chaperonin,accession number AE000297,Smith-Waterman Score=180.

SEQ ID NO: 24864 - DNA, 1735 bp, Homo sapiens
  SIMILAR (601)..(14): 981254mologous to Escherichia coli HisP-like nucleotide binding protein (phnL),accession number J05260,Smith-Waterman Score =983.
  misc_feature (1)...(1735): n = a,t,c or g
tgtgcgccacgggttttgcgtcgcgaatcagttccaccaccgcggcgctgtttntggcgtccagcgaggcggtaggttcgtcaagcagcagaatggggtagtcgacgataaagccgcgggcgatgttgacgcgctgctgttcgccaccggaaaatgtcgatggtgccaggtgccacaggcgttccggcacgttcaggcgggtgagaagacgcgcggctttagcggcgcaggcttcacgcggaacgccggtatcgagcagcggctgcatcaccacttccagtgctgagatacgcgggatgacgcgcagaaactggctcacccagccgacggtggttttgcggatttccaccactttgcgcgctggcgcggtgaccaggtctacccactcgtcaccgtgtttgatctggatttgaccttcgtcgggcagatagttggcgtacagcgagcgtagcagagttgatttgccgctgccggaatggccgtggagcaccacgcattcgcccgcgttgacggtgagcgaggcgcgattgaggacgggcaggcgcacgccgttttgctggtgcaggatgaaggttttactgacgttttgtacgttaatcatttttcgcctcgtggttcgggtgtcggatgcggctgacgcgtccggatcatgtgggtcgaggaaatcggccagcgattcggtaaccatccattcggtgcgtcgctgctcttctgtggtggtaacgctcacatccgcaatgcggatatctacaaaaccacacttcttcagccagtttttcagcgccagcgcggaagggatgaaatagacattacgcatttgcgcgtaacgatcgcctggtaccagcaccgtgttctcatcaccatcaataaccagcgtttccagcaccagttcaccttcattgaccagttgatctttcaactgccatagatgctccagcggtgaacggcgatggtaaagcacgcccatcgaaaagacggtatcaaaggctttcagtgccggaagttgttcaatactaacggtaacaaatgcgcgcgcatctgctcgaagtgcctgcatcatctcaataaccgcagctgtgagcggcagttgtgcgccgacgccgtgagaagtatccagcgcattcgccagatccttaatatgcagatcaatacggaagcccggcttgaagttgcggtccatcaccatcggcgctttggcatccaaaacggtactgcccgccagtccaccgcgaattgcctgataaaccaggtccgggttaacgcccgctttagttgccagcgttaacgcttctgacatcgcggcaatattcagcgccacaatgacctgatttgccagtttggtgacgttacctgcaccgatttccccggtatgcaccacggaacccgccatcgctttcatcaaatcatagtatttgtcgaaaatagccttgtcgccgcccaccatcactgacagcgtaccgtcgatggctttcggttcaccgccgctcaccggagcatccagcatatcaatgcctttcgctggctccgcgccttcaataatgccattctcacccagcgccacctctttcacatgaggggagtttggcagcatggttatgatgacgtcgcactgttcagcgatcgctttagccgtagacgctgtttctgcacctgcagcaatcacgtcagcaatagcttctgggttacggtcagcaaccaccagcgagtaacctgctttcagaaggtttttactcat

SEQ ID NO: 24865 - DNA, 4182 bp, Homo sapiens; identical to SEQ ID NO: 10696
  SIMILAR (2001)..(1114): 991254mologous to Escherichia coli K12 putative enzyme,accession number AE000280,Smith-Waterman Score=1575.

SEQ ID NO: 24866 - DNA, 3024 bp, Homo sapiens
  SIMILAR (534)..(4): 1001254mologous to Escherichia coli calcium/proton antiporter,accession number L28709,Smith-Waterman Score=890.
tcaggcaaatatcgtcatcaaataggcggcaaacagtgccagatgcgctgcgccattgagcacgttagtacgtccggtggagaaggagatatggcacagcactaaagaggccaccatcaccaccatttctggcgcaccaagtgcaaactgcaattcgttacccgtcataaaggcaattagcgtgacgacaggtacggtaagcgaaatggttgctaacactgaaccaaagaacagattcatcgcgcgctgaacctggttgttcaacactgcttttaatgcacctaaaccttccggcgacagaatcaacagtgccaccaggaagccagtaaaggcgacaggggcattcatgctgtcgagcaatgtctccagcgagctggcgttcattttggtcaccgcaataacggcaatcagatggataatcaaccagatagcatgccacaggctgctatgggcagacggtttaccgtgatgcgggtcgtcatcatcactgtcatcttcgtgctcgtagacaaacaaactttgatgcgttttggtaggtgcagcacccgccggatgcggcaaaatacccatcgggatgccataaatcatttcgagggtttcgccgcgcataatttccgcaggcgttccctgagcaatcatttcaccgccgcgcagggcgaccagataatcacagtagcgtgccgccatattgatatcgtgcaacacggcaatgaccgtcaggccacgctcctgacttaaacggtgcaccagcgacagcacatcaacctggtgggcgatatccagcgccgaggtcggttcgtcgagcaacagacaacggctatcccggtatgcgtgcataaggtgcatggccagatctggaaaatggcttgtgtaaaaacggcagtgcgaacgtgttaacggcggatatccccagctcgcagctggcaaatgcctgtgccggtaactcagcgttggtgtatatcgaaaaatatacgggcaatgcaccgaagttaacggcgtttgatcagccagcgcgcgtttaggtgccggataaccttccaccgttttacccggatcatgtgggtcgaggaaatcggccagcgattcggtaaccatccattcggtgcgtcgctgctcttctgtggtggtaacgctcacatccgcaatgcggatatctacaaaaccacacttcttcagccagtttttcagcgccagcgcggaagggatgaaatagacattacgcatttgcgcgtaacgatcgcctggtaccagcaccgtgttctcatcaccatcaataaccagcgtttccagcaccagttcaccttcattgaccagttgatctttcaactgccatagatgcttcacgctagcagctgccagggaggctgtgcgtgtcggggtaccacatgtgacgtccagctggctagcttgcagctcagccaacactttgccgttaaccctaagggccaggtgcctgcattgctgctggatgacggtactttgctgacggaaggcgtagcgattatgcagtatcttgccgacagcgtccccgaccgccagttgctggcaccggtaaacagtatttcccgctataaaaccatcgaatggctgaattacatcgccaccgagctgcataaaggtttcacacctctgtttcgccctgatacaccggaagagtacaaaccgacagttcgcgcgcagctggagaagaagctgcaatatgtgaacgaggcactgaaggatgagcactggatctgcgggcaaagatttacaattgctgatgcctatctgtttacggttctgcgctgggcatacgcggtgaaactgaattcgcgcgtaatgttgctcactgatcaacgccgtcattgcgcggctgatcgacgcttcaatatcgatagccggatagtgcccggcttccgccagtcggcgagacagcacaatgtgaccgtcgaggatcgcccgcgcggagtcggcaatcggatcctgctggtcatcgccagcgatatccagcgggtccagcgccacgccgcgcaggtagtaatcgaacggtgaacggctggcgtgatgatattgctccagatgctgaccgataaaccaggcttcatctgtactggtaatgtcttgtgctgccagtggcgctttggcgacgtccggtaacggcaacgcttgcggctgatgttcctgataactcagtacaatattgccgtcggcatcggagagctcaatggtcagcctttcaggattgataccgtgcaacacgccctggatggcggtcgcaggcatcagtgccacggcatcatcaagtaacgcgttgcatttaccgatttcgcggatcgccaggcggtatccgttcaacggagagatggcatacagcccccactcaatcccccgcttactacgctggagttttatcaccgcatcgcgggaggcattttgcaccatgcccaaagaatgataaggcaggaaatactgctcaaaacgcttctcttcgtaagcatcaagccaggtaaaatcgggctggttatcggcaaaaataccggtcatcagttcgatatacgggccgttattgtcggtcagactcttatcccacgcctggccaaattcactgtgtccccaactccactgttttttacctggcgcaatatggagtgcctcttcattgcttaaatctggcaacaggccattaatacggctggcgagcattgttttacctgttcccggcggcccaatcagtaaaaggttgtgcccgccagcagcggtaatttccagtcctcgctttccttgttcctgaccgataacatcactgagatcatgttgtagcgcccggatacgtggacacacgtcatgtacgtgctgcaccatgctgacaagccaaatctgtatcatggcttgccggagaacccggaaatcagcgaaaccgtgaaattctggaaaggcatctggaaaccgctcgcggctgttggctttgcggctacctttgcggccagtatcttccactacgtgggtgtcggtccgaaccgtgcggatgaggaagagaataatcat

SEQ ID NO: 24867 - DNA, 504 bp, Homo sapiens
  SIMILAR (1)..(231): 1001254mologous to Escherichia coli Biotin sulfoxide reductase 2 (EC 1.-.-.-) (BDS reductase 2) (BSO reductase 2),accession number D90829,Smith-Waterman Score=408.
ttacacagtcagcttaactatgcggaactgcgtaaaaaatatgcgatcgccgatcgtgaaccaatcactattcacaccgaagatgctgcacgctttggtattgcgaatggcgatctggtgcgtgtctggaacaaacgtggtcagattttgacaggcgcggtggtgactgacgggatcaaaaaaggcgtggtatgcgtgcatgaaggtgcatggccagatctggaaaatggccggatcatgtgggtcgaggaaatcggccagcgattcggtaaccatccattcggtgcgtcgctgctcttctgtggtggtaacgctcacatccgcaatgcggatatgcttaggcggtagatcgctggtccacaacggttccatacctaataaccgggttccggacagtccttcatgccgtgacttcatccctatttcgcgtaacggaatgagcgccataagggtaaggtcagcgaagtacatagaaaacgcgagtccgatgggcttcggtaccat

SEQ ID NO: 24868 - DNA, 1378 bp, Homo sapiens
  SIMILAR (919)..(1203): 921254mologous to Escherichia coli HipB protein,accession number D90782,Smith-Waterman Score=479.
ttacagaagacctttcaaacgtaacgtttttcgggtggcgacattcaaatcataatgcaccagataatcaggtttaaatgtcgcgtcacgcttatctttagcaatatatgtcaggcaatgattatgggtgaaaataacgatatttttatcaggcgctttgctttgtaagtccttaattgtggtcctctcagattgcaggatcagagggcagttctgaaagtctccttggtcagggagctggtttgcagagctgaaggggaggagggggccaggaggttgcttgcggccgtggtcctgaaaatcaggccctgccaagggtctctgagggccagccggatcatgtgggtcgaggaaatcggccagcgattcggtaaccatccattcggtgcgtcgctgctcttctgtggtggtaacgctcacatccgcaatgcggatatctacaaaaccacacttcttcagccagtttttcagcgccagcgcggaagggatgaaatagacattacgcatttgcgcgtaacgatcgcctggtaccagcaccgtgttctcatcaccatccataaccagcgtttccagcacagttcccttcattgccagttgactttcaatggcaagatgcccaccgggaacgcgcgttatagcgtacaggcaccgtagcatttgtccgttataacgcacaagtgataaacttccgttttgccggaggagtcgcatggaaaatctcgctcgctttttatccaccacacttaaacaactacgccagcagcgcggctggagtctttcgcgactggcagaagcgacgggcgtttctaaagcaatgttagggcagattgagcgtaatgagtccagtccgacggtcgcgacattatggaaaattgccaccgggttgaacgtaccattttcaacatttatttctccgccgcagtccgctacgcttcgctgtttccttatgatccacaactctgctttgaacacttggcgattcagatggcatctggtgcaataagcgaatcgacgccccatgagaagggggtaatcgaacatgtcgtcgtcattgatggacaacttgatctgtgcgttgatggggaatggcacacccttaattgtggggaaggcgttcgatttgctgcagacgtcacgcatatctatcgtaatggtggggagcaaaccgtacattttcattccctcatccattacccgcgcagttaagcgggaaaactatttcgcaacgtcgcgcttgtggctaaaatagccgccatttttcagctactggataagaatgtgaccgtatcttctcatcgacttgaactgttaagcccggcacgcgatgccgccattgcccgcgaagctatgtttgcacggtgccgatgctgtttatatc

SEQ ID NO: 24869 - DNA, 3858 bp, Homo sapiens
  SIMILAR (3858)..(3334): 981254mologous to Escherichia coli coenzyme A ligase,accession number X97452,Smith-Waterman Score=914.
ctaaaaccggtaaatacgacccgtgattgcgctcggtacggttattcgtggtggcactgcccactttgaatatgtcgctggtggtgcaagcaaacgctggcgcatgttgcccagacagcgaaattccgggtgcttttggggttctgacactgaaagcatgaacaaacgatgaacgtgctggcaccaaactgcacggggggtgggggggcaaatgcttgacagcctgcaggtcggctttatgggcagaccttcagataaggccgtacgaccataaaaaccgtggtagcaatgtacacaaccgggtgcctgccagtggggcagcggcgatggccatacattgtctggaatgtggatgggctccccttgctgccggcgacaatgtgggcaaagtttgcgtaccagacgctgggctattaccagcgtaagcgccgatgatagcatccagcgggcgacccccatttgctgtaaacgtaccagcgtttcgcaggtggaattagtgtgtagggtagacaacaccaggtgaccagtttgcgccgctttaatagcgatctctgctgtttcgccatcgcggatctctccgatcatgatgacgtcaggatcaaatgaaacggcgtttcttccattcacagtgaattcccgtcctcggcagccgatgttccggggggttggggggcaatgcttgcaagcctcgtaggtcgcctgttggaacagccctggatccgcgttttcagacctatcgctatttgcgtacgccggaagaaccggtaaaacgcgatagcccacgtcgtgccttccgtacatttgacggggcatctgcgatgtatcacttttcttcaaccgaaacttcccgcaaaactttcttcgtaaaaacgttgcggatacccgatcttcataccgggatacatcatttatgctgacgatatcgatcacttcatcgagttggtcatcagcaatcgccacatcaatttttacttttggcaggaaattgacgctgtattccgccccccggtacagctcggcatgccctttctgacgcccgaaacctttcacttcggtgacggtcaggccctgaataccaatggaagataacgcttcacgaacgtcttccagcttgaatggtttgattatcacggtcaccagcttcatagatcccctccggtcagaattcggtaatggttctgctacacgaagaaggtattgcaagcggtgtgccagaaatgaaaaacgagaaagagagcaggaagttaagaagtttgaaaatgaaaacgcagctggctgccagctcttcgcccgcaagttgcagttgatacatctgccagtagcgtccctgggccgccagcagttgctggtgagtgccctgctccacggcttgcccacgatgaagcacagaatggtgtcggcatcaacaatggtcgataagcggtgagcaatcactaccagcgtggtatgttcacgcaccgccgccagagcatgttgaatcgcctgttcagtaccggagtcaatgctggcgggtgcctcatcaaggatcaggatttgcggcgtctcgaacagcacgcgcgccagtgccagcagttgcttttgcccagggccgaggatcggcgcaacattgagcaatccttctttcgcctgatcgtcaggcagtacgcttaaatactccagatacagcggtagataatcgggcagttcccgacaatccagctgcaggccgaccttttcatactccgccagcaggtccaccattgcctggccgcgatcgcgggactcggcatgaacatgttcgaacagcagcagcgacgtggtgcgcccgcggtcaaacacttcgcaccattcggcctgtttatccagcagcggcgcgttaagcaggttgtgggtgaaatccgtaagcatcggcgcgtcgcggcggatcaacgccagcgcgtcctccttgcattcccacaacagctcgtccggatactccatcaacaggccgatcactttgaggatttcggtgatgttgatggcatcgatacggctactgttgaacaggttgaatttactgtccgaaccgtggcaaccgtcgccaaaggtaaaaccgcagccgttgcgttctgcgaaggcatcgcccgccatttcccgatggctggtcgggataacaaaacgatcttcatagttggcaatggcgagatagcgatacatctcttcgacctgggcgacgctcagggctacttcgtcgatggcacgagtatcagtaacgcccttcacggtttgtgaacgcatatagtggcgcatcgccatcatccgtttcagcgcccgcagtaccggaccggtatcgccggcactcacatattcaaggggctgacggctcctaccgcaaaactgcaataccgtattccggaccagccttcgcttgacggtaataccgtcgatatggatcgcgaacgcacccagtttgccgataacagccgatccgacaaataccggcgtcagtaacaccagcagtagttcgctcacgggcagcaacgccgcagatttacaaagcagttttctgactttgctggtggcgcagatgccgggtaaaaagtcttttgtctcggtacgacgctggaccagaattttgcccatgccatcatgcacgacgatgtaagttgcacgatgacgcagacactgtgcccgcatttgttcccggctggcttgtgcaatgacttcgttctcttcattgacaatatccacccattcagtacttgccaaacgacgctgttccattatcaggaaaccttctttttctggcgctggattaatcgcgacctgcgcaatgatactttgatcattgagtgcgattacactaagtacgtcattatccagcatgccataactcgccggattaccgcctttcggaatactcaccgagccggggttgaagtggaaaatctccccccgctgttctgccactggcagatgggtatgaccgtacaccagcacatcgttctggtttaaagcaggcagattttccgggccaaaaagatgaccatgcgtcaaaaacagacgttgtttttccagtaatacctgttgccacggcgcggttatcgggaaatgcagcagcatttgatccacttcgctgtcgcagttgccgcgcacagcgataaccttatgtgccacttcattaagccgttcagcgactttggctggcgcgtaaccctccggtaaagcattacgcgggccgtgattcaacacgtcgccaaggatcaccagccactgggcaccgctttgggcaaacaactccagaacacggtccgtcgccggtaaggaaggtgggcggcatagttggcatgcgctaggtcgacataaatgacgcctgcgaaggaccaacatgtcatcgctgcgtccgctgatgcgatccatgcggcgcatagtccgcgccgttcctggtaacagtcgggttaaatcacgcgtgcggtaacgaatgaccggcaatgcttctttggtcagcgtggtgaataacagttcgccatgttcaccatcggcaagcggtgtgccgtcatgaggattaacaatttcaggatagaaatgatcttcccaaatggttgggccgtcggtagtttccagacactccatcgccacccccggccccatcacttctgacaggccataaatatccagtgcggtgatccccaggcgacgctcaatctctttacgcatggcctgtgtccacggctcagcaccaaatactccaacccgcagcgagcaaccgctggcatcaccgcccaactgccgctccagctcttcaatcaggttaaggcaataagatggcgtaaccatgatcatatctggttgaaaatcacggatcagttgcgcttgtttttccgtctgcccgccagacat

SEQ ID NO: 24870 - DNA, 628 bp, Homo sapiens
  SIMILAR (479)..(625): 951254mologous to Escherichia coli Rod protein FlgB,accession number D90743,Smith-Waterman Score=236.
tgtacggatcccatgtccgtacctgtacaacgccacgattggaatattctggggattctcaacttaatccgtttgtacaacatgaattgtacctgtccgcaatgaccatcaacggcataaatagcgacccattttgcgtttattccgccgataacgcgcgcgtaaaggcatttaagctgatggcagaattttgatacctgcggaggagatatgctcgataagctcgacgccgccttacgttttcaacaagaggcgctcaatctgcgcgcccagcgtcaggaagtgctggcagcaaacatcgccaatgccgatacccctggttatcaggcgcgcgatatcgattttgccagtgaacttaaaaaagtcatgcaacgtggacgggatgcaaccagtgtggttgcactgacgatgacctcaacgcaacacattccggcgcaggcgctgacgccttctaccgcagaactgcaataccggatttccggccaacccttcgcttgacggtaataccgtcgatatggatcgcgaacgcacccagtttgccgataacagcctgcaataccagatgagccttagcgcgttgagcgggcaaatcaaaggcatgatgaacgttttacagagcggaaattaa

SEQ ID NO: 24871 - DNA, 414 bp, Homo sapiens
  SIMILAR (1)..(411): 841254mologous to Escherichia coli 3-methyladenine DNA glycosylase II,accession number K02498,Smith-Waterman Score=649.
atgctagcaaaattgaccgccagagtggcacagctttatggcgaacggctggatgattttccggagtatatctgcttcccgacgctcagctggctggcagcagcagacccgcaggcattaaaagcgttaggtatgccgttgaaacgggcagaggcgctgattcatctggcaaatgcggcgctggagggcaccttaccaatgacaataccgggcgatgtggagcaggcgatgaaaacgctgcaaacttttccgggcgaaagatgttttctgccggatgattatctgattaaacagcgatttccgggaatgacaccggcgcaaatccgccgttatgccgagcgctggaagccctggcgttcttatgcgctgttgcatatctggtatacggaaggctggcaaccagacgaagcatga

SEQ ID NO: 24872 - DNA, 1395 bp, Homo sapiens
  SIMILAR (1062)..(4): 1001254mologous to Escherichia coli similar to ~start codon is not identified yet,accession number D90869,Smith-Waterman Score= 1814.
ttagttcttcttttcggatccggcacttctgggggggaaatccagcgatggctggattatgtcgtcaattaaaaatgcggcgagtagattagcaaatatccacgctttcgcgagttcaggttcctttgcacgcaaagcatccaggtgcagcaaacttttgagccgcttaaaagccagttcaatttgccatcgcagacggtaacaatcagccacttgctctgctgaatattcatcttccggtaatgatgttagcaatagcacatggcccgctgcttccagcgtttccgcctgaactactcgtccttttcgacgattctcgctgagcagtcgggttttactgattaatgctttttcgggaggaagtgatacggcaatgagacgtgccggaaagggagctccggcttttttattacctgaattgcctatcattacagtggtttcaccgttcttaccgcaatccagcccgcgcagaaaacccatcatgtcaaagcgcattccttctgcagttaaccagcgcaatcctcgccagtgaacccggacgatataatcagcttctccaaaagcaagtgagcggatacattcgggacgcgaaccgaatccccggtcagcaatgcgtatctcgtctgccgtttgcgcaaatcggtccagccgttcagcgtctctgctgtcggttagctcaaaatcagtgaactgacaggtatgaggatcatatcccatatgtagtcgccattcagcgctgccgcccccgggcgcactgattgctgttccatcgacaagacgcaatctctttccgcttgtacaacccgtaactgcggcgcgtacagcaagtgtttgtgcggcaagtatgccaaaccagtcggcggcattccgcagccgcttcaggagagccacgtcagataatgttgcaacgtcatggagctgagcccatgcagtgacttcacgtaatgacatccccccggggccgtaagccagccccagacgtagcagagttgcagcatcacgaatttcgcggcggcgggttagagccccggcattacgtgccgaagtatccagttcttcgggcacatggtcaggctccaaattttccaaacttttatgctctgcttcccttgtaaatataagttccgatttcaggtcatttctttgctcacaaatataaacaaaggctactagaagcaaccaggccacatcgtgaatgctttgctgcttagaaatttcttccaccagatacactaaatcatcactctcaagttcaaagtcctttactccagctcccaataagttcattatttccatctgatacccccttagcctggacttcatgtccatatcactattggcattttggtcacaacaatttaacaagtctctaggaagttccaaactttccctcat

SEQ ID NO: 24873 - DNA, 651 bp, Homo sapiens
  SIMILAR (499)..(639): 1001254mologous to Escherichia coli narP,accession number U00008,Smith-Waterman Score=232.
gaaatagacgcagctgcgtggatcgccttctccaccccacatactgaagccagaataagccacgacttcgtgtgctccacgcgagggccgcctgacgccagagtttctcccgcatctgccatcagaggaccgtcgccctcaggagcccgagctcccgcggatgcccacgatgggcgcttgttcacctcagtctcggtacccaaaagtatccaagcggcattcaaattctgcccctactgtggaaattctttgcctgtagaggagcatgtagggtcccagacctttgtcaatccacatgtgtcatccttccaagaacttgcacagaaaacacaagacataatcatttaccataacacccgcatagagaacgaacgagcacagacgaacaacgcatgcccaacccatataaaccgggagcatcatagcaataaagtggccgtcgacattcgcttgatcaactgtgatctgcctgcttctgacaacggtagcggaatgccggtgatgattgtggatgatcatccacttatgcgacgcggtgttcgtcagttactggagcttgatcctggctctgaagtggtcgccgaagcgggcgacggcgcgagcgctatcgatctggcgaatagactggatatcgacgtgccaacatggtga

SEQ ID NO: 24874 - DNA, 648 bp, Homo sapiens; identical to SEQ ID NO: 65
  SIMILAR (186)..(157): 701254mologous to Homo sapiens Human secreted protein, SEQ ID NO: 7083,accession number G03002,Smith-Waterman Score=39.

SEQ ID NO: 24875 - DNA, 693 bp, Homo sapiens
  SIMILAR (342)..(304): 921254mologous to Homo sapiens Human secreted protein, SEQ ID NO: 7115,accession number G03034,Smith-Waterman Score=70.
atgaagccgcggaccctcgcactgagtgttacagttcttaaaggtggcgtgtccggagtttcttccttctggtgggttcgtggtctcgctggctcaggagtgaagctgcagaccttcacggtgagtgttacagctcttaaggcagcgcgtctggatttgatcgttcctcccggtgggctggtggtctcactggcttcaggagtgaagctgcagaccttcgcggtgagtgttacagctcttaaggaagcgcgtctggatttgttcgttcctcccggtgggctcgtggtctcgctggcttcaggagtgaagctgcagacctttgcggtgagtgttacagctcataaaagcagtgtggacccaaagaactcaggagcccagctggcttcacccagtggatcccgcaatggggctgcaggtggagctgccttccagtcccctgccgtgcacccacactcctcagcccttgggtggtcgatgggactgggcgccctggagcggggggcggcggtcatcggggaggctcgggctgcccaggagcccacggagggggtgggaggctcaggcatggcgggctgcaggtcccgagccctgccccgcgagaaggcagctaaggcccagcgagaaatcgagcgcagcaccggtgggctggcactgctgggggacccagtacaccctccgcagccgctggcccgg

SEQ ID NO: 24876 - DNA, 1134 bp, Homo sapiens; identical to SEQ ID NO: 14981
  SIMILAR (694)..(1116): 1001254mologous to unidentified bacterium transposase,accession number Z78058,Smith-Waterman Score=725.

SEQ ID NO: 24877 - DNA, 849 bp, Homo sapiens
  SIMILAR (690)..(496): 981254mologous to Escherichia coli was o492p and o826p before splice,accession number U28375,Smith-Waterman Score=331.
ttaacacttctcccttccttttctttctttccttcctttttctttctttttcattctttctttctttttctttctttctttctttttcgtttctcttttttcttttttccgttttctctttccttctttttcttctctttttctttttcctttccttccttcctttctttcttctttctttcctttctttctttttctttctttgcgtgcgttgctcggttcgttgaaggcgatagtatgcttgcgagtgttggcggaagtccgcttactgtttcccagaactcctggttctgtaaagagcaagaacacggagtaatactgctccaatgacaataccgggcgatgtggagcaggcgatgaaaacgctgcaaacttttccgggtatcgggcgctggacggcgaattattttgctttgcgtggctggcaggcgaaagatgttttcctgccggatgattatcggggtacgcgagcccacaacaggtctcgagcgtgatttccagcatttccagtgcttgcgtcagcttgaggtcgtgatcaaatgactcttcttttaagcctatgtaaccgaaaccgcagacatcgaggatctcacgaacacgcgcgtaccccagtaaggtcgggttaagtttcacaaaggtgttgagccctttttcttccagcatgtagcggcaaatggcttcgatttcattctcactgggataaaatgttttaaaacaaggcaaaaacctaacaggatccatgtccactcctgcgtccgcagcacctctgtgctgctgtggcttgctggatgtaagtcctggatccactggaccctgcatctcttcataggctgccttgaatgtcctcat

SEQ ID NO: 24878 - DNA, 652 bp, Homo sapiens
  SIMILAR (529)..(218): 991254mologous to unidentified bacterium transposase,accession number Z78058,Smith-Waterman Score=511.
ccaacgcttcccaataattgctctgattattacgttccatcgccacgatggcctcgcgtatatgttgtttattgttttcatctgacaacattaacttttcccacgcttcatctgataatgacgcctgtggcgtgcaaattttacgtaaatcttgtaataccgtggttttctcttttgcggactgcagtgagctaaaaggcgactcggcgtatacgatgctgattgctgttccatcgacaagacgcaatctctttccgcttgtacaacccgtaactgcggcgcgtacagcaagtgtttgtgcggcaagtatgccaaaccagtcggcggcattccgcagccgcttcaggagagccacgtcagataatgttgcaacgtcatggagctgagcccatgcagtgacttcacgtaatgacatccccccggggccgtaagccagccccagacgtagcagagttgcagcatcacgaatttcgcggcggcgggttagagccccggcattacgtgccgaagtatccagttcttcgggttcaaccagtgtatcttccatctcctggatcatcagacgaaccagtttctgtggatcttccgctttctctaacagagcgttgatgttggcattcacgatgtcggcaaagcgagaaaaaatacccat

SEQ ID NO: 24879 - DNA, 2259 bp, Homo sapiens
  SIMILAR (1)..(888): 1001254mologous to Cloning vector pZC320 SopA,accession number U26464,Smith-Waterman Score=1548.
atgaaactcatggaaacacttaaccagtgcataaacgctggtcatgaaatgacgaaggctatcgccattgcacagtttaatgatgacagcccggaagcgaggaaaataacccggcgctggagaataggtgaagcagcggatttagttggggtttcttctcaggctatcagagatgccgagaaagcagggcgactaccgcacccggatatggaaattcgaggacgggttgagcaacgtgttggttatacaattgaacaaattaatcatatgcgtgatgtgtttggtacgcgattgcgacgtgctgaagacgtatttccaccggtgatcggggttgctgcccataaaggtggcgtttacaaaacctcagtttctgttcatcttgctcaggatctggctctgaaggggctacgtgttttgctcgtggaaggtaacgacccccagggaacagcctcaatgtatcacggatgggtaccagatcttcatattcatgcagaagacactctcctgcctttctatcttggggaaaaggacgatgtcacttatgcaataaagcccacttgctggccggggcttgacattattccttcctgtctggctctgcaccgtattgaaactgagttaatgggcaaatttgatgaaggtaaactgcccaccgatccacacctgatgctccgactggccattgaaactgttgctcatgactatgatgtcatagttattgacagcgcgcctaacctgggtatcggcacgattaatgtcgtatgtgctgctgatgtgctgattgttcccacgcctgctgagttgtttgactacacctccgcactgcagtttttcgatatgcttcgtgatctgctcaagaacgttgatcttaaagggttcgagcctgatagtgacctaaggtacctgcagtcctgcgagtggggagacactggaatttttctgaagtggtcctgcattcctgccgagaaggggctgcagacctctggggcctgggtagaggcagcagatatacccctgctccctggctccccacgccggctgagccctcaggcagggtccagagggggccagggccccaaacatggacagcagtgtctcaagatgccaggtccccgggccccaggtctgcagggcggttccaacagagatcctggccagccctgcggtggagagagcacccgcagcagctctgtcatcaacaactatctggatgccaatgagcctgtgtccttggaggcccgtcttagccgcatgcacttccatgacagtcagaggaaggtcgactatgtacttgcctaccactaccggaaacgcggggtgcacctggcccaaggcttccctggccactcgctggctatcgtctccaatggggagacaggcaaggagcctcatgctgggggcccaggtgacattgagctgggaccgctcgatgccctggaggaggagaggaaggagcagcgggaggaatttgagcacaatctgatggaggctggactggagcttgagaaggacttggaggtctggcagagcctggatgtctggcatctcaacctgaattgcagcactgagtcaaagggggatatcttggatgctggggtccagcaggagtggacacgggaacccccaaaggcttcagagtggaagccccagggtcctcggagctggtgtgggtttgctgctggctccctgcacacgctgcccgtgcgtggttacgagtttgtgtataaggatggggaaaagggaaaggaagcagaagcagggtcagagctaaggagccacgtgaagctgattccacataaacaattttttcttcaaatcatcaataatcagcagatgaagccgcaggcaggagtgaagctgcagaccttcgcggtgagtgttacagctcttaaggcggcgcgtctggagttgttctttcctcccggtgggttcgtggtctcactggcttcaggagtgaagctgcagaccttcgcggtgagcgttacagctcataaaaacagtgtggacccaaaaactcctgctgtggtgagaagaggcaaaggtacagctcaggtcagtgcttcagagggtgcaagccccaagacatggcttccacgtggtgttgggcctgcaggtgcacaaaaggcaagagttaagatttgggaacctccacctggatttcaaaggatgtatggaaatgcctgcatgtccaggcagaagtctgctgcagggacagagacctcatggaggacctctactagggcaatgcagaggggaaat

SEQ ID NO: 24880 - DNA, 1173 bp, Homo sapiens
  SIMILAR (313)..(257): 681254mologous to Homo sapiens Human secreted protein, SEQ ID NO: 7115,accession number G03034,Smith-Waterman Score=69.
atggtgagtgttacagctcttaaggcggcgtttctggagttgttcattcctcccagtgggctcgtggtctcactggcttcaggagtgaagctgcagaccttcgcggtgagtgttacagctcttaaggtggcgcatctggagttttctccttctgatgttcggatgtgtttggagtttcttccttctggtgggttcgtggtctcgctggcttcaggagtgaagccgcagaccttcgcggtgagtgttacagttcttaaggcggcgcgtctggagttgttcattcctccccgtgggctcgtggtctctctggcttcaggagtgaagctgcagaccttcgcggtgagtgttacagctcataaaagcagcgtggacccaaagaactcaggagcccagctggcttcacctagtggatcccgcaccagggcagcaggtggagctgcctgccagtgccacgctgtgcgctcgcactcctcagcccttgggtggtcgatgggactgggtgccgtggagcagggggtggtgctcgtcggggaggctcgggccgcacaggagcccatggagtgggtgggaggctcaggcatggcgggctgcatgtcccgagccctgccccatggaaaggcagctaaggcctggcgagaaatcgagcacagcgccggtgggccggcactgctgggggacctagtacaccctctgcagccgctggcccgggtgccaagtccctcactgccttgtgcgagcagggctggccggctgctccgagtgcaggcccgccaaacccacgcccacccggaactccagctggcccccaagcgtgcacgcagccccggttcccgctcgcgcctctccctccacacatccctgcaagctgagggagccagctgtggccttggccagcacagaaaggggctcccacagtgcagcggtgggctgaagggctcctcaagtgccgccaaagtgggagcccaggcagaggaggcactgagagcgagcgagggctgtgaggactgccagcacgctgtcacctctcaactcagtctcccacatggcgtggccacccttgtgtctgttaaactctttctctacaaaaatgccatggtctttctttgtgcagtggtcaggaaaaaccccttgggcagatacaaaagttctttcaggcatctgtttccagaatag

SEQ ID NO: 24881 - DNA, 1241 bp, Homo sapiens
  SIMILAR (909)..(1238): 951254mologous to Escherichia coli narP,accession number U00008,Smith-Waterman Score=510.
aggatcacctgcagaatgaatttgctggaaatatttctgcgctggctgatgcggaaaatatttcacgtaagattattacccgctgtatcaacaccgccaaattgcctaaatcagttgttgctcttttttctcaccccggtgaactatctgcccggtcaggtgatgcacttcaaaaagcctttacagataaagaggaattacttaagcagcaggcatctaaccttcatgagcagaaaaaagctgggggacaccaaattgagcaactatccgcacaaaagagcaccttcttcagaaccggaaatcaggtgattcgctttgtggagtggcatcttctataccgcttcttttcttctttgaccctgcggtattcacttccgggcgttataaagccggaatcgtgtccttcgagtggccgccgccgctttgggcctctcgaccttgccgtatcgtattttggcgcggatttgggaattctgtttcggcagttgcttccgttttgggcggccttctcttgctgcgttcgggggaagttggttgtggggtcggggcctgccggatttcagtgtgtggcctacaaacggaacataaccgtaggtcggataaggcgtttacgccgcatccggcaaccgtgccgactagacagtgattaccatttcaccgtcatcgacaaaaaccctgccggacactcgctgactgatattgcccgtgactcccacttttatttcaccccgttgcttcaccgcatcgtcactgatagtgctgccatcctcttcaatttccgtcgaatggggatccgtattgcgcagctatcagcaggccttgctctgatacgtgctgaaacagtgatgtcagccaaggataccacacgcaaatatagctggtaccatcaactctttttctctataaattactcagtctcagacagcgacccggaagtatcgctggaagtgattcgtgccggagcgaaaggcagcaaagtctttagcgaacgcgtcaatcagtacttacgtgaacgtgaaatgtttggcgcggaagaagatcccttcagcgtgctgacggagcgcgagctggatgttctgcacgagctggcacaggggctgtcaaataaacagattgcctcggtgttgaatatttccgagcagacagtaaaagtacatattcgcaatctgctgcgtaaactcaatgtccgctcacgcgtggcggccaccattctgttcctgcaacaacgcggggcacaataa

SEQ ID NO: 24882 - DNA, 1911 bp, Homo sapiens
  SIMILAR (823)..(1908): 981254mologous to Escherichia coli similar to ~start codon is not identified yet,accession number D90869,Smith-Waterman Score= 1817.
atggcaggcccccgatacccagtttcagtgcaaggggcagccctggtgcagatcaagaggctccaaacgtttgccttctctgtgcgctggtcagacggcagcgacaccttcgtgcgcaggagttgggacgaattcaggcagctcaagaagaccctcaaggagaccttcccggtggaggcgggcctgctgcggagatctgaccgcgttctcccaaagcttctcggtcaggccagcctggatgcaccactgttgggacgcgtggggcgcacgagccgcggcctggcgcgcctgcagctgttggaaacctattctcggaggctgctggcgactgcagagcgcgtggcacggagcccgacgatcactggcttcttcgcaccgcaacccctggacctggagcccgcgctgccacccggcagccgggtgatcctgcccaccccagaggagcagcctctttctcgcgctgcgggccgcctctccatccacagtctggaggctcagagcctgcgctgcctgcagcccttctgtacccaggacacgcgggataggccttttcaggcgcaggcccaggagagcctggacgtgctgctgcggcacccctcaggctggtggctggtggagaacgaagaccggcagaccgcctggtttccagcgccctacctggaggaggcggccccgggccaaggccgggagggaggcccgtccctagggagcagcggtccccagttctgtgcttcccgcgcctacgagagcagccgcgcagatgagctgtccgtgcccgcgggggcgcgcgtgcgcgtgttggaaacgtcagaccgcggctggtggctatgcaggtacgcgggagcgggccccgaagaactggatacttcggcacgtaatgccggggctctaacccgccgccgcgaaattcgtgatgctgcaactctgctacgtctggggctggcttacggccccggggggatgtcattacgtgaagtcactgcatgggctcagctccatgacgttgcaacattatctgacgtggctctcctgaagcggctgcggaatgccgccgactggtttggcatacttgccgcacaaacacttgctgtacgcgccgcagttacgggttgtacaagcggaaagagattgcgtcttgtcgatggaacagcaatcagtgcgcccgggggcggcagcgctgaatggcgactacatatgggatatgatcctcatacctgtcagttcactgattttgagctaaccgacagcagagacgctgaacggctggaccgatttgcgcaaacggcagacgagatacgcattgctgaccggggattcggttcgcgtcccgaatgtatccgctcacttgcttttggagaagctgattatatcgtccgggttcactggcgaggattgcgctggttaactgcagaaggaatgcgctttgacatgatgggttttctgcgcgggctggattgcggtaagaacggtgaaaccactgtaatgataggcaattcaggtaataaaaaagccggagctccctttccggcacgtctcattgccgtatcacttcctcccgaaaaagcattaatcagtaaaacccgactgctcagcgagaatcgtcgaaaaggacgagtagttcaggcggaaacgctggaagcagcgggccatgtgctattgctaacatcattaccggaagatgaatattcagcagagcaagtggctgattgttaccgtctgcgatggcaaattgaactggcttttaagcggctcaaaagtttgctgcacctggatgctttgcgtgcaaaggaacctgaactcgcgaaagcgtggatatttgctaatctactcgccgcatttttaattgacgacataatccagccatcgctggatttcccccccagaagtgccggatccgaaaagaagaactaa

SEQ ID NO: 24883 - DNA, 2770 bp, Homo sapiens
  SIMILAR (1848)..(1991): 1001254mologous to Escherichia coli narP,accession number U00008,Smith-Waterman Score=226.
ctactggtcattctttgggtccacactgcttttatgagctgtgatactcaccgcgaaggtctgtagcttcactcctgaagccagtgagaccacgagcccacaatgacaataccgggcgatgtggagcaggcgatgaaaacgctgcaaacttttccgggtatcgggcgctggacggcgaattattttgctttgcgtggctggcaggcgaaagatgttttcctgccggatgattatctgattaaacagcgatttccgggaatgacaccggcgcaaatccgccgttatgccgagcgctggaagccctggcgttcttatgcgctgttgcatatctggtatacggaaggctggcaaccagacgaagcatgacgttggtcgccggatgcggtgcgagcgccttatccggcggttatgttccgtctgtaggcctgataagacgcacagtgtcgcatcaggcaacggctgccggatgcggcgtaaacgccttatccttcgtacggttatgttccgtttgtaggcatatttctcatcgtcataaaaccatagtgaacactcggtgcatgcgctgctggcgcatccccgggtgaaacgtgtcgtcattgccataagtcctggcgatagccgttttgcacaacttcctctggcgaatcatccgcaaatcaccgttgtagatggcggtgatgagcgtgccgattccgtgctggcaggtctgaaagccgctggcgacgcgcagtggggtattggtgcatgacgccgctcgtccttgtttgcatcabgatgacctcgcgcgattvttrggcgttgagcgaaaccagccgcacggggggggatcctcgccgcaccagtgcgcgatacgttgttcctttactttaggttgaaaaaaaatcagcgtcaagaaggtttcattaacacatatccctggcccaaaaagccggggattttttatatgtgcgttccgataaaaggtgcaaatgctcaggacgttgcagcgttttgcgtgaccgctcggggaaggcaaaattgcctctgggaaagcattgcgcggggtccggcgctcatcaacaatcggggggcagcaaggggccgctgcaatgatcgcgttgtcgaagttgatcacggttttgccgttctcaccttcaacttccagggtgttagccccggtgaatttacccagaccgttgaccactttgactttgcggcctttcgccataccagccagaccaccggtcagctgattgatcactttctctttccaggtacgaatcttgtcgatatcggttttcggttcgccgaagacgataccgtgttcagccagcgctttggcttcttcgataacttttgctacgtgcagcagtgctttagaagggatacagccgacgttcaggcaaacaccgccaagggtgttgtaacgttctacgattacggtttccagacgtattgggtaaaggtgcttgatcctggctctgaagtggtcgccgaagcgggcgacggcgcgagcgctatcgatctggcgcatagactggatatcgacgtgatcttgctggatctcaatatgaaaggtatgagtggcctggatactctcaatgccttgcgcagggatggcgttaccgcgcaaattattatcctgaccgtatccgatgcctccagcgatgtctttgcgctgatagacgcaggcgcagccggttatctgttgaaagacagcgacccggaagtattgctggaagcgattcgtgccggagcgaaaggcagcaaagtctttagcgaacgcgtcaatcagtacttacgtgaacgtgaaatgtttggcgcggaagaagatcccttcagcgtgctgacggagcgcgagctggcatgttctgcacgagctggcacaggggctgtcaaataaacagattgcctcggtgttgaatatttccgagcagacagtaaaagtacatattcgcaatctgctgcgtaaactcaatgtccgctcacgcgtggcggccaccattctgttccagtcggcggcattccgcagccgcttcaggagagccacgtcagataatgttgcaacgtcatggagctgagcccatgcagtgacttcacgtaatgacatccccccggggccgtaagccagccccagacgtagcagagttgcagcatcacgaatttcgcggcggcgggttagagccccggcattacgtgccgaagtatccagttcttcgggcttaccaatatgggccagaattgcatcaaagaagctctttgagcgcgggctgttgtgctcgccggttgggccaccgaagctttcttgcagctcttgcagcagctgtttctgcctttcgttcaggccggcaaagaagaaaattgtgaggccagggttgggacagaaaaggtggtacacggaggggtgggcacaaaagaggtcgatgagagggtagaaaaggtgcagcaggtccactcgctgtttcacagtgcccatttgcacatttgccccttttataccagcacccccaggattttccctggctctttttaagtttccatgaaaaagagacggagtgtccctatcttgcccacgttcaagtccaccggtgccatgtgggctcactgtacctattgcctgaggggtacaagtgccttttttgagtgagcttcccagggcgttgacattccttgtgctcaacacaaagcaatagatggtgcgtttgctggcttttgtccgtaatcgcagtcctttgccccgctcagccgggtggatcccgcgaggtccgcagttcgcgaccagcccggccat

SEQ ID NO: 24884 - DNA, 1572 bp, Homo sapiens
  SIMILAR (1466)..(1558): 671254mologous to Escherichia coli EnvZ protein,accession number J01656,Smith-Waterman Score=102.
atggagaccctcaatctgtacgcggatttgcgcagcgtcaccggcgaggcactgttgctgctcgatgaacccggcgtcggcgttgaccctatctcacggcgcgaactgtggcagatggtgcatgagctggcgggcgaagggatgttaatcctctggagtacctcgtatctcgacgaagccgagcagtgccgtgacgtgttactgatgaacgaaggcgagttgctgtatcagggagaaccaaaagccctgacacaaaccatggccggacgcagctttctgatgaccagtccacacgagggcaaccgcaaactgttgcaacgcgccttgaaactgccgcaggtcagcgacggcatgattcaggggaaatcgaatatcgttggcatcaaagacaccatcgacagcgttggtcacttgcgtacgatgatcaacacagttaagtcggtacgcccgtcgttttcggtattctgcggttacgatgatcatttgctgaatacgatgctgctgggcggcgacggtgcgataaccgccagcgctaactttgctccggaactctccgtcggcatctaccgcgcctggcgtgaaggcgatctggcgaccgctgcgacgctgaataaaaaactactacaactgcccgctatttacgccctcgaaacaccgtttgtctcactgatcaaatacagcatgcagtgtgtcgggctgcctgtagagacatattgcttaccaccgattcttgaagcatctgaagaagcaaaagataaaaaccgaccgttggtcgatctcgaacacgcagccttgcaggttggtaaagggattattccgccgccgctgcgtgagtatggcgcttcggaggtgcgttccgttacccgtgcctttaaccatatggcggctggtgttaagcaactggcggatgaccgcacgctgctgatggcgggggtaagtcacgacttgcgcacgccgctgacgcgtattcgcctggcgactgagatgatgagcgagcaggatggctatctggcagaatcgatcaataaagatatcgaagagtgcaacgccatcattgagcagtttatcgactacctgcgcaccgggcaggagatgccgatggaaatggcggatcttaatgcagtactcggtgaggtgattgctgccgaaagtggctatgagcgggaaattgaaaccgcgctttaccccggcagcattgaagtgaaaatgcacccgctgtcgatcaaacgcgcggtggcgaatatggtggtcaacgccgcccgttatggcaatggctggatcaaagtcagcagcggaacggagccgaatcgcgcctggttccaggtggaagatgacggtccgggaattgcgccggaacaacgtaagcacctgttccagccgtttgtccgcggcgacagtgcgcgcaccattagcggcacgggattagggctggcaattgtgcagcgtatcggggataaccataacgggatgctggaacttggcaccagcgagcggggccggcctgtccattcgcgcctggctgccagtgcccggtacgcgggcgcagggcacgacaaaaggaaggtaaaataa

SEQ ID NO: 24885 - DNA, 2712 bp, Homo sapiens; identical to SEQ ID NO: 22527
  SIMILAR (1666)..(2220): 951254mologous to Escherichia coli K12 low-affinity phosphate transport,accession number AE000381,Smith-Waterman Score=903.

SEQ ID NO: 24886 - DNA, 1280 bp, Homo sapiens
  SIMILAR (1)..(375): 901254mologous to Escherichia coli K12 putative DNA repair protein,accession number AE000119,Smith-Waterman Score=566.
atgaggtatatagttgccttaacgggaggcattggcagtggcaagagtaccgttgccaatgcgtttgctgatctcggaattaacgtcattgatgccgatattattgcgcgtcaggtggttgaaccaggtgcacctgcgctacatgccattgctgatcactttggcgctaacatgattgctgctgatggaacattgcagcgccgggccttgcgcgagcggatcttcgccaacccggaagagaaaaactggcttaacgccctgctgcatccgctgatttcagcagagacgcaacaccagatcccagcagctacttccccctatgtactgtggggtgtgccattgctggagaaaaatcactgttctcgttttgcaaacccagccgcttcacggtttccgggccaagtcctgacccgtcaaatccggaaacttgtacaggatcaccggcaggtcgacgctacgggcgatctgctggccgtaggcctcgcgatgctgcgccagtttgaccgcttcgtcagtggaaggggaaccgacgccaatcaataccggcactcgcccgtcgacaatggttacagcttcttcggcgagtgccatgcgctgggctgtattcatttggctaaattcaccaccggtacccagataaaacagcccgtcgacccctttattaatcaggaagtcggcaacttcgcgcattgcctttttatcaagggttccgtcacgatgaaacgtgctggataccggtggaataatgccgctgaattttttcattacctcagtttccttttcgagctgcaactctccagcaaactggcagttcatgatgtgctgaccaatatttataatcggcgctactttttcaacagcgtagagtcattattgtcgcgacctgttgttaaggacttctgtgtcatgctggttgatattaatcagttcaaacgcatcaatgcccaatggggacatcgtgtgggtgataaagtgctggtttcaattgtcgatattatccagcaaagcatccgccccgatgatattttagcgcgactggagggtgaggtgtttggcttgctatttaccgaactcaatagtgcccaggcaaaaatcattgcggaacgtatgcgtaaaaatgtcgaactcctgaccggctttagtaacagatatgatgttcctgaacaaatgaccatcagtattggcacggttttttcaacgggtgacacgcgtaatatctcgcttgtcatgacggaagcagataaagccttagcgaagcgaaaagcgaggggggcaacaaa

SEQ ID NO: 24887 - DNA, 2451 bp, Homo sapiens
  SIMILAR (1042)..(1776): 941254mologous to Escherichia coli O157:H7 6-phosphogluconate dehydratase,accession number AE005407,Smith-Waterman Score=1176.
atgatcggagagatccgcgatggcgaaacagcagagatcgctattaaagcggcgcaaactggtcacctggtgttgtctaccctacacactaattccacctgcgaaacgctggtacgtttacagcaaatgggggtcgcccgctggatgctatcatcggcgcttacgctggtaatagcccagcgtctggtacgcaaactttgcccacattgtcgccggcagcaaggggagcccatccacattccagacaatgtatggccatcgccgctgccccactggcaggcacccggttgtgtacattgctaccacggtttttatggtcgtacggccttatttgaagttctgcccataacgccggtcattcgtcagcttatttccgctaataccgacgttgaatcgctggaaacgcacgcacgacaggcgggtatgcgtacgctttttgaaaacggctgcctggccgtagagcaaggcttaaccacctttgaagagttaatccgcgtactggggatgccgcatggcgacggagcggcgatggacagagaagaaaacgaactcggcgtctcctgtattgctgttccggtgtttgatattcatgggcgggtgccgtacgccgtgtcgatttcgctttcgacatcacgtctgaaacagctgtatgctggcttgcccgtttggtgcgatggaagtcgtttcttcgcgcaaaaggcgagggcgattaagtgcaaacagtggggatacgtcggggctaaatcgcgccagcgctggctgttttacgcgtatgacaggctccggaagacggttgttgcgcacgtattcggtgaacgcactatggcgacgctggggcgtcttatgagcctgctgtcaccctttgacgtggtgatatggatgacggatggctggccgctgtatgaatcccgcctgaagggaaagctgcacgtaatcagcaagcgatatacgcagcgaattgagcggtataacctgaatctgaggcagcacctggcacggctgggacggaagtcgctgtcgttctcaaaatcggtggagctgcatgacaaagcggcaggtggcgtaccggttctggtgcgtgaactgctcaaagcaggcctgctgcatgaagatgtcaatacggtggcaggttttggtctgtctcgttatacccttgaaccatggctgaataatggtgaactggactggcgggaaggggcggaaaaatcactcgacagcaatgtgatcgcttccttcgaacaacctttctctcatcatggtgggacaaaagtgttaagcggtaacctgggccgtgcggttatgaaaacctctgccgtgccggttgagaaccaggtgattgaagcgccagcggttgtttttgaaagccagcatgacgttatgccggcctttgaagcgggtttgctggaccgcgattgtgtcgttgttgtccgtcatcaggggccaaaagcgaacggaatgccagaattacataaactcatgccgccacttggtgtattattggaccggtgtttcaaaattgcgttagttaccgatggacgactctccggcgcttcaggtaaagtgccgtcagctatccacgtaacaccagaagcctacgatggcgggctgctggcaaaagtgcgcgacggggacatcattcgtgtgaatggacagacaggcgaactgacgctgctggtagacgaagcggaactggctgctcgcgaaccgcacatttctgaactgagcgcgttcacctttggaacaggacgtggatattctgcggcttttggtgtaaaatgcccgttccgaaaaagggccctgagtgatccttgctacgcaatgcgcgaagttgccgacttcctgattaataaaggggtcgacgggctgttttatctgggtaccggtggtgaatttagccaaatgaatacagcccagcgcatggcactcgccgaagaagctgtaaccattgtcgacgggcgagtgccggtattgattggcgtcggttccccttccactgacgaagcggtcaaactggcgcagcatgcgcaagcctacggcgctgatggtatcgtcgccatcaacccctactactggaaagtcgcaccacgaaatattataggattattaagtggctgtgccagccataatgaaaatgccagtttactggcgaaaaaacaggcgcaaaatatcagccaaaacctgccgattaaatctgcgggatataccttagtgctggcgcaaagtagcggcacaacggtaaaaatgaccattatcagcgaagcgggtacacaaaccacgcagacgcctgacgcctttttaaccagctatcaacgacaaatgtgcgctgacccgacggtgaaattaatgatcactgagggaattaattacagcataacgattaatgatacacgtacaggtaaccagtatcagcggaaactggatcgtaccacctgtggaatagtcaaagcataa

SEQ ID NO: 24888 - DNA, 3397 bp, Homo sapiens
  SIMILAR (2263)..(2994): 1001254mologous to Escherichia coli K12 putative lyase/synthase,accession number AE000500,Smith-Waterman Score=1257.
atgagtgaactcccattcacaattgcttcaaagagaataaaatacctaggaatccaacttacaagggatgtgaaggacctcttcaaggagaactacaaaccactgctcaaggaaataaaagaggatacaaacaaatggaagtacattccatgctcatggttaggaagaatcaatatcgtgaaaatggccatactggccaaggtaatttatagattcaatgccatccccatcaagctaccaatgactttcttcaaagaattggaaaaaactactttaaagttcatatggaaccaaaaaggagccgcatcgcgaagtaatcctgagccaaagaacaagctggaggatcacattactaattcaactatatacaggctcagtaccaaaagctgctcggtgtctgggctgaagcagacactgctggcggagtccgaggctctgaccagctacagccaccgggtgttctcggcctgggacttcggtctctgcggggacgtccacgtgcggctgcgccagcgcatcatcttgtacgaattaaaggggcaggtgcctgcattgctgctggatgacggtactttgctgacggaaggcgtagcgattatgcagtatcttgccgacagcgtccccgaccgccagttgctggcaccggtaaacagtatttcccgctataaaaccatcgaatggctgaattacatcgccaccgagctgcataaagagttaaagttttcttttcattggagcacgacctcgcacaaaggactcggcatgaaactcgtcggtagctacaccagcccgtttgtacgcaaactttctattctgttgttagaaaagggcataactttcgaatttattaatgaactgccctataacgcggacaacggcgtggcgcaatttaacccgttaggaaaagtgccggtgctggtgaccgaagagggcgaatgctggtttgattcgccgatcatcgctgaatatattgaattaatgaatgtcgctccggcgatgttgccgcgcgatccgctggagtcgttgcgggtgcgcaaaattgaggcactggcggatggcattatggatgccgggctggtatcggtgcgtgaacaggcgcgtccagcggcgcagcagtctgaagatgaattgttacgccagcgggagaaaatcaaccgcagtctggatgtgctggaaggatcgggcggttgcccggcatccaacgccattcatggccatatcaatgattttctggtgcgtaccgggttgagaagcggtattctacaaataagactttccaaactgctcaatgacatgaatgtttcaaccctagtagagatgaaacgcacgacatctgacaaaggaatgtttctacacgaagagatattactggtcttagctattgactctgtagcacagcatagtattccccatattttccacccggaaatatactcagagcaaacgagaaatggtaccgagctgaccgagaaactgcgccatgcctgcggagctgccgtcgagtgtgtcatttccgatacctgtatcgcgggtatggctgaagccgctgcttgcgaagaaaaattcagcagtggggatgttgcccgccgcgtcactgacaaaacccatgaccggagtgacaataccgccgccaataatggtcataacgatgaaggacgaaccatatttggtgtcctggccgagattcttaatgcccagcgagaagattgttgggaaattttcatgagcaccatgcaatccggcatcgtcaagtggtttgacgacggcaagggcttcggcttcatcacccccgccgacggcggcaaggacctgttcgcccatcacagcgaaatcaagaacaacggcggcttccgcactctggccgaaggcgcccagcccgcgccctgcgcgggctttgtgctttctgggcctgccgtcgacaatccacctcttatgtccgcactgcccgttgccgccccgaaggccctgaccgcttaccgccccttctgggccaagcgtttcggccccgcacccttcctgcccatgagccgggcggagatggagcagctcggctgggacagctgcgacgtcatcatcgtcacgggcgacgcctacgtcgaccatcccagcttcgggggatcctctagagtgaccacagcagcaagctgcaccgcccctaaggcaaaaaccggccgggcccctgttgaccctaatatcgacgaactgaaacagtaccataatccgcgctacggtcgtgttccggttggcggcaactattacgcggaaacgaaaatgagcacttacgaaaaggaaactgaggtaatgaaaaaattcagcggcattattccaccggtatccagcacgtttcatcgtgacggaacccttgataaaaaggcaatgcgcgaagttgccgacttcctgattaataaaggggtcgacgggctgttttatctgggtaccggtggtgaatttagccaaatgaatacagcccagcgcatggcactcgccgaagaagctgtaaccattgtcgacgggcgagtgccggtattgattggcgtcggttccccttccactgacgaagcggtcaaactggcgcagcatgcgcaagcctacggcgctgatggtatcgtcgccatcaacccctactactggaaagtcgcaccacgaaatcttgacgactattaccagcagatcgcccgtagcgtcaccctaccggtgatcctgtacaactttccggatctgacgggtcaggacttaaccccggaaaccgtgacgcgtctggctctgcaaaacgagaatatcgttggcatcaaagacaccatcgacagcgttggtcacttgcgtacgatgatcaacacagttaagtcggtacgcccgtcgttttcggtattctgcggttacgatgatcatttgctgaatacgatgctgctgggcggcgacggtgcgataaccgccagcgctaactttgctccggaactctccgtcggcatctaccgcgcctggcgtgaaggcgattctggcgaccgctgcgacgctgaataaaaaactactacgccacgcgcatcccaattcacctcatcggcaaaatgtgagacggatactgcccatccagctcttgtggcagcaactgattcagcccggcgagaaactgaaatcgatccggcgagcgatacagcacattggtcagacacagattatcggtatgttcatacagatgccgatcatgatcgcgtacgaaacagaccgtgccaccggtgatggtatagggctgcccattaaacacatgaatacccgtgccatgttcgacaatcacaatttcatgaaaatcatgatgatgttcaggaaaatccgcctgcgggagccggggttctatcgccacggacgcgttaccagacggaaaaaaatccacactatgtaa

SEQ ID NO: 24889 - DNA, 681 bp, Homo sapiens
  SIMILAR (679)..(656): 1001254mologous to Escherichia coli Rhizopine catabolism protein MocA,accession number D90769,Smith-Waterman Score=47.
tcatcgttgtgtagcggtgtagatatgtgctggaaacacgctcgcaccagctttatcaccacaaaagcggatgttcataatcgcatgttcgcggatgttgagcgcaaatgacgtctccagccacagaatgcagccgctatgtaattcaatggtgccacacagcgaatcttcgacgcgcgcggaaagcccagcacatacatcggcagcatccagcatgtgaatgccgatgtcgatcagcgggccaccaccctgcagttctttattggtaaagacaccccagccgggaacgccgcagcgacgcagggcgcgggcggtggtaacgtaaatctctcccaaaacgccgttggtcacctgttcacgcagctgttgcgtatcgagcgcaaaacgatggtgaaagtcgtaggccagcaccttgcccagtttgcgcgcggtatcgacatttcccgcgcctgttatcacatggcagcccgcttccagtgccatcagggtatgttcgtaatgaaaacggttaggtgagcagacgctaaccacatcaggtttcactgccagcagcatggcctgcggatcgtcccacacggatgcattcccgtatttttctgccagcgcctgccgctgggaaaggcggctgtcacagacagctaccagttccagatacgttgcgggtgcagtagtacgaagcat

SEQ ID NO: 24890 - DNA, 957 bp, Homo sapiens
  SIMILAR (1)..(780): 1001254mologous to Escherichia coli K12 putative transient receptor potential locus,accession number AE000229,Smith-Waterman Score=1365.
atgaaaatcggcacacagaatcaggcgttctttccggaaaacattctggagaaatttcgttatatcaaagagatgggcttcgatggttttgagattgacggcaaactgctggttaacaacatcgaagaagtcaaagcggcgatcaaagaaaccggtttaccggtgaccaccgcctgcggtggctatgacggatggattggcgactttatcgaagagcgtcgtcttaatggcttaaagcagatcgagcgcattctcgaagcgctggcagaagtgggcggtaaaggcatcgtcgttccggctgcgtggggcatgtttaccttccgcttaccgccgatgacctcgccgcgtagcctggacggcgaccgcaaaatggtgagtgattccctgcgcgtactggaacaggtcgccgcgcgtaccggaaccgtggtgtatctcgaaccgttaaaccgctatcaggatcatatgatcaacaccctcgccgatgcccgccgttacatcgtcgaaaacgatcttaaacatgtacagattatcggcgatttctatcacatgaatatcgaagaagataacctggcgcaggcgctgcatgacaaccgcgacctgctcggtcatgtgcatattgcggataaccatcgctaccagccgggcagcggcaccctggatttccacgcgctgtttgaacagctgcgcgcggataactatcagggctatgtagtgtacgaagggcgtatccgggcggaagatcctgcccaggcgtaccgtgattcgttggcctggttgcgcgcaggccaggtggcggataaggttcatgcttcgtactactgcacccgcaacgatctggaactggtggctgtctgtgacagccgcctttcccaggcgcaggcgctggcagaaaaatacgggaatgcatccgtgtgggacgatccgcaggccatgctgctggcggtgaaacctgatgtg

SEQ ID NO: 24891 - DNA, 506 bp, Homo sapiens
  SIMILAR (476)..(3): 861254mologous to Escherichia coli Rhizopine catabolism protein MocA,accession number D90769,Smith-Waterman Score=717.
cgcgcggaaagcccagcacatacatcggcagcatccagcatgtgaatgccgatgtcgatcagcgggccaccaccctgcagttctttattggtaaagacaccccagccgggaacgccgcagcgacgcagggcgcgggcggtggtaacgtaaatctctcccaaaacgccgttggtcacctgttcacgcagctgttgcgtatcgagcgcaaaacgatggtgaaagtcgtaggccagcaccttgcccagtttgcgcgcggtatcgacatttcccgcgcctgttatcacatggcagcccgcttccagtgccatcagggtatgttcgtaatgaaaacggttaggtgagcagacgctaaccacatcaggtttcactgccagcagcatggcctgcggatcgtcccacacggatgcattcccgtatttttctgccagcgcctgccgctgggaaaggcggctgtcacagacagctaccagttccagatacgttgcgggtgcagtagtacgaagcat

SEQ ID NO: 24892 - DNA, 1383 bp, Homo sapiens
  SIMILAR (574)..(1110): 821254mologous to Cloning vector pSacBII SacB,accession number U09128,Smith-Waterman Score=748.
atggccgcaaaacccggtggtcgtctgctgatgtttggcgtgggcgtgattgtaatcggcgtaatgctctccatcttccagcaatttgtcggcatcaatgtggtgctgtactacgcgccggaagtgttcaaaacgctgggggccagcacggatatcgcgctgttgcagaccattattgtcggagttatcaacctcaccttcaccgttctggcaattatgacggtggataaatttggtcgtaagccactgcaaattatcggcgcactcggaatggcaatcggtatgtttagcctcggtaccgcgttttacactcaggcaccgggtattgtggcgctactgtcgatgctgttctatgtttgccgcctttgccatgtcctggggtccgcgctggcaatcgcggtggcggcccagtggctggcgaactacttcgtctcctggaccttcccgatgatggacaaaaactcctggctggtggcccatttccacaacggtttctcctactggatttacggttgtatgggcgttctggcagcactgtttatgggaggggtatcctctagccccaaccgcgggaacgttcagcagtttatcgatgaaggcaattatacatccggcgacaaccatacgctgagagaccctcactacgttgaagacaaaggccataaataccttgtattcgaagccaacacgggaacagaaaacggataccaaggcgaagaatctttatttaacaaagcgtactacggcggcggcacgaacttcttccgtaaagaaagccagaagcttcagcagagcgctaaaaaacgcgatgctgagttagcgaacggcgccctcggtatcatagagttaaataatgattacacattgaaaaaagtaatgaagccgctgatcacttcaaacacggtaactgatgaaatcgagcgcgcgaatgttttcaaaatgaacggcaaatggtacttgttcactgattcacgcggttcaaaaatgacgatcgatgagagcccaccagaagcatataatagtcgctgctccaagaaggctgagattctaggatgcacgcacagcccactctcaactcatgacctcctctgtgcccagggagcagaacctgctaatgagaggaacagaaaaacccacacagtgtcagtcaagtggtggaggactagaaaagggagaagaaaaactagaaacaactctttcaagacattgtactacaaagggggatcctctagagtcaaccgcggggtctgcacgcaaggcaacaacaggcaacaggcaatgatgtacattcaggtgaagaaaaaccaacaagaagtcttcacccatggattctgggatccccacaaagcagcctccatgtgccaggcattgtgctatgtgtaa

SEQ ID NO: 24893 - DNA, 2106 bp, Homo sapiens
  SIMILAR (961)..(1533): 931254mologous to Escherichia coli NADH DEHYDROGENASE I CHAIN G (EC 1.6.5.3) (NADH-UBIQUINONE OXIDOREDUCTASE CHAIN 7) (NUO7) (FRAGMENT),accession number D90859,Smith-Waterman Score=917.
ttatccgttctgcttttgcatccactccaccacaaaatcagccagcccctcaacatcattaatatccagtaatgcgacatgtggagaaatcgtgcacgggattgagattgaggagaaagtccagatcccatccatgcccttcatatccccgtggagcagaaggtatttttctggcttctgctctctcaaattctcaactgtgcaatacccacaacggcaggcacacttcacgggtttttcctggcaaaactttgacgggtgcgtttcaacggaaggggagaagccacccttctccatggctgtgtgtgtgcctatggtctgctcaggtcccgggtgtagcaccgcaggtgattcatcgccgtgggtcgttatcgccgtggtcagtgaggtattgtcggcgataatctgacagccaggcagttgaaatgcgatgcgatcgcctgattcaatacccttcgctaacatccagtttgccagacagctcgcggcgggatcgagcgcgctataggtgtacgatgcaccatgattatcgaccacggcaattttgtctggcatcgcacgacggtctgctgccagtaatcggccagcgaagcatcgccccataacccgtgccagactcagcacgtcggcgtgttcatatcccaggcgttcatacattccgagcaccatgtcgttatcttccggcacattgactccgcgatgcccgtcataaccgcccatcaccgttccgaccacgtcaccgtttacctcagcgaccaaaaacaaactgacgtcatggttcatcttacgctcgatgtccatttccggatcgttccacgacgcagcaagtcgcacgctcccaagggtgatgacctttcgagggatatagctgtcgtcgaggcctgacccagaggattccagggcgcacgacaacgctacttcggtcgcccggaagacggcacggttacggcgaactgcgatcgtatcgaaaaccgttacaacggtacggtaaaccactacttcctctgcgaccgtggtcgtttcggttacggttacgtcaacctgaaggatcgtccgcgtcagccagtacagcgtcgtggcgatgatttcattaccaggcaatgcagggccgcggcagatattctgcgtcagtcgaagaaagtgatcggtattggttctccgcgtgccagcgtggaaagcaactttgcgctgcgtgaactggtgggcgaagaaaacttctacaccggtatcgctcacggtgagcaggaacgtctgcaactggcgctgaaagtgctgcgtgaaggcggcatttatactccggctctgcgcgaaatcgaatcttacgatgcggtactggtgctgggcgaagacgttacccagaccggcgcgcgcgtcgcgctggcagtgcgtcaggctgtgaaaggtaaagcgcgcgaaatggcggcagcacagaaagtggctgactggcagattgcggcaatcctcaacatcggtcaacgtgcgaagcatccgctgtttgttaccaacgttgatgacacccgtctgcaagcctggcaaaaagcacaaatcgacgtcatcgtgcaggcactggcagtgcaagaactcctgcaggttgactctagaggtatcccccagacgcacttcatagtcgaacatcggcgaataatgcaggccactgcgcggcagaatatcggacgtcattaccagatccagctctccctgttgcaaggcgggctgcgggtcaaatgtcacgcccgatttaaaatccatctctacctgcggccagttcttatggaaattttctaacgcgggtgtcagccactgaatacagctatggcactcaatggcaatgcgcagacgcgtctgctgcggttcattgcaggcttgcagggcctggctaatttgcggcagtacctggtttgccagttgcaacaggatttctccctgcggtgtaaagcgtagcggctggctcttacgcacaaatagccggaagccaaggcgttgttccagatcgctaaactggtgagacagggcggattgcgtctgatgcaacgtcgccgcagcggctgcgagcgagccgcagttccgcaacgcttgtagcgttttcaggtgttttacttcgatcat

SEQ ID NO: 24894 - DNA, 1176 bp, Homo sapiens
  SIMILAR (341)..(186): 331254mologous to Escherichia coli Transposase,accession number AB024946,Smith-Waterman Score=64.
ctactcaagaaacaagaagaggaaaagtccattcacagactcgccgtcatatagtgcgccgctgcctctcccacatgttgtgttgacagcacaatagctcgtgtcaacacgtgtaggagacagagcgtccccgcgtagcaggattaaacgacggtcgcacacaaggggaaaaaggcgtttcgccgcgagagatgctccccccactgccccagagccctctttacagaagttcgggaaccatccgaaatgggtgcccggtccaaagggtaacgggacctctctcgccattccggtatataacgctcgccaggccaaagccaatgcgacctcgcaagatgcctgtatattcaggtggtttagcgcttcacggctacgaaagtacagcgttttataaattgtctcaggtgatattcgcagcgttttttgacgtggttttgttcgccttaaccatcctgatatttgctctggagaccatttcatctccagcttttccagaacaagctttcgcaatggtaaattttgatccagtaagcacggttttggccttttcgccattctgttggctcggttattagcatcaacagctttgtaatagcgtctgccccgattacgctgaacttcacgtgagatcgtcgaaggactgcgattcagcgcagtagctatcgcacgaatgctcattttggctgacaaaccagctcgtatctcctcgcgctcagacagtgtcaggtgagctacagcccgcttacgctcatggggttttatgccgccagtatcccagtgccttcgaaaaagccagcgagactcctcagagttcaaatccatgtccaagttcatacaccatccacccaactgtagaaaacttccagacttgtaggaaccaacatttgtccaaagggtgcttaataaatgctggtcgggcgggccccagccccggtactgggggatggggtgagttggaggtggcggcagctgcgaggctccagggcgcctggaagagacatctgcagtccagccggccgccaggccaagccctttttgcttctcctccttgatggactggatccgttcaatgagaatctccttttcccggtcctcatcgccgccggctgcctcctcctccagcagcacctccagctcctcctcctggatgtcccgggtcttggggctcttgttcat

SEQ ID NO: 24895 - DNA, 861 bp, Homo sapiens
  SIMILAR (512)..(595): 671254mologous to Escherichia coli yehP,accession number U00007,Smith-Waterman Score=93.
ttagtgatgcggaaacctgcggcgttcagagacgaatagtagattcgcggcctggacccggacctttaaccataacttccgattcttgatgccgtattctttcacggcgtcagcgcaacgctctgctgcacctgagctgatgtacgggctggccgccgcaggatgttcttctgcaccgggatctcctccccgtcgaggaccaggtgcggtcgcagaagcgagactcctcgcggaaagagctgagcgctcgcagcagagcgcggcgtgctgagggtcagacacggcactgccctcagccatcgcggccccgctcctcgcggcgatggcctggctaccaccacgagaacgcgggacgctggcgcataggtgcttgagcattatcaactggcgcaacttcccgtttcggcgctgcaatgccgttgcattgtccaccacaggccattgcacatcatcaacaactcgacagcaggcactggcatcgctgcaaaactggggagttttccatgtctgactgaacgatcttctgaccacccgtgagctacaacgctggcgattaattctggcgaagcggcagaaacgacgctttgtggggctgtttccgcagcaggtgattgagggctggaaagcgatgccgtgctgcgctacggcattgaagatgtggtgacaatctcgacgtgctggaacgtatgcagccttctgaaagcctgctacgcgtgttttgcacaccaaacatctgatgaaccccgaagtactggctgccgccgccggatagtgtgccaggttgttgaagaaattatggctcgactggcaaagaagttcgtcaggctttttctggtgtccgcgatcgccgtcgccgttcat

SEQ ID NO: 24896 - DNA, 3303 bp, Homo sapiens
  SIMILAR (3215)..(3292): 801254mologous to Escherichia coli Collagenase precursor (EC 3.4.-.-),accession number D90846,Smith-Waterman Score=95.
atgaccctgcatcactggtggcagtggctggtgttaggcgagttcccggtgcatgaatgcgaaaaatcgccggtaaaccataacgtagaccacgaagagatcgctaaatttgaagccgtcgcctcccgctggtgggatctggaaggtgagttcaaaccgctgcaccgcattaacccgctgcgtctgggctatattgccgagcgtgctggcggtttatttggcaaaaaggtgctcgatgtcggttgtggcggcggcattctggccgagagtatggcgcgcgaaggcgcgacggtgaccggtctggatatgggctttgagccattgcaggtggcaaaactgcacgcactggaaagcggcattcaggtggattacgtgcaggaaaccgtggaagagcacgcggcaaaacatgccgggcagtatgatgtggtgacctgcatggagatgctggagcacgtccccgatccgcagtcagtggtcagagcctgtgcgcaactggtgaaaccaggcggcgatgtctttttctcgacacttaaccgcaacggcaagtcatggctgatggcggtggttggtcgagaacaacggcgaggtacgcccagcgcttacccgtccagatataggtcacatcaccgcaccacacctgatttggctcggtcacggcgaactgcctttcaagaatggcatcagaaggagctaataatgagcagaaaaacccaacgttactctaaaaagttcaaagccgaagctgtcagaacggttcttgaaaatcaactttcgatcagtgaaggcgcttcccgattatctcttcctgaaggcactttaggacaatgggttaccgccgccagaaaagggctcggtactcctggttcccgcacggtggctgaactggaatctgaaattctgcaactgccagaggaaaaagcctctgtttttgaactatggaagaacggaacaggcttcagtgaaatagcgaatatcctgggttcaaaacccggaacgatcttcactatgttaagggatactggcggcataaaaccccatgagcgtaagcgggctgtagctcacctgacactgtctgagcgcgaggagatacgagctggtttgtcagccaaaatgagcattcgtgcgatagctactgcgctgaatcgcagtccttcgacgatctcacgtgaagttcagcgtaatcggggcagacgctattacaaagctgttgatgctaataaccgagccaacagaatggcgaaaaggccaaaaccgtgcttactggatcaaaatttaccattgcgaaagcttgttctggaaaagctggagatgaaatggtctccagagcaaatatcaggatggttaaggcgaacaaaaccacgtcaaaaaacgctgcgaatatcacctgagacaatttataaaacgctgtactttcgtagccgtgaagcgctacaccacctgaatatacagcatctgcgacggtcgcatagccttcgccatggcaggcgtcatacccgcaaaggcgagagaggtacgattaacatagtgaacggaacagcaattcacgaacgttcgcgaaatatcgataacagaagctctctggggcatggggcaggcgaattagcctcagagtacggaattacccgtgaaatgcaggatgaactggcgctacattcacagcgtaaagcggcagccgcaattgagtccggtgcttttacagccgaaatcgtcccggtaaatgttgtcactcgaaagaaaaccttcgtcttcagtcaagacgaattcccgaaagcgaattcaacggctgaagcgttaggtgcattgcgcccggccttcgataaagcaggaacagtcaccgctgggaacgcgtctggtattaacgacggtgctgccgctctggtgattatggaagaatctgcggcgctggcagcaggccttacccccctggctcgcattaaaagttatgccagcggtggcgtgccccccgcattgatgggtatggggccagtacctgccacgcaaaaagcgttacaactggcggggctgcaactggcggatattgatctcattgaggctaatgaagcatttgctgcacagttccttgccgttgggaaaaacctgggctttgattctgagaaagtgaatgtcaacggcggggccatcgcgctcgggcatcctatcggtgccagtggtgctcgtattctggtcacactattacatgccatgcaggcacgcgatataaacgctggggctggcaacactgtgcattggcggcgatacagggaattgcgatgcgaaagttatcgggtgttttcattgaacatcgacggcgaaggtaaccccattaatcaccagtcaaaacttgtcaccagcgtcagctcgccagcattacgcatcggtacaataaatgtttcctgtttctcattgaccgatccttcatcggtgatcagcgtcagttgggcggtggttaattccgtttcgctgcgcccatccatagtagttgatatacacatgatagcgcccgtgaattggcgcgggcatggcgaaaatctcgggtccgtaccccgtcgtgacatccatataacgctgaaaaatatgcgttacgctttcgcttatggcgcagatgctgtttatgcgggccagccgcgttattccctgcgtgtgcgcaacaacgaattcaaccacgaaaatcttcagctcggcatcaatgaagcccacgcgctggggaaaaagttttatgtcgtggtcaacattgcaccgcacaacgccaagctgaaaacctttatccgtgacctgaaaccggtggtggaaatggggccggatgcgctgattatgtccgatccagggctgattatgctggtgcgtgagcacttccctgaaatgccgatccacctttcggtgcaggctaacgccgtgaactgggcgacggtgaaattctggcagcaaatgggcctgacccgcgtgatcctctctcgcgagctgtcgctggaagagattgaagagatccgcaatcaggtgccggatatggagatcgagatcttcgttcacggcgcgctgtgcatggcctactccggtcgctgcctgctctctggctatatcaacaagcgcgacccgaaccagggcacctgcaccaacgcctgccgctgggagtacaacgtccaggaagggaaagaagatgatgttggcaacatcgtacacaagtacgagccgattccggtgcaaaatgttgagcctgacgctgggtatcggcgcaccaaccgacaaagtgtttatgatcgaagaggcccagccgtcctgggcgagttatatgacctgctgctttga

SEQ ID NO: 24897 - DNA, 1784 bp, Homo sapiens
  SIMILAR (677)..(132): 991254mologous to Escherichia coli Rhizopine catabolism protein MocA,accession number D90769,Smith-Waterman Score=959.
  misc_feature (1)...(1784): n = a,t,c or g
actcacaaaattgaccacagctctttggcgtgccgatcttttgaaagctatgcgcattcacgctnttcnccgccggaaagcccagcacatacatcgcagcatccagcatatgaatgccgatgtcgatcagctgggccaccaccctgcagttctttattggtaaagacaccccagccgggaacgccgcagcgacgcagggcgcgggcggtggtaacgtaaatctctcccaaaacgccgttggtcacctgttcacgcagctgttgcgtatcgagcgcaaaacgatggtgaaagtcgtaggccagcaccttgcccagtttgcgcgcggtatcgcacatttcccgcgcctgttctggcgtcatggcgggcggtttttcgcacatcacatggcagcccgcttccagtgccatcagggtatgttcgtaatgaaaacggttaggtgagcagacgctaaccacatcaggtttcaccgccagcagcatggcctgcggatcgtcccacacggatgcattcccgtatttttctgccagcgcctgcgcctgggaaaggcggctgtcacagacagccaccagttccagatcgttgcgggtgcagtagtacgaagcatgaaccttatccgccacctggcctgcgcctattatcgcgacccgcagcggagagcttgtcattgcacttttcacaaagaccagcacgatgccttcttctgaacgatagaaacgacgtgcatcttcctctgcgttttcaccaatcaccatgccttccggaataacacaagcacgatcgatgacgcagcggcgcagacggcacgagcgacctacccatacttccggtaacaatacggcggaatcaatgttgcagaatgaattcacgcgaacgcgcgagaacagaacggactgcaccaccaccgaaccggagatcacacaaccgccggaaaccagtgagttaagggtcatcccgtggctgtgctccatctcctcgtcaaacagaaaatccagttcctcttgctcatcctgatccttggacatcagctgctgggaaggcagctgctgaggcagagaggtcaggtgggaaaatctggactcctctgacttcccctttttccttggcgcaaaaaaataaccgccgccgataggtttaacgtattcctccagcgcttcgccattgagccttttttgtactgtcaggaagcctttttccagatcgtgttggtagcagacaaacagcaaccccatatccagttgcccggagttggtgacgcccagtgaataactgtagccacgacgcagcatcaggctggactcactctccgccgtgcggggattcgccagccggatatggctgtccagcgcgatcaccttcccttccgggtcgctggcgtaatcaggcacatcatgctcatgctgcattcccagcggcgcaccggtttgcttatcacggccaaaaatcgtctgctgttctttcagcggcgttctgtcccaaaattccactcgaaactgaatcaagcgtactgcctgatagctgccaccgattgtccacgcaggctcctgctgatctgccgttacccatggtgatactggagatagactccggaagctgcagtggctcacactatcaatcgagctccggtaccgctcctccagagccagctgcttgaactcctcatacatctttttgttgaagtgatctcggaggaagaaggaccagaagcggaagagtgtgttcatctcctgagactggccaatgcccaagcgtttccgctctgatgggaaagaaaggaggaaaggcat

SEQ ID NO: 24898 - DNA, 1355 bp, Homo sapiens
  SIMILAR (1161)..(1352): 1001254mologous to Escherichia coli put. IS30 transposase,accession number X00792,Smith-Waterman Score=341.
ccccattaagaatgtgcggggttggcatgttggctcctaaattgccccttatatcgaaacaggaagtacaaaagtccttgacttgctgaatgcatgctgcaaattaacatgatcggcgtaccatgattaaagtacgtaattgtagattcaattggtcaacgcatcagttatgtgaaaacatggggttgcggaggttttttgaatgagacgaacatttacagcagaggaaaaagcctctgtttttgaactatggaagaacggaacaggcttcagtgaaatagcgaatatcctgggttcaaaacccggaacgatcttcactatgttaagggatactggcggcataaaaccccatgagcgtaagcgggctgtagctcacctgacactgtctgagcgcgaggagatacgagctggtttgtcagccaaaatgagcattcgtgcgatagctactgcgctgaatcgcagtccttcgacgatctcacgtgaagttcagcgtaatcggggcagacgctattacaaagctgttgatgctaataaccgagccaacagaatggcgaaaaggccaaaaccgtgcttactggatcaaaatttaccattgcgaaagcttgttctggaaaagctggagatgaaatggtctccagagcaaatatcaggatggttaaggcgaacaaaaccacgtcaaaaaacgctgcgaatatcacctgagacaatttataaaacgctgtactttcgtagccgtgaagcgctacaccacctgaatatacagcatctgcgacggtcgcatagccttcgccatggcaggcgtcatacccgcaaaggcgaaagaggtacgattaacatagtgaacggaacaccaattcacgaacgttcccgaaatatcgataacagacgctctctagggcattgggagggcgatttagtctcaggtacaaaaaactctcatatagccacacttgtagaccgaaaatcacgttatacgatcatccttagactcaggggcaaagattctgtctcagtaaatcaggctcttaccgacaaattcctgagtttaccgtcagaactcagaaaatcactgacatgggacagaggaatggaactggccagacatctagaatttactgtcagcaccggcgttaaagtttacttctgcgatcctcagagtcccttggcagcggggaacaaatgagaacacaaatgggctaattcggcagtactttcctaaaaagacatgtcttgcccaatatactcaacatgaactagatctggttgctgctcagctaaacaacagaccgagaaagacactgaagttcaaaacaccgaaagagataattgaaaggggtgttgcattgacagattga

SEQ ID NO: 24899 - DNA, 3547 bp, Homo sapiens
  SIMILAR (2082)..(2543): 991254mologous to Escherichia coli yehO,accession number U00007,Smith-Waterman Score=783.
tcagggatagtgaatgcgcccgcaggaaccagaatggcatgaatcaaactccttgttgacgaatctcgacacgagcctgagaggtgttgggtttccgttacttggccccactgccgtggtttgatgcgttgccggggcgattgatccgggatatgggtcctccaccggctttttggggtgacttccggtcgtatggtttcgatctctaggcgtcagggggtggcgctgccgtaagggccctgttggaagactggggacccgctccttatacccccgctcgcggtgcgacgctcggtaccctccgctgcggtcgcgataataggcgcaggccaggtggcggataaggttcatgcttcgactactgcacccgcaacgatctggaactggtggctgtctgtgacagccgctttcccaggcgcaggcgctggcagaaaaatacgggaatgcatccgtgtggacgatccgcaggccatgctgctggcggtgaaacctgatgtggttagctctgctcaccgttttcattacgaacataccctgatggcactggagcgggctgccatgtgatgtgcgaaaaaccgcccgccatgacgccagaacggcgcgggaaatgtgcgataccgcgcgcaaactgggcaaggtgctggccacgactttcaccatcgttttgcgctcgatacgcaacagcaccgcccgcgcccgcgtcgctgcggcgttcccggctggggtgtctttaccaataaagaactgagggtggtggcccgctgatcgacatcggcattcatatgctggatgctgcatgtatgtgctgggctttccggcggtgaaaagcgtgaatgcgcatagcttcaaaagatcggcacgcaaaagagctgtggtcaatttggtgagtgggatcggcaacttacagcgtcgaagattcgctgtttggcaccattgaatttcaaacggcggcattctgtggctggaaacgtcatttgcactcaacatccgcgacagtcgattatgaacgtcagcttttgtggtgataaagctggtgcgacgtgtttccagcacatatctacaccgataacaacggtgaattaatgacgagggcaagcccgtgatgatagccgacgccgagaggggtacatcatccagcaactggtggcggcgttgtatcaatccgcagaacagggacgcgtgtggaattatgaccaggccagtaacgttatcagaacccatttcagccagcataccctgaacaagtatgcatcgctgatggcgcagggaacggctatcttgggcttcgcgccagccatgaagaagattacacgcgcagacgcgagggatgtatctggcggggtctgcctgatgtcgtggggatggagattccataaatggtgaggttttctcgttatcccacgaagcctggcagcgtgatctcatgtgattgcgtctgacactgtctgagcgcgaggagatacgagctggtttgtcagccaaaatgagcattcgtgcgatagctactgcgctgaatcgcagtccttcgacgatctcacgtgaagttcagcgtaatcggggcagacgctattacaaagctgttgatggcttgtagattggttcgtcgtaaaagttacgcgcaattccgcgccgcttcagttcactcttcaggcgggggtgaattggctggtaataaatgacggacacagacggaaaccagtcgtagccagtgaaataaacacaaacgttggttaagcgctgtaccttcaacccggtagctaccgtcataaccagtcgtcagtgtgagttgatgatagcgcaggatctcccgtcctgtttcgctgatatcaagactggcaatatcatcatccacaccattaagctcgctgaaggttgccatggtggcggtcaaccccggctgaaagagcgtcagcaagatctggcagcggcgctggggagccgaaaggacagatggtggagcaagcgtaggcatcatctgtagatctcccataagcataattgataagaatagctaaagtttgctcggccgaagctttgggggatctttcggaatcggcagtatcaccacatgttggagcggacgcagtcaggcaattgatgccccggcgctggatcgcggcgcggctcttggcgcactaatgcgtctggaacatcccaacgccagtgccgaagcggcgctgacgatgctggcgcagttatccccggcacaatctggtgaggcgctgcacggtttgctggcgctggcccgccatcaactggcctgtcagccggcatttatcgccggtttcagcagtcatttaaatcaactgagtgaagccgattttattaacgccctgcccgatttacgcgcggcgatggcctggctaccaccacgagaacgcgggacgctggcgcatcaggtgcttgagcattatcaactggcgcaacttcccgtttcggcgctgcaaatgccgttgcattgtccaccacaggccattgcacatcatcaacaactcgaacagcaggcactggcatcgctgcaaaactggggagttttccatgtctgaactgaacgatcttctgaccacccgtgagctacaacgctggcgattaattcttggcgaagcggcagaaacgacgctttgtgggctggatgacaacgcccggcagatagaccacgcgctggagtggctgtatgggcgcgatcctgaacggctccagcgtggtgaaagttccggtgaattaggtggctccaatctctccacccttgagtggatcaacagtattacacgctgtttccgcagcaggtgatgagcggctgaaagcgatgccgtggcccagggctggcgagtgaaacatagagatgataacgatctttctctgcgataaaacgctcggaatggcaatcgtatgtttagcctcggtaccgcgttttacactcaggcaccgggtattgtgcgctactgtcgatgctgttctatgttgccgcctttgccatgtcctgggtccggtatgctgggtactgctgtcggaaatcttcccgaatgcttcccgatgatggacaaaaactcctggctggtggccatttccacaacggtttctcctactggatttacggttgtatgggcgttctgcagcactgtttatgtggaaatttgtcccggaaaccaaaggtaaaaccctgagaagctggaagcgctcatcgttgccagccagcaacgatgggccttgatgacggaaacaccagacgaagaagagctggatctacagtttctcgcaagtcgaatggatacctcaaagctggatttgattctggtcgaagggtttaagcatgaagagatcgcaaagattgtgctgtttcgcgatggagccggacatcgacctgaagaattagtgatagacaggcatgttattgctgtagccagtgatgtgccgcttaatcttgatgtcgcattactggatattaatgatgttgaggggctggctgattttgtggtggagtggatgcaaaagcagaacggataagcaagagtaggctggataagacgcgccagcgtcgctccggcat

SEQ ID NO: 24900 - DNA, 461 bp, Homo sapiens
  SIMILAR (182)..(6): 401254mologous to Homo sapiens Human secreted protein, SEQ ID NO: 4473,accession number G00392,Smith-Waterman Score=72.
gacaaagcttccagaggaaggagcaggcagcaatctttgctgttctgcagcctctgctggtgatacccaggcaaacagggtctggagtggacctccagcaaactccagcagacctggagaagaggggcctgactgttagaaggaaaactaacaaacagaaagcaataacatcaacaaaaaggatgcccacgcaaaaaccccatccaaaggtcatcagcatcaaagatcaaagaatagccagtttagaggagaacataaatgacctgatggagctgaaaaacacagcacaagaacttcgtgaagcatacacaggtatcaatagtcgaatcaatcaagtggaagaaaggatatcagagattgaagatcaacagaatgaaataaagtgtgaagacaagattagaggaaaaagaataaaaaacaaacaaacaaacaaagcctctaaaaaatgtgggactatgtga

SEQ ID NO: 24901 - DNA, 752 bp, Homo sapiens
  SIMILAR (141)..(737): 551254mologous to Homo sapiens p40,accession number U93570,Smith-Waterman Score=524.
gacgaagcttccagaggaaggaacaggcagcaatctttgctgttctgcagcctctgctggtgatacccaggcaaacagggtctggagtggacctccagcaaactccagcagacctgcagaagaggagcctgactgttagaaggaaaactaacaaacagaaagcaataacatcaacattaacaaaaagcacgcccatgcaaaaaacctatccaaagtgcacaaaactgaacagagaagagtatgacgaattgacagaagtaggcagaaggtgggtaataataacaaactcctttgagctaaaggagcatgttctaacccaatggaaggaagctaagaaccttgataaaaggttacaggaagggctaactagaataaccagtttagagaagaagataaatgacctgatggtgctgaaaaacacagcacgagaacttcatgaagcatacacaagtatcaatagtcgaattgatcaagcggaagaaaggatatcagagattgaagatcaacttaatgaaataaagcttgaagacaagattacagaaaaaagaatgataaggaaaggacaaagcctccaagaaatatgggactatgtgaaaagaccaaacctacgattgattggtgtacctgaaagtgatgaggagaatgtaaccgagctggaaaacactcttcaggatatcatccaggagaacttccccaatctagcaagacaggccaacattcaaattcaggaaatacaaacactactaagataa

SEQ ID NO: 24902 - DNA, 831 bp, Homo sapiens
  SIMILAR (493)..(792): 581254mologous to Homo sapiens PRO2221,accession number AF116695,Smith-Waterman Score=277.
atggatgtgagcagaggccatctccctgctgctgctgttcatgctggcaggatccgttctcaacttttcttacttggaatctacactgtccttgaccctgcctgtccccataactctacccttcgggagtacataaatccacgtttatttatggcttctataacacctaaccctgcacatcccagtctttattctggcaacattcatgttgaggcagtattacttcctcctcctatttttatttgcttccagaggaaggaacaggcagcaatctttgctgttcggcagcctctgctggtgatacccaggcaaacagggtctggagtggacctccagcaaactccagcagacctgcggcagaagggcatgactgttggaaagaaaactaacaaacaaagcaatatcatcaacatcaacaaaaagaacatccattcaaaaaccctatctgaaggtcaccaacatcaaagaccaaaggtagataaatccacgaaaatgaggaaaaaccagcccaaaatggctgaaaattccaaaaaccagaatgcctcttctcctgcaaaggatcacaactccttgcctgcaagggaacaaaactggatggagaatgagtttgatgaattgacagaagtaggcttcagaaggtgggtattaacaaattcctccaagctaaaggagcatgttgtaaccaaatgcaaggaagctaagaaccttgaaaaaaggttagaggaattgctaagtagaataaccagtttagagaagaatgtgaatgacctgatagagctgaaaaacacagcagaagaacttcgtgaagcatacacaagcatcaatagctaa

SEQ ID NO: 24903 - DNA, 1511 bp, Homo sapiens
  SIMILAR (505)..(1215): 971254mologous to Homo sapiens phosphatidylinositol 3-kinase homolog,accession number U26455,Smith-Waterman Score=1164.
atgggcaaggacttcatgactaaaacaccaaaagcaatggcaacaaaagccaaaattgacaaatgggatctaattaaactaaagagcttctgcacagcaaaagaaactaccatcagagtgaacaggcaacctacagaatgggagaaaatttttccaatctacccatatgacaaagggctaatatcaagaatctacaaagaacttaaacaaatttacaagaaaaaaatcaaaccaccccatcaaaaagtgggcaaaggatatgtcttctcaaaagaagacatttatgcagccaacagacacatgaaaaaatgctcatcatcactggccatcagagaaatgcaaatcaaaaccacaatgagataccatctcacaccagccaaccgaggaattgaaatcattaactgtccatttttagatgatgcagcatcctgtatagatccaacttattcctccaacatattcccccctgttaacttgtcatggggacttcctatgaagccaaaggaagtaaagattaagcggcagaaaaaagaacaccttctcaaggacagggattttagttttcaggagcctatcatggctctacgcacagtcattttggagatcctgatggaaaaggaaatggacaactcacaaagagaatgtattaaggacattctcaccaaacaccttgtagaactctctatactggccagaactttcaagaacactcagctccctgaaagggcaatatttcaaattaaacagtacaattcagttagctgtggagtctctgagtggcagctggaagaagcacaagtattctgggcaaaaaaggagcagagtcttgccctgagtattctcaagcaaatgatcaagaagttggatgccagctgtgcagcgaacaatcccagcctaaaacttacatacacagaatgtctgagggtttgtggcaactggttagcagaaacgtgcttagaaaatcctgcggtcatcatgcagacctatctagaaaaggcagtagaagttgctggaaattatgatggagaaagtagtgatgagctaagaaatggaaaaatgaaggcatttctctcattagcccggttttcagatactcaataccaaagaattgaaaactacatgaaatcatcggaatttgaaaacaagcaagctctcctgaaaagagccaaagaggaagtaggtctccttagggaacataaaattcagacaaacaggtgcccctctgggacaaagcttccagaggaaggaacagtcagcaatctttgctgttctgcagcctccactggtgatacccaggcaaatagggtctggagtggaactccagcagactccagcagacctgcagctgagggacctgactgttagaaggaaaactaacgaacagaaaggaatagcatcagcatccacaaaaaggacatccacagaaaaaccccatacgaaggtcaccaacatcaaagaccatagatagaaaaatccatgaagatgaggaaaaaccagtgcaaaaaggctga

SEQ ID NO: 24904 - DNA, 966 bp, Homo sapiens
  SIMILAR (64)..(198): 881254mologous to Homo sapiens Human secreted protein sequence SEQ ID NO:103,accession number Y87064,Smith-Waterman Score =195.
atgacactgaacggtgctgaagtgctgtctgatactcctaagtgcaagaaggctgtgtcaggcccttctgctgcaggtctgctggagtttgctggaggtccactccagactccgtttgcctgggtatcaccagtggaggctgcagaacagcaaagactgctgcctgttccttcctctggaagctttgtcccagagggacacctgccagatgccaggtggagtgctcctatacgaggtgtctgtcaatccctgctgggaggtgtctcccaggcaggaggcacaagggtcagggacccacttgaggaggaagtctgtcccttagcagagctcgagcgctgtgctgggagatctgttgctgtcttcagagccagcaggcaggaacatttacgtctgctgaagctgacttcacagccgccccttcccccaggtgctctgtcccagggagatgggagttttatctataagcccctgactggggttgctgcctttctttcagatgccctgcccaagaggaggaatctggagaggcagtctggctatagcacctttgaggagctgtgtttccagaagagaacttggggaagggatgcagtgcgaatcagtgacctgttattaggagaccactcgcattttggcaaatgcccaatatcaaggcttgagagagcagaaaatatgccagtggtatcggagctctcagctgcagggtgtagtactgaagtgaatcatgtatttgttggaatcatttggcaaaagggcaaatgcagcaaatacactgctccctccaagtccagtgttccagtgtcaagcaccagaggacacgttcatatcacagtacaaaatccaactctggtaccttttgtcgggaagctcaatattgacagcccaataggtgataggaatattccagtcctgacagctggtaactgcaaaactttaggtgatctgcggtcatttccacacaattaa

SEQ ID NO: 24905 - DNA, 2223 bp, Homo sapiens
  SIMILAR (1495)..(2220): 1001254mologous to Homo sapiens ZNF37A,accession number X69115,Smith-Waterman Score=1378.
tgtgtgttgattttgtactctgcaactatgccaaaactatttgttagctcatagatgttttgtggattatatgctaaataatgttatctgcaaatagagtagttttacttctgcctttcaatttgaatgtcttttattttttttttcttgcctatttgctctggctagaacttttaatacagtgttgaattgcagtggtgtgaaagcactatcattgcctgttcatgatcttagggggggatctttcagtctttcactatggagtatgttacctatgagttttttgtatatgtgctttattatgtggaggaacaggcagcagtctttgctgtttggcagcctccactggtgataccgaggcaaacagggtctggagtggacctccagcaaactccagcagacctgcagcagaggggcctgactattagaaggaaaactaacaaagagaaaggaataacatcaacatcaacaaaaaggacatccattcagaaaccccatctgaaggtcaccaacatcaaacaccaaagactgagcaaaattgtgattttccagggatcagtgtcgtttagggatgtgactgtgggcttcactcaagaggagtggcagcatctggaccctgctcagaggaccctgtacagggatgtgatgctggagaactacagccaccttgtctcagtagggtattgcattcctaaaccagaagtgattctcaagttggagaaaggcgaggagccatggatattagaggaaaaatttccaagccagagtcatctggaattaattaataccagtagaaactattcaataatgaagttcaatgagtttaacaaaggtggaaaatgtttctgtgatgaaaagcatgaaataattcattctgaagaggaaccttctgaatataataaaaatgggaacagcttctggctgaatgaagacctcatttggcatcagaaaattaaaaattgggaacaatcttttgaatacaatgaatgtgggaaagctttccctgagaattcactcttccttgtacataagagaggttacacaggacagaaaacctgcaaatatactgaacatgggaaaacctgtgatatgtcatttttcatcactcatcagcaaacacatccaagagaaaaccactatggtaatgaatgtggagaaaatatctttgaggaatccattctccttgaacatcagagtgtttacccattcagccagaagttaaatctcactccaattcagagaacccactcaattaacaatattattgaatataatgagtgtggaacatttttcagtgaaaaattagtccttcatttacaacagagaacacatacaggagaaaaaccttatgaatgtcatgaatgtggaaaaaccttcacccagaagtcagcccacacaagacatcagagaacacacacagggggaaaaccctatgaatgtcatgaatgtgggaagaccttctataagaattcagacctcattaaacatcaaagaattcatacaggggagagaccttatggatgtcatgaatgtgggaaatccttcagtgaaaagtcaacccttactcaacatcaaagaacgcacacaggggagaaaccatatgaatgtcatgaatgtgggaaaaccttctcatttaagtcagtccttactgtgcatcagaaaacacacacaggggagaagccctatgaatgctatgcatgtgggaaagcctttctcagaaaatcagacctcattaaacatcaaagaatacacacaggtgaaaaaccttatgaatgtaatgaatgtgggaagtcattctctgagaagtcaacccttactaaacatctaagaactcacacaggtgagaaaccttatgaatgtattcagtgtggaaaatttttctgctactactccggtttcacagaacatctgagaagacacacaggggagaaaccttttggatgtaatgaatgtgggaaaaccttccgtcagaagtcagccctaattgttcaccagagaactcatataagacagaaaccctatggatgtaatcaatgtggaaaatcattctgtgtgaagtcaaaactcattgcacatcatagaacacacacaggggagaaaccctatgaatgtaatgtttgtggaaaatcattctatgttaagtcaaaactaactgtacatcagagaatacacttggggagaaaccctataaatgtagtaaacgagggaaattactctgggtga

SEQ ID NO: 24906 - DNA, 414 bp, Homo sapiens
  SIMILAR (6)..(233): 351254mologous to Homo sapiens Human gene 91-encoded protein fragment, SEQ ID NO:490,accession number Y86573,Smith-Waterman Score=98.
ccccagaggaggcactctgtgccttagcagagctcgagcgctgtgctgggagagctgctgctctcttcagagccgagaggcagaaacgtttacgtctgctgaagctgcacccacagccgccccttcccccgggtgctctgtcccagagagatgggagttttatctataagcccctgactggggctgctgcctttctttcagagatgccctgcccagagagcagttttacaggctttttacagacagatcagaccgagtccctgaaaactccgtgacagatgtttgtcacattgaaagtaaaatggagcctctccgcctcggcccacaaacgtctccattatgagaccaagcctggtctgctcgttcaccactctggtctttatttcctcaaatgctcagagctctctcgtagct

SEQ ID NO: 24907 - DNA, 2095 bp, Homo sapiens
  SIMILAR (1884)..(2081): 291254mologous to Escherichia coli exonuclease X,accession number AF194116,Smith-Waterman Score=60.
gtcgactactagaggatcccccccgcaagaggcccggcagtaccggcataaccaagcctatgcctacagcatccagggtgacggtgccgaggatgacgatgagcgcattgttagatttcatacacggcttccagtcttcatgcttcctccaacgccgagaaaaacttcctggattgtagcccctgtactggaggtcctagccagagcaatcagacacgagacagaaatacagggcatccacaccggtacagaagacgtcccagtgtcactgtttgctgatgacatgatcatttaccttgacaaccttaaagactcctccagaaagctcctagaagtgataagagacttcagcaaagtgtctggatacaagattaatgtacacgaatcagtagctcttctatacaccaacaatgactacgcagagaatcacatcaagaactcaaccccttttactatagggtacgtgctcgcattcgtagtcatggtcatagctgtatcctgtgtgagattgttatacgctcacaattgcacacaacatacgagcctgaagcataagtgtcaagcgtgggtcgtgactactgtcgatgcagctgcattcatgactcaggctacgcgcgaggagaggcggattgcgtattcggcgccaggtggttatttctttcacatactggaagtcctagccagaacaatcagacaagagaaagaaatacagggcatccaaaccggtaaagaagaagtcaaagtgtcactgtttgctgatgacatgatcatttaccttgaaaaccttaaagactcctccagaaagctcctagaagtgataaaagaattcagcaaagtgtctggatacaagattaatgtcgactctagaggatcccccacagacttggtaatttataaagaagaaattgtatttctcatagttccaaaggctaagaagtccaaaatcaaggtgctggcctctgacccgctttgttatgccgcaacgacctggcgaatgaccatcattgccggccttcccgttgaatataacgatcgctttattcgtggaattgcggtgttcgcaccgtggcgaaaaacgcctgggatctaccatcagagtcatgacccgctttgttatgccgcaacgacctggcgaatgaccatcattgccggccttcccgttgaatataacgatcgctttattcgtggaattgcggtgttcgcaccgtggcgaaaaacgcctgggatctaccatcagagtcatggtgcatgtctgggccgtcgttccagaaccatcacggtggtcgatgcacaaccgcaagtcatggatatggacccgacctgttcactgtttactacagggcaatgtctgggagaacccgacctgctggcgtcggcccgtcgcttacaatttttttcacatcagtactcgattgccgtgctgatggcaaatgcccgtggtaacagtgcatatatgggagtaactatggtggtctcatcgttcgcgccgatcgtggttcattattgttagtcgggttggcaaggcgatatcattccattacgctaggctttttcggcctggagcatgccatgttgcgcattatcgatacagaaacctgcggtttgcagggagggatcgttgagattgcctctgttgatgtcattgacggaaaaatcgtcaaccccatgagccacctggtgcgccccgatcgtcctattagtccacaagcgatggcgattcatcgcatcaccgaagccatggtcgccgataaaccgtggattgaagatgtgatcccacactattacggtaagtgaatggtatgtcgcgcataacgccagctttgaccgccgcgtactgcctgagatgcccggtgagtggatttgcactatgaaactggcccgtcgtttgtggcctgggatcaagtacagcaatatggcgttatataaaacacgcaagctcaatgtacagacgccgccgggcctgcatcatcaccgcgcgttgtatgactgttatatcaccgccgcgttgcttatcgatattatgaacacctccggctggacggcagatacagatggccgatatcaccggacgtccgtcgttgggggatcctgctag

SEQ ID NO: 24908 - DNA, 2538 bp, Homo sapiens
  SIMILAR (1837)..(2535): 991254mologous to Homo sapiens p40,accession number U93564,Smith-Waterman Score=1176.
atgcttcaaagcaaccgaaccgccgccagccattcaccatccatccagccagccatccagccagccatccagccagccagccaactatccatccacaatttgtggacacaattccggcattcaaccaaaattccagttgaatgggtgaatggtgaatggctgaatggacgaatgccagaagatcatcatgaatggcaatgcaactatcagaacgttcagcagtttatcgatgaaggcaattatacatccggcgacaaccatacgctgagagaccctcactacgttgaagacaaaggccataaataccttgtattcgaagccaacacgggaacagaaaacggataccaaggcgaagaatctttatttaacaaagcgtactacggcggcggcacgaacttcttccgtaaagaaagccagaagcttcagcagagcgctaaaaaacgcgatgctgagttagcgaacggcgccctcggtatcatagagttaaataatgattacacattgaaaaaagtaatgaagccgctgatcacttcaaacacgagagaaaccgtcgatttcaacggtaaacatattcatgtgcgcggagcaaaactgctcttcccggcgattcaacagccgtatccgccactttactttggcggatcgtcagatgtcgcccaggagctggcggcagaacaggttgatctctacctcacctggggcgaaccgccggaactggttaaagattttatcgaacaagtgcgggcgaaagctgccgcgcatggacgcaaaattcgtttcggtattcgtctgcatgtgattgttcgtgaaactaacgacgaagcgtggcaggccgccgagcggttaatctcgcatcttgatgatgaaactatcgccaaagcacaggccgcattcgcccggacggattccgtagggcaacagcgaatggcggcgttacataacggcaagcgcgacaatctggagatcagccccaatttatgggcgggcgttggcttagtgcgcggcggtgccgggacggcgctggtgggcgatggtcctacggtcgctgcgcgaatcaacgaatatgccgcgcttggcatcgacagttttgtgctttcgggctatccgcatctggaagaagcgtatcgggttggcgagttgctggtcccgcttctggatgtcgccatccccggaaattccccagccgcagccgctgaatccgcaaggcgaagcgctaaggaagaaataatggcacgcccagtgaagaagtggttattgcgcgttgccccctggtttttaccggtgggcatcgtggcggtgtggcaactggcctcctcggttggctggctgtcgacgcgtattttgccttcaccggaaggagtggtgacggcgttctggacgctctccgccagcggcgaactgtggcagcatctggcgatcagctcctggcgggcgctgattggcttttcaattggcggatcgctggggttgattttgggactgattagcgggctatctcgctggggagaacggctgctggatacctcaattcagatgttgcgcaacgtgccgcatctggcgctgatcccgctggtgattttgtggtttggcattgatgaatccgcaaaaatctttctggtggcgctcgataatatcgatcgcgggttggtggagatggcgcgtagctatggattatccggcataccgctgtttatccatgtgatcctgcctggtgccctgccctcaattatggtcggcgtgcgttttgcgttgggcctgatgtggctgacgctgattgttgccgaaaccatttctgccaattcaggcattggttatctggcgatgaacgcgcgagaaagcttcaggagccgatgcgatcaactggaagaaagggtatcagcaatggaagatgaaatgaatgaaatgaagcgagaagggaagtttagagaaaaaagaataaaaagaaatgagcaaagcctccaagaaatatgggactatgtgaaaagaccaaatctacgtctgattggtgtacctgaaagtgatgtggagaatggaaccaagttggaaaacactctgcaggatattatccaggagaacttccccaatctagcaaggcaggccaacgttcagattcaggaaatacagagaacgccacaaagatactcctcgagaagagcaactccaagacacataattgtcagattcaccaaagttgaaatgaaggaaaaaatgttaagggcagccagagagaaaggtcgggttaccctcaaaggaaagcccatcagactaacagcggatctctcggcagaaaccctacaagccagaagagagtgggggccaatattcaacattcttaaagaaaagaattttcaacccagaatttcatatccagccaaactaagcttcataagtgaaggagaaataaaatactttatagacaagcaaacgctgagagattttgtcaccaccaggcctgccctaaaagagctcctgaaggaagcgctaaacatggaaaggaacaaccggtaccagccgctgcaaaatcatgccaaaatgtaa

SEQ ID NO: 24909 - DNA, 1971 bp, Homo sapiens
  SIMILAR (400)..(1218): 981254mologous to Escherichia coli DNA helicase,accession number L02123,Smith-Waterman Score=1368.
atgacaatcaagggtgaacaggcgaaaaaacagctgattgctgccgcactggcgcagtttggtgaatatggaatgaacgccaccactcgcgagatagccgcccaggccgggcagaatatcgctgccatcacctactacttcggttcgaaagaagatttgtacctcgcctgcgcccagtggattgccgattttattggcgagcagttccgtccgcatgccgaggaagccgaacgcttgttcgcgcaaccacagcctgatcgggctgccatccgtgaactgatccttcgcgcctgcaggaacatgattaagctgctcacccaggatgacaccgtcaacctcagcaagtttatctcccgtgagcagctctctcccacggcagcctaccacctggtgcacgaacaggaggcagagcaccgttttgcgatgggcgaactgccagatgaagtgctggagatctgccagcggctggcaaaactcaccgagatgctgcgtggcctggcggagttatttcttaacgatttaagtgagaaaaccggcagccatgacattgtacgtctgcatcggttgattttgcagatgaaccgcgcgttggggatgttcgaggcgcaaagcaaactctggcggctggcttcgctggcgcaatcttccggtgcaccggtgaccaaatgggcgacgcgggaagagcgcgaagggcagctacacctctggtttcactgcgtgggaatacgtgtcagcgatcagctggaaaggctgctgtggcgcagtattccgcacattattgtcacctccgcaaccttgcgttcgctgaacagtttttcgcgtttgcaggagatgagtggtctgaaagagaaagcgggcgaccgttttgtggcgctggattccccctttaaccactgcgaacagggcaaaattgttattccccggatgcgcgttgagccttccatcgacaacgaagagcagcatattgccgaaatggcggcctttttccgtaagcaggtggagagcaaaaaacatctcggtatgttggtactgtttgccagcggacgggcgatgcagcgctttctcgactatgtgacggatttacgtctgatgttgctggttcagggcgatcagccgcgttaccgtttagttgaactgcaccgcaaacgcgtcgccaacggtgagcgcagcgtgctggtgggcttacagtcattcgccgaagggcttgccagtcccggccccgagccccctccttttccggcagccttggagatgttgccttttcttaatttgcatatgtcgccggagcgaatgctgcagcggatggactcggaaaaagtggttaccttcaccacagcgctaatgaccgggctttccggggcaatggcgagcgtgcttttgctgctgatgaccgtagtttttatgctgtttgaagtgcgccacgtcccttacaaaatgcgttttgcgctgaataatccacagattcacatcgcgggattacaccgcgcacttaaaggcgtttcgcactatcttgcattgaagacgctactcagtttatggacaggtgtcatcgtctggctggggctggagctgatgggggtgcagtttgcgctgatgtgggcagtactggcgtttttgctcaactacgtgcccaatatcggcgcggtaatttccgccgtaccgccaatgattcaggtgctgctgtttaatggtgtttacgaatgtattctggtcggcgcattgtttttagtggtccatatggtcatcggcaatattttagaaccacggatgatgggccatcgcctggggatgtccaccatggtggtatttctttcattgttaatttggggatggctgctcggcccggtagggatgctactttcggtgccattaaccagcgtgtgtaaaatctggatggaaaccaccaaaggcggtagcaaactggcgattttactggggccgggcagaccgaaaagtcggttaccgggatga

SEQ ID NO: 24910 - DNA, 1380 bp, Homo sapiens
  SIMILAR (1344)..(604): 1001254mologous to Escherichia coli putative aliphatic sulfonate binding protein precursor,accession number AJ237695,Smith -Waterman Score=1260.
ttacccacacgggatactagaatttttataaacacatagatcaatcagctcggtaccgctggtcatttcgtatgcggcattactgcctgccatgctgccgaagctgcgcaccgtctcacggtgcagcctgtcccgcgtatactcgaccagcggcgtcccgcccagcttcattcccgccaggtaaccgctgccatacgtcagccactccaccggcggcaggctgtccggcgtgacgcggtttgccagcccctgctcgttgtatgcgtgtttcgtctcatgctgccacagcagttcccccgtctccgggttctccaccgtctggcattcgccggtcaggcggcctttatcgtcatagccatagtggacggcaacacggtggccttcgctcaggtggctgatgtctgtcagccagccgtggccatcatactgccactgcttctgtgtgagttttccggtcaggtcataatgataacgttgcgtccgcccgtcaaagccgccctgctgtaccagccggtccagcgcatcgtaactgaagacgctgtggctgccgtccaggaaccagttccccacagataccatggggcgacagtattcagaataatgcagacgattttcataaaacagatctgccgtttgctgctgtaaggcggcaacctcggcgttaaccggtttgatggtggtaggagggcgatgatctaagtaagaggcaatcaccggtgccggtaagcccatcgtttttgccagtaaagcgatgctttgctcgcgctggctgcgggttaacgcatcggcctcactaaaggttgccagtacgccctgaataaaagcgccgtttttttctgcatagggacgagctgccagataaaacgatccagtttgattgagatcggtgccgtctttcagcacccgcacgccgccctgtaataatgcagcagagtagtagggatcccagatagcccaggcgtcaacgttaccttgctggaacgcggcgcgggcatcagcgggcgtcaggtaagtgggttggatatcggtaaacttaagtccggcctgacgcagtgcacgcagtaaaaggttgtgtgaactggaacctttctgaaaggcaactttgtgacctttaagatcggctacggttttgatcgggctgttttctgccaccagaatcacttcggctttgggcttcggtggctcgacgcccacgtacaccaaatcagccccggcagcctgggcaaagattggcggaatatccccggtactgccgagatcaatactgccaacgtttaacgcttccaacatttgcggacccgcggggaactccacccaggagatttttgattccggatagcgttttccagtaactggtggcttttggcaggaccataccat

SEQ ID NO: 24911 - DNA, 1518 bp, Homo sapiens
  SIMILAR (497)..(1150): 911254mologous to Escherichia coli putative aliphatic sulfonate binding protein precursor,accession number AJ237695,Smith -Waterman Score=1009.
  misc_feature (1)...(1518): n = a,t,c or g
ctccttgctggaatatgcgcgggaaaaactaaatggcctggatgtagaggtttatcactggaatctgcaaaacttcgccccggaagatctactttatgctcgtttcgatagtccggcactcaagaccttcaccgaacagctgcaacaggccgatgggctgattgtcgccacgcctgtgtataaagccgcctattccggtgcgttgaaaaccctgctcgacctgctgccagaacgcgctttgcaaggcaaagtggtgctaccgctggcgacgggcggtaccgtggcccatctgctggcggtcgattatgcccttaaaccagttttaagcgcactgaaagctcaggagatcctgcacggcgtgtttgccgatgactcacaagtaattgattaccatcacagaccccagttcacgccaaatctgcaaacccgtcttgataccgcgctagaaactttctggcaggcattgcaccgccgcgatgttcaggttcctgaccttctgtctctgcgagcaccgaagcccaaagccgaagtgattctggtggcagaaaacagcccgatcaaaaccgtagccgatcttaaaggtcacaaagtgcctttcagaaaggttccagtcacacaaccttttactgcgtgcatgcgtcaggccggacttaagtttaccgatatccaacccacttacctgacgcccgctgatgcccgcgccgcgttccagcaaggtaacgttgacgcctgggctatctgggatccctactactctgctgcattattacagggcggcgtgcgggtgctgaaagacggcaccgatctcaatcaaactggatcgttttatctggcagctcgtccctatgcagaaaaaaacggcgcttttattcagggcgtactggcaacctttagtgaggccgatgcgttaacccgcagccagcgcgagcaaagcatcgctttactggcaaaaacgatgggcttaccggcaccggtgattgcctcttacttagatcatcgccctcctaccaccatcaaaccggttaacgccgaggttgccgccttacagcagcaaacggcagatctgttttatgaaaatcgtctggtgccgaaaaaagtcgatattcgccagcgcatctggcagcccactcaactggaaggaaaacaattatgagtctgaatatgttctggtttttaccgacccacggtgacgggcattatctgggaacggaagaaggttcacgcccggttgatcacggttatctgcaacaaattgcgcaagcggcggatcgtcttggctataccggtgtgctaattccaacggggcgctcctgcgaagatgcgtggctggttgccgcatcgatgatcccggtgacgcagcggctgaagtttcttgtcgccgtgcgtcccagcgtaacctcacctaccgttgccgcccgccaggccgccacgcttgaccgtctctcaaatggacgtgcgttgtttaacctggtcacaggcagnnnnnnnnnnnnnnnnnnnnnnnnnnnnnngtcgtga

SEQ ID NO: 24912 - DNA, 691 bp, Homo sapiens
  SIMILAR (142)..(32): 541254mologous to Escherichia coli acetohydroxy acid synthase I, small subunit,accession number L10328,Smith-Waterman Score=101.
acgctggtcgtcattgaccagtagccgatatggcttttgtcgctgtcctgaatcggcagacaaagaatgccttcacgttaaaagcgcggcgggcaaaaaggccacaaacgtgggtcattacgccggatggttgcgaacgtattcgccgcacctggcggcccatcgggtaaactttttcttcggcatcaatgcgcacatggatcagcgcgggccagggcgattgatgatttcctgcaatgaagcctgcggatcggcttgttattcaaatcacagttatatgaggaacgacaagcacgcagtgcggagagcagacagcggtagagcagagggaggaggaccacgagttaaaagtgttataaaagcccccgttattaccccaaagaaaaagcccgttgtgtcgacactaaagcactgggtattgatgctcgcgtgggtaacctgttctccgctgactgttctactctccggacggcgaaatgttcgacgtgatggaaaaatacgcattctcggcgtggaaatggaagcggctgcgtctggcaatcagtcaggcgacgttccacgccttgttgccagagaagatcgggtgattcgctttggtaaagcacggcaacgcgatatgcactgctgcgtccttatcgcggaattgagcgtattccgtctggcgggtggacgataccggaaaggcgcataa

SEQ ID NO: 24913 - DNA, 2298 bp, Homo sapiens
  SIMILAR (637)..(443): 521254mologous to Escherichia coli hexosephosphate transport protein,accession number M89479,Smith-Waterman Score=135.
atggtcatctgttgccagacggccctacaccatgggcggctttccgggcgttgcgctgctgacggaagagtacatcactttatggccagcaatttcgaccgcctgaccgtctggcaggacggcaaaaagtcgactttacgctggaggcatacagtattcccggaagttagcaaagagcaaatgcagatccgcgatattcggcgcgtccggcgttttatctcaccgcctcgcagcaacgctgggaagaaacctgaagaaagggttaaccaatccggatgcgacgccggaacagacgcggtcgcggtgaaagcgatcgacacgctcaacggtaactggcgctcaccggcgcatcatccagaacagcgcgtgcagcccaagtttgtgagtgatgatcgggcaagcaccatcgcaatggcaaagctggcaaatggcatcagccacgggagccgactgaaagcaaaattccggcggcgaaaatcaaattcatcggcctcggttgccgttaaacaatttgtccgagccccaaccggctaccagcgaccgataaatccgcccagttcaaacatcgtcactgccgtattcgccgtgccagatcgacgcccagtgtctcggacatatacaaattgccccagtcgttatcgccgcccggaccacatagaccagcacatagcaaaacgaaagcagccgatatacggattcagcaacacatatttgcgcgtcgtgtcgccatcaccgaccgccggtaaacctaacgcctgcgggcgatcgcgtagccgccgcagagaaaaatccccacgactatcgccatacaaccagcaatcatcatccggcacgccagccgtaatgcagcgcagccgctgccatcacaaggggaatagtgcgccgccgacgttatgcgccgtgttccataatgcccaccaatcgcgggctcggtacgtgaataccaggccgtttacagacgcgcacaaaccgaagaatttcatggtaaacatcaccacgcatccggtaatcggctgggccatcaggaaaaaatggttgtgttccagcgcctctgtagtcgattcatcatcgcgactttatctttcaattcgcgttgcaaaacattgccccgcgacgctgcatattttccggggcgttggtcacgatggaagttcggcgaccgtatttagctctcccagcagcagaccatgcttggccgctatcgctgacttcgacatggtgcgtaacgcagtagatgcactaaagcactgggtattgatgctcgcgtgggtaacctgttctccgctgactgttctactctccggacggcgaaatgttcgacgtgatggaaaaatacgcattctcggcgtggaaatggaagcggctggaagaagatgtgctctacgccctaccgtatttaacggtgaatatactggcggttggttggtcggggaggggattatcagcgatggattactgcacaacaccctgcggaaattcctcttgccgcagccaactcgctgtttagccatcgtttacacgaccgtctgggtagccgcagtatacagattcactgcattctcaggggtcggcaagcagtattggatgcgtcatgtcggagggcacgaacgttcaagggccgctaggcggcgatttgcgcagtggagtagcaacgcgcaggatcgctggcatcttggcgtgatggcggctacgccaatcagcacagtaatactcagagtaatcgtgtgggttataatcggatgggcgcatcagcggttacagcgctgggctgtacgcgacctggatcagaacgatgcgaataagaccggcgcttatgttgacagctgggcgcttataactgccgttaccactcccggccggcattggcgcggagtactggcgcgactatctaaaattaagcagtacggctatttgcgactgaccaactggcgcagcgcacctgaactggacaacattatgaagcacgcccggccaatggctgggatgtacgcgcagaaagctgctacccgcctggccgcaccttggcgatgtgttcgtacacttctctgctatccagacgatggttacaaatctctggacgaaggtcagaaagtgtccttcaccatgaaagcggcgctaaaggcccggcagctggacgttgataagcggggtcatcgtgatgattaccgtcctctgatcgccacccagttcgcgccttacttcactgaaatggcgctcaaagcggtttcagttttgccggtgaaagtgcgcaaatctcagcgttgtccgtggcaatatgttcggttggtcgatttctga

SEQ ID NO: 24914 - DNA, 1679 bp, Homo sapiens
  SIMILAR (1192)..(1677): 1001254mologous to Cloning vector pZC320 SopA,accession number U26464,Smith-Waterman Score=856.
atgggggtagagccgtcatggcttggtgccatccttgtgatagccctgaaaggatgcatgatgctcatccgtggccactctgctgcaggtctgctggagttttctggagttctactccagaccctgtttgcctgggtatcaccaatggagatggcagaacagcaaagatattgccgcctgttccttcctctggaagcttcgtcccagaggggcacccactggatgccagccacagctctcctgtatgaggtgtctgtcgacccctactcggagatgtctcccagtcaggatacacagagagaggaggaatctagagaggcagtctggccacagcagccttgcttagctgtggtgggctccacccagttcgaacttcgtttacactgtgaggataaaactgcctacttaagcctcagcagtggtggatgcccctcccgcgatcaagctcgagcatcccaggtcaacctcagactgctgtgctggcagcaaaaatttcaggctagtggatcttggcttgctgggctctgtggaggttgggcctcggatccagtcccatcttttacctgggtaaattcatcccacttacccggagttagccaattggtgtttcacacagatgattttcctttgggtcgggtgtctcttcagtatcatcccttctgtggttcgccagaaagatattaccagaaaggggtccaaatccagaccccaagagagggttcttggatctcacacaaaaaagaattcaaggccggacttaagtttaccgatatccaacccacttacctgacgcccgctgatgcccgcgccgcgttccagcaaggtaacgttgacgcctgggctatctgggatccctactactctgctgcattattacagggcggtgtgcgggtgctgaaagacggcaccgatctcaatcaaactggatcgttttatctggcagctcgtccctatgcagaaaaaaacggcgcttttattcagggcgtactggcaacctttagtgaggccgatgcgttaacccgcagccagcgcgagcaaagcatcgctttactggcaaaaacgatgggcttaccggcaccggtgattgcctcttacttaaatcatcgccctcctaccaccatcaaaccggttaacgccgagggtggcgccttacagcagcaaacggcagatctgttttatgaaaatcgtctggatctggctctgaaggggctacgtgttttgctcgtggaaggtaacgacccccagggaacagcctcaatgtatcacggatgggtaccagatcttcatattcatgcagaagacactctcctgcctttctatcttggggaaaaggacgatgtcacttatgcaataaagcccacttgctggccggggcttgacattattccttcctgtctggctctgcaccgtattgaaactgagttaatgggcaaatttgatgaaggtaaactgcccaccgatccacacctgatgctccgactggccattgaaactgttgctcatgactatgatgtcatagttattgacagcgcgcctaacctgggtatcggcacgattaatgtcgtatgtgctgctgatgtgctgattgttcccacgcctgctgagttgtttgactacacctccgcactgcagtttttcgatatgcttcgtgatctgctcaagaacgttgatcttaaagg

SEQ ID NO: 24915 - DNA, 1112 bp, Homo sapiens
  SIMILAR (219)..(839): 851254mologous to Escherichia coli purine nucleoside phosphorylase,accession number M60917,Smith-Waterman Score=869.
cggcacgctgcccgggtgtggagcaatgcacacatgccctagcggcccagcgactcatctcgtccgccgtcgcatcgtccgcctccccgcttgtgtcgtcaccagagcgaacgtgccgactccctcccgacctgtcaatgcgacaatcggcgcgtttcactcgggatagatggcatcccaggggcggcgtctgtcagcacagtacccatggtcaccgtttcaatacgcagacccgtcccgtacccaccgttcccggtaggctggtcttcaccggtacctccaaagcgcccaaaatttccgtaatgggtcccggtatgggtatcccgtcatgctccatctccgccaaagaactgatcaccgatttcggcgtgaagaaaattatccgcgtgggttcctgtggcgcagttctgccgcacgtaaaactgcgcgacgtcgttatcggtatgggtgcctgcaccgattccaaagttacccgcatccgttttaaaggccaagcctttggcggtatcgctgacttcgccatggggcgtaccgcagtagatccaggtaaagcactgggtattaatgctcgcgtgggtaacctggtctccgctgacctgttctactctccggacggcgaaatgttcgacgtgatggaaaaatacggcattctcggcgtggaaatggaagcggctggtatctacggcgtcgctgcagaatttggcgcgaaagccctgaccatctgcaccgtatctgaccacatccgcactcacgagcagaccactgccgctgagcgtcagactaccttcaacgacatgatcaaaatcgcactggaatccgttctgctgggcgataaagagtaattgtgtttcgctgcaaggcgattgccttgtgaagccggagcgggagactgctccggctttttagtatctattcatttttctctccagcttgaatattttcgctatacttttcagtgaaatgtgttaataaatctattcaagtatctattcacgaatctattcattaatgagcgagctgactgatcttttactgcaagggccgcgttctgccccggaattgcgccagcgtctggcaatcagtcaggcgacgttctcacgccttgttgccag

SEQ ID NO: 24916 - DNA, 1534 bp, Homo sapiens
  SIMILAR (1136)..(1531): 1001254mologous to Escherichia coli integral membrane protein,accession number K01992,Smith-Waterman Score=663.
tcatgtgcagctgttactggcgctgttttttgccatcgtcctcaacccgctcgtcacatggtttattcgtcggggagtacaacgccccgttgccattacgattgtagtggtggtgatgctgatcgcactaaccgcgctggtcggcgtactggcggcatcgtttaacgaatttatctctatgctgccgaagtttaataaggagctgacgcgcaaactttttaaattgcaggagatgttgccttttcttaatttgcatatgtcgccggagcgaatgctgcagcggatggactcggaaaaagtggttaccttcaccacagcgctaatgaccgggctttccggggcaatggcgagcgtgcttttgctggtgatgaccgtagtttttatgctgtttgaagtgcgccacgtcccttacaaaatgcgttttgcgctgaataatccacagattcacatcgcgggattacaccgcgcacttaaaggcgtttcgcactatcttgcattgaagacgctactcagtttatggacaggtgtcatcgtctggctggggctggagctgatgggggtgcagtttgcgctgatgtgggcagtactggcgtttttgctcaactacgtgcccaatatcggcgcggtaatttccgccgtaccgccaatgattcaggtgctgctgtttaatggtgtttacgaatgtattctggctcaccctgctggacatctgcggttacagtatcactctgcgctggcgaacgattttgcggaagcggaatcggcgcgtcgccgcctcaaaaaccgtattgcgctgacgctctcgatggcgacgatggccttcggcctgttctggctgatctggattttaatgtccaccatcactcgcggtatcgacggtatgtcgctggcgctgttcactgaaatgacgccgccgcccaatacggaaggtggtggtctggcgaacgctctggcgggtagcgggctgttaattttgtgggccacggtattcggtacgccgctgggcattatggcggggatttatctggcggaatatggtcgtaaatcctggctggcagaagtgattcgcttcattaacgacattctgctctctgcgccgtcgattgtggttggtctgtttgtttacaccattgtggtgccgattgttatccgcaccaccgagaacatgctgaaactggtgccgtacagcctgcgtgaagcggcttatgcgctgggtacaccgaagtggaagatgatctctgcgattacgctgaaagcgtcggtgtccgggattatgaccggtatcctgctggcgattgcccgtattgctggtgaaaccgcgccgctgctgtttaccgcgctctccaaccagttctggagcacggacatgatgcagccgatcgccaacctgccggtgacgatctttaagtttgcgatgagcccgtttgcggaatggcagcaattggcctgggccggggtattgatcattaccctgtgcgtactgctgctgaacattctggcgcgcgttgtttttgcgaagaataaacacggttga

SEQ ID NO: 24917 - DNA, 2142 bp, Homo sapiens
  SIMILAR (999)..(1805): 981254mologous to Escherichia coli ProW protein homolog,accession number D90732,Smith-Waterman Score=1363.
aacgttcagcagtttatcgatgaaggcaattatacatccggcgacaaccatacgctgagagaccctcactacgttgaagacaaaggccataaataccttgtattcgaagccaacacgggaacagaaaacggataccaaggcgaagaatctttatttaacaaagcgtactacggcggcggcacgaacttcttccgtaaagaaagccagaagcttcagcagagcgctaaaaaacgcgatgctgagttagcgaacggcgccctcggtatcatagagttaaataatgattacacattgaaaaaagtaatgaagccgctgatcacttcaaacacgagagaaaccgtcgatttcaacggtaaacatattcatgtgcgcggagcaaaactgctcttcccggcgattcaacagccgtatccgccactttactttggcggatcgtcagatgtcgcccaggagctggcggcagaacaggttgatctctacctcacctggggcgatccggcggacctgcgttaatgagattgtcgaacaagtgcgggcgaaagctgccgcgcatggacgcaaaattcgtttcggtattcgtctgcatgtgattgttcgtgaaactaacgacgaagcgtggcaggccgccgagcggttaatctcgcatcttgatgatgaaactatcgccaaagcacaggccgcattccgcccggacggattccgtagggcaacagcgaatggcggcgttacataacggcaagcgcgacaatctggagatcagccccaatttatgggcgggcgttggcttagtgcgcggcggtgccgggacggcgctggtgggcgatggtcctacggtcgctgcgcgaatcaacgaatatgccgcgcttggcatcgacagttttgtgctttcgggctatccgcatctggaagaagcgtatcgggttggcgagttgctggtcccgcttctggatgtcgccatccccggaaattccccagccgcagccgctgaatccgcaaggcgaagcgctaaggaagaaataatggcacgcccagtgaagaagtggttattgcgcgttgccccctggtttttaccggtgggcatcgtggcggtgtggcaactggcctcctcggttggctggctgtcgacgcgtattttgccttcaccggaaggagtggtgacggcgttctggacgctctccgccagcggcgaactgtggcagcatctggcgatcagctcctggcgggcgctgattggcttttcaattggcggatcgctggggttgattttgggactgattagcgggctatctcgctggggagaacggctgctggatacctcaattcagatgttgcgcaacgtgccgcatctggcgctgatcccgctggtgattttgtggtttggcattgatgaatccgcaaaaatctttctggtggcgctcggtacgctattccccatttatatcaacacctggcatggcatccgtaatatcgatcgcgggttggtggagatggcgcgtagctatggattatccggcataccgctgtttatccatgtgatcctgcctggtgccctgccctcaattatggtcggcgtgcgttttgcgttgggcctgatgtggctgacgctgattgttgccgaaaccatttctgccaattcaggcattggttatctggcgatgaatgcgcgggagtttttgcaaacggacgtggtggtagtcgctattattctttacgccctgctcggccaactggctgacgtcagcgcgcagctgttagagcgcctctggttgcgctggaacccggcttatcatttgaaggaggccacgggcacgccattgttgctcaatgcagtaagcaaacattacgcggaaaatatcgtcctgaaccaactggatttacatattccggcaggtcagtttgtggcggtggtgggccgtcagcggtggtggcaaaagtaccctgctgcgcctgctggcaggtctggaaacgccaaccgcaggcgatgtgttagcgggcaccatcaccgctggtctgaaattcaggaagacacgcgaatgatgtttcaggatgcgcgtctgctaccgtggaaatcggtgattgataacgttgggttaggccttaaaggccagtggcgcgatgccgcacgtcgagcgttggtctgcg

SEQ ID NO: 24918 - DNA, 2678 bp, Homo sapiens
  SIMILAR (1956)..(2042): 751254mologous to Escherichia coli FMNH2-dependent aliphatic sulfonate monooxygenase,accession number AJ237695,Smith-Waterman Score=104.
atggtcctaaaccgcttgttaactggtttattcttcgggagtacaccgccccgttgccattacgatttaattggtgctgatcctgatcgcactatccgctctgttcggctgtactggcggcattcgttgaacgaattaatctctatgctgccgaagtttaataaggagctgacgcgcaaactttttaaattgcaggagatgttgccttttcttaatttgcatatgtcgccggagcgaatgctgcagcggatggactcggaaaaagtggttaccttcaccacagcgctaatgaccgggctttccggggcaatggcgagcgtgcttttgctggtgatgaccgtagtttttatgctgtttgaagtgcgccacgtcccttacaaaatgcgttttgcgctgaataatccacagattcacatcgcgggattacaccgcgcacttaaaggcgtttcgcactatcttgcattgaagacgctactcagtttatggacaggtgtcatcgtctggctggggctggagctgatgggggtgcagtttgcgctgatgtgggcagtactggcgtttttgctcaactacgtgcccaatatcggcgcggtaatttccgccgtaccgccaatgattcaggtgctgctgtttaatggtgtttacgaatgtattctggtcggcgcattgtttttagtggtccatatggtcatcggcaatattttagaaccacggatgatgggccatcgcctggggatgtccaccatggtggacggcgtgcgggtgctgaaagacggcaccgatctcaatcaaactggatcgttttatctggcagctcgtccctatgcagaaaaaaacggcgcttttattcagggcgtactggcaacctttagtgaggccgatgcgttaacccgcagccagcgcgagcaaagcatcgctttactggcaaaaacgatgggcttaccggcaccggtgattgcctcattacttgagatcagtcagcccgtctctaaccatccgatcagaaccaggttaacagccgaggttgccgccttacagcagcaaacggcagatctgttttatgaaaatcgtctggtgccgaaaaaagtcgatattcgccagcgcatctggcagcccactcgactggaaggaaaacaattcatgagtctgaatatgttctggtttttaccgacccacggtgacgggcattatctgggaacggaagaaggttcacgcccggttgatcacggttatctgcaacaaattgcgcaagcggcggatcgtcttggctataccggtgtgctaattccaacggggcgctcctgcgaagatgcgtggctggttgccgcatcgatgatcccggtgacgcagcggcgtgaagtttcttgtcgccctgcgtcccagcgtaacctcacctaccgttgccgcccgccaggccgccacgcttgaccgtctctcaaatggacgtgcgttgtttaacctggtcacaggcagcgatccacaagagctggcaggcgacggagtgttccttgatcatagcgagcgctacgaagcctcggcggaatttacccaggtctggcggcgtttattgcagagagaaaccgtcgatttcaacggtaaacatattcatgtgcgcggagcaaaactgctcttcccggcgattcaacagccgtatccggcactttactttggcggatcgtcagatgtcgcccaggagctggcggcagaacaggttgatctctacctcacctggggcgaaccgccggaactggttaaagagaaaatcgaacaagtgcgggcgaaagctgccgcgcatggacgcaaaattcgtttcggtattcgtctgcatgtgattgttcgtgaaactaacgacgaagcgtggcaggccgccgagcgttttgtgctttcgggctatccgcatctggaagaagcgtacgggttggcgagttgctgttcccgcttctggatgtcgccatcccggaaatccccagccgcagccgctgaatccgcaaggcgaagcggtggcgaatgatttatccccccggcgaactgtggcagcatctggcgatcagctcctggcgggcgctgttggcttttcaattggcggatcgctggggttgattttgggactgattaggggctatctcgctggggagaacggctgctggatacctcaattcagatgtgcgcaacgtgccgcatctggcgctgatcccgctggtgattttgtggtttgcattgatgaatccgcaaaaatctttctggtggcgctcggtatgattggggattttctaaccaagctgataacacgttcgcggtattctgggcttcacccggtacttacaaaggccgcaaaattccgtaatgggtcacggtatgggtatcccgtcctgctccatctacaccaagaactgatcaccgatttcggcgtgaagaaaattatccgcgtgggttccgtggcgcagttctgccgcacaccatgctttgccgctatcgctgacttcgacatggtgcgtaacgcagtagatgcactaaagcactgggtattgatgctcgcgtgggtaacctgttctccgctgactgttctactctccggacggcgaaatgttcgacgtgatggaaaaatacgcattctcggcgtggaaatggaagcggctggtatctacggcgtcgctgcaaatttggcgcgaaagccctga

SEQ ID NO: 24919 - DNA, 372 bp, Homo sapiens
  SIMILAR (202)..(2): 941254mologous to Escherichia coli similar to,accession number D90883,Smith-Waterman Score=301.
cggtgctctcctgctggcgacttgccccttgtggctgaatcgtcggacggatgagaaagccgagcagcatggatgccacgcccaacgtcaacagcgcgaggatcacccgataatcaaacatagtgaccagtttgcccgtcagcgccgagccaatgacaaacgccaccgagccccacagtcgcacagtggtgagaaaaagagggttaaagccaatcatcaccagcatcagccacgctacgtgcgcccccgcccagaaggcgacagcaaagagaagtgtcagcagtgccagcacgcgcaaggcggaaatcaggcgggaaggatcgctgacgcggggcgcgatgagcaaactcccgaggaaacgggcaaccagac

SEQ ID NO: 24920 - DNA, 2760 bp, Homo sapiens
  SIMILAR (2571)..(2759): 1001254mologous to Escherichia coli D-serine dehydratase (EC 4.2.1.14),accession number D90866,Smith-Waterman Score=348.
atggcggcgaagggacggtggatgccgatggtcgccgcgacgggcggcaacatcgtgacgcttgaagtctgcgggccgatgggcgaaaaagtgaatgctttttatggccttaccggcgacgggaaaacggcggtgattgagatggcggcagcaagtggcctgatgctggtcgcgcctgaaaagcgtaatccgttgctggcctccagttttggtacgggggagttaattcgtcatgcgctggataacgacattcgccatattattctcggcattggcggcagtgcgacggtcgacggcggtatgggcatggcgcaggcgctcggtgtgcgtttccttgatgccgacggtcaggcgctggcggcaaacggtggcgtcaccatcggggataattctgttattggcgcgggtagtatcgtcacaaaagacattccaccaaacgtcgtggcggctggcgttccttgtcgggttattcgcgaaataaacgaccgggataagcactattatttcaaagattataaagttgaatcgcctacaagttcagcgatctacattagccgcatccggcatgaacaaagcgcaggaacaagcgtcgcatcatgcctctttgacccacagctgcggaaaacgtactggtgcaaaacgcagggttatgatcatcagcccaacgacgcacagcgcatgaaatgcccagtccatcaggtaattgccgctgatactacgcagcacgccagaaaaccacggggcaagcccggcgatgataaaaccgattccctgcataaacgccaccagcttgccagcaatagccggttgcacagagtgatcgagcgccagataaagcaccatcgttctcccatggagctgatgacgatgctgcgtgacgtgcgcttaaacgggctgcccctgatcgacatccgcgtgccagcggcagccagcacagcacgatcaacaatcccattaagaccgccgaccagcgcgccagccgtgcccgccaggaaggggaacggctccagtcgcgcgctggtcgccagcggaaacagcatcccggcaccgaaaaagaacagcgcggcgggaacgagcagcgtccagacattcatcacgccaaaccagtcggggatccacatcagcaagccagccagcaggcagcagataaccgactgccacattaaccacgccggagcaggcttcaaaggcggcaatcccggccagaccgccaatcagcatcagcaaataacagttaaaaccgctgttaccgactctagagatccccggtaccgagacaacacccacgctcagaggagctcgcgcaagaagtccccgttgccctggtctacaacggcattccgcatgtgccgcccctttatggggttgaaggcacgcgcccgtgcgctggcgggacgtacgggctgtggcgtatgcggcgtggagcaacttaatgacatcggaaaaccggtgcagccgctaccgttcacccagacgtctgacctcaacaaactggatgatgcattacgtcatctcaacgattttcagccagtggggcaactgactggttgtactcacgccgctgcctggatgttgccatctggcgaactggtcggcgggcatgaagacgtgggtcgccatgtggcgctggacaaactgttaggccgccggtcacaagaaggggaaagctggcagcaaggtttaagattagcgtgcaagaaagaattaaagcttgccccactgaaagcatccaaactcaaattcgcggcagaggcgcttccggatgccatctcccgtgcagccatgacgctggttcagtctctgctcaatggcaacaaaatcctctgttgtggtaatggaacttccgctgccaatgcacagcattttgctgccagcatgatcaaccgtttcgaaacggagcggcccagcttacctgccattgcactaaatactgataatgttgtcttaacggcgattgccaacgatcgcttacatgatgaagtgtatgcaaaacaggtgcgggcgctgggtcatgcgggagatgtattgttagccatttccacccgtggcaacagccgcgatattgttaaagcagttgaagccgccattacgcgtgatatgaccattgtggcattgaccggctatgacggcggcgaacttgcaggtttgttagggccacaggatgtggagatccgcattccttcgcatcgtagtgctcgcattcaggaaatgcatatgctgacggtaaattgcctgtgcgatctgatcgataacacgcttttgactctagacatccccgataccgagccagatccgccaatacagcattgctgtggctcaaccggaaatctggggttatcaatcggcattatgagcgcccgcattggctttaaggtgacagttcatatgtctgctgatgcccgggcatggaaaaaagcgaaactgcgcagccatggcgttacggtcgtggaatatgagcaagattatggtgttgccgtcgaggaaggacgtaaagcagcgcagtctgacccgaactgtttctttattgatgacgaaaattcccgcacgttgttccttgggtattccgtcctggccagcgtcttaaagcgcaatttgcccagcaaggccgtatcgtcgatgctgataaccctctgtttgtctatctgccgtgtggtgttggcggtggtcctggtggcgtcgcattcgggcttaaactggcgtttggcgatcatgttcactgcttttttgccgaaccaacgcactccccttgtatgttgttag

SEQ ID NO: 24921 - DNA, 2460 bp, Homo sapiens
  SIMILAR (1)..(567): 1001254mologous to Escherichia coli glutamate--cysteine ligase (EC 6.3.2.2),accession number D90892,Smith-Waterman Score= 1012.
atgggcgatgagcggatgtggccgttaagtatgccatgctacatcgcagaaggtcaggacatcgaactggcacagtacggcacttctaacaccggacgctttaaaacgctgtatcgtgaagggctgaaaaatcgctacggcgcgctgatgcaaaccatttccggcgtgcactacaatttctctttgccaatggcattctggcaagcgaagtgcggtgatatctcgggcgctgatgccaaagagaaaatttctgcgggctatttccgcgttatccgcaattactatcgtttcggttgggtcattccttatctgtttggtgcatctccggcgatttgttcttctttcctgcaaggaaaaccaacgtcgctgccgtttgagaaaaccgagtgcggtatgtattacctgccgtatgcgacctctcttcgtttgagcgatctcggctataccaataaatcgcaaagcaatcttggtattaccttcaacgatctttacgagtacgtagcgggccttaaacaggcaatcaaaacgccatcggaagagtacgcgaagatcggtatcgagaaagacgaatgccaacaaacagaccacgcgccaaaaatctggtctgcacgcggtggcacaagaccgtgcgctgaaagacggcaaactgaatgtttactggaccatgtgcgcaatatgcgaaagaacaagaacgcccggattggctgggtcctgagcagcaacatactcttttgctaccaggttcatcccgtcacgcagtggcgtcactggataccgcttattgatttgaaagggcaagctgccaacaggctgtttgcaaaactcaggagtggggcattccagccgtgctggcgccgtggcgtgtgcccatcggctcgccggcgggatgatgtagtgttgttgcacgtccctccggtcactcgtgccccctttacctgtcgtctcttctccggcgggacaccgcacccgggcttggcggggttggcaattccgttagtcgccgggccgactattctcgccacgctgatgttgttgtctcatcagtacccgaatcagatggggcatctggtgattgctctgctgctggcctggggcggcacctttgtcatcctgctacagtcttcgctatttttacgtctgctgggcgagaaaggggatattttgatatcttctcatacgatactgccatccctggtcagagtgcagaacaggatgctcgtgaggattaagctttttgaatgcctgatcgagcatattctcaaccatgttcatcactggtctttccgaaaggctgtaagaaataacttcgttgttgaagagatctattactggagacaaatacagcttgcgcccattgactgcaaattcagtaacatcggtaacccacttctcgtttggccgcgtagcctgatggtgatgattcacaccactacctggtatgtgaccaatgctcatagtgttagccccgtcacatgggatatcgccaatgttctgaattctgcctctcgtgtcagcgtgccgctatttttcatgatttccggctatctcttttttggcgaacgcagcgcccagccgcgccatttcttgcgtatcggcttatgtctgattttttatagcgcaatcgcactgctctacattgcgctgtttacctccatcaatatggagttagcgctgaaaaacctgctgcaaaagccagtgttttaccacttgtggtttttcttcgcgattgcggtgatttatctggtttcaccgctgattcaggtgaagaacgtcggcggaaaaatgttgctggtgctaatggcggtgattggcattatcgctaacccaaacacagtgccgcagaaaattgacggttttgaatggctgccaattaacttatatatcaatggcgatactttttactacattctgtatggcatgttgggccgcgctatagggatgatggacacacagcataaagcactgtcgtggaaaccaccgcgccgggggacacgggaggccaacgagaacacacacaccacaatacagcagctacaccaaaaagaaacagacagcacacaagacgaaccgtcgaaccgaaacaaatcaccaaaacacaaaggcaaaaccaacaggaaaacacgccacaccaggaatacaccacgaaccaaacacgcgacacaaaacacagaggcacaccgacgaagcaaacacgccaccgacagcagcgacccgcccaacaacacccaagagcactacgcccaaacaccggaaacctacaaaccaagcggcaacacaaacaagaaagtgaccaccacacgccgagcacgacaacaacaacaaggcagcagcgcctgcttaggtgactctagaggatcccgacaactccaccgagccccacagtcgcactttgccgtaatcaagcgggaactgcttttgccacgtattcgccagtgcatcggtcaacggtaccagtggtga

SEQ ID NO: 24922 - DNA, 993 bp, Homo sapiens; identical to SEQ ID NO: 24607
  SIMILAR (310)..(804): 931254mologous to Escherichia coli No definition line found,accession number U00039,Smith-Waterman Score=795.

SEQ ID NO: 24923 - DNA, 2625 bp, Homo sapiens
  SIMILAR (1170)..(1334): 851254mologous to Escherichia coli D-serine dehydratase (EC 4.2.1.14),accession number D90866,Smith-Waterman Score=243.
attatcgggccggaggcgcattcaaccccattttaaaaagcagcagtctcgttgatacgctggcagttattctctccaatatgcatatgcacccgattcttctggcctggttagtggctcttattctgcatgcggcagtgggctccgctaccgtggcaatgatgggggcaacggcaattgttgcacccatgctgccgctgtatcccgacatcagcccggaaattattgcgattgctatcggttcaggtgcaattggctgcactatcgttacggactcgcttttctggctagtgaagcaatattgcggcgctacgctcaatgaaacatttaaatactatacgacagcgacatttatcgcttcagttgtcgctctggcgggcacattcctgctgtcatttatcatctaagcgcaaagagacgtactatggaaaacgctaaaatgaactcgctcatcgcccagtatccgttggtaaaggatctggttgctcttaaagaaaccaccgggggtttatcccggccacgcttcatggggttaagggtttaccttatgttggcctgaccgaacaggatgttcaggacgcccatggcgcgcttatcccgttttgcaccctatctggcaaaagcatttcccggaaagtggctgcccacgggggggattattgaatccagagctgggggccctttccagctatgcaaaaacggctgggaaaaagaatatcagcaaccgatcagcgggcaactgttactgaaaaaagatagccatttgcccatttccggctccataaaagcacgcggcgggatttatgaagtcctggcacacgcagaaaaactggctctggaagcggggttgctgacgcttgatgatgactacagcaaactgctttctccggagtttaaacagttctttagccaatacagcattgctgtgggctcaaccggaaatctggggttatcaatcggcattatgagcgcccgcattggctttaaggtgacagttcatatgtctgctgatgcccgggcatggaaaaaagcgaaactgcgcagccatggcgttacggtcgtggaatatgagcaagattatggtgttgccgtcgaggaaggacgtaaagcagcgcagtctgacccgaactgtttctttattgatgacgaaaattcccgcacgttgttccttgggtattccgtcgctggccagcgtcttaaaagcgcaatttgcccagcaaggccgtatcgtcgatgctgataaccctctgtttgtctatctgccgtgtggtgttggcggtggtcctggtggcgtcgcattcgggcttaaactggcgtttggcgatcgtgttcacgggttgcaggcatgatagattcccataatgccccagcgcactacgccgcaaatcgccgagatcaacagcatatcgcgtgcacgccgaggccgagtagccagctgcctgccagtaaatggcgctaaaaccgtaataggccgcatgtgccccctgcaataaacaaacgcaggccagaaagcgccagttctggcgaaccagcgccaaccacgcagaccaaccggtgctctcctgctggcgacttgccccttgtggctgaatcgtcggacggatgagaaagccgagcagcatggatgccacgcccaacgtcaacagcgcgaggatcacccgataatcaaacatagtgaccagtttgcccgtcagcgccgagccaatgacaaacgccaccgagccccacagtcgcactttgccgtaatcaagcgggaactgcttttgccacgtattctccagtgcatcggtcaacgggaccagtggtgagaaaaagagggttaaagccaatcatcaccagcatcagccacgctacgtgcgcccccgcccagaaggcgacagcaaagagaagtgtcagcagtgccagcacgcgcaaggcggaaatcaggcgggaaggatcgcatattctgcgcgacgaagaaaacacccgttttcgccatacttcgactaccacgcgaccgttatctttactgcggttttgcggcgtgtagcttttttgctgaagttgcttcagcgcggcggcgtcctgctcttcggcactcggcttattaaattgcgattgcaggaagttcaccatctgattgagacggatatccccgccaccaatcgccgccagcaactcgtcgacatcattgaagttgtaacgcggcagcagatgtttttctgcttctttcaggctgatccccagatgttccagctcgtcgtcaaggatttgccgcccagccagaatgtttttgtcacggtcctgtttacggaaccaggcgtgaattttcgaacgcccacggctggttgtgacgtaaccgaggtttgggtttaaccagtcacggctggggttcggctgtttctgggtgataatttcaatctggtcgcccatctgcagtttactacgcgacagtaactccagttggtcggcttcggcggtaaaaccgggaagcagttccctttcatcacatttgacgaaaaaatcatgtcctgcatagcgcaaatgccatgcggcatggacttctccgccaggcagttcattacgcagttcgatttcgccttcacctaactgctcgctcaaaagacgactgattgcctgccacat

SEQ ID NO: 24924 - DNA, 1497 bp, Homo sapiens
  SIMILAR (680)..(826): 971254mologous to Escherichia coli phnJ,accession number D90227,Smith-Waterman Score=251.
ggcccgaatatgcagtaagcgacgcagacgaccgagcacttcaacaatgcccatcaccgccagttcttccatttcgtaccaggcttcgcagccttcagcctgcattcgtggcccggcaacaccaacaaagcgggcgttgggcacatgttctttcagagcgcggattaaaccggcccccaggatatcgccggaggtttctccggcgaccagggcaatcgttaatggacgctgttcagtcattaacgaatcagaccgcgcgttgagcgtgcaaagaaatcggtaaaggctttcacttccggatatgtttccgccagttcagcaatttccggtttcacttcatcgagcgttttaccgctacgataaatcagcttattacgcattgcggatagccggaatcgcctcacggctgaatccgcggcgcttcagcccttctatattgacacccgaacggcggtgcgtggttaccctgcgcaatgacataaggagggacgtcttgcgccacaaccaaccccgaagtacggcgagcacgcgacaggcccggcgcaggatgaagagttcgtgctggcacatgccgacaacgtcgaagccgcaggctttgtctcacacctcaaactcccccactacgtcgatttccaggccgaactggagctactcaaacgtctgcaacaggagcagaaccatggctaatctgagcggctacaactttgcctacctcgacgagcagaccaaacgcatgatccgccgcgccatcttaaaagcggtggcgatccccggttatcaggtgccgtttggcgggcgcgagatgccgatgccgtacggactggggaaccggcggcattcagcttaccgccagcggtgattggcgaaagcgacgtgctgaaggtgattgaccagggcgcggatgacaccaccaacgccgtgtcgattcgcaacttcttcaagcgcgtgaccggggtaaacaccacggaacgtacggacgatgcgacggttatccagacgcgtcaccgcatccccgaaacgccgctgaccgaagatcagataattatcttccaggtgccaatccccgagccgctgcgctttatcgagccgcgcgaaacggaaacccgcaccatgcacgcgctggaagagtacggcgtgatgcaggtgaaactgtatgaagatatcgcccgcttcggtcatatcgccaccacctacgcctatccggtgaaggtaaatgggcgctacgtgatggacccgtcgccgatcccgaaattcgataacccaaaaatggacatgatgcccgccctgcaactgttcggcgcggggcgcgagaagcgcatctatgcggtgccgccgtttacccgcgtggaaagtctcgatttcgacgatcacccgttcaccgttcagcagtgggatgagccatgcgccatctgcggatcgacccacagctatcttgatgaagtggtgctggatgacgccggaaaccgcatgtttgtctgctccgataccgattattag

SEQ ID NO: 24925 - DNA, 405 bp, Homo sapiens
  SIMILAR (405)..(10): 881254mologous to Escherichia coli RNA polymerase sigma E,accession number D64044,Smith-Waterman Score=580.
tcagggaatccgaacgaccctagcacggacctgaggcacgatccgcaggaggcggggcttgatttctttcaacgcgccgccactgtcgaagttttcaggttcaatggcatccacatcactggaaggtggacgacgcccctgagcaaccaggtaatttttcgctgtatttacagcaatccgatacagccatgtataaaaagcgctatctccccggaacgaatccagcgcacgataggctttaataaaagcttcttgtaccacatcgggaacatcacccgacggcacatagcgggaaaccagactcgccactttatgctgatagcgcactaccagtaagttaaaggctttctgatctcccttctggacccgttcaaccaggacctggtccgttaactgctcgctcat

SEQ ID NO: 24926 - DNA, 2454 bp, Homo sapiens
  SIMILAR (1)..(768): 991254mologous to Escherichia coli yejR,accession number U00008,Smith-Waterman Score=1312.
atggggtacgtgggtttctcggtggcgtttgcttttgccattgcttctttgctgagcgggcgtctggacagcacttatgcgcgttttactcgtccgtggacgctggcagcgtggatcttcctgacgctcggcatcgtgctcggttccgcatgggcctattacgaactcggctggggtggctggtggttctgggatccggtagaaaacgcctcgtttatgccgtggctggtggggactgcgctgatgcactcactggcggtcactgaacaacgcgccagcttcaaagcgtggacattactgctggcaatcagtgccttctcgttgtgtctgttggggactttcctcgtgcgttccggcgtgctggtatcggtacacgcgtttgcgtctgatccggcgcgcggtatgtttatcctcgcctttatggtgctggtgattggcggttcgctgctgctgtttgccgcgcgtggacacaaagttcgctcacgcgtaaacaatgcgctgtggtcgcgggaatctttgctgttagcgaacaatgttttgctggtcgctgcgatgctggtggtgttgctggggacgctgctgccgttggtgcataagcaactgggactgggcagtatttcgattggcgaaccgttcttcaacaccaggtttacctggctgatggtcccgtttgcgctactgcttggtgtcggtcctctggtgcgctgggggcgggatcgcccgcgtaagatccgcaatttattgattatcgccttcatctctacgctgcaaagttgtggcgatgacggtgctcggcactggacaatggccctgctggattgcggtgctggttctgacttcaacgccaacggcgaaaaagcggtcttcttcggtgcgatgtatgacctgaaaaactggaatcttccaggcttcgccatcggcgcttcctacgtttacgcatgggatgctaaacctgcgacctggcagagcaatccggatgcgtactacgacaaaaaccggactattgaaaaccgaatcagagcgtccgaccttagtggatcccgtctgtacatgcatcgcatcgaaaaagactggtacacgctgatgaacaccatcatcaacggttcagcttctgaagcagatgccgcacgtaagcaactgcgcgaagaactgctggcgattgcgccggtcttcggtcagaagccgtacttcctgagcgatgagttcagcctggtcgattgctatcttgctccgctgctgtggcgtctgccgcaactgggcatcgagttcagcggcccgggtgcgaaagagctgaaaggctatatgacccgcctaacaccacgtcgtccctatctgctgcgtgcattctatgagtggttgctggataaccagctcacgccgcacctggtggtggatgtgacgctccctggcgtgcaggttcctatggaatatgcgcgtgacgggcaaatcgtactcaacattgcgccgcgtgctgtcggcaatctggaactggcgaatgatgaggtgcgctttaacgcgcgctttggtggcattccgcgtcaggtttctgtgccgctggctgccgtgctggctatctacgcccgtgaaaatggcgcaggcacgatgtttgagcctgaagctgcctacgatgaagataccagcatcatgaatgatgaagaggcatcggcagacaacgaaaccgttatgtcggttattgatggcgacaagccagatcacgatgatgacactcatcctgacgatgaacctccgcagccaccacgcggtggtcgaccgggattacgcggcctgacgctgcgctggtttagcgtggcagcacagcgtagtgatattcttgatgccgtgacactgtcacttaaagtggcggcgctggcgacattaattgcgctggtgttagggacgctggcagctgccgcgctgtggcgacgagactttttcggcaaaaacgccatttcgctgttactgctgctgcccattgcgctgccgggcattgtcactggtctggcgttattaaccgcctttaaaaccatcaatctggagccgggatttttcaccatcgtggtcggtcatgcgactttttgtgtagttgtggtgtttaacaatgtcatcgcccgttttcgccgcacctcctggagtctggttgaggcgtcaatggatcttggggccaatggctggcaaaccttccgctacgtagtgttgccgaatctcagttcggcgttactggcaggaggaatgctggcgtttgccttgtcgttcgatgaaatcatcgttacgacctttacggcaggtcatgaacgaacgttaccgttgtggttgctcaatcagcttgggcgaccgcgtgatgtaccggtaactaacgtggtggcactgctggttatgttggtaacaaccttgccgatcctgggggcctggtggctaaccgcgaaggcgacatatcttgaaaaacttaaagtgtag

SEQ ID NO: 24927 - DNA, 2183 bp, Homo sapiens
  SIMILAR (178)..(657): 991254mologous to Escherichia coli stringent starvation protein,accession number M69028,Smith-Waterman Score=837.
atgagcgagcagttaacggaccaggtcctggttgaacgggtccagaagggagatcagaaagcctttaacttactggtagtgcgctatcagcataaagtggcgagtctggtttcccgctatgtgccgtcgggtgatgttcccgatgtggttcaagaagcttttattaaagcctatcgtgagctaacaccacgtcgtccctatctgctgcgtgcattctatgagtggttgctggataaccagctcacgccgcacctggtggtggatgtgacgctccctggcgtgcaggttcctatggaatatgcgcgtgacgggcaaatcgtactcaacattgcgccgcgtgctgtcggcaatctggaactggcgaatgatgaggtgcgctttaacgcgcgctttggtggcattccgcgtcaggtttctgtgccgctggctgccgtgctggctatctacgcccgtgaaaatggcgcaggcacgatgtttgagcctgaagctgcctacgatgaagataccagcatcatgaatgatgaagaggcatcggcagacaacgaaaccgttatgtcggttattgatggcgacaagccagatcacgatgatgacactcatcctgacgatgaacctccgcagccaccacgcggtggtcgaccggcattacgcgttgtgaacgtgattgtggcaatcatattcaccacgaaaccgactgccatggggatcgctgtccgcttcaccaccgcaaaaggcgaaacgcctgcaattcctgacgtaacgaccaccaccgcagtaatcggcgaaaccgcgcgcgctagcgtcgtggcaaaatgcatcggcataatcattacaaccgctgtgccaatcgtcgttaagcctttcgcaaatatttcacccgcgaccaccagcgtaccacggttcttcggtttaccggcctccagttcgcacaccttgattggtgcgattatcggcatcggtttaaccaacgcgctgttaaccggctcatcggtgatggatgcgttaaacctgcgtgaagtgaccaaaattttctcctcgctgattgtttcccctatcgtcggcctggtcattgcgggaggcctgatattcctgctgcgacgctactggagcgggacgaaaaagcgtgaccgtattcaccgcattccggaagatcgcaaaaagaaaaaaggcaaacgtaaaccgccattctggacgcgtattgcgctgattgtttccgctgcgggcgtggcgttttcgcacggcgcgaacgacggacaaaaagggatcggcctggtaatgctggtactggtggggattgcccctgctggcttcgtcgtcaatatgaatgcgtccggctatgaaattacccgtacccgcgatgccgttaccaacttcgccgcaagagagtccgaagcgagtgttattcgccattcgaatcgcttcatcgaaacaataaacggcgggcgcaggtgcagccgtgggatcacgctgacgctccataaactacgcctcggcacagcctctgctccgccgtgctgaaccgcctggaacagaaaaaaccggtggggctgcgctacgatccgcaagcacaatcgctggtgtgcctgcccacgcaaacccggacgggctggaatctcaatggctttgaggtggggttcaggccatgcgtcaggctgatgatttacggacgttctcttgaggcgcaggcaaccgcgagtcttgcagcagccacaggctatgacagccatatcttcgatctttttccggcctcagccagcgctcagatcgataccgatacggcggtcattttgctgtgccatgatctcaaccgggagctgccagtgttgcaggccgcgcgagaagcaaaacccttttatctcggcgcattgggcagctatcgaacccacacgttacgtctgcaaaagctccacgagctgggatggtccagtgcaggaaacaacgcaaatccgggcacccgtcgggatattccccaaagcccgggatgcgcatactctggcactctccgtgctggcagaagtcgcctctgtacgtctccatcaggaggaggattcatgcctgcccccgtcgtcctgatccttgcggccgggcgtggagagtgctttctcgcctccgggggaaatacccttgcagacagtctggacatggacagcgcggagaaaccggagcgtacatatcgtacgtga

SEQ ID NO: 24928 - DNA, 363 bp, Homo sapiens
  SIMILAR (252)..(1): 771254mologous to Escherichia coli P43,accession number X59402,Smith-Waterman Score=308.
cgccggatacagtacccgcaccgcgctcgccatcgtcaataaaccacccagcagcgcaatcccgcccaccagcgggctggcaagcagaaaacgaaatcctgccagtaatgatttcaacggatgctcacgcggctgcggtggcggtggcaacgccggaaggcttaacaacggtagcaagcgatccgccagcacaccgccgaccatcaggccaacaaacatcgcgccgccggtcagcgtcaccgaaagccccacctgccaggtggaatgtgtcatcatctggatctgcaccggcaccgcgacgccgagcaaacccagagacacaattgagatgaaacgagcgaggaatactgcgcgaaacgccgg

SEQ ID NO: 24929 - DNA, 3195 bp, Homo sapiens
  SIMILAR (103)..(1539): 731254mologous to Escherichia coli RtoA protein,accession number D90778,Smith-Waterman Score=1737.
atgaataagaaatttaaatataagaaatcgcttttagcggctattttgagcgcaaccctgttagccggttgtgatggcggtggttccggatcttcctccgatacgccgcctgtagattctggaacagggtctttgccggaagtgaaacctgatccaacaccaaacccggagccgacgcctgagccaacgccggacccagagcctacgccagaaccgatacctgatcctgaaccaaaccagaacggagccgaactgtcctacaacacggaaaaaacgttaactattcgcgattcagtttttacttataccgagaatgctgacgggactatatctctgcaagatagcaatggtcgtaaggcaacgattaatctttggcagattgatgaagcgaataacactgttgcccttgaaggggtgagcgcagatggcgcaacgaagtggcaatataatcacaacggtgagcttgttattacgggtgataatgccacagtaaacaacaatggcaaaaccaccgttgacggtaaagattccaccggtacggaaatcaacggtaataacgggaaagtgattcaggacggcgatctggatgtcagcggcggcggtcacggtattgatatcaccggtgacagcgcgacggtggataacaagggcaccatgaccgtcaccgatccggagtccatgggtatccagatcgacggtgacaaggccatcgtcaataacgaaggcgagagcaccatcaccaacggtggcaccggcacccagattaatggtgatgacgccacggcaaacaacaacggcaaaaccaccgttgacggcaaggattccaccggtacggaaatcaacggtaataacggaaaagttattcaggacggcgatctggatgtcagcggcggcggtcacggtatagatatcaccggcgacagcgcaacggtggataacaagggcaccatgagcgtcaccgatccggagtcatcgattgacggcgaccaggccatcgtcaataacgaaggcgagagcactatcaccaatggcggcaccggcactcagatcaacggtaacgacgccaccgcgaataacagtggaaaaaccactgttgatggaaaagattccacgggtaccaaaatcgcgggcaatatcggcattgtaaatctggatggtagcctgactgttacaggcggtgcgcatggtgttgagaacattggtgacaacggcacggttaacaacaaaggagatattgttgtttccgatactggatcgattggcgtgctcatcaacggtgagggggcaacagtatccaatacgggtgatgttaacgttagcaatgaagcgacagggttcagcatcacaaccaacagtgggaaggtttcgctggcaggcagtatgcaggttggcgatttctcgaccggggtagatcttaatggcaacaataacagcgtgacgctggcggcaaaagatctaaaagtggtcgggcagaaagcgacgggcataaacgtttctggcgatgcgaatacagtgaatatcactggtaacgttctggttgataaggataaaaccgcagacactgcggcggaatatttcttcgatccatccgtgggtatcaacgtttacggcagtgataataacgtgacgctggatggaaacagtgtcgctatgggggtatgccttacagttccacataaagtagccaatcccggaagccaccacgccaagaaacaccagaatgccccattgcagcgtggtttgcggcattttctgcgcatttcccagcaagaaccatgcaatcactgccaccagaaacgcgccaagatagaaccacgcaaaggcgttatgctgtggcatcgggcgagtttccatcaggcgtttgtaacccaccatgccaatggcaaaagtgatattggagagttgcaccagcagcaagccagtccagaaatggtcggtgacctgatcatagcgaataatcccggcaccaatcaccgccagcaaggcgctaaaggcatagccccagcgcagacggcgcttactcatgatgtcataaatcagcgtgatgtagagcggcgtcagcacggtgaacagcagcagctcggaaaccgtcaggtagagataagcgcggaaactcagcatatacatcacgccaagctgcatcgcgcccaccagcatatacaggccgaccgttttcaggctattgccacgggtacgcagaaacggcagaaaaacgagtgccgccaggccaacgcgcaccagcaccgcaaaatagctatcgacgtgccccgcaagaggaaacgaggacacggaacgcagacacgaacacaacacgcaacaagagaaaacacaacgagacagcaggaagaagagacgagaagaggcacagcacaaaaaacagcagaacacaaacagcagcaagaagacacgacaaaccttactggaccactggcgttaactggcggcaatattgcactgctggcttgtgcaggtccgatgggcattggcgctatcgattacgccattaacggcggcatacaaccgtcgcgggtggtggtggtcgatatcgacgacaaacgtctggcgcaggtacagaagctgctgccggtggaactggcggccagtaaaggcattgagctggtgtatgtgaataccaaagggatgagcgatcctgtccagatgctgcgggcgctgacaggagatgccgggttcgatgacatttttgtttatgcggcggtgcctgctgtcgttgagatggctgatgaattactggcggaagatggctgtctgaacttctttgccgggccgacggataaaaacttcaaagtgccgtttaatttctacaacgtccattacaacagcacgcacgtcgtcggtacatctggcggttcaacggacgacatgaaagaggcgattgcccttagcgccactgggcagttacagccgtcgtttatggtgacccatatcggtggcctggatgcggtgccagaaaccgtgctcaatctgccggatatccctggcggtaaaaaactcatttataacggcgtgaccatgccgctcactgccattgccgatttcgccgaaaaaggcaaaagcgatccgctgtttaaagagttggcgcggctggttgaggaaacgcacggcatctggaatgaacaggccgagaaatatctgctggcacactttggcgtcgatatcgcggaaggccgcgcatga

SEQ ID NO: 24930 - DNA, 1383 bp, Homo sapiens
  SIMILAR (555)..(4): 1001254mologous to Escherichia coli orf303,accession number X76979,Smith-Waterman Score=929.
ttaacgttgtgcttcgccacctaatccttcaatcaggttttgaattaacgctgccagttcaccagtcatcaggatgaaatcggcatcaaaacgctgggcgaaatcttcacggtcgatatcttcgttttgatcgcgcagctcgtcgcagaacttcagacgcttgagcgaaccatcgtcgcacatcacaaactgaatgcgctgctgccagtcgagcgccagtttagtcaccacttttccggcttcaatgtgattggtgatctcttcgctggtcagatcttgtttcttcgcgcggatcacgccgccatcttccagcaacgatttcagctcggcttcatcaagcagctggaagccctgtgccgcactaccggagcgaacccattcggtcagcgtcagttcaatcgggttttccatgctcaatggtacaaccggtaacgaccccaggcttttacgcagtaatgccagcgtatcttccgcttttttggcactggcgcagtccaccataatcaaaccgttaaccgtgtcgatccacatcattgtctggctaaaacggctaaaatagtagaacaatctcaaattactgcgttttgataaatcgactaatgtcagacgttcagcaaacaggcgcaaacattgccaaccgcgctccattgcttcattggagagggcattttcgctattcaggccagcagccagacgcactttgcgttttattcgcgtcagcgtctggatgcttccagccaccggaattgagtgaccaatataggtctcaatagcaggcaaattcaatgcatactcttcacacgccaggctgatagagtgaccgcttgcgcctgcgcgacctgtacgaccaatacggtgaacgtaatcttcacagtccatccggtacatcgagttacaaactgcgttctggcggatattgcacccggccggaacgtcgtgtgaaccggatatccaattcccgggtaatccccgaataccgcagtttttgggcaaatcgcgtgaaaacgacgggtccagccaattccaccggcaacgcgccgcgtaaagtgtccgcaacaccaaatatacgagttgtagacggggctcaaaaaccaatgtgtcacctcgaggtctgcggcaatgaggatcacattcgggcccatagagcttcagaggattgcgagtaaggcttatgactgtgtgccagctagcactgccagtccagccatctttgggcgtcatccgtcgtccgcaggcgccgtcatcaggcattcgtcgaagtcccgagtcctttttgcatatgcagcagttgtgttcctcgcgatcgtggtcccatcctaagcctcccttgatcggcccaccaagcattgctttttggtgctgctgagataacacaatccgcat

SEQ ID NO: 24931 - DNA, 1073 bp, Homo sapiens
  SIMILAR (457)..(2): 991254mologous to Escherichia coli Citrate lyase alpha chain (acyl lyase subunit) (citF) homolog,accession number D90702,Smith- Waterman Score=773.
cagagttgacaatcacatccgcagcgctacgggcaataagcagttcgcgcgggttagtggtcatacgggtcgcgccagcgccgatttttgcagcatcgccaacgcggtcaactttgacgatcaaatcaacctgatcttgctcaatgcttgccggattatgcggataaggcagcagttcttcggtaagcatcacgacctgttttgcgttgtcggcatcaactattgcatagccgagggagccgcagcaggctttaccggtgtagccgttggcattaccgaattcatcacaggacgggacgccgatgaaagccacgtcaatattcagttcgccgctctgtaccagatgcacacgaccgccgtgagagtggatctgcaccggttctgccagcagaccacgggagatctcttccgccagtggaccacgcaggccggaggtataaatgcgggtaaccacgcccggctgcggcggtaatttgatttgctctttcgccgccgccagttgcttatcaaactgcgcaatccgctctgccgcttgtttctcatgcccggtaatttcgccaagttgcgttaacagcgactgccagcttttgtcgtcgtaattgatgattaatgtcggggcgatggtggaaagctgatcatacagtgccagcgccgaatccccgccggttgcgctaattaaaatcagatccggcatttgcgcggcaacggcttcggcgctcggttcgccgatataaaaccgttgcagtttgcgttctttcgccaccttgctccactggcgtaaaaagccctggtcatccgcgacgcggttattcggcgtggtcgcgccgctggcgatcaccggagcatcaatcgccaacattgagccggtcagggtgacgctgtctggtacgatcaattcacttggctcatgttccgtcaatgccggagagacaattgaagttgatttaggtgatgtcttcgctgccaatttccgtgttgtagggcataaacctcttggggccagaacggcagaacttgcaattccagtcaggtgtaacacgggaaacgcgggattagttaatgtcaacctgagt

SEQ ID NO: 24932 - DNA, 864 bp, Homo sapiens
  SIMILAR (587)..(252): 461254mologous to Escherichia coli ferrienterobactin transport protein,accession number M29730,Smith-Waterman Score=178.
  misc_feature (1)...(864): n = a,t,c or g
ccagcatgggcacatgggatgacatataaaactgtgaccgggggatgcctgctaggatgcgacataccgtcaggcagctgtctgcttctttggttgctgtcctttttctttgtcagtctcaaagggcggagaccataatattggtggtcgcgagaagttctcccacagcgccttcccagaaggtgctctcgccccggcgggaccatacagcggagccccgacggctccacacgcctggagtgccagcgccgatccccgccggttgcgctaattaaaatcagatccggcatttgcgcggcaaggcttcggcgctcggttcgccgatatagagccgttgcagtttgcgttcttcgccaccttgctccactggcgtaaaaagccntggtcatccgcgacgcgttattcggcgtggtcgcgccgctggcgatcaccggagcatcaatcgccacagtgagccggtcagggtgacgctggtggaaacaatacgctgcggctggtttccagtgtatgtgtgccacggctgtcagtaatctgacgcggccagtcgcggcctgaactgcggctattcctgaaagcaaaagtcccgttttgccgaattctcccgcgtcaaccgtccgtcgttcataaccagtgtcgacgatgcctcctattcgtccaggcgatggcgaccacgacccacggtttaaagcgccctctggaacgccccaccaacccccccgtgctggacatagtttgtcgaaggcacggttaaacggaaaattgcacagccgcctaaggccagttgcgcacaccaggcgataacggcacggtgatgagtgcggataccataacttttccttaatgtagtggcggaatcctgtatgc

SEQ ID NO: 24933 - DNA, 2922 bp, Homo sapiens
  SIMILAR (337)..(879): 871254mologous to Escherichia coli arsF,accession number U00039,Smith-Waterman Score=769.
atgtcatttctgttacccatccaattgttcaaaattcttgctgatgaaacccgtctgggcatcgttttactgctcagcgaactgggagagttatgcgtctgcgatctctgcactgctctcgaccagtcgcagcccaagatctcccgccacctggcattgctgcgtgaaagcgggctattgctggaccgcaagcaaggtaagtgggttcattaccgcttatcaccgcatattccagcatgggcggcgaaaattattgatgaggcctggcgatgtgaacaggaaaaggttcaggcgattgtccgcaacctggctcgacaaaactgttccggggacaatgtgttttatccgggaggcattatgttactggcaggcgctatctttgtcctgaccatcgtattggttatctggcagccgaaaggtttaggcatcggctggagtgcaacgctcggcgcagtactggcgttagttacgggcgtggtccatccgggtgatattccggtggtgtggaatatcgtctggaacgcgacggctgcgtttatcgccgtcattatcatcagcctgctgctggatgagtccggcttttttgaatgggcggcgctgcacgtctcacgctggggtaatggtcgtggtcgcttgctgtttacctggattgtcctgctcggtgctgccgttgccgccctgtttggcaatgatggcgcggcgcttattttgacaacgattgtcatcgccatgctgctggctttaggggtcagtaaaggcactacgctggcgttcgtgatggcggccgggttcattgccggccactccttccccggccagtacaccgcccttcagtttgaaatcgttgaagccatatttttcatatgccgcttccgccaggcgcaccaccgcatccggcgcgataccagtcgcatgagtcatccggctggctttgatacggcagcggcgtggctttgcgattaccgacgaagaacagataaccgagcatttcgacatcctacgctgttgaccatcgcccagcagcgatgccacgtttacccccagatgctgccccagcagatccagcattgccgcttctatcccggtaactacatgaatagtggtaccatcacgatcggcaaaagtattacgcaccagcgtcagaacgtttttgtattcacccagcgttttacctaccaccagcggaatcgcatcttccagcgttttacggattttctcgccgccgggaatttcccctacgccagtgtgaccagaattatctttgataatcacaatattacgcgtaaagaacgaatcaatgacggccgaaaacgggacgtttacggtcaaaggtccagccggggatcaggtactgcatcggacctgcgtcgttacgcgcaccgccaggcagacgtttataggcctcatgtgccttttgtacctgttcccagtccagttccagcccagaccgggcgcatcaggaacggcaatttttccgtttttaatctccagcggattttgggtcagcgacaatcgccctcctgccaaatccagtgggtatcgatagcggtaggattacccggtgccgccgcgcccacatgggtaaacatcgccagagagatatcgaaatggttattagaatggcagccccaggtcagcccccagtcgtcgcaaagtgcgccacacggactgcaccggaaagcgtccagaagtgcggatcggactctagagatccccgagtaccgagctagaattcaggggggttttagccaccatttcggggactttcgggacctcggtcaacatcacaaaaggggcgaggggacggattgtgcgctttgtcgaatttgtcattacgcccttaaccttattaataacaggaagctgatttcgcgcgaccacgccgaatacaccgtcgcggatgaccagggctttttacgccagtggagcaaggtggcgaaagaacgcaaactgcaacggctctatatcggcgaaccgagcgccgaagccgttgccgcgcaaatgccggatctgattttaattagcgcaaccggcggggattcggcgctggcactgtatgatcagctttccaccatcgccccgacattaatcatcaattacgacgacaaaagctggcagtcgctgttaacgcaacttggcgtaattaccgggcatgagaaacaagcgtcagagcggattgcgcagtttgataagcaactgtcgtcggcgaaagagcatatcaaattaccgccgcagccggtcactgccattgtctatactgccgctgcacacagtgccaatctctggacgccagaatcagcacaagggcagatgctggaacaactcggctttacgctgcgcgaagttacccgcagggttaaatgccagccacaagtcaggtcacgactgtacgccagtggatcaatctctcctggcgttatcagcgcgggtaaacccaacacgatgacaatattaaaaatgtttgcgccaatgatatttccgacagcaatgtcgttttcacctttgcgaaccccccgctattgcggttgccagttccggcaggctggttccgatagcaattgccgtcagacccatcgtcaactcgctgatggcaaagtaattcgccagcaccgtggcgttatcaaccacaatccgcaacaaaaatggcatgatgatatgcgacatgccgagacatatccacgacacgcgaaatcgacgatacccggcacaggcatggtcagttcgccccacggcaccaacggctcaatttcgcccatgaccgtgatccccagtaacgccgccagctgtgcgttattgcccagctcaggatgtgcgtcaagcggcaaatgccagccatacaggttgatatcattcgccagcaacgtttttaaacggttacgcttcattccgcgaatgaccggagactctcctttccagaagtag

SEQ ID NO: 24934 - DNA, 3852 bp, Homo sapiens; identical to SEQ ID NO: 14975
  SIMILAR (2293)..(3057): 951254mologous to Escherichia coli glycine-tRNA synthetase, beta subunit,accession number U00039,Smith-Waterman Score=1230.

SEQ ID NO: 24935 - DNA, 2283 bp, Homo sapiens
  SIMILAR (508)..(1581): 791254mologous to Escherichia coli K12 putative endoglucanase,accession number AE000380,Smith-Waterman Score=1425.
atggaggtaaagaacaaactggcgcataaagagatcgaccaaatcctgaaacgcgcgcaggtacgccgctggcgagttggcgtacataacgatcgccagttgctgcaattttgctacacctcagaagtggccgacagtgcgctgaaaatcctcgacgaagcgggattacctggcgaactgcgcctgcgtcaggggctggcgctggtggcgatggtcggtgcaggcgtcacccgtaacccgctgcattgccaccgcttctggcagcaactgaaaggccagccggtcgaatttacctggcagtccgatgacggcatcagcctggtggcagtactgcgcaccggcccgaccgaaagcctgattcaggggctgcatcagtccgtcttccgcgcagaaaaacgcatcggcctggtattgttcggtaagggcaatatcggttcccgttggctggaactgttcgcccgtgagcagagcacgctttcggcacgtaccggctttgagtttgtgctggcaggtgtggtggacagccgccgcagcctgttgagctatgacgggctggacgccagccgcgcgttagccttcttcaacgatgaagcggttgagcaggatgaagagtcgttgttcctgtggatgcgcgcccatccgtatgatgatttagtggtgctggacgttacagccagccagcagcttgctgatcagtatcttgatttcgccagcacggtttcccactatcaacccactgaaatcattctctctgaaggtcgactggtcgatagccaggggtatggtgttgctggcgtcaactactacaccaattcaggccgtggcgtgacaggggaaaatggtgaattttcctttagctggggcgaaaccatctcctttggtatcgatacctttgaactgggttcagtgcgcggcaataagtcgaccattgcgctgactgaactgggtgatgaagttcgcggggcgaatattgatcagcttattcatcgctattcgacgaccgggcaaaataatacccgtgttgttccggacgatgtacgcaaggtctttgccgaatatcccaacgtgatcaacgagattatcaatctctcgttatccaacggtgcgacgctgggggaaggtgagcaagtcgttaatctgcctaacgaatttattgagcagtttaatacgggtcaggccaaagagatcgataccgcgatttgtgcgaaaaccgatggttgtaacgaggctcgctggttctcgctgacgacgcgcaatgttaatgacggccagattcagggcgttatcaacaagctgtggggcgtggatacgaactacaaatctgtcagcaagttccatgtattccatgactccaccaacttctatggcagcacgggtaatgcgcgcggtcaggcggtggtgaatatctccaacgcggccttcccgattctgatggcgcgtaatgataaaaactactggctggccttcggcgtaaaacgcgcctgggataaaaacgagctggcgtacattacggaagcgccttctcttgttgagccggaaaaccagaatgcctgctttacaaaccctcgctacggcgcgggtgcggcgacgaacccagatcctgaagtcttcagctgggcggcaacgcaagttgttacagcgatggaagcaacccataaattgggcggtgaaaactatgtcctgtggggcggtcgtgaaggttacgaaacgctgttaaataccgacttgcgtcaggagcgtgaacaactgggccgctttatgcagatggtggttgagcataaacataaaatcggtttccagggcacgttgcttatcgaaccgaaaccgcaagaaccgaccaaacatcaatatgattacgatgccgcgacggtctatggcttcctgaaacagtttggtctggaaaaagagattaaactgaacattgaagctaaccacgcgacgctggcaggtcactctttccatcatgaaatagccaccgccattgcgcttggcctgttcggttctgtcgacgccaaccgtggcgatgcgcaactgggctgggacaccgaccagttcccgaacagtgtggaagagaatgcgctggtgatgtatgaaattctcaaagcaggcggtttcaccaccggtggtctgaacttcgatgccaaagtacgtcgtcaaagtactgataaatatgatctgttttacggtcatatcggcgcgatggatacgatggcactggcgctgaatattgcagcgcgcatgattgaagattggcagctggataaacgcatcgtgcagcggtaa

SEQ ID NO: 24936 - DNA, 1045 bp, Homo sapiens
  SIMILAR (156)..(203): 621254mologous to Escherichia coli ferrienterobactin transport protein,accession number M29730,Smith-Waterman Score=49.
atgactgagcccacgctcctcaattgcgtggcaataacagaacgttactgcttccctaacaccagagaccacacggggggcgaggggacggattgtgcgctttgtcgaatttgtcattacgcccttaaccttattaataacaggaagctgatttcggcgcgaccacgccgaataaccgcgtctgcggatgaccagggcttgttacgccagtggagcaaggtggcgaaagaacgcaaactgcaacggctctatatcggcgaaccgagcgccgaagccgttgccgcgcaaatgccggatctgattttaattagcgcaaccggcggggattcggcgctggcacttgccaatctctggacgccagaatcagcacaagggcagatgctggaacaactcggctttacgctggcgaagttacccgcagggttaaatgccagccaaagtcagggtaaacgccatgacatcattcagcttggtggggaaaatctggctgcagggttaaatggcgagtcactattcctgttcgccggtgatcagaaagatgctgatgctatttatgctaatccgctgctcgcgcacctgcctgcagtacaaaacaagcaggtttatgcgctgggaaccgagacgttccgtctggattactacagcgccatgcaagtgctggataggcttaaggcgctgttttaagcattaactgtcggacgctgtcacctgcggcggcgtctggcgaaaatgtcgcaactccaccagcaccagcaataacaacacgccgataatcaacaaaccaaaaccgctcgcgcttgcggaagcaaccggtgtcatcatcgcgcccaaaccacccagcagcgccgcgcctatggcatcgcccgtcacgttctgcgccgtccacaaaccgttaatccgccctaacatcgcttccggggtttgcgtttgcagcattgtgtattgcagcaacgagctgaccgcactcaaccagccgaacagcgccagacaaaccacgcctaaaatccacatcggcatcaggccaaacagaccaatggcgaggaac

SEQ ID NO: 24937 - DNA, 2319 bp, Homo sapiens
  SIMILAR (1365)..(205): 961254mologous to Escherichia coli P43,accession number X59402,Smith-Waterman Score=1905.
ctggcgcacgtattccggaaacttcagacggctatcggagtggatgaatccacagccagcacctttggggcataccgccgcgacatattccccgcgtccgctttgtcccggacggccatctggccgaaccccacgggaatcgagaacacgcgtcaccgcagatccccgcgggtaacgccaccaggcgggaaacgcatgcacacacacctgcggcggcgtctggcgaaaatgtcgcaactccaccagcaccagcaataacaacacgccgataatcaacaaaccaaaaccgctcgcgcttgcggaagcaaccggtgtcatcatcgcgcccaaaccacccagcagcgccgcgcctatggcatcgcccgtcacgttctgcgccgtccacaaaccgttaatccgccctaacatcgcttccggggtttgcgtttgcagcattgtgtattgcagcaacgagctgaccgcactcaaccagccgaacagcgccagacaaaccacgcctaaaatccacatcggcatcaggccaaacagaccaatggcgaggaacgatcccagcgtggagagcagcatcaataaccctggtcgcgcactatgtgccagcttcccgctggttaacgcaccaatagccgcgccgagcgggatcgccgcgtagagaaaaccaatctgtgccgctgacatctgccagttgtcagccagcgccggatacagtacccgcaccgcgctcgccatcgtcagcgggctggcaagcagaaaacgaaatcctgccagtaatgatttcaacggatgctcacgcggctgcggtggcggtggcaacgccggaaggcttaacaacggtagcaaggtaataaacgtgcccgccgccgccagcccgtagttccaggctacgccaccggtcgccagcaataaaccgccaatcatgggcgaaatcaccgaccccagacgcacggtcaacatggtgatcgccccggcctgcattaagttttcacgccctaccagtgctggtgtcgccgccaatagcgccgtaacgccaagcgatgcgaaaaaaccatcccataaaccaagtaaatagattgccagcaatgacggctccggcagcagtgcattaaggcacagtccaatgaagccaatgccacaggtgccgcgcgccagcaaaatcacttttttgcgctcatagcgatccgccagcacaccgccgaccatcaggccaacaaacatcgcgccgccggtcagcgtcaccgaaagccccacctgccaggtggaatgtgtcatcatctggatctgcaccggcaccgcgacgccgagcaaacccagagacacaattgagatgaaacgagcgaggaatactgcgcgaaacgccgggtgcgtttcagcaggcagttcaggatcgagcgccgaggtaggttcatcaaacagtaaaacttccggttccatcgccagcgcccgcgcgatagaaacacgctgttgctgaccgccggaaagatgcaccggatatttcccctgcgcacgttcgtctatcccgacttttgccagatacttcaccgcccgctcgcgcgcttcctgcttgctcaggcccaacacctgaatcggcgcttccatgacgttttccagcaccgtcatatggctccagagattgaagtgctggaataccatcgtcaggcgtgtgcgcagtaagcgcagttgatttttatcggcgactttgagttgaccgtctttgtcgcgcaccagattgatcgtctggccattgaccacgatcgacccttcactcggtttttcgaggaagttaatgcagcgcagaaaggtacttttccccgatcccgacgatccgatgatgcttattacatctccggcattcgcttgcagtgatacccctttcagcacttcatgttcgccgtagcgtttgtgcaaatcgataacgtttaatttattctcggacatcgtattcgcggcaatgccgaaggcggtaaaaggttgatacgtggcggcgttaatatcgcgggctattttcagcagatccggcaccgtggcagtaaatgccaacgcagtagagtgcagcatcaggatcacttcgttgctgtatgccggtaacgcaatacgcagcgcagaaggcaaaataatgcagcgatacattttaaaagtcgcgaagccataggctctggcggcttcaatttccccatgcggaaccgaacgagttgccccagcaaaaatatcgtagtgtaagcgcagtgtaagcgtcagcgcagcgggatggtgaccggcattcttccgctgttgattagcctgctggttatcatgaacgcactgattaattttatcggtcagcat

SEQ ID NO: 24938 - DNA, 3094 bp, Homo sapiens
  SIMILAR (828)..(1127): 1001254mologous to Escherichia coli K12 putative endoglucanase,accession number AE000380,Smith-Waterman Score=557.
gtcaggtacgaggatcccctgcggcacgcaggacatggcgaagatgggctgggttcctccgatgggatcgcacagcgatgcgttaacgcacgttgccaatggtcaaattgttatctgcgcgcgcaaagaagaaaaaatcctcccgtctccggtgattaaacaggcgctggatagcgaatatcgccaaactggaagcggaacaggcgcgtaagctgaagaaaaccgaaaaagattcgctgaaagacgaagtgctgcactctctgctgccgcgtgctttcagccgttttagccagacaatgatgtggatcgacacggttaacggtttgattatggtggactgcgccagtgccaaaaaagcggaagatacgctggcagtactgcgtaaaagcctggggtcgttaccggttgtaccattgagcatggaaaacccgattgaactgacgctgaccgaatgggttcgctccggtagtgcggcacagggcttccagctgcttgatgaagccgagctgaaatcgttgctggaagatggcggcgtgatccgcgcgaagaaacaagatctgaccagcgaagagatcaccaatcacattgaagccggaaaagtggtgactaaactggcgctcgactggcagcagcgcattcagtttgtgatgtgcgacgatggttcgctcaagcgtctgaagttctgcgacgagctgcgcgatcaaaacgaagatatcgaccgtgaagatttcgcccagcgttttgatgccgatttcatcctgatgactggtgaactggcagcgttaattcaaaacctgattgaaggattaggtggcgaagcacaacattctggaacagggtctttgccggaagtgaaacctgatccaacaccaaacccggagccgacgcctgagccaacgccggacccagagcctacgccagaaccgatacctgatcctgaaccaacaccagaaccggagccagaacctgttcctacgaaaacgggttatctgaccctgggcggaagccagcgggtaactggtgctacctgtaatggtgaatccagcgatggctttacatttaaacctggcgaggacgttacttgcgtggcgggtaacacgacaattgccaccttcaacactcagtcaagaacgtgcgcgtagcttgcgtgcggttgaaaaagtgtcgtttagcccttgaggacgcgcaagaactggcgggctccgatgacaagaaaagcaatgcggtttcgctggtaacgtccagtaacagctgtccggcgaatacagaacaggtttgtctgacgttctcctcggtgatcgagagtaaacgcttcgactcgctgtataagcaaatcgatctggcaccggaagagttcaaaaagctggtcaatgaagaggtggaaaacaatgctgcgaccgataaagcgccatccactcatacttcaccggtcgtgcccgtcaccacgccgggaacaaaaccggatctgaacgcttccttcgtgtcggctaacgcggaacagttttatcagtatcaacccactgaaatcattctctctgaaggtcgactggtcgatagccagggatatggtgttgctggcgtcaactactacaccaattcaggccgtggcgtgacaggggaaaatggtgaattttcctttagctggggcgaaaccatctcctttggtatcgatacctttgaactgggttcagtgcgcggcaataagtcgaccattgcgctgactgaactgggtgatgaagttcgcggggcgaatattgatcagcttattcatcgctattcgacgaccgggcaaaataatacccgtgttgttccggacgatgtacgcaagggtgagggctggggacttttgctttcaggaatagccgcagttcaggccgctgactggccgcgtcagattactgacagccgtggcacacatacactggaaagccagccgcagcgtattgtttccaccagcgtcaccctgaccggctcactgctggcgattgatgctccggtgatcgccagcggcgcgaccacgccgaataaccgcgtcgcggatgaccagggctttttacgccagtggagcaaggtggcgaaagaacgcaaactgcaacggctctatatcggcgaaccgagcgccgaagccgttgccgcgcaaatgccggatctgattttaattagcgcaaccggcggggattcggcgctggcactgtatgatcagctttccaccatcgccccgacattaatcatcaattacgacgacaaaagctggcagtcgctgttaacgcaacttggcgaaattaccgggcatgagaaacaagcggcagagcggattgcgcagtttgataagcaactggcggcggcgaaagagcaaatcaaattaccgccgcagccggtcactgccattgtctatactgccgctgcacacagtgccaatctctggacgccagaatcagcacaagggcagatgctggaacaactcggctttacgctggcgaagttacccgcagggttaaatgccagccaaagtcagggtaaacgccatgacatcattcagcttggtggggaaaatctggctgcagggttaaatggcgagtcactattcctgttcgccggtgatcagaaagatgccgatgctatttatgctaatccgctgctcgcgcacctgcctgcagtacaaaacaagcaggtttatgcgctgggaaccgagaccattgtgtattgcagcaacgagctgaccgcactcaaccagccgaacagcgccagacaaaccacgcctaaaatccacatcggcatcaggccaaacagaccaatggcgaggaacgatcccagcgtggagagcagcatcaataaccctggtcgcgcactatgtgccagcttcccgctgagaaaaccaatctgtgccgctgacatctgccagttgtcagccagcgccggatacagtacccgcaccgcgctcgccatcgtcaataaaccacccagcagcgcaatcccgcccaccagcgggctggcaagcagcaaacgaaatcctgccagtaatgatttcaacggatgtcacgcggctgcggtggcggtggcaacgccggaaggcttaacaacggtagcaaggtaa

SEQ ID NO: 24939 - DNA, 2118 bp, Homo sapiens
  SIMILAR (1)..(660): 971254mologous to synthetic construct aceB,accession number A31765,Smith-Waterman Score=1140.
gcactgttggcaaagggcagtggtccctatttctatctgccgaaaacccagtcctggcaggaagcggcctggtggagcgaagtcttcagctatgcagaagatcgctttaatctgccgcgcggcaccatcaaggcgacgttgctgattgaaacgctgcccgccgtgttccagatggatgaaatccttcacgcgctgcgtgaccatattgttggtctgaactgcggtcgttgggattacatcttcagctatatcaaaacgttgaaaaactatcccgatcgcgtcctgccagacagacaggcagtgacgatggataaaccattcctgaatgcttactcacgcctgttgattaaaacctgccataaacgcggtgcttttgcgatgggcggcatggcggcgtttattccgagcaaagatgaagagcacaataaccaggtgctcaacaaagtaaaagcggataaatcgctggaagccaataacggtcacgatggcacatggatcgctcacccaggccttgcggacacggcaatggcggtattcaacgacattctcggctcccggaaaaatcagcttgaagtgatgcgcgaacaacacgcgccgattactgccgatcagctgctggcaccttgtgatggtgaacgcaccgaaagaaaattcaatgcattaatggaaagtgaaaaaggacagagccagaacttgtggaaatttgccgtttactcaggacttcgtcacggggaactggcagctctggcgtgggaggatgtggatctcgaaaagggaatagtgaatgtcagaagaaacctgacgatacttgatatgttcggtcccccaaaaacaaatgccgggatccgaacagtaacactactgcagcctgctcttgaagcactgaaggagcaatacaaactgaccgggcatcatcgcaaaagcgaaatcaccttttatcatcgggagtacggcagaaccgaaaagcaaaaactgcattttgttttcatgcccagggtgtgtaacggaaaacaaaaaccttattactcggtaagcagtttgggggcaaggtggaatgcagcagtaaaacgtgctggtattcgccgccgtaatccgtaccatacgcggcatacttttgcctgctggctgttgacggcaggagcgaacccggcatttatagccagccaaatggggcatgagactgcgcagatggtgtatgaaatctacgggatgtggattgatgacatgagcgacgaacagatagccatgttgaatgcgcgggttatggtttatgacgtggcttccggcaacgcgttatttatttctgaactcggtccgttaccggaaaatgttacctggttatcgccggaaggggagtttcagaagtggaacggcacagcctgggtgaaggatacggaagcagaaaaactgttccggatccgggaggcggaagaaacaaaaaacaacctgatgcaggtagccagtgagcatattgcgccgcttcaggatgctgcagatctggaaattgcaacggaggaagaaatctcgttgctggaagcatggaaaaagtatcggagcatcccactgtgctctaaggtggttacaatgatgtttgatgaccgccctggatgcccagtgggatttccaatgtggggaagaggtggttttgacagaatgcctcctggttggggtgggcgtcccatgcctccatctagaagagatatgagccctcatcgaggaccacctcctcctcttactggacgaggtggccggggtggtagcagagctcggaatcttcctcttcctccaccaccaccacctataggggaagacctaatggcctatgacagaagagggagacctggagactgttactatggcatggttggtttcagtcctgatgaaacttggaactctgcaatagatacatggagcccatcggaatggcagatggcttatgaaccacagggtggctccggatatgattattcctatgcagggattgggggctcatatggagatcttggtggacctattactactgcccaagtcactattcccaaagatttgactggatctattattggcaaacgtggtcagcggattaaacaaatgctcatgagttggcagctttcataa

SEQ ID NO: 24940 - DNA, 3189 bp, Homo sapiens; identical to SEQ ID NO: 18292
  SIMILAR (2197)..(2829): 971254mologous to Escherichia coli K12 putative glycoprotein,accession number AE000239,Smith-Waterman Score=1075.

SEQ ID NO: 24941 - DNA, 1452 bp, Homo sapiens; identical to SEQ ID NO: 15782
  SIMILAR (811)..(1449): 951254mologous to Escherichia coli orotate phosphoribosyltransferase,accession number X00781,Smith-Waterman Score=1024.

SEQ ID NO: 24942 - DNA, 677 bp, Homo sapiens; identical to SEQ ID NO: 9279
  SIMILAR (41)..(547): 971254mologous to Escherichia coli narJ protein,accession number M20147,Smith-Waterman Score=828.

SEQ ID NO: 24943 - DNA, 1173 bp, Homo sapiens
  SIMILAR (571)..(999): 931254mologous to Escherichia coli RNase PH,accession number L10328,Smith-Waterman Score=676.
atgagccttaaagtttcagaatgttctcctttggactccatgccttacatccgggtcacgctgatgcaagagcctatgaagaaggtgcctgcttctccgttgccttctgccatgattggcctgaatggtatgctattggtcagccatcctgcaagtgtaggcaaacaacagactggtggccgtgtctacagctgtcagcacatgcgtatgcccccgcgaccttggcagcggcctgatgtggtctgtttaccacctaatcaagggcatccaccctactgtcatttgttgtgtaacactgggcagctagctgtctccacctgggggtatgccggtgcacacactgggcacttccggcaggcctcccagatatcttgcttggacatggacagatcccaatgcttcttgacctgttgcattagtttacgccttgcacgacccaattttcggtgcagtcatggggctacatatcattccttttgcctcttaaaactaagctgtcattattacttggacatttttactggcttattcattccagttgggatatccttccaaccttgcctgggaaatccagttactaatgcaactacagataacgaaggctcggtgctggtcgaatttggcgataccaaagtgttgtgtaccgcctctattgaagaaggcgtgccgcgcttcctgaaaggtcagggccagggctggatcaccgcagagtacggcatgctgccacgttctacccacacccgtaacgctcgtgaagcggcgaaaggtaagcagggtggacgcacaatggaaatccagcgtctgatcgcccgtgctcttcgcgcggcagtagatttgaaagcgctgggtgagttcaccattacactggactgcaacgtgcttcaggctgatggtggcacgcgtaccgctacgattacgggtgcctgcatggcgctggtagatgcgctacagaagctggtggaaaacggcaagctgaaaaccaatccgatgaaagggatggactatgataccccccacttcgaaatgggcagccatgacacaacaagacgagacacaccgaacgaactacaagccgatgcctatacgagcaataggcgcgagaagaagacaccttacgactcagtcatcatacatcgatggaccaacgccctcctctcgtcctatctatcataa

SEQ ID NO: 24944 - DNA, 3066 bp, Homo sapiens
  SIMILAR (1)..(1242): 951254mologous to Escherichia coli K12 putative thiosulfate sulfur transferase,accession number AE000270,Smith-Waterman Score= 2155.
  misc_feature (1)...(3066): n = a,t,c or g
atgaccgcgctggcaatggctttagggctggcttgcgcttcttcgtgggccgctgaactggcgaagcctcttacacttgaccagcttcaacaacaaaatggcaaagcgatagatactcgccccagcgcgttttataacggctggccacaaaccttaaatggcccttctggtcatgaacttgccgccttaaacctctctgccagctggcttgacaaaatgagcaccgaacagctcaacgcgtggatcaagcaacataacctgaaaaccgatgctccggtggcgctgtacggtaatgacaaagatgtcgacgccgtcaaaacgcgactgcaaaaagcaggtttaacgcatatctccatcctgagtgacgcgctaagcgaaccttcccgtctgcaaaaactgccgcattttgagcagctggtttatccgcaatggctgcacgacctgcaacaaggtaaagaggttacggcgaaacctgccggtgactggaaagtcattgaagcggcctggggcgctcctaagctttaccttatcagccatattcccggcgctgactacatcgataccaacgaagtggaaagtgaaccggtgtggaacaaagtttctgatgaacaactaaaagcgatgctggcaaaacaagggattcggcatgacaccaaggcgcgtgtggcgcagattatgctttatgctggcgtgaaagatgtgcgcctgctggatggcggctggcaaacctggtccgacgcgggactgcctgttgagcgcggaacgccaccgaaagtgaaagcggaaccggatttcggcgtgaagatcccggcacaaccgcagttgatgctcgatatggaacaggcccgtggactgctgcatcgccaggatgcatcgctggtgagcattcgttcgtggccagaatttatcggtacgaccagcggttacagctatattaaaccaaaaggtgaaatagccggcgcacgttggggacacgctggtagcgactcgacgcatatggaagattttcataacccggatggcaccatgcgcagcgccgatgatattaccgctatgtggaaagcgtggaatatcaaaccagagcagcaagtttcattctactgcggcaccggctggcgcgcgtccgaaacctttatgtacgcacgcgccatgggttggaagaatgtttccgtgtatgacggcggctggtacgaatggagcagcgatccaaaaaatccggtagcaaccgttcgtgtttcaccaacggtccgttgcacctgggtgaacaacgaccttggacgttcaccccatactgtacatacgcctttgccaggcactatactcccacatttcggcccaggcgttggctggttaagtcagcggcacagcagggcctcggcgtacctggaatctggcccttatacccgtaaccagaaaagtaagatgaggagcgaaggcatgaaaccatatcagcgccagtttattgaatttgcgcttagcaagcaggtgttaaagtttggcgagtttacgctgaaatccgggcgcaaaagcccctatttcttcaacgccgggctgtttaataccgggcgcgatctggcactgttaggccgtttttacgctgaagcgttggtggattccggcattgagttcgatctgctgtttggccctgcttacaaagggatcccgattgccaccacaaccgctgtggcactggcggagcatcacgacctggacctgccgtactgctttaaccgcaaagaagcaaaagaccacggtgaaggcggcaatctggttggtagcgcgttacaaggacgcgtaatgctggtagatgatgtgatcaccgccggaacggcgattcgcgagtcgatggagattattcaggccaatggcgcgacgcttgctggcgtgttgatttcgctcgatcgtcaggaacgcgggcgcggcgagatttcggcgattcaggaagttgagcgtgattacaactgcaaagtgatctctatcatcaccctgaaagacctgattgcttacctggaagagaagccggaaatggcggaacatctgggcnggngcngcggtcagtggaatttccacttttttgaccatccgctgcaagtaccagaagccttcacctctgagttaatggctgactgggggcatattaccgtccccgccatgtggcaaatggaaggtcacggcaaactgcaatataccgacgaaggttttccgttccccatcgatgtgccgtttgtccccagcgataacccaaccggtgcctatcaacgtattttcaccctcagcgacggctggcagggtaaacagacgctgattaaatttgacggctgggcggactctacctacgtggaagaccaggatatgtggtggtcagcggggatcttccgcgatgtttatctggtcggaaaacacctaacgcatattaacgatttcactgtgcgtaccgactttgacgaagcctattgcgatgccacgctttcctgcgaagtggtgctggaaaatctcgccgcctcccctgtcgtcacgacgctggaatataccctgtttgatggcgaacgcgtggtgcacagcagcgccattgatcatttggcaattgaaaaactgaccagcgccagctttgcttttactgtcgaacagccgcagcaatggtcagcagaatccccttatctttaccatctggtcatgacgctgaaagacgccaacggcaacgttctggaagtggtgccacaacgcgttggcttccgtgatatcaaagtgcgcgacggtctgttctggatcaataaccgttatgtgatgctgcacggcgtcaaccgtcacgacaacgatcatcgcaaaggccgcgccgttggaatggatcgcgtcgagaaagatctccagttgatgaagcagcacaatatcaactccgtgcgtaccgctcactacccgaacgatccgcgtttttacgaactgtgtgatatctacggcctgtttgtgatggcggaaaccgacgtcgaatcgcacggcttgataaatgcgacgccgatccagctgctgctggccaagtacaaccgcaacaagtcgaacgggatggtgtga

SEQ ID NO: 24945 - DNA, 1761 bp, Homo sapiens
  SIMILAR (567)..(10): 871254mologous to Escherichia coli ATP phosphoribosyltransferase,accession number U02070,Smith-Waterman Score=821.
tcagccgggctttcgaccgataaataacttggcttggcgcagccggtaagttccaagcgtggcccgggtggaacccagatcgcaaatcgcatccgccagtccggcacgcggggcgatttcaacagaaccgttcagtaagcaggatttaaaagagatgcctttttgttcgagataacgcttgagcaggtgaggataagaggtggcgatacgtttaccgtttaaggagagcggaccgtcccaggcttcatcaaccggcgttgccagcgaaagacgacagccgccgaaatccagacgacgcagggtaaagtagcgtggatcttcaccttgggcgcggcggttaagcagctcttcttccagcacgttttcgccgataatcccaaggtctaccacgccatccattaccagaccgggaatgtcgtcgtcacgcacgcgcagaatatcaatcggcatgttttctgccatcgcgatcaggcgctgggtgtgaagattaattttaatgccacagcgcgccagcaattcgcgtgagtcatcacttaaacggggggatcctctagagtggacttgcacgaagtgtatcttcaaacttccgaagtcccaaagaccagcaccagatctagccagggaggactgggggaagggtgcctttccatttgagctcggagaaggttttacacaacacgatggtactttacatttgttgattgccttctctgttccaggtggtctacaggtattatctcctttaatcctcaaaacagccatagctgctggtgtcattaatcttgccattggtgttgttgctgtgattattctctgtctccgattcagtctgcagcagacgcgggtgagttgggtagcaacggcattctgccagacgtcgaaagcttgcgtattccggtacagtatctggcgaatttgctgaccgccggtgataccaaaccggtactgcgcgcactgaaacgtatgctggcgatgcgtcattacaaacgtgctgaaaccgttgacggtaaagttgatacccgtgcgctggaagaggtcggtctgaccgaagcccaggcacaggagatgtaccgttatctggcgattgctaactacgaagatcgctttgtggtgccgagtagtcatcgtgaactggcacgggaagccttcccggagaaaaatggctgcggctttacctttggtgatggcaaattcaatctgttcaacagccgtcgtatcgatgccatcgatgtgaccagcaaaacggagccgcatccatgatcgaactcgtgattgtatcgcgtctccttgaatatccggatgctgcattatggcagcatcaacaatagatgtttgaggcgatcgccgcgtcgaaacattggtcgagtcggcctgcgcggaagatgtaacggggctaaaccatgcaccgaagctgcggcagcgacgcttatgcgttgttgggtaggggagcgttctgtaagcctgcgaaggtgtgctgtgaggcatgctggaggtatcagaagtgcgaatgctgacataagtaacgataaagcgggtgaaaagcccgctcgccggaagaccaagggttccttttactttgttggagtcttgtgagtccttttgatgatctgacccagcatgattgctgcaacctctcttgatgctcggctctagttcctggcagtttcctcttgacatccagactgtagaatcttcagggctcatgggctctggcccctgcttccccttctctcttccttcttctctggccgtgtaagccat

SEQ ID NO: 24946 - DNA, 2727 bp, Homo sapiens
  SIMILAR (1186)..(1118): 951254mologous to Escherichia coli gidA protein,accession number X01631,Smith-Waterman Score=104.
atgaactcgattgcgtgtttggtccggaaactagtgaacctggggctcatgtgtatggcgggcgtccctgatactgaattgaggcggcctgggagggagtgccgcggggtgggccggataccagaagggagtaggcgacggattataagccggctctgcccggagttaggaatggccgtaagtggggtggcgcgggattacatggagattgaaataggctcgctgatgggaacgcgcgagggagcgaggtggaagagtgttattgacggagatgggggagtctggatggggagtgccgatatcgggacgattaggacggtgctacggttaataaggggaaacgatatcttgaaaaggggcgtatgtgtcatgctgagctgcgactttctaaatcttgggatgggccgcggggccgttggattgtcccgggtgggccggcgccgaccgttggacccgaacctattcggccttctcgtcgcgaggatcgaagaagtcatactcaatggcataacccggacgcacgatcttcgcgttttccatcccctgcatagagcggacgatgtgcatctgcacatcgaacggcaggctggtggagataccgttcggataaatttcattagaggtcagtccttccggttcaaggaagatctgatgctgatttctgtcggcgaacggcatgactttgtcttcgatcgacgggcagtagcgtgggccgacaccttcgatcacccctgcgtacattgggctacgatcgaggttactgcggatcacatcatgggttttctcgttggtatgagtgatataacacggcacctgctggggatgctgggacgcatgacccataaacgagaataccggcattgggttatcgccatgctgttgcgccagtacgctaaagtcgatgacgaccaacgcgcagttcagttcacgcaaacggcgagaaagcggaatggacggcggatcaccagcacggccaccgctgtaattatccagaccgatatgaattttaccgtcgaggaacgtcccaacggtgagcacgacggctttggcacggaacttcagtcccatttgggtaacagcaccgaccacgcgatcgttttcgacaataagatcttcaaaccgcctgctggaagatcatcaagttcggttggttctcaagcgccgtacgtaccgcctgacgccggagatttcaatatgcgtccagcaggccgtagcaataatcaggtgcgtcccgttaccctgactcgtaactatacaaaacatgcagaaggctcggtgctggtcgaatttggcgataccaaagtgttgtgtaccgcctctattgaagaaggcgtgccgcgcttcctgaaaggtcagggccagggctggatcaccgcagagtacggcatgctgccacgttctacccacacccgtaacgctcgtgaagcggcgaaaggtaagcagggtggacgcacaatgggaatccagcgtctgatcgcccgtgctcttcgcgcggcagtagatttgaaagcgctgggtgagttcaccattacgctggactgcgacgtgcttcaggctgatggtggcacgcgtaccgcgtcgattacgggtgcctgcgtggcgctggtagatgcgctacagaagctggtggaaaacggcaagctgaaaaccaatccgatgaaaggatatgttagcgcgcaaggtgagctgatcctcaacgaaaaactggctaaacagctggtaactgccgcgaactgggtaaaaatgcagagtgacgaaggggaaatcaacccggttgatattctacgctggccgggcgtgatggcagcccaggagcaggatcttgacgccattgccgctgaaattctcgcggcgctggatggtacgctggacgactttattgtcgcgcgcgaaaccgaaggtcaggcactgaaagcattgatcgagcagcgtctggaaggcgtcaccgccgaagtggtcaaagtccgctcccatatgccggaaatcctgcaatggcagcgtgagcgtctggtcgcgaagctggaagatgctcaggtgcaactggaaaacaaccgtctggagcaggaactggttctgctggcacaacgaattgacgttgccgaagaactggatcgcctcgaagcgcatgtcaaagagacctacaacattctgaagaaaaaagaagcggttggtcgtcgtctggattttatgatgcaggagttcaaccgcgagtcgaacactcttgcgtcgaagtctatcaatgccgaagtgacaaactccgccatcgagctgaaacgtgctaatgcctggatgctcaactactccaacccggcagccattgtcgcagaagccacgcgtcgtctgcgcccgaatgcgaaaatcctcaacatctgtgacatgccaatcggtattgaaagccggatggcgcaaattgttgggctgcaagatcgcaaacagatgcgcgtgcgctactacggcctgaaccactggtggtcggcgatatcccgcagtttcagaaaggcgatagcgccagatccagacgcgcatcgaggtaatattctttcggcgtcttgccggtatagcgtaaaaacagacgacgcaaccaggcttcgctaccaggggatcgtgcagccatatgaggccactaagaaagagtcagtcatggccatgacgggctgtacttcaaggaagtcccagtataggtatttcccaggagcaacccaagtcttcgggtattacctgaattag

SEQ ID NO: 24947 - DNA, 2289 bp, Homo sapiens
  SIMILAR (1)..(1308): 991254mologous to Escherichia coli Respiratory nitrate reductase 1 beta chain (EC 1.7.99.4),accession number D90758,Smith- Waterman Score=2319.
cgtaaaatcaacggcaaactgcagccgcgcatgggtaaccgtgccatgctgctgggtaaaatcttcgctaacccgcatctgccggggatcgacgattattacgagccgttcgattttgactatcagaacctgcatcccgcgccggaaggcagcaaatcgcagccgattgcccgtccgcgttcgctgattcccggggaacggatggcgaaaatcgaaaaagggccgaactgggaagatgacctgggcggtgagtttgacaaactggcgaaagacaagaacttcgacaacatccagaaggcgatgtatagccagttcgaaaacaccttcatgatgtatttgccgcgcctgtgcgaacactgcctgaacccggcatgtgtggcgacctgcccgagcggtgcgatttacaagcgtgaagaagatggcatcgtcctgatcgaccaggataaatgccgtggctggcgtatgtgcatcactggatgcccgtacaaaaaaatctacttcaactggaagagcggtaagtctgagaagtgcatcttctgctatccgcgtattgaagcgggtcagccgaccgtgtgctcagaaacctgtgtcggtcgtatccgttatcttggcgtgctgttgtacgatgccgacgctattgaacgtgcagccagcaccgagaacgagaaagatctttaccagcgtcagctggacgtgttcctcgatccgaacgatccgaaagtcatcgagcaggcgattaaagacggtattccgctgagcgttattgaagccgcacagcagtcgccggtttataaaatggcaatggaatggaaactggcgctgccgctgcatccggaatatcgcacactgccgatggtctggtacgtgccgcctctgtctccgattcagtctgcagcagacgcgggtgagctgggtagcaacggcattctgccagacgtcgaaagcctgcgtattccggtacagtatctggcgaatctgctgaccgccggtgataccaaaccggtactgcgcgcactgaaacgtatgctggcgatgcgtcattaccaacgtgctgaaaccgttgacggtaaagttgatacccgtgcgctggaagaggtcggtctgaccgaagcccaggcacaggagatgtaccgttatctggcgattgctaactacgaagatcgctttgtggtgccgagtagtcatcgtgaactggcacgggaagccttcccggagaaaaatggctgcggctttacctttggtgatggctgccacggttcagataccaaattcaatctgttcaacagccgtcgtatcgatgccatcgatcatcaacaagagatgtttgaggcgattgccgcgtcgaaaaatctgccaaaagaggatgcccatgcgctgggcattttcctgcgcgatttaacgacgatggatccgctcgatgcccaggcgcagtacagcgaactgttcgaccgtggccgcgccacgtcactgttgctgtttgaacatgtgcacggcgaatcccgcgaccgcggccaggcgatggtggacctgctggcgcagtacgagcagcacggcttgcagttaaacagccgcgaattgccggaccatctgccgctgtatctggagtacctggcgcagctgccgcaaagcgaagccgtggaaggtttgaaagatatcgcgccgattctggcattgctgagcgcgcgtctgcaacagcgtgaaagccgttatgccgtgctgtttgatctgctgctgaaactggcgaataccgctatcgacagcgacaaagtggcggaaaaaattgccgacgaagcgcgcgatgatacgccgcaggcgctggatgctgtctgggaagaagagcaggttaaattctttgctgacaaaggctgcggtgattcagcaatcactgcgcatcagcgtcgctttgccgccggggcggtcttcctgattggtagctggctgcgttatgactacgggcagtacacctggcgcgcggcgtccagccagatgctggatcgcaaagggatgaacctggcgtcgaacctgttccatatcgggattctggggatttttgtcggtcacttcttcggtatgctgacgccgcactggatgtatgaagcctggctgccgattgaagtgaaacagaaaatggcaatgtttgctggtggtgccagcggcgtgctgtgtctgattggcggcgtgctgttgctgaaacgtcgtctgttcagcccacgcgtgcgtgcaaccactaccggagcggatatcctgatcctgtcgctgctcgttatccatgcgcgctgggcctgttga

SEQ ID NO: 24948 - DNA, 3412 bp, Homo sapiens
  SIMILAR (1291)..(2004): 981254mologous to Escherichia coli Respiratory nitrate reductase 1 beta chain (EC 1.7.99.4),accession number D90758,Smith- Waterman Score=1206.
atggctaaactcttcatatggcggggagcagcgggggactgggggcccttcttgcgaacgctgatcacgggacaccatagggaatttgacgcttttgaggatgaggtaaatgacgggttggaagaaagcagcttggagggcgcatgtagtcacaggccccatagctggctgtgtcagaatctcccgtgtcagtggtgggaagaccaggaaaccatagggcacactatgctccggggatatgctacgaggatcttggggccctcttccgacaaggcacaagatcagtatgaagggtgtatcctcgcggttcctttatatggccacacaactggttccaaccggggattccaaaaggctcccaacggcctgtaccaaaaacagggggctcccgttaccgtgactcgtaactatccaaaacatgcagaaggctcggtgctggtcgaatttggcgataccaaagtgttgtgtaccgcctctattgaagaaggcgtgccgcgcttcctgaaaggtcagggccagggctggatcaccgcagagtacggcatgctgccacgttctacccacacccgtaacgctcgtgaagcggcgaaaggtaagcagggtggacgcacaatggaaatccagcgtctgatcgcccgtgctcttcgcgcggcagtagatttgaaagcgctgggtgagttcaccattacgctggactgcgacgtgcttcaggctgatggtggcacgcgtaccgcgtcgattacgggtgcctgcgtggcgctggtagatgcgctacagaagctggtggaaaacggcaagctgaaaaccaatccgatgaaagggatggtagccgcagtttctgtcggaattgtgaacggcgaagcggtttgcgatctggaatacgttgaagactctgccgcagagaccgacatgaacgtagtgatgaccgaagacgggcgcatcattgaaaaaagtaagatgaggagcgaaggcatgaaaccatatcagcgccagtttattgaatttgcgcttagcaagcaggtgttaaagtttggcgagtttacgctgaaatccgggcgcaaaagcccctatttcttcaacgccgggctgtttaataccgggcgcgatctggcactgttaggccgtttttacgctgaagcgttggtggattccggcattgagttcgatctgctgtttggccctgcttacaaagggatcccgattgccaccacaaccgctgtggcactggcggaacatcacgacctggacctgcccgcaatccgcgtattgaaccggaaacctgtgtcggttcgtatccgtaatcttggcgtgctgttgtacgatgccgacgctatggaacgtgcagccagcaccgagaacgagaaagatctttaccagcgtcagctggacgtgttcctcgatccgaacgatccgaaagtcatcgagcaggcgattaaagacggtattccgctgagcgttattgaagccgcacagcagtcgccggtttataaaatggcaatggaatggaaactggcgctgccgctgcatccggaatatcgcacactgccgatggtctggtacgtgccgcctctgtctccgattcagtctgcagcagacgcgggtgagctgggtagcaacggcattctgccagacgtcgaaagcctgcgtattccggtacagtatctggcgaatctgctgaccgccggtgataccaaaccggtactgcgcgcactgaaacgtatgctggcgatgcgtcattacaaacgtgctgaaaccgttgacggtaaagttgatacccgtgcgctggaagaggtcggtctgaccgaagcccaggcacaggagatgtaccgttatctggcgattgctaactacgaagatcgctttgtggtgccgagtagtcatcgtgaactggcacgggaagccttcccggagaaaaatggctgcggcttaccctttggtgatggctgccacggttcagataccaaattcaatctgttcaacagccgtcgtatcgatgccatcgatcaaaacggagccgcatccatgatcgaactcgtgattgtatcgcgtctccttgaatatccggatgctgccttatggcagcatcaacaagagatgtttgaggcgattgccgcgtcgaaaaatctgccaaaagaggatgcccatgcgctgggcattttcctgcgcgatttaacgacgatggatccgctcgatgcccaggcgcagtacagcgaactgttcgaccgtggccgcgccacgtcactgttgctgtttgaacatgtgcacggcgaatcccgcgaccgcggccaggcgatggtggacctgctggcgcagtacgagcagcacggcttgcagttaaacagccgcgaattgccggaccatctgccgctgtatctggagtacctggcgcagctgccgcaaagcgaagccgtggaaggtttgaaagatatcgcgccgattctggcattgctgagcgcgcgtctgcaacagcgtgaaagccgttatgccgtgctgtttgatctgctgctgaaactggcgaataccgctatcgacagcgacaaagcactgttggcaaagggcagtggtccctatttctatctgccgaaaacccagtcctggcaggaagcggcctggtggagcgaagtcttcagctatgcagaagatcgctttaatctgccgcgcggcaccatcaaggcgacgttgctgattgaaacgctgcccgccgtgttccagatggatgaaatccttcacgcgctgcgtgaccatattgttggtctgaactgcggtcgttgggattacatcttcagctatatcaaaacgttgaaaaactatcccgatcgcgtcctgccagacagacaggcagtgacgatggataaaccattcctgaatgcttactcacgcctgttgattaaaacctgccataaacgcggtgcttttgcgatgggcggcatggcggcgtttattccgagcaaagatgaagagcacaataaccaggtgctcaacaaagtaaaagcggataaatcgctggaagccaataacggtcacgatggcacatggatcgctcacccaggccttgcggacacggcaatggcggtattcaacgacattctcggctcccgtaaaaatcagcttgaagtgatgcgcgaacaagacgcgccgattactgccgatcagctgctggcaccttgtgatggtgaacgcaccgaagaaggtatgcgcgccaggaatatttgtcggcaccctgatggaagtcggtgcccacaaccagccggagagctggatagcagagttgctggcggcaaaggacagtactctggcggcatctccggcaaaagcggaaggtctgtatctgttctcggtggattaccctgaccggtatgatcttcccataccgcctatgggcccgctatttctgtcggacttacgagaataa

SEQ ID NO: 24949 - DNA, 1065 bp, Homo sapiens
  SIMILAR (1065)..(4): 1001254mologous to Homo sapiens guanine nucleotide-binding regulatory protein 2,accession number M60165,Smith-Waterman Score= 1835.
tcagtagagtccacagccccgcaggtttttggcgatgatgacgtccgtcacagcatcaaagacaaactggatgttgttggtgtccgtggcgcaggtgacgtggctgtagatctctttgtgggctgacttgttcttgctctcgtactgggcctggatgtaagccacggcttctgtgaaggcgctggggcctgtatattcaggaaagcagatggtgagcggggacttcttgatcttctcttcaaatatgtccttcttgttaagaaacaggatgatggacgtgtctgtgaaccatttgttgttgcagatgctgtcaaaaagcttcagggattcgtgcatgcggttcgtggtttcgtcttcgtggagcacctggtcatagccgctgagcgcgacacagaaaatgatggccgtgacgtcctcgaagcaatggatccacttcttgcgttcagatcgctggcctccgacgtcaaacagcctgaagtggaggttcttgaatgtgaagtgggtttctacgatgccagtggttttgaccctggttcggaggatgtcctgctcagtgggctggtagtcggcggccccaatccgatccaggctgtccaggtagtatttggcagagtcgttgagttgatactcccgggaccggttgaagcactcttggattcctgagtcgccccagagccgcatcatggcagaaagcagctctgcagagaagggctcggtgtcttccatccgactcaccacatcacacaccatcttggcgtcagcctttctctccttatcaccatattcgatgcccaaagtgtccatggcccggacgatggctgccagggactggatagtgttgctgtagacaacaggcttgtactgtttcacgtcttctccggagaagccatcttcatggatgatcttcatctgcttcacaatggtgctttttcctgattctccagccccgagcaggagtaatttcacgtctttggcggcgctgatgccatcctctttgaggtttttctcaatcgccttgctccgctcgagggcggctctctcctctgcgctcagagtacatcccat

SEQ ID NO: 24950 - DNA, 1664 bp, Homo sapiens
  SIMILAR (522)..(944): 931254mologous to Escherichia coli O157:H7 hydrogenase-1 large subunit,accession number AE005291,Smith-Waterman Score=722.
gaaaccaatccagatactcgctactccttctcaaacaacagacgccaatcctttattccaatgagacagcataaatgccacatcctgctctacagagatataatggcttttcctgtggctgccttgtgtcaagggcagcctagcacagcaaagttactggctgacgccaagatggtgtgtgatgtggggaagtcaatagaaaacaccgagcccttctctgcaaaactgctttctgccaagaagcggctctggggccactcaagaatccaagagtgcttcaaccggtcccgggaatatcaactcaaccactctgccaaatactggtcgcgtctgtttcccgttttccgaccagcgagccatatgaaagctagcgccccatacctgccaggccagtggcgcaccgacgccaagcgaccgctaaagaccttattgacccgctggggcattcccggatattgccaacgactttggcgagaaaagtctgctgatgcctggcggcgcggtgattaacggcgacttcgaacaatgtgctgccagtggatttggttgatccgcagcaggtgcaggagtttgtcgaccacgcctggtatcgatatcccaacgatcaggtcgggcgtcatccgttcgatggcatcaccgacccgtggtacaaccccggcgatgtcaaaggcagcgataccaacattcagcagctgaatgaacaggaacgctactcgtggatcaaagcgccacgctggcgcggtaacgcgatggaagtggggccgctggcgcgcacgttaatcgcttatcacaaaggcgatgctgcgaccgttgagtcggtcgatcgcatgatgtcggcgttgaacctgccgctttccggtatccagtcaacgttaggccgcattttgtgccgcgcgcacgaagcgcagtgggccgcagatgccattgagaacaattacagcagaaacccaagtcaggggtacagcactgtgccccgtagcccacaccccaaagttgatcccatcctcacaaagcccagtggaccagctgggccagaaatgacgaggaaacagacccagagagaggacaggcctcgctcaaggcccagcatgacaacaagccccacctccaacctcaaaccctcggtgccagccttcaaaggcgtgggctacctggacagcctggatcggattggggccgccgactaccagcccaccgagcaggacatcctccgaaccagggtcaaaaccactggcatcgtagaaacccacttcacattcaagaacctccacttcaggacggagcaggcctcagtgcacgcatgttactgcaggctgtttgacgtcgaaggccagcgatctgaacgcaagaagtggatccattgcttcgaggacgtcacggccatcattttttgtgtcgcgctcagcggctatgaccaggtgctccacgaagacgaaaccacggttttgagcacgcgaattgtggacggacacagatattctgaccatagcaccattgcctgccctgccttcgggacttacactcttttggagctgaaggaactggctctttcttgctccacattgctccacattccccatcagcgttccccagcaggctctttcctagcagacaatctgaactgcacccaggctgcagtcatccctgaatttgggggcttctaa

SEQ ID NO: 24951 - DNA, 1344 bp, Homo sapiens
  SIMILAR (1176)..(1229): 551254mologous to Escherichia coli yehP,accession number U00007,Smith-Waterman Score=47.
atgacttttggaggggaccaaatatttgaatcattagtttatcgatctgcatttcggcacgtctactctagaggatccccatggtatttacacaccaactctgatctttcatttgttgagagtaaaaaagaactgattgcagagcacatcttggagactttcccctggaatctgaagggccttacagagattccatggggtgatgcatccggtgaatccggcgctgtcggtttgggcgttctcgcagcggttcattatcacccgcaacgtcaaagcctgatggaaaaactggcgctgaacaaagatgccgtggtgctggttatcagcactgaaggcgacaccgaccaggtgattgagcggctggaaagcgatgccgtgctgcgctacggcattgaagatgtggtgacgaatctcgacgtgctggaacgtatgcagccttctgaaagcctgctacgcgctgttttgcacaccaaacatctgatgaaccccgaagtactggctgccgcccgccggatagtgtgccaggttgttgaagaaattatggctcgactggcaaaggaagttcgtcaggctttttctggtgtccgcgatcgccgtcgccgttcatttattccactggcgcgaaactttgatttcaaaagtactctgcgcgccaacctgcaacactggcacccgcaacacggcaagttgtatatcgaatccccccgctttaacagccgcattaaacgccaaagcgaacaatggcaactggtcttactggttgatcaaagcggatcgatggtcgattcggtgatccactctgcggtgatggcggcctgtttgtggcagttatcccggcattcgtacccatctggtggcgtttgacacaagcgtcgttgatctcacggcagacgttgccgatccggtagagttattaatgaaagtacagttgggcggcgggaccaatatcgccagtgccggggagtatggtcggcaacttattgaacaaccagcgaaaagcgtcattatcctcgtgagcgatttttacgaagggggttcatcatcattactgacgcatcaggtgaaaaagtgtgtccagagcggcatcaaagtgctgggactgggagcgctcgatagcaccgcaacaccttgctatgaccgcgatacggcccaggcgctgggtaatgtcggcgcacaaattagccgccctgatgccgggcgagctgggatcattggcttgggagaatcttctggcatggattcactagggccgggagtattagaactgacaccgcaggccccgccggcgttaagcaatgccggttttgttaagcgcagtcttaaggaactggaaaaaagcaacgt

SEQ ID NO: 24952 - DNA, 1913 bp, Homo sapiens
  SIMILAR (1216)..(1689): 881254mologous to Escherichia coli HyfH,accession number M63654,Smith-Waterman Score=738.
atgggcgcttacctgattcgccgtctgttgctggtgatcccaacattatgggcgattatcaccatcaactttttcatcgtgcaaattgcgcctggcggtccggtcgaccaggccatcgccgccattgagtttggtaatgccggagtattacccggcgcaggcggtgaaggtgttcgtgccagccatgcgcaaacgggtgtcggcaatatcagcgacagtaattaccgtggcggacgcggattagatccagaagtgatcgctgagatcactcatcgctacggttttgataagccgatccacgaacgttacttcaaaatgctctgggactacatccgctttgattttggcgatagcctgtttcgcagcgcctcggtgctgacgctgattaaagacagtctgccggtttccatcaccctcggattgtgttggtattttgtctgtcgtgcctgtgtagtgacacacgcgctcagtctctggcagagcgcaagcatagaagtaccccggacgtcggccacggcgaaagctcggaagacggaacccggaaggcagacaaagcggaaagtacgcagctcgcagacagtagcggcaagacagcgtatagctacgctgccccacagtatgacggtctgtaaccccggactcttccattctcaaatggcagacgccttggcccaccggtactacggatttaatatcgccgagccttgggacaacggcagcgaggcgatgttgcagcgggacatagggctaaaatctgagagtcgaggcctgatggctggtaaaaggtgcagttgtttgaagggtgagtgcggatggagcttggacatgcaagccagggtatccacatgcttctatgtgaggctgttgtgtgggacagagctggaggatcaccgcatctgcatcatcgacacgtgcgacaacaagtgtggaccacaacgtaggtatgtcatcaagttcagagaactatgtttagtgaattctactgtgactcttgttgatcaagagtacgaattgacagtgacagatccagaactatacgatggatcctcccaggcgttagcgggaatctctgatttgagctcgatctacgctacctgtgacccgggctactcctgtaccgaccgtgtgacgctggtagatgtgcgcaagcgccagtcaaaaaccgggccgtataaagagatcggacgctacggcattgatcgtaaccgttcgccgctgaaccctggctttcgcggaaaaccggacctgatgcccagccaatgtattgcctgcggtgcctgcgcctgtgcttgtccggcaaatgcgctgactatccagaccgacgaccagcaaaactcgcgcacctggcagctctatatggggcgttgtatttactcgacggacgttgtgaagaagtgtgcccgaccagagccatccagacttaccaataactttgtactgaccgtcaccaataaagccgatctctatacccgcgcgacgttccatctacaacgttgcagccgttgcgaacgcccgtttgccccgcaaaaaaccatcgcactggctgctgaattgttagcacagcaacaaaatgcgccacaaaaccgcgaaatgttgtgggcgcaagcgagcgtctgcccggaatgcaaacaacgcgcgacgctgatcaacgacgatacagatgtactgctggtggctaaggagcagctatgagtccagtgcttacacaacatgtcagccagcccatcacgctggacgagcaaacgcaaaagatgaagcggcatttgctacaggatatccgtcgctcggcttacgtttatcgcgtcgattgcggcggctgcaacgcctgtgaaatcgaaatttttgctgccattacaccagtattcgacgcagaacgttttggcattaaggttgtttcatcaccgcgtcacgcc

SEQ ID NO: 24953 - DNA, 866 bp, Homo sapiens
  SIMILAR (1)..(453): 991254mologous to Escherichia coli K12 putative general protein secretion protein,accession number AE000409,Smith-Waterman Score=716.
atgttgctgcgcgttgcgctcatcggcccgctgatttgcgccattaacagcgcacgctatctccgcactttaagtattttgcaatccagcggcgtccctctgctggatgggatgaatttgtccaccgaaagcctcaacaacctcgaaattcgccagcgtctggcaaatgcggcagagaacgttcgccagggtaacagcattcatctttcgctggaacaaaccgcaattttcccgccgatgatgctctacatggtggcctctggcgaaaaaagcgggcagctcggcacattaatggtcagagccgcagataaccaggagacactccaacaaaatcggatcgccttaacgctctccatcttcgagccagcactcattattacgatggcactgatcgtcctgtttattgtcgtgtcggtactccaacctcttcttcagcttccctccatgattaataaaggaagcataatgcgcgcaacggataagcaacgcggttttacattactggaaattatggtggtgatcgtcattatcggcgtacttgccagcctggcggataagcaaaaagccgtcagcgatattgtggcgctggaaaacgcccttgatatgtacaaactcgacaatcatcactatccaaccacaaatcaggggcttgaatccttagtagaagcgccgacactgccaccgctggccgcaaactataacaaggaaggttatatcaagcgtctgcctgccgatccctggggcaatgattatgtcctcgttaatcctggtgaacatggtgcatacgatctgctttcagcagggcccgatggtgaaatgggaaccgaggacgacatcaccaactggggtttgagcaagaagaaaaa

SEQ ID NO: 24954 - DNA, 2391 bp, Homo sapiens
  SIMILAR (463)..(1026): 1001254mologous to Escherichia coli BILE ACID-INDUCIBLE OPERON PROTEIN F,accession number D90868,Smith-Waterman Score=983.
atgcccgatacgttggtgattatcttttttgttgctattttaaccagccttgccacctgggtagttccggtggggatgtttgacagtcagaaagtgcagtatcaggttgatggtcaaacaaaaacacgcaaagtcgtagatccacactcatttcgcattctgactaacgaagcaggcgaacctgagtatcaccgcgtacagctgttcacgacgggcgatgaacgcccgggcctgatgaacttcccgtttgaaggattaacctcaggatcgaaatacgggacagccgttggcatcatcatgtttatgctggtgattggcggcgcgtttggcattgtgatgcgtacaggaaccattgataacggtatcctggcgcttattcgccatacccgcgggaatgaaattctctttattcctgcgctgtttattctgttttcacttggcggcgcggtatttggtattgctatgtcaactccacttcaaggaataaaagttctcgatttcaccggtgtgcaatctggcccatcttgtactcaaatgctggcctggtttggcgctgacgttattaaaattgaacgtcccggcgttggtgacgtaacgcgtcaccagctgcgagatattcctgatatcgatgcgctttacttcaccatgcttaacagtaacaaacgttctattgagttaaataccaaaacagcggaaggcaaagaggtaatggaaaagctgatccgcgaagctgatatcttagtcgagaactttcatccaggggccattgatcacatgggcttcacctgggagcatattcaagaaatcaatccacgtctgatttttggttcgatcaaagggtttgatgagtgttcgccttatgtgaatgtaaaagcctatgaaaacgttgctcaggcagcgggtggcgcggcatccactacgggtttttgggatggtccgccgctggtaagcgctgcagcgttgggtgacagcaacaccggaatgcatttgctgatcggtttacttgctgctttgctgcatcgcgagctcaatatgacggtcgcggagatcgtcgaaagggaagagtgggcgggatttcgcgccagagaaacggcggcgctggaagcggtaactgcgccatccaccgttatcgctacaggcggcggcattattctgacggaatttaatcgtcacttcatgcaaaataacgggatcgtggtttatttgtgtgcgccagtatcagtcctggaagatttccgccaacggacaatggaagtgctacggctggcgtttttatcctccggcattctcgaattttttacctcgctgtcaattgctctggtggcggtctactttggtttttcctatctcggcgagctggattttggtcactacgataccggtgtgacgctggctgcgggttttctggccctgatccttgcgccagagtttttccagccattacgcgatctcggtacgttttatcatgctaaagcccaggctgttggcgcagctgacagtctgaaaacgtttatggaaaccccgctcgcccatccgcaacgtggtgaggcggaattagcatcgaccgatccggtgaccattgaggccgaggagctgtttatcacgtcgccggaaggtaaaacgctggccggaccgctgaactttactttgccagcaggccaacgtgcggtgttggttggtcgcagcggttcagggagccgctactgcccgtatatcaaccatcgaaatgtccgtctgggcccaattgtaacagatgtgccgtgggaaaattcgggcgacaaatcattgccggaagccactgcgcaggtcatctcgagcgggtcaggggcgacaaaagttgaagacggtttgggcgacctcaacaagccggtgagtaatcagaacttagttactggaatagatacgccggtctataacgcgccgagtgcgggaagtgcgccatttggggtactggcggacaatatgcgctacccgattttgcataaactgaaagacaggttaaatcaaacctggtatcagatccgtattggcgatcgactggcctatatcagcgcactggatgcccaacccgataatggcctgtcggtgctaacctatcaccatattctgcgcgacgaagaaaacacccgttttcgccatacttcgacgaccacatcggtacgcgctttcaataaccagatggcctggctgcgtgacaggggatacgcgacactgagcatggtgcagctggaaggctacgtgaagaataagatcaatctccctgcgcgagcggtggtgattacctttgatgatggcctcaagtcggtgagccgctatgcgtatcctgtgttgaaacaatatggcatgaaggcgacggcgtttattgttaccacgcgcatcaaacgtgtttag

SEQ ID NO: 24955 - DNA, 2399 bp, Homo sapiens
  SIMILAR (1419)..(1048): 1001254mologous to Escherichia coli K12 putative membrane protein,accession number AE000312,Smith-Waterman Score=670.
ttaaatgtaggagctggtgaatgggattacaatttcccgcaggatttggcggattctatttgggatctgggtgggtgtccggtacttttgtactttccgtttcatggtgcgcctcttcctcttcgttggggcacggggcacatccaaagggtacatccggtatcttcccttgttgtcagttacgcggagataatccccggagaaagtcgacacacggctgtaagccatacccgccatcgcatacgcgctgaaccattcattcacgcgcacagacggccccaccatcacgctgaaccagcggttacgcacggaatcttcatgccagcgggtatcgctgtaacgggtaagctggcgattcttgtctcctgcatagctgaatggccgccctgcagtggacaacccaacaacaatatccgtcatttgtgcaggcaacatgcgcatagcaaaagccgtttgttttgccgacattccggttttgcttaattgtgattgagtaacctcaagctcactccgcatagcacgaagttttccagaaagctcctcatacatgtcaggagaaagcatccccttagcttttgcttcattgagctgtttctgttgttctaccagacgattaaaagcagttccgacaggatcaagttgagcaatcagacgttgcaaagcaacaacctgttcatcatgcgcttttgctgcttctcgctctgcctgagcctcttgatgaatactattgcattggatatgcccatagtgctgtctgtaggcatttccctgccaaaatcggacaaaatccatctgtgcttcaaagccaaaccacatatctgagttcataaccgaggccatgagtctcagcatctttttcgcggtaatccgcaaagccgtcagtccaaagatctcggagccgggttcgttcacctgttttttacccgcggtccacaccagaagctctttgctggacactttgctaagcgccacggtatcggaaacaacaccacccgtcgtcgcccgatacccaccaaccatcgcctcgacgaggtacagtccccggctcccttgctgcggctcgaacggtttagcctgccatagtggataacggaactgtttcaccaggggatattttttcagcggggaaaactggttgttctgtacataacgggaaggtttaataatggcattgccgagctgtaattcgggtaacgcctgagtcacattctgccgtgactgagaagagaaagtacgctgcatcacgcggcgagatttgccgtaccagttatcccacagccaggttagcgtattgttcagcccgtcgcccagatattgcggttgcaccacaatgcgatgcaggtttttctgctggcgcaaaaatgccatcgggtcaggaatacgatacaggcgaacgtccacgccgccgtactcttccatcgcggactccgctgttaaccggaggatatgcatcatgaaaaccgttagggagtccacaacgttgtacaactttctcggatcgcacaatccatactggcggttgacggaaagcagcgatgttttgcgcttttctaccaccgaaaccacagaacctgatcgtacattgcagttatctgccgaacaggctgctcgcatcagggaaatgacggtcatcacctccagcctgatgatgagtctgaccgtcgatgaaagcgatctttctgtgcatctggtaggacgaaaaatcaataaacgggaatgggctggcaacgcgtctgcatggcatgacacaccggcggttgctcgtgatttatcacacgggctttcctttgctgagcaggtagtttctgaagcacattccgcaatagtgatgatgaaccgtatattgttcgaccggtcgctgtcgcctggcgtgattatgttccgcaaccggcgcgtaacggtttgagcaactttactggcaaccttgaagaacctgcggtgatggttaactacttcttgcagggcgacccttatcaggggatggtccactttacccgctttttccaccagcacccgtctggcctcagctaatgggtcgcgggtaacatttttcagatcctctgtgctaaccagccagtccggaagcgcacccgggacaatgttcagttgttgcattccagagggcaacgtggcgtttttcgctgctcccgccgggtactgaccgggctggtggaccgcttcgggcgcacacagacgttccaccgcgaagccgccggtgaattcagcggcgaaatcaccggcgtgacggatggtgcctggcgtcacttccggctggtactgaccacgcaggcgcagcgggcagaagaagcccggcagcaggccatttccggcgggacggaaccgtccgcttttcctgataccctgccggttgacaccgaatatgtgatgaacttcattac

SEQ ID NO: 24956 - DNA, 1911 bp, Homo sapiens; identical to SEQ ID NO: 8710
  SIMILAR (505)..(1140): 1001254mologous to Escherichia coli Aconitate hydratase, mitochondrial precursor (EC 4.2.1.3) (Citrate hydro-lyase) (Aconitase),accession number D90715,Smith-Waterman Score=1106.

SEQ ID NO: 24957 - DNA, 1158 bp, Homo sapiens
  SIMILAR (484)..(732): 911254mologous to Escherichia coli K12 putative flavoprotein,accession number AE000360,Smith-Waterman Score=364.
atgcgacacgggataactgggaaaactgtgcaatatatcagccacactagacgtgcccaatacgggcacaacgcgtggaaaccctatacgatcgggcatacagggaggtttttggttggaatccccgcggccccaccggcaggcccaacgcaaggcacactgggtaaagcaaagaaggcggccgaacagaggcggacgagacggacgcggcagactcagggcaacggggaatggaacagaggtctgaaatggataggaaacccactggcactaccggacaaaggtccgaaaagccccggcgcaccctggaatgcctcgcacttcacgaaacccgtatcttcctgccgcagcggaaggaaacgcactcctcggatgcacacgacatgccgggccctccgatgctgtagccaggatttgaaatgtcccgcgaccattactgagcagacggtcttgcggagagcagataccaggaatcgctatgctgcaggaaagctgggagccgaagtggcatacagtcggccccgatggatgaacgtgtgcgttgatgctgaaaaagtgattggtatttccggacatctgctggcacctgaggtgtgtattgttgttggcgcttctggcgcagcagcgttaatggcgggcgtacgcaatagcaagtttgtggtggcgattaatcatgacgccagcgctgcggtatttccacaggcagatgttggcgtggttgatgactggaaaggtggtgctggaggcactggtgacaaacattcacgcagattgccaataacgtgttgccggatgatcctgcctacggttctggcctggggacttgtaggcctgataaggacgcgtcaagcgtcgcatcaggcgctgaatgtcggatgtggcgtgcggcctacaaatcaaaccaaattcaattggttacgattatcccgtcaaagtaattttttcgctaacgtccagaccccggtattcgtggtggaaagcgccacgacacccgcgttaatcgcattacgcgcatcttcttcatcgcacaccagcccaccggcaatcagcggttggcggattttctctgtcacccagcccagcactttgggcatacagcctggcaggatctcaatacaatccggattcgattgcgcaacttgcttatcaatgttgtga

SEQ ID NO: 24958 - DNA, 4134 bp, Homo sapiens
  SIMILAR (3508)..(4086): 991254mologous to Escherichia coli amylomaltase,accession number U18997,Smith-Waterman Score=1014.
atgatgactcaaggcaccttggtcgatgccaccatcattgaggcacccagctcgaccaagaacaaagagcagcaacgcgatccggagatgcatcagaccaagaaaggcaatcagtggcactttggcatgaaggcccacattggtgtcgatgccaagagtggcctgacccacagcctggtcaccaccgcggccaacgagcatgacctcaatcagctgggtaatctgctgcatggagaggagcaatttgtctcagccgatgccggctaccaaggggcgccacagcgcgaggagctggccgaggtggatgtggactggctgatcgccgagcgccccggcaaggtaagaaccttgaaacagcatccacgcaagaacaaaacggccatcaacatcgaatacatgaaagccagcatccgggccagggtggagcacccatttcgcatcatcaagcgacagttcggcttcgtgaaagccagatacaaggggttgctgaaaaacgataaccaactggcgatgttattcacgctggccaacctgtttcgggcggaccaaatgatacgactggcacaggcagatgacgccgccccggcagcgggcagtactctggacaaaatcgccaaaaacggtgtgattgtcgtcggtcaccgtgaatcttcagtgcctttctcttattacgacaatcagcaaaaagtggtgggttactcgcaggattactccaacgccattgttgaagcagtgaaaaagaaactcaacaaaccggacttgcaggaccaagaagacaacacagatgacagaccgatcatgagagagacgagacgaccagagcgagacacgacaagaagaagaagaaaggtagagggccattttggtgtgtcggtctccgagttttctcgggaggttgttccagggcccaaggaagttcatgcaaaaaaagggtggtttcggtgttggacccgagggccttctcagtactgcgctgtcctaaaaaaagtaatagggggcaacaaacttccacaagaggagaggcgcaacaaagagggaacaacctgcgcggtgctgacgccgcttattcagacgctgcgtgacattcccggcgtgaaagcgctgcgtgatgccacccgtggtggtgtaaacgcggtggttcatgagttcgcggcagcctgcggttgtggtattgaactttcagaagcggcactgcctgttaaacctgccgtgcgtggcgtttgcgaattgctgggactggacgccctgaactttgccaacgaaggcaaactagtaatagctgttgaacgcaacgcggcagagcaagtgctggcagcgttacattcccatccactggggaaagacgcggcgctgattggtgaagtggtggaacgtaaaggtgttcgtcttgccggtctgtatggcgtgaaacgaaccctcgatttaccacacgccgaaccgcttccgctcaatgaccttttgcaccgctttgcggtgctttcctggaagaacaaaatgtcatatacaccgatgagtgatctcggacaacaagggttgttcgacatcactcggacactattgcagcagcccgatctggcctcgctgtgtgaggctctttcgcaactggtaaagcgttctgcgctcgccgacaacgcggctattgtgttgtggcaagcgcagactcaacgtgcgtcttattacgcgtcgcgtgaaaaagacacccccattaaatatgaagacgaaactgttctggcacacggtccggtacgcagcattttgtcgcgccctgatacgctgcattgcagttacgaagaattttgtgaaacctggccgcagctggacgcaggtgggctatacccaaaatttggtcactattgcctgatgccactggcggcggaagggcatatttttggtggctgtgaatttattcgttatgacgatcgcccctggagcgaaaaagagttcaatcgtctgcaaacatttacgcagatcgtttctgtcgtcaccgaacaaatccagagccgcgtcgttaacaatgtcgactatgagttgttatgccgggaacgcgataacttccgcatgcgggttaccgggtgcttttgtctcacagctctcaagattctttccttcatcgtaacattaaatagcctgatgacaatgtgcctaggcgatgatctttttgcaatgaatttcccaggaaagaatgatacagagagacagaaagagagagagagagagactgaaaggcagacagatggaaaacatgcactcatggtggaagccagagtccttgctaacctaatttcagaagtggcataccatgctcccatgagattgtggtgtagcaaggccctctatgatccaccttcaggcagaaatgcaggcatttggagcacctacttgcctgaaccagcatccatctgccaggtgacttcgttagatattccaaccgtaagcgtgcgcaaatcccactggggaaatgcgctaacggcgacgctgcaaacagaaaaacgcccgctatgcctttccctggcgcgtcaggcgggagcagcgaaaaacgccacgttgccctctggaatgcaacaactgaacattgtcccgggtgcgcttccggactggctggttagcacagaggatctgaaaaatgttacccgcgacccattagctgaggccagacgggtgctggtggtggggcagggcggagagccagataaccaggaaatcgctatgctggcagaaaagctgggagccgaagtgggctacagtcgggcgcgagtgatgaacggtggcgttgatgctgaaaaagtgattggtatttccggacatctgctggcacctgagtttcatcggaccaaaaccgtcgattttgcaatcgatgttatggtcgccttcaaccaggcggatgtttttcactttggtgccaattttcagcatcgaagagctacctttcaccttcagatctttaatgatggtaacgctgtcgccgtcagccagcagattgccgttagcatctttaacgatcagctcgtcgctttcctgtgcaggttctgcgtcgttccattcgtaggcacattccgggcagatgtacatgccgttatcttcgtgtattcggagttgcattttgggcagtgtggtaatgacatgtggatttcctcaaaagtcagcagggcaaaagcgccaaaaaacggcagattgccgaaaaaggccgcaattatacacaaaatccctgagtttgtcggggtgaaggcaattctggccaaaggctacgacccggtgaaatggcggaagaaagataaggtgctggacgcagtattgaaagagctggaaagcggtaaatacagcgacggcgataagcatgccttcgaccagatgctgcacagtatcggcaaacagggcggcgatccgtatctggtgatggcggatttcgcagcctatgtagaggcacaaaagcaggtggatgtgctgtaccgcgaccaggaggcctggactcgcgcggcgatcctcaataccgcccgctgcggaagctcgatggaaagcaaacgtctggataatgccgcgctggcggcggggattagccccaattacatcaatgcccacggtaaaccgcagtcgattagcgccgaaaccaaacggcgtttgcttgacgcgatgcatcaacgtaccgccacgaaagtggcggtaacgccagtcccgaatgtcatggtttataccagcggcaaaaaaatgccgatggtggtggagggcagcggcgaatatagctggctgctgaccaccgaagaaggaacgcagtacaaaggccatgtaacggggggcaaagcgttcaatctaccgacgaagctgccggaaggttatcacacgctgacactcacccaggacgaccagcgcgcgcattgccgggtgattgtcgccccgaaacgctgttacgaaccgcaggcgttgctgaataaaccaaagctgtggggtgcctgcgttcagctttatacgctgcgatcggaaaaaaactggggtattggggattttggcgatctcaaagcgatgctggtggatgtggcaaaacgtggcgggtcgttcattggcctgaacccgattcatgcgctctatccggcaatccggagagcgccagcccatacagcccgtcttctcgccgttggctga

SEQ ID NO: 24959 - DNA, 2574 bp, Homo sapiens
  SIMILAR (796)..(1422): 911254mologous to Escherichia coli DLP12 integrase,accession number M27155,Smith-Waterman Score=1001.
atgaccatcatcggtctgtctcccccgctctgggtgtttccatttcgcctgcgtcatttaaacgtgttcagctcaacgaaatgcgctgggtgccgattgctgaagaggatgcggtttctgaaatgtggttggtctggccgaaacatcatgaacaaagtccggctgcgccctacagattatttcggagcgcgaaaatatagggagtatgcggtggttgctgaaaaccagcctgggcacattgatcaaataaagcagaccaacgcgggcgcggtttatcgcctgattgatcagcttggtccagtctcgcgtatcgatctttcccgtctggcgcaactggctcctgccagtatcactaaaattgtccgtgagatgctcgaagcacacctggtgcaagagctggaaatcaaagaagcggggaaccgtggccgtccggcggtggggctggtggttgaaactgaagcctggcactatctttctctgcgcattagtcgcggggagattttccttgctctgcgcgatctgagcagcaaactggtggtggaagagtcgcaggaactggcgttaaaagatgactgccatgctggatcgtattatttcccatatcatacggacagttcgtatgtctggttctgttgccgtgacacgcgccattgccgtgcccggattgctgttattactgattatcgcgacggcataagcctgctcattggggcaaaatcactccccgcttccgtagtgctggaggccttctccggcacctgccagagcgccgactgcaccatcgtgctcgacgcgcggctgccgcaacgcgactggaagtggctggaaaaagcgcctgtcatcaagataccagcggtcagaaacaagcgagtcagatggctggaaaaggaggaagcaaaacgccttattgatgagtgccccgaaccactgaaatctgtcgtcaagtttgcgctggcaactggtctgagaaagtcgaacatcataaatctggaatggcaacaaatcgacatgcagcgacgagttgcctgggtgaatccagaagagagcaaatcaaaccgcgccattggtgtggcgctgaacgataccgcctgtaaagtgttgcgtgatcaaataggcaagcatcacaaatgggtgtttgtacataccaaggcggctaagcgagcagatggaacatcaacgcctgcggtcaggaagatgcgcatcgacagcaagacatcatggctatcagcttgtcgtcgtgcaggaattgaagatttccgtttccatgacctcagacacacctgggcaagctggctgattcagtcaggcgtcccattatcagtgcttcaggaaatgggcggatgggagtccatagaaatggttcgtagagcatgcgaggaaaatagacgacattattgtataaggtaccgagctaccgataacgcctcgctgaacacacagcggcgcgtggcgctggcacaggcgcagcttggcgataccgcagcagcgcagcggacgtttaataagttgatcccgcaggcaaaatctcagccaccgtcgatggaaagcgcgatggtgctgcgtgatgcgatggcggcggacctctatcgccagcaggatcttaacgtcacccttgagcacgattactggggttcgagcggcaccggtggttactccgatctgaaagcgcaacagctagccatgttgcccacggtggatgcgccgtattctgacgggcggatgcttctctctcgccatgtcagtgccgcgttacctgcccgttatatgcaaaccatcgaaaatgctgcgttctgggcgcaaattggtgacaagatggtgaccgtggggaatattcgggccggacaaatcattgccgtggagcccactgccgcaagttattacgcatttaattttggctttggcaaaggttttatcgataaaggtcatctcgagccggttcaggggcgacaaaaagttgaagacggtttgggcgacctcaacaagccgctgagtaatcagaacttagttacctggaaagatacgccggtctataacgcgccgagtgcgggaagtgcgccatttggggtactggcggacaatttgcgctacccgattttgcataaactgaaagacaggttaaatcaaacctggtatcagatccgtattggcgatcgactggcctatatcagcgcactggatgcccaacccgataatggcctgtcggtgctaacctatcaccatattctgcgcgacgaagaaaacacccgttttcgccatacttcgacgaccacatcgggccactttttccggttcgcgggcatcgcgtaccagatcgttaagcagacgaccgttggcactactgtagaaatcactctgcgcaggtacgtcgttgatggcaaccgcattccaccacggcaggatcggcagggcgatgcctttttcggtttcgccacccatacccagcagtggcatcaggtttttaaacgccagcgcgatatccagatcgttaccgccaatacggcaaccactgtgacccagcaggctggcttcacgatcgagacgcgaacgccactgcggccccatcagcagcaatga

SEQ ID NO: 24960 - DNA, 1941 bp, Homo sapiens
  SIMILAR (982)..(1905): 991254mologous to Escherichia coli HI0019 homolog,accession number U82598,Smith-Waterman Score=1600.
atggcgatccacgaaatgatggtggtgacgccggaattacgggccgctattcatgaaaatgtggatgaacaagcactggagcgactagtccggcaacaacacaaggccttaatcaaaaatggcctgcaaaaagtgataagcggtgacacctcctgggatgagtgccacgctggagagcgaagcatgaattatcgctatcgcgccatgacccaggatggtcaaaaattgcaagggatcattgatgctaacgatgaacgtcaggcacgactgcggctgcgtgaagaagggcttttcctgctggatattcgcccccaaaaaagttcgggagtaaaaacacgtcgcccgaggatcagccatagtgaactgacgcttttcacccggcagttggcaaccttaagcgcagcggcattacccctggaagagagccttgccgtaatcggtcaacaaagcagtaataaacgactgggtctgagcgacacgttgcaacgtaccggcccgacattattagcgacagtgtttattgtcgctgtaggtttctggctctggttaaaacgcggcaataaccgccaccgttttcatgccatgttgctgcgcgttgcgctcatcggcccgctgatttgcgccattaacagcgcacgctatctccgcactttaagtattttgcaatccagcggcgtccctctgctggatgggatgaatttgtccaccgaaagcctcaacaacctcgaaattcgccagcgtctggcaaatgcggcagagaacgttcgccagggtaacagcattcatctttcgctggaacaaccgcatttcccgccggcctgccacactgttaaccgccaggaagacatcggccacatggttacctatgaccacctgaaactggccaccgctttccaccaccataataataccgggggtctttttcagtacctctgcttgcgcttgctttcatcctttaatttaaaacagcaagtcgatgaccaaaaaactcatattaaaacctggggctgtcagatgaacgagtacgattcatcgaagatggccgatctgctggatgccacccacggctatcaactgaccgacgtggcggaagaagcggatgtgctgctgctgaacacctgctcaatccgcgagaaggctcaggaaaaagtcttccatcagttgggtcgctggaaactgttaaaagagaagaatccagacctgattatcggcgtcggtggctgcgtggcatcgcaagaaggcgagcacattcgccagcgcgcccactatgtcgatattatttttgggccgcaaacgctgcaccgtctgccggagatgatcaactccgtgcgtggcgaccgcagcccggttgtagatatcagcttcccggaaatcgagaagtttgaccgtctaccggaaccgcgcgccgaagggccgaccgcgtttgtctccatcatggaaggctgcaataaatattgcacctactgcgtggtgccttacacccgtggtgaagaggtaagccgtccgtccgacgatattctgtttgagattgcccagcttgcggctcagggcgtgcgtgaagtcaacctgctcggtcagaacgtgaacgcctggcgtggtgaaaactacgacggcaccaccggatcgtttgccgatctgctgcgtctggttgctgcgatcgacgggatcgatcgtattcgctttaccaccagccatccgatcgaattcaccgacgatatcatcgaagtgtatcgcgacacgccggagctggtgagcttcctgcatctgccggtacagagcggttccgatcgcattctgaacctgatgggccgtacccatacggcgctggagtacaaagcgatcatccgtaaactgcgtgcggcgcgtccagatattcagatcagttctgatttcatcgttggcttcctggcgaaaccaccgaagacttcgagaaaacgatga

SEQ ID NO: 24961 - DNA, 287 bp, Homo sapiens
  SIMILAR (130)..(2): 881254mologous to Escherichia coli similar to Salmonella proline permease,accession number U00006,Smith-Waterman Score=172.
ccgccaggcaggccatgaaggcgatgttctgattctcaaacagcacgccgaggataatcgcaatcacgccgaggatcagtacggcgatttttgatacccgcaacacttcacgttcggtcgcgccttctttgatagacgttagcgtacaagtcatgcgaaaccgcggatgcgcccgccagcgtcagacccgcaaccaccgcgaggatagtggcgaaagcaaccgctgaaataaaaccgaggaacaggttgccgcccactgcattctctcaggaaggccgccagatcgc

SEQ ID NO: 24962 - DNA, 3345 bp, Homo sapiens
  SIMILAR (1973)..(2041): 1001254mologous to Escherichia coli K12 putative general protein secretion protein,accession number AE000409,Smith-Waterman Score=117.
atggatagagcgggggacggacccatccgtccgttgtcaggacctacagacgtgtacggtgacaccgtgtacctccgcgaccccgggccgaaccatggaaaaaccaccaacgggcctttacggttcgtgcccttgctgccctttggtcaacaggtttttccgcgcgtaaccccgaatttctggaatcccgtgtccagtgccgcgttacctgcccgttatatgcaaaccatcgaaaatgctgcggtctgggcgcaaattggtgacaagatggtgaccgtggggaatattcgggccggacaaatcattgccgtggagcccactgccgcaagttattacgcatttaattgtggctttggcaaagcttttatcgataaaggtcatctcgagccggttcaggggcgacaaaaagttgaagacggtttgggcgacctctacaagccgctgagtaatcagaacttagttacctggaaagatacgccggtctataacgcgccgagtgcgggaagtgcgccatttggggtactggcggacaatttgcgctacccgattttgcataaactgaaagacaggttaaatcaaacctggtatcagatccgtattggcgatcgactggcctatatcagcgcactggatgcccaacccgataatggcctgtcggtgctaacctatcaccatattctgcgcgacgaagaaaacacccgttttcgccatacttcgacgaccacatcggtacgcgctttcaataaccagatggcctgggctcgcgtggacaggggatacgcgacactgagcatggtgcagctggaaggctacgtgaagaataagatcaataaccgcgcgaccgaacgtgaagagctgcgggtatcaaaaatcaccgtactgatcctcggcgtgattgcgattatcctcggcgtgctgtttgagaatcagaacatcgcctttatggtggggctggcgtttgccatcgcggcgagctgtaacttcccgatcattctgctttctatgtactggtcgaaactgaccacgcgtggcgcgatgatgggtggctggctggggctgattaccgcagtagtactgatgatcctcggcccgacgatttgggtacagatccttggtcacgaaaaagccatcttcccgtatgaatacccggcgctgttctctatcaccgtggcattcctcggcatctggttcttctcggcaaccgataactcagcggaaggcgcgcatttgcgaccaatacgaaggaaaaaagtgtaccggttcaactacttgcgctcggatggtccgtaccaagggtgggtcagcgaaagattattgatcctgagggcgatatcccctggttgtagcaagctggtgcattttcccacgcttttcgattcgctctatcgtaccctggtaaaagcgggcgaaaagagcgggctgctggccccggtgttggaaaagctggctgattacaatgaaaaccggcagaaaatccgcagcaagctcattcagtcactgatctacccctgtatgctcactacggtggcgattggggtcgtgattattctcctcactgctgtcgtgcccaaaattaccgaacagttcgtgcatatgaagcagcaactgccgctgagtacacgcattcttttaggtctgagcgacacgttgcaacgtaccggcccgacattattagcgacagtgtttattgtcgctgtaggtttctggctctggttaaaacgcggcaataaccgccaccgttttcatgccatgttgctgcgcgttgcgctcatcggcccgctgatttgcgccattaacagcgcacgctatctccgcactttaagtattttgcaatccagcggcgtccctctgctggatgggatgaatttgtccaccgaaagcctcaacaacctcgaaattcgccagcgtctggcaaatgcggcagagaacgttcgccagggtaacagcattcatctttcgctggaacaaccgcattttcccgccgatgatgctctacatggtggcctctggcgaaaaaagcgggcagctcggcacattaatgggtgcgcaatcccactgggaatgcgctacggtgaacgctgcatccaggatacgcccgctatgcctttccctggcgcgtcagccgggagcagcgaaaaacgccacgttgccctctggaatgcaacaactgaacattgtcccgggtgcgcttccggactggctggttagcacagaggatctgaaaaatgttacccgcgacccattagctgaggccaagacggggtgttgttggtggggcaaggccgaaaaagccagatacccaggaaatcgctaatgctggcaaaaaagctggaagccaaagtgggttacagtcgggcgcgagtgatgaacggtggcgttgatgctgaaaaagtgattggtatttccggacatctgctggcacctgaggtgtgtattgttgttggcgcttctggcgcagcagcgttaatggcgggcgtacgcaatagcaagtttgtggtggcgattaatcatgacgccagcgctgcggtattttcacagacagatgttggcgtggttgatgactgaaaagtggtgctggaggcactggtgacaaacattcacgcagattgccaataacgtgttgccggatgatcctgcctacgtgttctggccctggcggacttgtaggcctgataagacgcgtcaagcgtcgcatcaggcgctgaatgtcggatgtggcgtgcggcctacaaatcaaagcaaattcaattggttacgattatcccgtcaaagtaattttttcgctaacgtccagatcccggtattcgtggtggaaagcgccacgacacccgcgattaatcgcattacgcgcatcttcttcatcgcacaccagaccaccggcaatcagcggttggcggattctctctgtcacccagcccagcgctatgtgggcatacagcctggcaggatctcaatacaatccggattcgattgcgcaacttgcttatcaatgttgtgaaacgaaattgaatcaacaataaacaggcgatgaatacagaaaaaaccttccgctcttgccgctttcaacattgaggctttggtactgataatgccgtccgcctcggtcaccagtttcaaaaactgaataacgacttctttatttgacgcgccttccagcaaatcaacatgaataaaagcatatttcccggcgttcttaatctttttaacgatattactgatggtgcagatattgccgtacaacacggaaataaattggcattcagaatcgattgccagttgcaggctggcattatctttaacggcagcaatcaccggattctggcggagcaggtgtaagaggggcat

SEQ ID NO: 24963 - DNA, 828 bp, Homo sapiens
  SIMILAR (49)..(495): 921254mologous to Escherichia coli ORF2 protein (AA 1- 166),accession number X13583,Smith-Waterman Score=665.
atgattgaatgtttcctgaggtttcccaagaagcagaagctgctatgcttcctgtacagcctgcagaactcatacttacagcgcagaaaaacattaacccgggctctggcaaaactcgcaagagcaacatcaaatgaaaaattaagtcaggcttttcatgcgcacctcgaggaaactcatggacagattgaacgtattgatcaagttgtggagtccgaatcgaacctgaaaattaagcgcatgaaatgtgtggcaatggaaggtcttattgaagaagctaatgaggtcatcgaaagtaccgagaaaaacgaagtgcgtgatgccgcactgattgccgcagcacagaaagtcgagcattatgagattgccagttacgggacattagcgacgctggctgaacaattaggttaccgtaaagcagcgaagcttctgaaagaaaccctggaagaagaaaaggccaccgacatcaaactgactgatctggccattaataactcattttataaagaggacattttcatgaatcgtattgaacattatcatgactggttacgtgacgcccacgcaatggaaaagcaagccgaatctatgcttgaatccatggccagccgtatagataattatcctgaactacgcgctcgtattgaacaacatcttagtgaaaccaaaaaccagattgttcaactggaaactattcttgatcgtaatgacatttcacgttcagtcattaaagattccatgagtaaaatggctgcgcttgggcagtcaaccgctgacacaacaaagaactcaacacacagacagagcaacacacgacaaggaaactga

SEQ ID NO: 24964 - DNA, 322 bp, Homo sapiens
  SIMILAR (216)..(296): 561254mologous to Rattus norvegicus muscarinic acetylcholine receptor,accession number M22926,Smith-Waterman Score=76.
tggcataattggtttgcatttacaacagcaagaagcggtagcggttgcgatcgtgcggggcgcaacaagaatgctttttgcaacgctggtggcggttgccgctggagaacgacattatcaaagatgggcggattgttgatgcgcagcagctggctaaaacgttgttaccgtggagtcgcgaactgccgcagcgtcatcacattatgttggcgtttcccgccagtcgcacattacagcggtcatttccgcgcccgtcgatgtcccttggtgagcgggagcaaacggcctggctgtcagggacgatggcccgcgagctggatat

SEQ ID NO: 24965 - DNA, 973 bp, Homo sapiens
  SIMILAR (2)..(754): 901254mologous to Escherichia coli NADH-dependent nitrite reductase (nirB) (AA 1-839),accession number X14202,Smith-Waterman Score=1164.
cagcaaaaacacccttgagattgtgcaggaaggtgttgaagcgcgtaaaaccatgcgttttgccgacggcagcgaactggaagtcgactttatcgtcttctctaccggtatccgtccgcgcgataagctggcaacccagtgtggtctggacgttgctccgcgtgggggtattgtcattaatgattcctgccagacttccgatccggatatctacgccatcggtgaatgcgcaagctggaacaaccgtgtatttggtctggtagcacctggctacaaaatggcgcaggtcgccgttgaccatattctcggtagcgaaaacgcctttgaaggtgctgaccttagcgccaagctgaaactgctgggcgtagacgtaggcggtattggtgatgcgcacggtcgcacgcctggcgcacgtagctacgtttacctcgacgaaagtaaagagatctacaaacgcctgattgtcagcgaagacaacaaaaccctgctcggtgcggtactggtgggcgataccagcgactacggtaacctgctgcaactggtgctgaacgctatcgaactgccggaaaacccggattccctgatcctgccagcacactcgggtagcggcaagccgtctatcggggttgataaactgccggacagcgcgcaaatctgctcctgcttcgacgtcactctgcttgtgctctggcagcgggcgaatcacaatcttcttgcccggctggttgagtgccgaaatcggggtaatacaggccagaccattcttgccgttcatgttcagaccgtcggaaccgcacacaccttcacggcaggagcggcggaacgacaggctgggatctttctcttttagctggataagcgcatccagcagcatcatgtcgcgaccttcatccgcttccagggtgtaatcctgcatacgcggagcatcatcaacatccgggttatagcgataaattgaaaactcgagtctcat

SEQ ID NO: 24966 - DNA, 574 bp, Homo sapiens
  SIMILAR (480)..(572): 1001254mologous to Escherichia coli succinate dehydrogenase large subunit,accession number J01619,Smith-Waterman Score=176.
gtttcgcaacttgataggagacttcggtcatgttgccgtagttgccagagaatttgatgctgtcgaacgggaccatcatcgctgcggtcgctttgttcagttcttcgactttagtgccatccgggagcgtgacggtgtaacgcccgctttttgatgactgggtttcaaagaagcgaccgacttcagaacttggtgatgcggtagtcgcaacacccgggatctcaactttcttcgcggcttcgccaccggcagccagagctgcacgtcctgcttcggaatctgccgggatcacatccgggctctggacgatacgtttcttagcatcttttttatagatgaatgcagtaatacgctggttgccgccctggttggcatcgatttgacgaacgatgtagaaagagtaggcacctttcgcttttgccgctttggtgatggcatcattgacttctggctggctacgatagaagcctgtcgtgctcgagagccgtggcgcgcatagccgcttcgacttcccggatcgtgatgatgaaaactggctgtgccactccctgtatctgccagagtcggaatccat

SEQ ID NO: 24967 - DNA, 639 bp, Homo sapiens
  SIMILAR (301)..(483): 961254mologous to Escherichia coli pot. PBP 1A,accession number X02164,Smith-Waterman Score=306.
atgctcatacttccggctttggagacaaagaatcagaaaaagtcagccctcagcgaaagctgcatgctatgtcaagaactttcttctgggagaattctgaggtgtcatggaaacttaggatctcctacatatgcttttcaaatatctgctattgacagagtgaacttcgccctggtagtggggttacacctaagacatgattaccgcaatgagaaacttggacggtctggtagacattatcaggcgccagtaggaaaccgcagcagtgctgatggcatgcatcgggacccatgttctcaattggatatctgttgcattctgctgggagcaggctcgatttatggcctataccgctacatcgagccacaactgccggatgtggcgacattaaaagatgttcgcctgcaaattccgatgcagatttacagcgccgatggcgagctgattgctcaatacggtgagaaacgtcgtattccggttacggacggaccagtgatgtggtttccattcatgataataacgacttgtgtaaaaggaaactttgctttaaataatcagtttagagaagatatgttaaattacaatacagagggtatttatgggaaaaacgtgaatttcgaaaacaataaacaaacataa

SEQ ID NO: 24968 - DNA, 2839 bp, Homo sapiens; identical to SEQ ID NO: 13601
  SIMILAR (2515)..(1631): 821254mologous to Homo sapiens putative p150,accession number U93572,Smith-Waterman Score=1208.

SEQ ID NO: 24969 - DNA, 1452 bp, Homo sapiens; identical to SEQ ID NO: 4039
  SIMILAR (514)..(1065): 971254mologous to Escherichia coli pot. PBP 1A,accession number X02164,Smith-Waterman Score=938.

SEQ ID NO: 24970 - DNA, 1326 bp, Homo sapiens
  SIMILAR (1326)..(802): 971254mologous to Escherichia coli K12 putative dehydrogenase,accession number AE000435,Smith-Waterman Score=888.
gttccggctgtaccggcaattccgcagcagtaattcacggccaaaacgccggagaattttcactccggcgttttcatgttgcaacaacatcgacttgatatggccgatggcgcgcgtcgggttcagccccttcggacatacactgacgcagttcatgatgctgtgacagcggaatacgctgaatgcatcactcaaaccgtcgaggcggctgtcagtctcggtatcacggctatcaatcaggaaacgatatgccgctaacaagcctgccgggccgataaacttatcgggattccaccagaaagacggacaagaggttgaacaacatgcgcagagaatacattcatacagcccgtcgagtttttcgcgctgctctggcatctgtaaatgctcgcgagctggcggattttgtccattattcaacaggtaaggcttaattttctcatattgcgcatagaattgtcccatgtctaccaccaaatcgcggatcaccggtaaacctggcagcgggcgaatcacaatcttcttgcccggctgcggtttaccgccggaaagggtgtgaaaacgttttggacgcttaatacgcgtcatatacttggaccacacgcgttctgcttctgtcactggctcacgttcgccacggcatactgctacgaagagtttctcttcctcggtaaccggctcgcgtttgccaagatccaactcattgaaggcataaccatgacgctcaagcagttgtgcctctcgcgacatagcgagttttctatctgtgccagcggctcgttgtggtaatgtatgcttaatcatcgacatatcgaccatggtgatcggcgtggaacgaatggcgacgatcagcgggttagtgcctatgcgacactcttttggcacccacggcggcattacggcgatggagttggtccagcaaatgccaatatagcctttttccgccgcctgccagccgttactgccgccgcgcatccagtggttggcattacgtagtgccaccagaccaataccgtgatcggcagccagttcaatggcgcgatccatcatctttttcgctgtcaggttaccgatcgaacgctgggcgtcccactgttcaattgcgccgaggctggttatacgtttgggttgggcatcaggaatgatatcgccgttttccagttgttgaatgaaacgagggaaacgattaacgccgtgagaataaacgccggattcggtggtgcgggcgaacatctctgcacaggcgtcagccgtttcgctgtcaacgccgcgtgaaattaagacccgattaaaggctgcttttaactgctcaaatgtcactttcat

SEQ ID NO: 24971 - DNA, 1540 bp, Homo sapiens
  SIMILAR (460)..(356): 971254mologous to Escherichia coli Phosphoglycolate phosphatase (EC 3.1.3.18),accession number D90769,Smith-Waterman Score=164.
ctatacgttttgccagaaggccgataaccgcggccaggtgagtgattccgttgaaggcaacagtaattgcgccccggttaagcccgcgccgatccccaccgagcgcataccgctggcgttaatggcgtcaatgcccgcctgcgcatcttcaatgccgatacatgcctgcggcggcacgcccagccctgcacaggcggcgagaaagatttccgggtccggtttcgagtttttaagttgggaagcatccgcgcagaaggtgaaaaactcgcgcagctccagcgccgctaaaatcgtcggcgcattcagggagacagaagccagcccaaccgagatgtgctgtgcccgaagatctgccaagcaaagagcgaatgccgggtagaacagcgttgaccgtcaactcgcgtagtgagtggacatagagcagatttttgcgatacgccagttgcgccctctcgtctgatgtaatcaactccgccagcaactgataaaccttcatcgtttctgccggttcggcatcgccgctatcgctgatatacccttcatcacgcagtgtcagcaccagagaactgaacaccgccttgtcgaagaactccggcgcgttgatgccgtgcagcacggagagacgttgcgcgacggtgcggctctctttctccaagctaccgcggttgatcgacgggttggcactcaacaaccagaaggtgatggcataacgttgcagcgttttcgccgccccttcggccaagaactggtacctcccggggaaagtggccattcctgggaaaattgccgccttaaccaagggcgcccaactttgggcaatgtgttgccaaggagggtataacacccttggccagcagcccccacgaaaatgaccggtcatggctttggttgcagaaatcgccgggctcttatcgccgaacacttcacggatagctgccagctctttcacgtcgcccaccggagtcgaagtaccgtgggagttcaggtaatcgattggggtatcaacgccatgcatcgccatcttcatgcagcgtactgcgccttcgccagacggagcaaccatgtctgcaccatcagaggttgcgccgtagccaacgatttcagcatagatgtgagcaccacgcgccagcgcgtgttccagctcttcaaccactaccataccgccgccgccagcgataacgaaaccgtcacggtgagcgtcgtaagtacgggaggctttttcccggggggtcgttgtatttagtagacagcgcaaccattgcgtcgaattcgcaagccattttccaacacaaaaaacttttttccttttaccccggcccaaaatccaccagcggacggctgatatgccaggcttcatcggcggtgaccagcagcatttcaaaacggtcactcctttcatgccatccttgattagattgatgaagcccactttcttgccgtggcggaggattttcttgcgcatcagttccggcgcgctgccatcaatggtgaacaggtcacgcgccacacccaccgccagctccgggtagccgctaaacat

SEQ ID NO: 24972 - DNA, 1350 bp, Homo sapiens
  SIMILAR (298)..(858): 981254mologous to Escherichia coli ATH1 protein,accession number D90769,Smith-Waterman Score=960.
atggcacgagactccgtgctgctactggaaaaactcggctgtcgcgtaaatttcccggagaaacagggatgctgcggtcagcctgcgatcaatagcggttatatcaaagaagcgattccagggatgaaaaatctgatcgccgcactggaggataacgacgatcccattatttcaccggctggctcttgcacctatgccgtaaaaagttacccgaacttgaagcttgatgaatcacttgcgcaacttggcttgcgacctacacaaggccgttggtggttgacttgcgaaggccggcgattaggtctggcgaaatacaaagcggcggcggggaagcaaaccatactgctggattattcacgcgcagaagtgaacgagatgcagatcctcaaacaagctgatgtggtgatgctcaattacatgctgccggagcagttctcagcggcatcgtgtcttgccaatctgcaattttatgaaccgcgcactattcacgactcgtcattaagtaaagcaatccacggcattgttgccgcacgctgtggcctgctgacccaaagttatcagttctggcgcgaggggactgaaatcgatcttggtgctgatccgcatagttgtgatgatggtatccatgctgccgcaactggcgctatctggctgggggcgattcagggttttgccggggtgagcgtgcgtgacggtgaattgcatctcaatccggcgttacctgagcagtggcaacagttgtctttccctctgttctggcagggctgcgaattacaggtcactcttgacgcgcagcgtattgcgattcgaacttctgcgcccgtttcactgcgtttgaacggtcagcttataaccgttggcctgaacgcatctggtttttccggtaggactgaactgaaacctgacaaggcggtcaattttcggatcctggatggctgtaatcaaccgataccgcgcatctgcatttcccaggcgtggcagcagattgccgctgaaattggcatcagcattgatgcgcagtttaacgaatccctaaaagggatcagccgcgatgagtctctgccggcgcattctgcaacaccggggcgcaaaaggacgtggccggaactctttaacctccgccaggagagggcgcaactggcgtatcgcaaaaatctgctctatgtccactcactacgcgagttgacggtcaacgctgttctacccggcattcgctctttgctggcagatctccgtgcacagcagatctcggttgggctggcttctgtctccctgaatgcgccgacgattttagcggcgctggagctgcgcgagtttttcaccttctgcgcggatgcattcccaacttaa

SEQ ID NO: 24973 - DNA, 1198 bp, Homo sapiens
  SIMILAR (10)..(909): 791254mologous to Escherichia coli pot. PBP 1A,accession number X02164,Smith-Waterman Score=1148.
ctcggtacccgctacatcgagccacaactgccggatgtggcgacattaaaagatgttcgcctgcaaattccgatgcagatttacagcgccgatggcgagctgattgctcaatacggtgagaaacgtcgtattccggttacgttggatcaaatcccaccggagaaggcgagaagcctttatcgtgacagaagacagccgtttctacgagcatcacggcgttgacccggtggggatcttccgtgcagcaagcgtggcgctgttctccggtcacgcgtcacaaggggcaagtaccattaccccagcagctggcgagaaacttcttcctcagtccagaacgcaccgctgatgcgtcagattaaagaagtctttctcgcgattcgcattgaacagctgctgacgaaagacgagatcctcgagctttatctgaacaagatttaccttggttaccgcgcctatggtgtcggtgctgcggcacaagtctatttcggaaaaacggtcgaccaactgacgctgaacgaaatggcggtgatagccgggctgccgaaagcgccttccaccttcaacccgctctactcgatggatcgtgccgtcgcgcggcgtaacgtcgtgctgtcgcggatgctggatgaagggtatatcacccaacaacagttcgatcagacacgcactgaggcgattaacgctaactatcacgcgccggagattgctttctctgcgccgtacctgagcgaaatggtgcgccaggagatgtataaccgttatggcgaaagtgcctatgaagacggttatcgcatttacaccaccatcacccgcaaagtgcagcaggccgcgcagcaggcggtacgtaataacgtgctggactacgacatgcgccacgctatcgcggcccggcactatgtgctgtggaaaccaacggcaaacatccgcgcccgttataaagcacagggaattgagttgcctgcggtagtgccggctggaccggataacccaatgggccatcatgcgattcgtctggcggcctatggcggcgtttatttgcttcatggtacgaacgccgatttcggcattggcatgcgggtaagttctggctgtattcgtctgcgggatgacgatatcaaaacactctttagccaggtcaccccaggcaccaaagtgaatatcatcaacactccgataaaagtctctgccgaaccaaacg

SEQ ID NO: 24974 - DNA, 3290 bp, Homo sapiens
  SIMILAR (1174)..(1260): 721254mologous to Escherichia coli succinate dehydrogenase large subunit,accession number J01619,Smith-Waterman Score=97.
tcctgcagttggcagtttctaggtctaaaatctgagcaagcgtgtacaacagctgcgtatattgcaacagccgtatgctgtttggtctggcacaacagggtaatgcgccaaaagccgtggccgtctgtcgataaacgtggtgtaccagtgcagactgaggattggcgctggtgacgtggcgcatgtcgtagtccagcacgttattacgtaccgcctgctgcgcggcctgctgcactttgcgggtgatggtggtgtaaatgcgataaccgtcttcataggcactttcgccataacggttatacatctcctggcgcaccatttcgctcaggtacggcgcagagaaagcaatctccggcgcgtgatagttagcgttaatcgcctcagtgcgtgtctgatcgaactgttgttgggtgatatacccttcatccagcatccgcgacagcacgacgttacgccgcggacggcacgatccatcgagtagagcgggttgaaggtggaaggcgtgttcggcagcccggctatcaccgccatttcgttcagcgtcagttggtcgaccgtttttccgaaatagacttgtgccgcacaccgacaccataggcgcgtaaccaagtaaatgcatcagcgtgcgttctggactgaggaagaagtttctcgccagctgctgggtaatggtacttgccccttgtgacgcgtgaccggagaacagcgccacgcttgctgcacggaagatccccaccgggtcaacgccgtgatgctcgtagaagcggctgtcttctgtcgcgataaaggctttcaccatctccggtgggatttgatccaacgtaaccggaatacgacgtttctcaccgtattgagcaatcagctgcccatcggcgctgtaaatctgcatcggaatttgcaggcgaacatcttttaatgtcgccacatccggcagttgtggctcgatgtagcggtataggccataaatcgagcctgctcccagcagaatgcaacagaccgtcagagtgacgggtgataaggagatcatcacaatggcatttaagatctggcaaattggtttgcatttacaacagcaagaagcggtagcggttgcgatcgtgcggggcgcaaaagaatactttttgcaacgctgcagccggttgccgctggagaacgacattatcaaagatgggcggattgttgatcgcagcagacctgcaggatccggtgcaggatatggaaatgtggcagttccacccgaccggcattgcttgcggggcgtactggtcaccgaagttgccgtggtgaaggcggttatctgctgaacaaacatggcgaacgttttatggagcgttatgcgccgaacgccaaagacctggcgggccgtgacgtggttgcgcgttccatcatgatcgaaatccgtgaaggtcgcggctgtgatggtccgtgggggccacacgcgaaactgaaactcgatcacctgggtaaagaagttctcgaatcccgtctgccgggtatcctggagctttcccgtaccttcgctcacgtcgatccggtgaaagagccgattccggttatcccaacctgtcactacatgatgggcggtattccgaccaaagttaccggtcaggcactgactgtgaatgagaaaggcgaagatgtggttgttccgggactgtttgccgttggtgaaatcgcttgtgtatcggtacacggcgctaaccgtctgggcggcaactcgctgctggacctggtggtctttggttcggcccgacaggttctgcatttgcaagagtctatcgccgagcagggcgcactgcgcgatgccagcgagtctgatgttgaagcgtctctggatcgcctgaaccgctggaacaataatcgtaacggtgaagatccggtggcgatccgtaaagcgctgcaagaatgtatgcagcataacttctcggtcttccgtgaaggtgatgcgatggcgaaagggcttgagcagttgaaagtgatccgcgagcgtctgaaaaatgcccgtctggatgccacttccagcgagttcaacacccagcgcgttgagtgcctggaactgcataacctgatggaaacggcgtatgcaacggctgtttatgccaccttccgtaccgaaaggcgtggcgcgcatagccgtcttcgacttcccggatcgtgatgatgaaaactggctgtgccactccctgtatctgccagagtcggaatccatgacgcgccgaagcgattacaccctggaagcggatgaaggtcgcgacatgatgctgctggatgcgcttatccagctaaaagagaaagatcccagcctgtcgttccgccgctcctgccgtgaaggtgtgtgcggttccgacggtctgaacatgaacggcaagaatggtctggcctgtattaccccgatttcggcactcaaccagccgggcaagaagattgtgattcgcccgctgccaggtttaccggtgatccgcgatttggtggtagacatgggacaattctatgcgcaatatgagaaaattaagccttacctgttgaataatggacaaaatccgccagctcgcgagcatttacagatgccagagcagcgcgaaaaactcgacgggctgtatgaatgtattctctgcgcatgttgttcaacctcttgtccgtctttctggtggaatcccgataagtttatcgggccgggaagcttgttagcgggatatcgttccggattgattgccgggataccgaaatgctcagctcggtacctgtctggagaaaagcgaagtgtggcgtggcagcagattgccgctgaaattggcatcagcattgatgcgcagtttaacgaatccctaaaagggatcagccgcgatgagtctctgcggcgcattctgcaacacgggggcaaagagggcgactttaactcgcaggagagggcgcaactggcgtatcgcaaaaatctgctctatgtccactcactacgcgagttgacggtcaacgctgttctacccggcattcgctctttgctggcagatctccgtgcacagcagatctcggttgggctggcttctgtctccctgaatgcgccgacgattttagcggcgctggagctgcgcgagtttttcaccttctgcgcggatgcttcccaacttaaaaactcgaaaccgggcccgggaatctttctcgccggctgtgcaaggctgggcgtgccgccgcagggctgtatcggggttggagattcccagcggggcttggagcgcttacgcccgcggatgccccctggacggggaaagagaatggccaatataagtccataa

SEQ ID NO: 24975 - DNA, 2235 bp, Homo sapiens; identical to SEQ ID NO: 10825
  SIMILAR (491)..(462): 901254mologous to Escherichia coli dfp (CG Site No. 18430),accession number L10328,Smith-Waterman Score=47.

SEQ ID NO: 24976 - DNA, 1014 bp, Homo sapiens
  SIMILAR (19)..(618): 861254mologous to Escherichia coli phosphomannose isomerase,accession number M15380,Smith-Waterman Score=867.
atggattcttatgtcgatcaactgcaagcgcagggcggaagtatgatcatgctggcgaaaggcaaccgcagccagcagggtgaaccgtggcaaacgattcgtttaatttctgaattttacccggaagacagcggtctgttctccccgctattgctgaatgtggtgaaattgaaccctggcgaagcgatgttcctgttcgctgaaacaccgcacgcttacctgcaaggcgtggcgctggaagtgatggcaaactccgataacgtgctgcgtgcgggtctgacgcctaaatacattgatattccggaactggttgccaatgtgaaattcgaagccaaaccggctaaccagttgttgacccagccggtgaaacaaggtgcagaactggacttcccgattccagtggatgattttgccttctcgctgcatgaccttagtgataaagaaaccaccattagccagcagagtgccgccattttgttctgcgtcgaaggcgatgcaacgttgtggaaaggttctcagcagttacagcttaaaccgggtgaatcagcgtttattgccgccaacgaatcaccggcgttttatatttcgccaaattacctctcgcacctgtttcaaaaaacgggggccattggttttaacgaatacctgaatcacacgcgactggagcacgctaagacgttattgaaaggctatgacctgaaggcacaacttttccagggtaccgagatgatgtgtatcagtcaatattaccgtccccgccatgtggcaaatggaaggtcacggcaaactgcaatataccgacgaaggttttcgccaacatcgcccgtaacggatcgagcagctcctggctgtgcagcggatattacgctctacgagccgcgcggcgactaccagataatcgttgagagtatctggaagtcgggcgcaatccagagagcttttatcgctaaatcagggggatttgctgtggtaatgccggatgccattctgaagcatccggcatgggagatttaa

SEQ ID NO: 24977 - DNA, 3747 bp, Homo sapiens
  SIMILAR (101)..(295): 901254mologous to Escherichia coli O157:H7 evolved beta-D- galactosidase, alpha subunit; cryptic gene,accession number AE005537,Smith-Waterman Score=308.
ccggttgccttttaagtatccagttaaagtaaagcctttacctgccccttttagtaaaattttattaaactccccagcaattccacaacttcccatcaccatgaatggttccgatttctctctaccggaaggccctatgaatcggtgggaaaacattcagctcacccccgaaacccgacttgcgccgcgtgcgtactttttttcatatgattctgttgcgcaagcgcgtacctttgcccgcgaaaccagcagcctgtttctgcccttaagcggtcagtgggaatttccacttttttgaccatccgctgcaagtaccagaagccttcacctctgagttaatggctgactgggggcatattaccgtccccgccatgtggcaaatggaaggtcacggcaaactgcaatataccgacgaaggttttccgttccccatcgatgtgccgtttgtccccagcgataacccaaccggtgcctatcaacgtattttcaccctcagcgacggctggcagggtaaacagacgctgattaaatttgacggcgtcgaaacctattttgaagtctatgttaacggtcagtatgtgggtttcagcaagggcagtcgcctgaccgcagagtttgacatcagcgcgatggttaaaaccggcgacaacctgttgtgtgtgcgcgtgatgcagtgggcggactctacctacgagaaagaccaggatatgtggtggtcagcggggatcttccgcgatgtttatctggtcggaaaacacctaacgcatattaacgatttcactgtgcgtaccgactttgacgaagcctattgcgatgccacgctttcctgcgaagtggtgctggaaaatctcgccgcctcccctgtcgtcacgacgctggaatataccttgtttgatggcgaacgcgctggtgcacagcagcgccattgatcatttggcaattgaaaaactgaccagcgccagtcttgcttttactgtcgaacagccgcagcaatggtcagcagaatccccttatctttaccatctggtcatgacgctgaaagacgctaacggaaacgttctggaagtggtgccacaacgcgttggcttccgtgatatcaaagtgcgcgacggtctgttctggatcaataaccgttatgtgatgctgcacggcgtcaaccgtcacgacaacgatcatcgcaaaaggcgcggcgttggaatggatcgcgtcgagaaagatctccagttgatgaagcagcacaatatcaactccgtgcgtaacgctcattttgtcgattatgtgaacagcggtttttataacaacactacctttcaccgcgtcattcctggctttatgattcagggcggcggtttcaccgagcagatgcagcagaaaaaaccaaacccgccaatcaaaaatgaagccgataacggcctgcgcaacacgcgtggcaccatcgcgatggcacgtaccgctgacaaagacagcgccaccagccagttctttatcaacgttgccgataacgccttccttgaccatggtcagcgtgatttcggttacgcggtatttggtaaagtggtgaaaggcatggacgttgccgataagatttcccaggtgccgactcatgacgttggtccgtaccagaatgtgccgtcaaaaccggcttctgttcgttatgacgttaacgatcaacgtctggatatagacgttcctcaagcctgggtaatgaaaaattaccaaaactatgttgatccatcgttatgggaaaacggcattaatgcggccatgttgtcatacaacctcaacggatatcatagtgaaacccctggtcgaaaaaatgaaagcatttatgctgcatttaacggtgggatgaatttaggtgcatggcgactgcgtgcctcgggcaactacaactggatgaccgattctggcagtaattatgattttaagaatcgcaagccggggcgtcggcgttatctgacgctggtgatgatctttattacggtagtcatttgttatgtcgaccgcgccaacctggccgtggcttccgcccatattcaggaagagttcggcattaccaaagcggaaatgggctatgtattttcggccttcgcctggctttatacgctatgtcagatccccggcggttggtttttagatcgcgtaggttctcgcgtgacttattttattgcgatatttggctggtcagtggcgactttattccagggctttgccacgggcttaatgtcattaattggtctgcgcgcgataaccggtattttcgaagcgcctgctttcccgaccaataaccggatggtgaccagctggttcccggaacatgaacgcgcttctgccgttggtttttatacgtctggtcagtttgtcggtctggcgtttctgacgccgctgctgatctggattcaggagatgttgagctggcactgggtgttcattgtcactggtggtatcggcattatctggtcgctgatttggtttaaggtttatcagccgccgcgcctgaccaaaggtatcagcaaagctgaactggattacattcgtgatggcggcggtctggtggatggtgatgcgccgggacagctgccagaacgaatgagcccagctctcctgcccgcagccagccgcgtgtgggtgcaactggcgaccagccactggaatgggaagatgcgcggttttggttttgttcagttcaaaaacctcctagaagcaggtaaagctctcaaaggcatgaacatgaaagagataaaagaccatcgaccctacgtcgttggatttgccgccgatacaaataatgtggaagaatacgcccggcaaaaacgtatccgcaaaaaccttgatctgatctgcgcgaacgatgtttcccagccaactcaaggatttaacagcgacaacaacgcattacaccttttctggcaggacggagataaagtcttaccgcttgagcgcaaagagctccttggccaattattactcgacgagatcgtgacccgttatgatgaaaaaaatcgacaactggctccgggtgacactacgctggttccgaccgggctggcgattcatattgccgatccttcactggcggcaatgatgctgccgcgctccggattgggacataagcacggtatcgtgcttggtaacctggtaggattgatcgattctgactatcagggccagttgatgatttccgtgtggaaccgtggtcaggacagcttcaccattcaacctggcgaacgcatcgcccagatgatttttgttccggtagtacaggctgaatttaatctggtggaagatttcgacgccaccgaccgcggtgaaggcggctttggtcactctggtcgtcaaaaaacaaactgcgaaaaggaaccgtcgcgaggaaatacttcagtctctggcgctgatgctggaatccagcgatggaagccaacgtatcacgacgcacccatcggcacgctttctggtggcaatcagcaaaaagtggtgatcggtcgttgggtctatgctgccagccagattttgttgctcgacgagccaacgcgcggcgtcgatatcgaagccaaacagcagatttaccgtattgtccgtgagctggctgccgaaggaaaaagcgtggtgtttatctccagtgaagtggaggagttgccgctggtgtgtgaccgcatcctgttattacagcacggcacgttctcgcaggagtttcacgctccggtcaatgtggatgagctgatgtccgccattctgtctgtgcactga

SEQ ID NO: 24978 - DNA, 2646 bp, Homo sapiens
  SIMILAR (703)..(1230): 1001254mologous to Escherichia coli K12 putative enzyme,accession number AE000325,Smith-Waterman Score=922.
atgcccatagaagaaccggcgctgcgcagctggcagcgcccgttccttaaatgggctggcggcaaatattcgctgctgccggaactggatcgtttgatccccgcaggtaaacgccttattgagccttttgtgggtggcggctcggtgttccttaactcagacaagcacgaacgcttccttctggctgacgtcagcgctgacctgattaacctgtatcagatgctggcggtggtccccgattcggtgatctatgaggcaatgaaggcattcaggcatcttaatgatgccgaaaactatacgttaattcgtgaagcattcaacgcgcagcggctggatgcggtcgagcgtgcagcagcattcctttacctcaatcggcactgcttcaacggcctgattcgttacaacctggacgttttttttaacgtcggctttgggaagcataagcaaatgacaaataatgaaagcaaagggccgtttgaaggcttattagttatcgatatgacacatgtccttaatggacctttcggaactcaacttctttgtaatatgggcgcaagggtaattaaagttgagccgccgggtcatggtgatgatacccgcacatttggtccctatgtggatggacagtcactctattacagttttattaatcatggcaaagagagtgtggttcttgatttaaagaatgatcacgataaaagtttcggacataccggtccgctaaaagatgctcctgcctacgataccatcattcaggcaatgagcgggataatgatggaaacaggatatcctgatgctccgccagtgcgcgttggtacatctcttgcggatctatgcggcggtgtctatttattcagcggaatagtgagtgcactttatggccgcgaaaagagccagagaggggcgcatgtcgatatagcgatgtttgatgccacgctgagttttctggagcatggtctgatggcatatatcgcaactgggaagtcaccacaacgtctgggaaatcgccatccctacatggcaccttttgatgttttcaatactcaggataagccgattacgatttgttgtggtaatgacaagcttttttctgcgttatgccaggcactggagcttacggaactggttaatgatccccgatttagcagcaatattttacgcgtacaaaaccaggctattcttaaacaatatattgagcggacgttaaaaacgcaggcagctgaagtttggttcacgccattctccaacaagtacaatgggcatcgtattgcccgaacagataaagctagcatgccaacggtatacagcgagtcgctctttgtggaggggatcatccgagcgtctacgtcaatgaccacaaagcagggaccttcactgcggaccggaagaacgctgagaaagttctgtccactctcggagactgcagcaacgactgatagtagtatcttccccagcaaattcaccccgacagctagcaggctgccggggttttcttttatcaggagcccgaaaatgacccaatccgtgttgctgccaccggggcctttcacccggagacaagcgcaagcgttcactaccacgtacagcaatatcacactcgaagacgaccagggcagtcacttccgtctggtggttcgtgatactgaaggccggatggcatccgtacagacacggccacccgctgatcgcgaagcatttacccgcattcacctccccgaacacactttatatccccatacgccagccatcgccgctggcgtttttattgacggagacatacccatgacaacacagacgcagcacgacctcgcacccgctaaccaacccgaatttgaactgaccgtcacgccggtccccgatgaacagcgtatcgatttctggccacagtactttggcgctatcccgcagtggctactcctggagccgcatatcttcgcctggatggaccgcttctgtgagggctacagcggtggtatctggtcgttctacaccctcagcaatggcggcgcatttatgtcccccgagcctgacaacgatgagacatggcgtctgtttaactgcctgaacgccaccatgccgccgtacagaatgacgtgcgggacggtgatttatgctatccagatgagtatcttcctcgcccgcatctcccgtggtcgtactgtgcgtgaactgtgcttcggcatggtgctggggctgacagcgtcaacctggatcctgtggactgtactcggtagtaacactctgctgttgatagataaaaacatcatcaacattccaaatctgatcgaacagtacggtgtggcgcgcgccatcattgaaacctgggccgctctgccactcagcaccgccaccatgtggggcttcttcatcctctgctttattgccaccgttacgctggttaacgcctgctcttataccctggcgatgtccacttgccgcgaagtacgcgatggtgaagaaccacctctgctggtgcgtatcggttggtcaattctggttggcattatcggtattgttctcgtggcgctcggcggcctgaaaccgattcaaaccgccattatcgccggaggatgcccgctgttcttcgtcaacattatggtgacgctctcctttattaaagacgcgaaacagaactggaaagattaa

SEQ ID NO: 24979 - DNA, 2935 bp, Homo sapiens
  SIMILAR (948)..(19): 1001254mologous to Escherichia coli K12 putative ATP-binding component of a transport system,accession number AE000350,Smith- Waterman Score=1568.
ttaggtttttgtccccctcccaagatcaacgaaaccgccggtattgcccagcgtaaacgaagcatcccctccccctgttttcaccagcgtcatcgcgtcgtcagactgtgggctgacgccggtatcctgaacaaagattttaaaattaccagtggcgttgttgttgacgaccagttgatcgccccgggagcctgcaacgttggtatgcaggtagaaattaccgctaccggaaagttcattggttgtcagcgtattgtagataccgttagttgtggcaggcgctgctgtttgtgctgacaaataaacatcaccgtcgttgagtagcaaactgtttactctatattcgcagttgctggtacctgcacaggaattattgctgttaagccagacactgccccggctggcagccgtcaggtcggcaagcgtggtatcgacgccatttcccagagtcaatgtcgcgctatcggtaatccggaccgccccttcgagtttaactggcgtaacattatcccgtggcgtcattaacgacaggcttcctgtcgcgccactgaccgatgcatccgccagcgtacctgcgtagacgattgccgtaccgccagcgacctggagatcttctgcccgggccagagcctgaaactcatcttttgaccgcccaagggtatattgcccgccagagttaacctttgtggcggagtcctgacccaggttttgcattgccccacccttgccaaccgtggagtcgcgagcttcggtacctgctaataccaataaattaccgccattttccagcaacatattggtcgctaaattgccggaaatggaaaaagtaccgtactgatgagtaccgctgatttcaataccgttagccgtgctcgtctggagagcggcaccgctgttctggacgatatctgtcgctttgccattatcgttgactgtcagcgtaccgcctaagggttgaaatgtacaccctcgagaagtggcccattctccttttgtagtggagtattgaggtttaatttctcttatggagccttcccagattagaggggtttgaagtgtgttgatgtcttgaggctttcttgccgctgacctagctacctgactggctaatctatttccttcggctacctcatctgttcccttctgatgtcccctacaatgcatttctgtgatttctcgtggaaggaaaactgaggaaagtaaccttttaatttcctggtgatgttttataggagatccattggtggtaagaaaatgcctttccttccaaatggctgcatgagcatggagaactaggaaagcatactgggagtcagtgtaaatattagctacctttcctttgcttaattcaattgctcttgtaagagctattagctcagctaattgagcgcttgtgcctggaggaagagacacacttttaatgacgtcatttagagtgactactgcgtatcctgccttgtggatccatgctctacaagagagctcccattgaaaatgaaagcccttgccgatgcgggattcccccaggccgtgatcccgccgcacgagcgtccgtttattccggtgctgcgtcagttgggattcagtggtagcgatgagcaggtactggaaaaagttgcacgccaggcaccgcactggctttccagcgtcagttccgcttcgccaatgtgggtagccaatgcggcaacgatcgcgccatctgccgatacgctggatggcaaagtgcatctcaccgttgccaacctgaacaataaatttcaccgttcgctggaagcgcccgtcactgaatcgcccgcaataatccggcaggaacaccaccttcaacttatcgccaaccagcggatcgttgttgatcacgtcagccactttgttgatcgcaaagataatattcttcgccaggtagtagcccggtgccgctttcgcgccgaagaggaagacgcgcggtacgcgatcagcctgcgggttttcacgaatttctttgtacaacgccagaatatgcagcagattcaggtgctggcgtttgtactcatgcaaacgtttgatctgaatatcgaaaatcgcctgtggattgatctcaataccggtacgaactttcacaaactccgccagacggactttattcgcctgcttgatctcgcgatattgctgacggaatttcgcatcatcagcgaatttttccagattgatcagctgatcgagatcgttagcccactctttttgcagtgatttatccaacagagccgccagtgccgggttgcactgtttgatccagcgacgtggggtaataccgttggtgcactgggctcctccatgttgccgggttgataacaacgcctgcgctattccggtgggcttatggatattcgtgatgggaatttggggggcagtgttaacagctttggtagggcgtaggtaataagtgccgtcatggccggtctctatgttgacggagcgtatggggtcggtgatatggccgtctattggcggtttaatggtgacgatcaggtggcgtagcttgtaactgtgcggtgtcggcgtcgtgcatgttagtaaccgtgttgccgtggttaagccttccggtgttgtgtttggtttatgggatggttttttcgcatcgcttggcgttacggcgctattggcggcgacaccagcactggtagggcgtgaaaacttaatgcaggccggggcgatcaccatgttgaccgtgcgtctggggtcggtgatttcgcccatgattggcggtttattgctggcgaccggtggcgtagccttgctaccgttgttaagccttccggcgttgccaccgccaccgcagccgcgtgagcatccgttgaaatcattactggcaggatttcgttttctgcttgccagcccgctggtgggcgggattgcgctgctgggtggtttattgacgatggcgagcgcggtgcgggtg

SEQ ID NO: 24980 - DNA, 1557 bp, Homo sapiens
  SIMILAR (1557)..(1153): 911254mologous to Escherichia coli phoE protein,accession number V00316,Smith-Waterman Score=648.
tcatggtttcaacagcgccggcatactgatcacgggggacttccagttgcatggggccattatttcccatgtaacgatactgtccgttttgtccgtcgaatgccgcaccgacgctacgggctgcagttgaacaatatttcgtctggatttctgttccgctgaccagtctgtctgctccatttctggcattatatcaccgagatccgtgcgtttttcagacgactgtctgtggcacgccgaatggacgctaaatttctcttcgtcgttaaaaatcgcttttaacagcgattcagtgacgggcgcttccagcgaacggtgaaatttattgttcaggttggcaacggtgagatgcactttgccatccagcgtatcggcagatggcgcgatcgttgccgcattggctacccacattggcgaagcggaactgacgctggaaagccagtgcggtgcctggcgtgcaactttttccagtacctgctcatcgctaccactgaatcccaactgacgcagcaccggaataaacggacgctcgtgcggcgggatcacggcctgggggaatcccgcatcggcaagggctttcattttcagtaagccctgcttcgccgccagtcgcgggttagacaccacctcatcggaaaaatccagcccggggttaagcgtggcgggcaatgttaacgagtccgactccaggctcgccatcggccatgcgcagtaatctgcggcataccaggcgctggggcgatggttaccggaagcaccaatgccgccgaatggcgcggtactggcagcaccggtaagcggtttgttccagttaacaatccccggccgcgcctccagcaacagttgatcgaacttttcccgctcgggggaaaccagaccgcaagagagtccgaagcgagtgttattcgcccatcgaatcggcttctgcacagtttcatagggccgaagcgcaataagggtccgaaacctctttttttgtgttgccgcgagacccgttttttcatgggtcccgcgggtcgaacgagttctcgcttttaaaacgcggggccgcggggttcgcccccttctcatggtgctcctgacccgcggtgggcgtcgaataacgcgcaagggcgtgtcccgcgccgtttcgtgtggacagaaattctccctccgagggggggtgtgaccatcggtcattagttgtcggtcaaattccgggaacatatcggtccaggcttccacgtcatacaacgcccccaggttacgaccataatcgaaagaacccaaatctttatatttcaacccggcaaaagcgagacgcgttttttgctgtgcagtatcactctctgctttattaccggcaaactctgcttcccaacgaccataaccagtcagttgatcgttaatttgtgtttcgcctttgaaaccaaaacggatataactctggtcgccatctttactggcgttatcactcatataatgcatggctttaactttgccatagacatccagtttattaccgtctttattatatatttctgcagcctgtacagatgcagatgccacaatgcccat

SEQ ID NO: 24981 - DNA, 1842 bp, Homo sapiens
  SIMILAR (1842)..(694): 981254mologous to Escherichia coli valyl tRNA synthetase,accession number J03497,Smith-Waterman Score=2020.
atgaactacttcaccgattcggtggggatgttgctgatgtatctgccgcgcatgttgttctataccgatcccatcgctaaaggcggcttcccgcagggctggaccgtgttctactgggcatggtgggtgatttatgctatccagatgagtatcttcctcgcccgcatctcccgtggtcgtactgtgcgtgaactgtgcttcggcatggtgctggggctgacagcgtcaacctggatcctgtggactgtactcggtagtaacactctgctgttgatagataaaaacatcatcaacattccaaatctgatcgaacagtacggtgtggcgcgcgccatcattgaaacctgggccgctctgccactcagcaccgccaccatgtggggcttcttcatcctctgctttattgccaccgttacgctggttaacgcctgctcttataccctggcgatgtccacttgccgcgaagtacgcgatggtgaagaaccacctctgctggtgcgtatcggttggtcaattctggttggcattatcggtattgttctgctggcgctcggcggcctgaaagcgattcaaaccgacattatcggcggaggatgcccgctgttcttcgtcaacattatggtgacgctctactttattaaaaacgcgaacacagactggaaagcttcattaacccacaaaatatcaaaaccccgcacaggtgaagcccagcgcgtcagtacggtgcggctcaataccgttcgggaactgcttctcggtgcgcttacggattttgtccgccagctgcgcctgcatcatattgccggtacgtttttccagcagttctggcagcgaaataccgtcaaccatatccagtgggtcgataacgttacccttggatttggacatcttctggccttcgtcatcacgaatcaggccggtcatgtaaacggtgtggaacggcacctgcggtttgccattttcatctttgatgaagtgcatggtcatcatgatcatgcgggcaatccagaagaaaatgatgtcgaaaccagataccatcacgctggttgggtggaactgacgcagggcgtcggtattttccggccagccaagggtagagaaggtccacagcgcagaagagaaccaggtatcgagaacgtcttcgtcctgacgcaggacaacatcagcaccgaggttattttctttacgcacttcgtcttcgttgcggccaacataaacgttacccgcttcgtcataccatgccgggatacggtgaccccaccacaactgacgagagatacaccagtcctgaatatcgcgcatccaggagaagtacatgttttcgtactgcttcggtacgaactgaatgtcgccgttctcaaccgcttcaaccgccggtttcgccaggacatcggcacgcacgtaccactggtcggtcagcattggttcgataactacgccgccacggtcgccgtaaggaacggtcaggtcgtgcggtttaatttcttccagcaggccaagcgcgtcaactgcggcaacgactgctttacgtgcagcaaaacgctccagtttctggaactctgcagggatttcgctggaataaacgtcagattcgttacctttggtatcgaacacctgggcgctttcacggatatcgccgtcaaaggtcaggatgttgatcatcggcagggcgtgacgtttacccacttcatagtcgttaaagtcgtgcgccggagtgattttcacgcagccggtgcctttttccatgtcggcgtgttcgtcgccaacgatcggaatacgacggttaaccagcggcagaatgacatatttgccaatcagatctttgtaacgcggatcttccgg

SEQ ID NO: 24982 - DNA, 1344 bp, Homo sapiens; identical to SEQ ID NO: 18149
  SIMILAR (1)..(774): 891254mologous to Escherichia coli K12 putative protein transport,accession number AE000378,Smith-Waterman Score=1143.

SEQ ID NO: 24983 - DNA, 1360 bp, Homo sapiens
  SIMILAR (391)..(1170): 941254mologous to Escherichia coli hycD,accession number X17506,Smith-Waterman Score=1242.
ttcaaaaacagaggctttttcctctgctgtaaatgttcgtctcattcaaaaaacctccgcaaccccatgttttcacataactgttgcgttgaccaattgaatctacaattacagtatgatggccacggctggctgacagacatcagccacctgagcgaaggccaccgtgttgccgtccactatggctatgacgataaaggccgcctgaccggcgaatgccagacggtggagaacccggagacgggggaactgctgtggcagcatgagacgaaacacgcatacaacgagcaggggctggcaaaccgcgtcacgccggacagcctgccgccggtggagtggctgacgtatggcagcggttacctggcgggaatgaagctgggcgggacgccgctggtcgagtatacgcgggacaggctgcaccgtgagacggagtatcgcgacattatcaaactgctggggcgtcagagcgtcggcccggatgcctccggctgggtgttccgcctgacgccgtatgtgatggtgggcgtcatgctgactatcgctactgcgctgccggtggtgaccgtcggttctccgctgccgcaactgggtgatttgatcaccttactgtatctctttgccatcgcgcgtttcttctttgccatttctggtctggataccggtagcccgtttaccgctatcggcgcgagccgtgaagcgatgcttggcgtgctggtcgaaccgatgctgctgcttggtctgtgggttgccgcacaggttgccggttccaccaacatcagcaacatcaccgacaccgtttatcactggccgctgagccagagcatcccgctggtactggcgctttgtgcctgtgcgttcgccacctttatcgaaatgggcaaactgccgttcgacctggcggaagccgagcaggagctgcaggaaggcccgctctctgaatacagcggcagcggctttggcgtcatgaaatggggtatcagcctgaaacagctggtggtgttgcagatgttcgtcggggtgtttattccgtggggacaaatggaaaccttcaccgccggtggactgctgctggcgctggtgattgccatcgtaaaactggtggtcggcgtcctggttatcgcgctgttcgaaaacagcatggcccgtctgcgtcttgatattactccgcgggacatgatacgaatcgagctcgacagctgggaacaaaatggtgaggcaatcaaacgcaccgggcaaccgctattgctaagtttgttggtgcgaaatttgctggataacgccgtgcgctacagtccacagggcagcgtggtagacgtcacgctgaatgctgataatttcatcgtgagggataacggccccg

SEQ ID NO: 24984 - DNA, 1828 bp, Homo sapiens
  SIMILAR (1118)..(1399): 891254mologous to Escherichia coli betT protein homolog(PIR:S10898),accession number D10483,Smith-Waterman Score= 428.
  misc_feature (1)...(1828): n = a,t,c or g
ttacatatctttcttaattttgtcccattcgcctttaactttatctttaaagttggcttgtttatcctgagtacaagcctgaacgatagctggggttacggttgcaataccctgaacatctaaaaccgcatcttctggtttatctttgttgttcagcgcttcagcaaaaccaactgcagttggcggtggactgctgctggcgctagtgattgccatcgtaaaactggtggtcggcgtcctggttatcgcgctgttcgaaaacagcatggcccgtctgcgtcttgatattactccgcgcattacctgggctgggtttggctttgcatttttagcgttcgtctccttgctggcggcgtgattaaagagagtttgagcatgtcngtcttgctcgagaatctctccgagccgcccaaccaacacgatattatcgaaatcctcactgttcagcgtaaagaagaggaaacagcattgagctgtcggcttgttttgcgaaagctgacagaaacagaaccggtgattattttcgaaggtatcgaagcgccggcaacgctgcctgcagatgaagtgccggtaggtaaagacgaaaatgacaacgttgaagtcagccgctggggtaccccgcgtgagtttgactttgaagttcgtgaccacgtgacgctgggtgaaatgcactctggcctcgactttgcagctgcagttaagctgactggttcccgctttgtggtaatgaaagggcagattgctcgcatgcaccgcgcactgtcgcagtttatgctggatctgcataccgaacagcatggctacagtgagaactatgttccgtacctggttaaccaggacacgctgtacggtacgggtcaactgccgaaatttgctggcgatctgttccatactcgtccgcgccacgaatgcttcagacatattggcagtctgggccttgccacgccgctggtgaccgagtgtatgcaatggttgtttggcattccgcataccctgcaactggacgctatcatcattacctgctggattatcctcaacgccatttgcgtcgcttgcggtctgcaaaaaggggtacgtatcgccagtgacgtgcgtagttacctgagcttcctgatgctgggttgggtgttccattgtcagcggtgccagcttcatcatgaactacttcaccgattcggtggggatgttgctgatgtatctgccgcgcatgttgttctataccgatcccatcgctaaaggcggcttcccgcagggctggaccgtgttctactgggcatggtgggtgatttatgctatccagatgagtatcttcctcgcccgcatctcccgtggtcgtactgtgcgtgaactgtgcttcggcatggtgcaagaatttggctgcaaatcctccaccaaaatcgataatgccgactttaatcaggcttaagccgatcatcagtaccacaataccgctgacggtaggcgtaataacccgacgtaaatagggcaacataaatgaagatccgaccaccagaaatgcgcccacgaaggagacgccgagaagcgacgacatgattaactcttcgtgaaaaccgtcgcttttcatgctgtgaaaatgaaagcccttgccgatgcgggattcccccaggccgtgatcccgccgcacgaacgtccgtttattccggtgctgcgtcagttgggattcactggtagcgatgaacacgtactggaaaaagttgcacgccaggcaccgcactggctttccaacgtcagttccgcttcgccaatgtgggttaccaatgcgggaacgatcgcgccatctgccgatacgctggatggcaaaatgcat

SEQ ID NO: 24985 - DNA, 978 bp, Homo sapiens
  SIMILAR (636)..(4): 1001254mologous to Escherichia coli formate dehydrogenase-O gamma subunit,accession number L19201,Smith-Waterman Score=1128.
tcattcagctttcttttccgttgtcttgcggacctcacggtaccagcgcgggtgatgtttcttcgcccaggcgctggtaacccatccttccaccatggcggtaatcgtgcctttcacccaaagggcggcgtagatatgcaccatgataaccacaattaacgccactgcggcaaatgaatgcagcattaacgcgaatcggatcaccgggattgagaaagcaggcgcaaaataaggacgccagataatcacgccgctcaccagcagcagaaccaggaaaataatcgccgcccagaaaacgcatttctgaccgaagttataacgcccggtgtcacctacttcctcgttgacgacgatcttacgaatattcttcgcccaaaagatatcatcccgattgattaggttgtgatgccagtaacggaaaaacatgatgatgaacgaggcaaacataaccacgccgacaaacgggtgcagaattcgcgccagctgcggtgtgcccatgatttgcatcaaccagttgaaggacgggaacaaaaagcccagcccgctcaccgccgccaggatgaagcagaaggcggtgatccagtggttgatacgttccggcgcggtgtagcgcacgatggtgtcacgtcgtttcatttgcgctcctcgtctttcgacacccacgtagtggaagatactggccgcaaaggtagccgcaaagccaacagccgcgagcggtttccagatgcctttccagaatttcacggtttcgctgatttccgggttctccggcaagccatgatacagatttggcttgtcagcatggtgcagcacgtacatgacgtgtgtaccaccgacgcctgccggatcgtacagacccgcattgtcgtaaccgcgggttttcagctcagcaacgcgctcgctcgccagcgttttcatcgactctttcgtaccgaagtgaatcgcgcccgttgggcaggtcttcacgcaggctcccat

SEQ ID NO: 24986 - DNA, 894 bp, Homo sapiens
  SIMILAR (1)..(771): 681254mologous to Escherichia coli helicase II,accession number X04037,Smith-Waterman Score=855.
atgagcgtggaaaactgctcgccatctcgcttatgcggtgacgtttacccaccaagcggcggcggagatcgtcttcgtctcgggcacctgatgggcccgagcccagcgggttattgtgggtcgggccccttccacgggctggcggcccccgttttgctgcggtgcgccccatatggacgcccaatctgccgcaggactttccagatcctcgacagtgaagacccagctaccgccttgcttaagcgtctgatcaaagccatgaacctcgacgagaagcagtggccgccgcggcaggcaatgtggtacatcaacagccagaaagatgaaggcctgcgtccgcatcatattcaaagctacggtaatccggtggagcagacctggcagaaggtgtatcaggcgtatcaggaagcgtgtgaccgcgcgggcctggtggacttcgccgagctgctgctgcgcgctcacgagttgtggcttaacaagccgcatatcctgcaacactaccgcgaacgttttaccaatatcctggtggacgaattccaggataccaacaacattcagtacgcgtggatccgcctgctggcgggcgacaccggcaaagtgatgatcgtcggtgatgacgaccagtcaatctacggctggtaccgagatctacgctcaataagcgcagcaattgcccggcatgtccgactggcaaaactcgcaagagcaacatcaaatgaaaaattaagtcaggcttttcatgcgcacctcgaggaaactcatggacagattgaacgtattgatcaagttgtggagtccgaatcgaacctgaaaattaagcgcatgaaatgtgtggcaatggaaggtcttattgaagaagctaatgaggtcatcgaaagtaccgagaaaaacgaa

SEQ ID NO: 24987 - DNA, 3264 bp, Homo sapiens
  SIMILAR (1765)..(2415): 951254mologous to Escherichia coli analogue of ATP-dependent protease regulatory subunit,accession number X57620,Smith-Waterman Score=1033.
atgtcgaaaagcaatccgtctgaagtgaaattggccgtaccgacatccggtggcttctccgggctgaaatcactgaatttgcaggtcttcgtgatgattgcagctatcatcgcaatcatgctgttctttacctggaccaccgatggtgcctacttaagcgcccgtaacgtctccaacctgttacgccagaccgcgattaccggcatcctcgcggtaggaatggtgttcgtcataatttctgctgaaatcgacctttccgtcggctcaatgatggggctgttaggtggcgtcgcggcgatttgtgacgtctggttaggctggcctttgccacttaccatcattgtgacgctggttctgggactgcttctcggtgcctggaacggatggtgggtcgcgtaccgtaaagtcccttcatttattgtcaccctcgcgggcatgttggcatttcgcggcatactcattggcatcaccaacggcacgactgtatcccccaccagcgccgcgatgtcacaaattgggcaaagctatctccccgccaatcattctcggcgagcaagtgcgcgatacttccgcccggataccgactatctgctgactatctccaacgatgcgtggtttggtaaatctattggtccatggcaacacttccagatggcgcgaatgcgtgcgctggagctggcgcgcccactgttgcgcagcaccaacaacggcattacggcggtgattggcccgcagggtgagattcaggcgatgatcccgcagttcacccgcgaggtgttaaccactaacgtgacgccgaccaccggactcacaccatacgcacgtaccggcaactggccgctgtgggtgctgacggcattgtttggttttgctgctgtgttgatgagtctgcgtcagcgacccaaactaaatgtacctaaggaaggtgcgaacaagtacctgatagagagtcatggggcgcgagtgaaggggctggcgtcacattttgtctacggttacggcaaaggcggcaaagagagcgtcagccatcagaactatccgcaggtcatcaaacatacgccgcggatgaccgcgatggcgaatattgctctgtttcgtctgtttaatcgcgatctgtttggcaatttcaatgagttatatcgcaccattactcgcacagcgggtccggtggtcctgcattttcatgtgctgcacagctactggctaaatcttaagagcgtggtgcgcttttgcgaaaaagtgaaaaaccataaaccggacgtcactctggtactggacgctgcacgaccactggagtgttaccggacgctgcgcctttaccgacgttacgaaggtggaggaccaccacgaaccacaaacccaaacgcggggtctggtgatgactaccagctgagcaacgacatgaaagttgacggtcagtcttacgacagcatgcgttatgaactgggtgtagatgcaggttataccttcacctacagcgaagatcaggctctgactccgtacttcaaactggcttacgtctacgacgactctaacaacgataacgatgtgaacggcgattccatcgataacggtactgaagggtctgcggtacgtgttggtctgggtactcagtttagcttcaccaagaacttcagcgcctataccgatgctaactacctcggtggtggtgacgtagatcaagactggtccgcgaacgatttgacgggcattactgcaaaggacgcgcaaatgttatctgtagttaaacctcttcaggaatttgaactgttcgttctggcggcacttgagtctcgcggcacgctggccgacatcctgaaagcagcaggggcgaccaccgccaacattactcaagcgattgaacaaatgcgtggaggtgaaagcgtgaacgatcaaggtgctgaagaccaacgtcaggctttgaaaaaatataccatcgaccttaccgaacgagccgaacagggcaaactcgatccggtgattggtcgtgatgaagaaattcgccgtaccattcaggtgctgcaacgtcgtactaaaaataacccggtactgattggtgaacccggcgtcggtaaaactgccatcgttgaaggtctggcgcagcgtattatcaacggcgaagtgccggaagggttgaaaggccgccgggtactggcgctggatatgggcgcgctggtggctggggcgaaatatcgcggtgagtttgaagaacgtttaaaaggcgtgcttaacgatcttgccaaacaggaaggcaacgtcatcctatttatcgacgaattacataccatggtcggcgcgggtaaagccgatggcgcaatagacgccggaaacatgctgaaaccggcgctggcgcgtggtgaatggcactgcgtaggtgccacgacgcttgacgatatcgccagtacagtaaaaagatgctggaccagccaccaacaccaaactaagaacagaacccgcagaacaacaacccgcaacatccgctttcctaaccaaatgattgaacaaattaacatcgctcttgagcaaaaagggtccgggaatttctcagcctgggtcattgaagcctgccgtcggaggctaaccaccggtggtccacacgtcatgtacgtgctgcaccatgctgacaagccaaatctgtatcatggattgccggagaacccggaaatcagcgaaaccgtgaaattctggaaaggcatctggaaaccgctcgcggctgttggctttgcggctacctttgcggccagtatcttccactacgaacgcgtcatttttctgactggccaggttgaagaccacatggctaacctgattgtggcgcagatgctgttcctggaagcggaaaacccagaaaaagatatctatctgtacattaactccccaggcggggtgatcactgccgggatgtctatctatgacaccatgcagtttatcaagcctgatgtcagcaccatctgtatgggccaggcggcctcgatgggcgctttcttgctgaccgcaggggcaaaaggtaaacgtttttgcctgccgaattcgcgcgtgatgattcaccaaccgttgggcggctaccagggccaggcgaccgatatcgaaattcatgcccgtgaaattctgaaagttaaagggcgcatgaatgaacttatggcgcttcatacgggtcaatcattagaacagattgaacgtgataccgagcgcgatcgcttcctttccgcccctgaagcggtggaatacggtctggtcgattcgattctgacccatcgtaattga

SEQ ID NO: 24988 - DNA, 3256 bp, Homo sapiens
  SIMILAR (648)..(1271): 991254mologous to Escherichia coli ferrous iron transport protein B,accession number X71063,Smith-Waterman Score=1069.
ctctcggtacccggagatcttacgaattttcttcgcccagaagatatcatcccgattgattaggttgtgatgccagtaacggaaaaacatgatgatgaacgaggcaaacataaccacgccgacaaacgggtgcagaattcgcgccagctgcggtgtgcccatgatttgcatcaaccagttgaaggacgggaacaaaaagcccagcccgctcaccgccgccaggatgaagcagaaggcgattattctcttcctcatccgcacggttcggaccgacacccacgtagtggaagatactggccgcaaaggtagccgcaaagccaacagccgcgagcggtttccagatgcctttccagaatttcacggtttcgctgatttccgggttctccggcaagccatgatacagatttggcttgtcagcatggtgcagcacgtacataacgtgtgtaccaccgacgcctgccggatcgtacagacccgcattgtcgtaaccgcgggttttcagctcagcaacgcgctcgctcgtagcgatgcgacggtgggtttaccgcgtgaggcggatacaataccgccgaacgactcaaacagccgtgttccacagcacccatggaaattaccgcgaaggacagcctgtcgggactctaatcgatgatcgctataaagctaacgagaatgtggaactggtgcattacgcacagccgctgctcaacgaagcagattcactggcaaaagtgatgccttccgacatcccgctgaaacaacgtcgctggctgggcctgcaaatgctggaaggcgatatctacagccgcgcctacgccggtgaagcgtcgcagcatctggatgccgccctcgcccgtctgcgtaatgagatggacgatccggcgctgcacattgccgatgcgcgttaccagtgcattgctgccatctgtgatgtggtaagcaacaccctgacggcagaacccagccgtttcaccactgcggtagataaaatcgtgctcaaccgtttcctcggtctgccgattttcctctttgtgatgtacctgatgttcctgctggctatcaacatcggcggggcgttacagccgctgtttgacgtcggctccgtggcgctatttgtgcatggtattcaatggattggctacacgctccacttcccggactggctgactatcttcctcgcccagggcctgggtggcggcattaacaccgtgctgccactggtgccgcagattggcatgatgtacctgtttctcttctttcttgaagactccggcgctggcttgccgggaaatctttgtgccgctgatgcggcttcgtgtgaacctccgttggtatccccctgtgctctaaagaatatcctggtggacgaattccaggataccaacaacattcagtacgcgtggatccgcctgctggcgggcgacaccggcaaagtgatgatcgtcggtgatgacgaccagtcaatctacggctggcgcggggcgcaggtggagaatattcagcgtttccttaatgatttccccggtgccgaaactattcgtctggagcaaaactaccgctctaccagcaatattctgagcgccgctaacgccctgattgaaaacaataacgggcgtctgggtaaaaaactgtggaccgatggcgcggacgtcgcgggtgctcccagaggcgttattgaggccagtatgccgcaccgtatttacggcgggatgcgcttcttggatcgccatgaaatcaaagatgcgctctcgtatctgcgcctgattgccaaccgcaacgacgacgcggctcttgacgcgtggggaatacgcgcacgcgggggtggtggtcgcttcagtagcgccagccaggaaggactcgtcaccctcgtaaatgacccagtatgtcaacccaaccaacaaaccaccaccgataatgttgccgatcgtaaccggaatcaggttatcagtgatgaaattcatcacggtccaggtgagaaaaattttcggtgcagaccgactgcgtgcaaaatttcgggattcgaaatcgcggatacaatcccatcggaacaaacaagttgcgatctgtgctcaaaccgtggaaaaacatgggacgggagacatatgacgcttgtcattagctgggcagattactatgaccgtgttactaggtgtataagctggctcatttcgacccacgcgccgcagtacatgccgacctttgaactgaataaagccattgtgcaaaaagcggagcactaccatttcgatttcgccctgtcgatgatcaaactgcgtggctttggcggcaaaactgagttctgggatcacaaccttgagtcgttcaccttgatggcggggctggcggccgtgacctcgcgcattcagatttacgccactgctgccaccttaacgttacctccggcaatcgtcgcccgtatggccgcaaccatcgactccatctctggcgggcgttttggcgtcaacctcgtgactggctggcaaaagcccgagtatgagcagatgggtatctggcctggcgatgactatttctcccgtcgttacgactatctcaccgaatatgttcaggtgctgcgcgacctgtggggcacggggaaaagcgattttaaaggcgattttttcaccatgaatgattgtcgcgtgagtccgcaaccgagtgtccccatgaaagtgatctgcgccgggcaaagcgacgctggcatggcgttctccgcccggtatgccgatttcaacttctgtttcggcaaaggcgtaaatacacccacggctttcgccccgaccgctgcgcggatgaaacaggccgcagagcaaaccggacgcgacgttggctcttatgtgttgtttatggtgattgccgatgaaaccgacgatgccgctcgcgccaaatgggaacactacaaagcgggcgcggatgaagaggcgttaagctggctaaccgaacaaagtcagaaagatacccgctccggtactgacaccaacgttcgtcagatggccgatcccacttcggcggtaaacatcaatatggggacgttagtcggttcttacgccagtgtcgcgcgcatgttagatgaagtcgcaagcgtgccctggtgccgaaggcgtgctgttaaccttcgacgattttctgtcgggaatcgaaaccttcggcgagcgcattcaaccactgatgcaatgccgcgcccatctacctgcgctgactcaggagcaactcatccagaatagctttggcgaccgaggcgctcggtaccgttttcgacaac

SEQ ID NO: 24989 - DNA, 942 bp, Homo sapiens
  SIMILAR (91)..(11): 531254mologous to Escherichia coli K12 putative sensory transduction regulator,accession number AE000187,Smith-Waterman Score=69.
tcagtgggttaaaggtatctccttcatatggattaagtctgcatccctccagctttgccagattatcatcctgcatatcaagaaagctttcactgtcagcgaactggcattgatggcagataaatccgccgccagcggcaatacggctgaaggtcggacttccgccatggcagaaaacaggatcgtgttatcgatcagatcgattttggcatcaaagacaccgtcgaaattctgcatatggggcagatgcagagcctgacagttatcacattcatataaactcatccccaggtcatcgagccattgacgcagcgtatccagaccaggaacgaccagcgatgtcataattttgtacaacctctttcgataaaaagaccggcacagctccatcaccaacggcccgcgattagcacgcagaatatccacaccagcaacgtccagcgccatcgttcgcgcggcttttatcgcgatttcacgttcctgtggtgtgatactggcgacgcttgccgcgccgccacgatgcaaattggaacgaaaatcgccctctttcgcccgccgttcaatcgcagcgaccacgttatcgccaacaaccagaggaatcctgaggtgtagcctgatgtggactggctgatcgccgagcgccccggcaaggtaagaaccttgaaacagcatccacgcaagaacaaaacggccatcaacatcgaatacatgaaagccagcatccgggccagggtggagcacccatttcgcatcatcaagcgacagttcggcttcgtgaaagccagatacaaggggttgggccaggtcgagattgttactacctgaaaatgcatcgctggcgatcagatttaatgaaccattcgggccaaatccaaatccgttgttggaaatattagcggtattcaactgaacacgaatatgagcgtcctgatcgcattgcat

SEQ ID NO: 24990 - DNA, 2666 bp, Homo sapiens
  SIMILAR (2081)..(1938): 641254mologous to Escherichia coli ferrichrome-iron transport protein FhuB,accession number U70214,Smith-Waterman Score=133.
  misc_feature (1)...(2666): n = a,t,c or g
ttatagccggatgcgatgctggcgcatcttatccggcctacggggagccaggccgaataaaatcgtatgccggataaggcgtttacgccgcatccggcctattttaaggctgcgttttccccggcattcgcgggtcgtctttaaaatacgtactaataaaatatttgtaatggcaacagtgaaacccaagcacttcatagagggccggagtgagtcgtccaggtacatgagggtcttcttgtgtctgccttctccccaggcgaagcgcatccagcggcgttcatcaacaccacggccagcaaccgatttagccaatcctggccacagaccatgtacggtcagaaaatcagctttgttggtcgtttcggtttgcaggcgacattcatctcgttcgttacgatttcgatcgtgttgactctggcaaaatccggtttgccaggagagggccaggacatagcgatcaaaatcgccatactgttttgcctgcaacgcattagcagagatataggcataagtgaggatatagagaacgaaggcaacggtaataccgctgataatgttccaggtgttaccgattaaatctttggtgatggtgttaaaactggagccgacgggataatttaaatttgcttgccagaagaaagagagctgcttttcgatcagcttttcgaagatgtcatatttttgctgatcgtagcgagccacgttgaccggctgaccaaagaacatcggttctttgagctgatcatttttcgtctgtgaaaaggtggtatatgccatgagtgtgtcctgttgggagtttaatgccggataaggcattttacgccgcatcctcgtgcctgatgcgacgctggcgcgtcttatcaggcctacaaatccgagccgtaggccggataaggcgttcacgctgcatccggcacccggagcctgatgcgacgctggcgcgtctttatcaggcctacaaaccgagccgtagccggataaggcgtttacgccgcatccggcatctcaatatcagatcttacatgcgccgctttcgcagccatccaactgctgcatcggcactttctgacgggaagcgtgacggatggcagcagctgatgccgcgtgtcgctctagaggatccattcggcaggtggaaatcgaagctgatggagcgcccgattgtggtcgcgaatggcaaagcgcggataggtcgtccaccggagcagggcagaaggtttacagttggagcccgagaagcgtgtcgatctagaggatccccgacgaaggtgtttacctggcaccgtcagcgtttgaagcgggctttatgtccgtggcgcacagcatggaagatatcaataacaccatcgatgctgcacgtcgggtgtttgcgaagttgtgatccagcatggtttgtcggatgcggcgtgaacgccttatccgacctacgattcggggccgtttgtaggcccgataagacgcgccagcgtcgcatcgggcatccgttgtcgcgtaaacgctttatccgtccaggcataaaatatggcgcgccgataaaggttgacagcagccccgccgggatctggaatggaaacagcaccatccgcccacaccagtcagcgaacaccagcagtaaaccacccaccagcgccgaaattacgatgtgtggcatcgtccgtcgaaagcccatcatccgcgcaatatgcggtgccattaaaccaacaaaactcaacggtccaatagtcatcgtcgcggtcgccgtcaggcaagccgctaacagcagcagcgcaattcgcgtcggcgtcagcgccattcctacggctcgggcggtatcaccacccagcggtaaaatggtcagccagccggcggcaacaagcgggggtaaatcgcccaaggcaaaaattccacccaatccaacaaattcccggtgcgccagacctgcgcatcggtcgcgtngtcgaaccggaaatccaggtcagcacttgcgccattcgcgggtcaccacttgcctgcaacatcatcaaaagcatgtgaacgcgtgcttaagcaaaatcaacagacaacagacgacccgcgaatgccggggaaaacgcagccttaaaataggccggatgcggcgtaaacgccttatccggcatacgattttattcggcctggctccccgtaggccggataagaacacatctattgttgttgttggtggtggtggtggttatgtaggcttgctgggcgaggatatcggcggcggtgatccagcgcagcgggatgcccggtgtgcgcgtatgcgggcggataaaaagctgctcgaaggcggtacgctgtcagcggcatgtctttgcaacatgtgtctggaacggacgtcaagtcacgtccggcgcaggaacgtggtcaacaatcgcctggtacagcggggtcatgtcttccgccatatcttcgtggtccagacccgcgataccgttcagcgcagaagcgtaaacgatcgggaagtccagctgctcgtcggtcgcgtcgaggttaacgaacagatcgaatacctgatccacaacccaatcaggacgcgcgccagggcggtcaactttgttgataacaacaatcggcttcaggccgtaagcaaacgcttttttggttacgaagcgcgtttgcggcatcgggccgtcaaatgcgtcaaccaccagcagcactga

SEQ ID NO: 24991 - DNA, 1071 bp, Homo sapiens
  SIMILAR (846)..(295): 991254mologous to synthetic construct aceA,accession number A31763,Smith-Waterman Score=968.
ttacttcttcgcctctgcaaccactttactacccacgccgcggttattgtattcccacatgcggttgtagttagtgtcattcagattgcgctgtatttcgtcgttatcatctacgctgccggtattacccgcaaacggacgattagagatcaccgcatcggcccacggtttagccgtgttaaaccttcgtgatgcgcaaccgatgccggtccggggcaccgattgccggatgcggcgtgaacgccttatccggcctacagtcagcaacggttgttgttgcttagaactgcgattttcctgctggtgagatacgaaggtatagccatctttcgcggcggcaaattccggctgctgcactttctcaacgtagtgcttcataccctcgcgctgggcataggcgtttgccaggtcaaacatgttgaaccacatgctgtggatacctgccagggtgatgaactggaacttgtagcccatatccgacagctgctgctggaagctggcaatagttttgtcgtcgaggtttttctgccagttgaacgacggcgagcagttataagccagcagtttgcccggatatttcgcgtggatagcttgtgcaaagcgacgcgccagttccagatccggcgtggaggtttcacaccagaccaggtcagcatatggcgcatacgccaggccacggctgatcgcttgctcaatgcccgcatgagtacggaagaagccttcactggtacgctcgccggtaataaattcgctgtcatacgggtcgcaatcggaggtgatcagatccgccgcatcagcatcggtacgggcaaccagcagggttggaacgcccgtcacgtcagcggcgcccccgggctgcacggtgtcgtatacaacgtcaattgcgcggtgtgcggcaaaaggtgcagggccagcgggtaggcgaagtgccggcgttgtcagcttaccaaattgggtgtatacgggtatagcggcaagtgtgcaggggccgcagcaccagggtgcgtctaggcggcgggctgtacctcggtgggcccgcacagccgtaccccgggtcgcagtgtacaacat

SEQ ID NO: 24992 - DNA, 2649 bp, Homo sapiens
  SIMILAR (2148)..(2177): 901254mologous to Escherichia coli K12 orf, hypothetical protein,accession number AE000509,Smith-Waterman Score=49.
tttccgacggcaaaaaactgcccagaggcgttgcgattgaagatagtgaaggcaactatctgacaacatcagtggatgacggtgttgtattcctcaataacatcaaaccggacatggtgctagatataaaagatgagcagcaatcatgccgtattcaccttacattcccagaagatgcaccaaaagatgtgttctatgagacagcaacaggagagtgccaatgaaacggataataacaggatgcctgctgctgaacttcgccatggccgctcaggcagagtgtaatatctccagtagcatacaaaatatcgactatggcaaacgaagtgctgccatgcgccaagttgaccggggtatgccagcccatttagcaggcagaccactcgcgttggtaattcaatgcgatcaggacgctcatattcgtgttcagttgaataccgctaatatttccaacaacggatttggatttggcccgaatggttcattaaatctgatcgccagcgatgcattttcagtcgttcacgtgcagaataacctcgacgacaatactattgccagcttccagcaacacctgtcggatatgggctacaagttccagttcatcaccctggcaggtatccacagcatgtggttcaacatgtttgacctggcaaacgcctatgcccagggcgagggtatgaagcactacgttgagaaagtgcagcagccggaatttgccgccgcgaaagatggctataccttcgtatctcaccagcaggaagtgggtacaggcgtttacgccgcatccggcaattctctgctcctgatgagggcgctaaatgccgcgtggcctggaattattgattgctcaaaccattttgcaaggcttcgatgctcagtatggtcgattcctcgaagtgacctccggtgcgcagcagcgtttcgaacaggccgactggcatgctgtccagcaggcgatgaaaaaccgtatccatctttacgatcatcacgttggtctggtcgtggagcaactgcgctgcattactacacggccaaacggtgtaggcctgataagacgcgccagcgtcgcatcaggcaaccggctcgggcgttggatgtcggatgcggcgtgaccgccttgtctgacctaccggggtgccgcacttcacagcggtgtaggcctgataagacgcgccagcgtcgcatcaggcaaccggctcgggcgttggatgtcggatgcggcgtgaccgccttgtctgacctacggggtgccgcacttcacggcagtttagcgaactaccgcgttgtcaattttctcttccgccttccagacgcgatgattctctctgtccttcttcgttcgtgtccttttgtattccctcttctccgccgtttgcgtgctggtgcccccgtgggtccgtattgcactgggactcccatcactcctttgccatccacacggttgtttgccccattgccaaaccggtgttcgatggccggaatgtacggcggcctacaaccggtgccgcatccggcaattggtgcacgatgcctgatgcgatgcttgacgcatcttatcaggcctacaatgggtaccggatcgatggctgaagaggctctggggacgagtttcaagaggttatgtgcgcattatagccggatgcgatgctggcgcatcttatccggcctacggggagccaggccgaataaaatcgtatgccggataaggcgtttacgccgcatccggcctattttaaggctgcgttttccccggcattcgcgggtcgtctttatattcggcggtggcaaacccaccccgcggaaaaaaaggtcaaacgggcgaagaaagaagaaaaatgcccttagccccagcacggaaccaaatgctgcgccagagggggatttgctgcatgccttgtcttcgaatacgtagtggtcttctggacctcgctacccgactctttttgccgaaagagttttccaacccgtattcgcggatcaatggtcccctcgctgtgggatttcccacccggggtcgatggccgtaaagggaagaccagttggaacggggtcccggggccgtgtgtcacttgtggtctgggcttaacgtgccctgaatctccgtgttgtcccgggctttccctgggggatgggtaccctgaaaaggtgtctgtgggaccaccaatcccgctaaaatttcaggccattctgcaggcatttcacgagatcttcggcgaaggatcctgccatattgcatccgttgccgtcgagagcggtgtaccggaacagccctttggcagtgaggaaacgcgcgctggcgcacgaaatcgggtagccaatgcccgccgtttacttccagaggctgatttttgggtggcgattgaagctggcatcgatggtgacagcactttcagttgggtggtgattgaaaacgccagccagcgcggcgaggcgcgttcggctactttgccgttgcctgcggtgattctggaaaaagtgcgtgaaggtgaggcgcttggtcccgtgatgtcgcgttataccggtattgatgagattggtcgtaaggaaggggcgatcggcgtgtttaccgccgggaaactcactcgcgccagcgtctatcaccaggcggtgatcctggcgctgagtccgtttcataatgccgtgtattaa

SEQ ID NO: 24993 - DNA, 1828 bp, Homo sapiens; identical to SEQ ID NO: 13813
  SIMILAR (854)..(1651): 771254mologous to Escherichia coli formylglycineamide ribonucleotide synthetase (EC 6.3.5.3),accession number M19501,Smith-Waterman Score=969.
  misc_feature (1)...(1828): n = a,t,c or g

SEQ ID NO: 24994 - DNA, 2564 bp, Homo sapiens
  SIMILAR (1509)..(1742): 1001254mologous to Escherichia coli low affinity gluconate permease,accession number D84362,Smith-Waterman Score=380.
cgccccacgtgccaattctcggcgcccgggcctccggcctgccccgtcccgccattccgatttcacggggttcgccgccgcgtttccccttttcgtcgggccgtttccgcgagcgcgcgaaacccggcgccccccccagtgaagggggcccgtttcccttccgggcgcggttttccgaatgcccacttgcgtcccatccgggggcgcatttccgaagaaatgggcgtttgggggaacccgttgaaatcccgcggttcccaaaccgtggtgccaggcgtttaccaccgccgcgtttgttatccagcgcattaataaagtgtcgctgatcgtctgttctgcattgaaaaacccctatcgcgacttgctgcgtgaaggtaatccgaatctctctttcatctatttgaaaggcgattttgatgtgattgaaagccgcctgaaagcgcgcaaaggccatttctttaaaacccaaatgttggtgacgcagtttgaaacgctgcaggagccgggtgcggacgaaaccgatgtactggtggtggatatcgatcaaccgctggaaggtgttgtggcaagcaccattgaggttattaaaaaaggcaaataagtagtgactacattaacgcttgttttaacagcagtagggtctgttttactgctgctgtttttagtcatgaaggcgcgtatgcacgctttcctggctttaatggtggtgtccatgggggctggccttttttctggtatgccgctcgataaaatcgcagcgacgatggaaaaagggatgggaggcaccctcggcttcctggcggtggttgtcgccctgggagctatgtttggggagatcttacatgaaaccggcgcagtcgatcagattgccgtcaaaatgctcaaatccttcggtcacagccgcgcgcattatgccatcggccttgcggggctggtctgtgcgctaccgctgttctttgaagtggcgatagttctgctgattagcgttgctttctcaatggcgcgccacaccggtacgaacctggtgaagctggtaatcccattatttgcaggcgtggcggcagcggcggcatttctggtgcctggaccagcgccgatgctgctggcatcgcagatgaatgccgactttggctggatgatcctgattggcctgtgtgcggcaattccgggaatgattattgccgggccgctgtggggtaacttcatcagccgttacgttgagctgcatattcctgacgacatcagcgaaccgcatctcggcgaaggcaaaatgccatctttcggattcagcctgtcgctgatcctgctgccgctggtgctggtagggctgaaaaccattgccgcgcgttttgtgccggaaggatcaactgcttacgaatggtttgagtttatcggtcatccgtttaccgcgattctggttgcttgtctggtggcgatttacggtctggctatgcgtcagggcatgccaaaagacaaagtgatggagatttgcggtcacgcgctgcataccggcggggatcattctgctggtgattggtgcgggcggcgtgttcaaacaggtgctggttgactctggcgtaggtccggcactgggcgaagcgttaaccggcatgggcctgccgattgctatcacctgcttcgtgctggcagctgcagtgcgcatcattcagggttctgccaccgtagcctgtttaacggcggtaggactggtgatgccggttattgaacaactgaactactccaaaagaagaggcttcactgggagggttgaagagaactttggggtttgcaaagggcctagcaaatatcattctcagcatgatgccattaatagacaaggcagagaggccagcgatgctcacggcacgctggaaaatctgccgttgccgcttgtcccgcaaccgaatgccgcaacagcgctggcggcactgcgtgccagcgggctggaagtcagtgaaaatgccattcgcgacgggattgccagcgcaattttgccgggacgtttccagattgtgagcgagtcgccacgcgttatttttgatgtcgcgcataatccacatgcggcggaatatctcaccgggcgtatgaaagcgctaccgaaaaacgggcgcgtgctggcggttatcggtatgctacatgataaagatattgccggaactctggcctggttgaaaagcgtggttgatgactggtattgtgcgccactggaagggccgcgcggtgccacggcagaacaactgcttgagcatttgggtaacggcaaatcatttgatagcgttgcgcaggcatgggatgccgcaatggcggacgctaaagcggaagacaccgtgctggtgtgtggttctttccacacggtcgcacatgtcatggaagtgattgacgcgaggagaagcggtggcaaactctgccagatgcacgtcaatgtgcaggataaaatcgatgaggaaataaatcaggtccatatttgcctatgccttgtactcgtcatcgtttcaggctgtaaatacgttggctacagcctgaaatgttccgagcattattactcgttagtccgccagaaatag

SEQ ID NO: 24995 - DNA, 1428 bp, Homo sapiens
  SIMILAR (505)..(1386): 941254mologous to Escherichia coli protein AraJ precursor,accession number U73857,Smith-Waterman Score=1397.
atgctcggtaaaacgtataccaaagcagaatgcaaagcactcttgaataaagaccttgccactgtcgccagacaaattaacccgtatatcaaagtcgatataccggaaacaagcgcgcggcgctctttactcattcgtttacacgtgggtgctggcaattttagaacatcgacgcttcttcgcaaaataaaccagggcgacgttatcgcggtatgcctgcccctctgcgctgactcgcagtatcaaccagagagcattaatcgcgtagaacagtcatgtctctctagtgatgtatcagaaaagaaccttaacaaccgattaccaaaaaaacttaataacaccgttaatagtacacagatttatcggcacagagccaaaatacaaaaaaccatatggagacaacaccccaaggaaacaacaaaacaaaatagccgaccaaaaagaacaaaattacccagggagcaacgcgacaaaaaagaaagaaaaagaaccaacaccaaatatggggaaacaataaacacagaaggagacaaacaaaagatgctcgccattggtcggctggtatccggctttccgcatggcgcattttttggcgtcggagcgatcgtgttatcaaaaattatcaaacccggaaaagtcaccgccgccgtggcggggatggtttccgggatgacagtcgccaatttgctgggcattccgctgggaacgtatttaagtcaggaatttagctggcgttacacctttttattgatcgctgtttttaatattgcggtgatggcatcggtctatttttgggtgccagatattcgcgacgaggcgaaaggaaatctgcgcgaacaatttcactttttgcgcagcccggccccgtggttaattttcgccgccacgatgtttggcaacgcaggtgtgtttgcctggttcagctacgtaaagccatacatgatgtttatttccggtttttcggaaacggcgatgacctttattatgatgttagttgggctagggatggtgctgggaaatatgctaagtggcaggatttcaggacgttattcaccactgcgcattgcagcagtgactgactttataattgtactggcactgctgatgctctttttctgcggcggcatgaaaacaacgtcgcttatttttgcttttatttgttgcgcgggattatttgccctttcagcaccgctacaaatattgttactacaaaacgccaaaggcggagagttattaggtgccgcaggtgggcaaatagcgtataacctcggtagcgccgtcggggcatattgcggaggtatgatgctgacgctggggctggcatataattacgtgacgctgactgccgccctgctatcgtttgctgcgaagtctactgctgctctggcggtgctcagcaatccacactggtgcggcaaggcaacgtaa

SEQ ID NO: 24996 - DNA, 3912 bp, Homo sapiens
  SIMILAR (2213)..(2172): 371254mologous to Escherichia coli K12 part of glycogen operon, a glycosyl hydrolase, debranching enzyme,accession number AE000419,Smith-Waterman Score=40.
ttaaaaacgctgctctttgagcaccattttgcagtaaatcgaataaagatgcttctcgcgaccactgacgcggcacggtattcccgcttcctgcaaacgcccttcgatttcagaaagaatcttctggatcatctctttacggttgccgcgcgcggctttcaccacttctttgattacgcgataacggttgggatacagcgcctcaaaacccagctcttcgagttcggttttaatgtggtggatacctaaacggtgcgccagcgggctataaatttcgagagtttcacgggcgatgcggcgacgtttgtccgggcgaagtgagcccagcgtgcgcatgttgtgggtacggtcggcaagtttgatgaggatgacgcggatatcctgcaccatcgccataatcatcttgcgaaagttttcggcctgcgcctctttcttatcgcggaacttgagtttatcaagtttcgacaccccctctaccagctcggcgacgcttttaccaaaaagctgttccatatcctgatcctggtagttggcgggagtatcttcaatcacgtcatgcagcagcgccgccatcagcgtttcatagtcgagtttcatctcggccagaatgcaggcaaccgctaccgggtgcgtgatatagggttcaccgcttgaacgtgtttgcccctcgtgagcatcacgtgcaacgagatacgcctgccgcagacgcttgatttggtcaatcgccagacccgcagcaaaggtcagcgcgtgttgctcggcaattgccacgtcgaagtagcgatccgggaatttacgtgaaaactcgaccatgccggaaccttcacgcatcgccggagtaatcgccatcagcttgttgtctttcgcggaaagcagctgtgccagatggttgttgagcgcgccgacattttcggaaatcgacatttcattgtcgttgagaatcaccagcatatcaggacggatatcgcccgcgtgattcatcgcttcaaacgccatgcctgcggtaatcgcgccatcgccaatgacacagacggtgcggcgatttttgccttctttttcggcagcaaccgcaataccaattccggcactgatggaggttgatgaatgcccgacgcttaatacgtcatattcgctttcgccgcgccacgggaacgggtgcagaccgcctttctgacggatggtgccgattttgtcgcggcgtccggtcaaaattttatgcggataagcctgatgccccacatcccaaatcaattggtcaaacggggtgttgtagacatagtgcagcgccacggtcagttcgaccgtgcccagcccggaggcgaagtgcccgctggaacggctcacgcccagttcggtgaggcccgcgctattcgtcagtattgcttgttttctgcgccaattgacatccctccgattcttccgggggcaaacgtttaacggccttctcgaccagccattcagcgacatttcctgcctggcattagcgtattggttgcggataacgtaagtattgattaagatgcggtagtacccaggttgttcaccaactgatgtcattatagtatttaagcacataatcacgaccatatcgaaatcagcgaagagtagatcaccgaatgtgcccccgcggatcgtcatattgctggtctgcgccagtgacatccctcgagtctccggggcaaacgctacggaaatcaacaagccaaacagcgagatacccgcccccattagcatcgtgttactgataccgtaattattgataaagatcggtagtgcccaggtcgaaacaatggtgccaatacgacttaaggacataatcacgcccacggcagaggcgcggatatctgtcgggaagagttcattaggatagagccactgcaaattacccggcccgccagagaaaaaggcatacaccgcaaaggccatcactaccagccagatccccatatccgggattagccccaaaaccgccagcgccagcgtcatcatggcaaagctgccaatcaacaatggacgccgtccggcagtgtttaaccacagcatcggcggaatacagccgagcataaagaacacggcacgatgcagcgccacaacgcctgccgtcagattgtagtagtcgacactttcgaatccggcatcctgcatcatggctttcagggtatcctgatcgggatgcatacggatggattctgccagataacggtagctgtcggcgtcgttcgcgaccagtgagccgatacgcggcagcacatggaaggagtatgcatcataggctttgctcagcggctcgataattggcttcgagaactcaagcaccagcaggcggccgccgggtttcagcacgcgatacattgaacgcagtgctttatctttgtcggtgacgttacgcagaccaaacgaaatggtgatgcaatcaaaggtgttatccgggaacggcagcgcctcagcgttcgcctgaacatactcaacgttgccaatcacaccgatattacgcagcttctcgcggcccattttgagcatggattcattgatatcagcaaggaccactttgccagtttctccgaccaggcgggagaatttcgctgtcaggtcgccggtgccaccagccagatccagcacggtctgcccacggcgtacgccgctgcaatcaatcgtgaatcgcttccacaaacgatgaatacgtgcctgacgggtatgacatcgcttctggcgcatcgctcggcgctgtttttcaagacggcatccgcccgatcctgccgcaactgattgaagcctatatgaaccgtcgcgagtcggggagtatcgcttttggtcgatatcctcggcgtcctggcgataaacagcctgatggcgtttggtcttggcgctatctggggcgtgttgatccttacttgcctgttgccagtaaaccagctgctgaccgcgcagtttggctggaagcaaagtctgatcgccgccgtggtggtactgatgacccgtgtggtagtcgtgcgctatttcccacatcttaacccctatccccagaggcaaatcataatgtagccagaaacgacgggcagcatcgcggaaatgatcgttccactcggcaaacagcggcgggaaatttcccacctgataaccaccaggagcgatatcccacggttcagcaattaacttcacctgcgagagcaccgggcagttctggatagcggtaaacaacggcgcatcctgacggaactctggcgtacggcccatgactgccgccagatcaaagcggaaaccatcgacgtggcaggtttctacccaataacgcaggcaggcgctggcataatccaccaccgccggatgactcaaattgagcgtgttgccgcaaccggtccagttgtgataatcgccgtcttctcttatccaataatagctacggttatcgatcccacgcagcgagaataacgggccgtcgaggtccagttccgcactatggttgagcacgatatcaagaatgacttcgatacccgctttatgcagtgctttgattgcatcgcgaaactcatccagcgccgtttctggcgagcaggcatacgccggatgcagcgcaaacatcgccaccgggttgtaaccccagtagttacttagccccatgcgttgcagacgtggttcactggcaaactgcgccacagccagcacgaccacatcgggtgcgtacatgtcgatttcatgaatcaactcccggtcataggcttcacgactgtcaaacgcgctggcgatgagcgtatgcgttgcaatacccgcctggcgggcgcgttcaaggccgaacgcgtcggccttattgctgaaaactgcccgtacggtgcctttaattttgttggttttacaggcgtcaataattgcctgtaaattacttccgttgccggaaataagcaccacaatattcat

SEQ ID NO: 24997 - DNA, 2076 bp, Homo sapiens
  SIMILAR (696)..(4): 951254mologous to Escherichia coli alternate gene name yibJ,accession number U00039,Smith-Waterman Score=1202.
  misc_feature (1)...(2076): n = a,t,c or g
ttagctagcaaatgaattttgtcctttacctgtattacaagaaaataaccaaactgtcatcccatctttataattcccatcaaatttaattagatatgctagatctttagctgtcatgatactggccgttgcggattcaatagatgtgggggtaccatgccccccgattgtgaaaacgcctgggatattaatctcatcagctacagaatggataagatcactttcggggtataaatttatatcaaccaaaccttgcggatctacatttatgaccggattcaacggatactgataaaaattccatccccccttcagtccaatcggatcctgagtgatataccgccccagcagcgggtcataatagcggtggcggttgtaatacaggccggactcctcatcatactgctgacccggcaggcgaatgagctgctgcagatgatgcgggttctcatcactcagcaggttgccccattcatcatattctgcgcaccacgctgttgccccttccgtgctgatgagcgccagcggcaggccgcgatggtcgcagtggtacaggtggatttttcgcgccggcgtgtacaccgggtccatctggtttttcatctgctccacggtcaggccgcacgatgccagccagcggcggctttcctcactcacccggtcagccaggatttcactttccagccggtcgancatcagttgtgggctggaggtaaaccaactgcgggcatcaccgtggggaaacagtagtggtaaccgttcataaaattcactgtcccaggcgacgatagcggtgacgggcgcggtcagggttttttgcagattgccgctggaaagtgccgggcgcagacgttcttttccttctgccgtgcgggtaaacacgatccgtgccggagaacagttagctgatgtcggcccccatttcatcagggcataaatctcccgtaacgtctcatcgctgacgggtgtctcccgccagccgttgtgagtgcgggcatcggtgaacagggtgagggcggcttcacggtgatgtaacaggctggcaagcccgttgagtaacagagcattaaacgtttcgggatcggtcacgttgcaggcgtgtccggcatagggcatcaccattttctggctatcgggcagggcggcatgaagttcactggaacatgctgttggcaccagcagattatcactggcggagatgatttgcaccgggcagcggatggattcgaatcggagctcggtatcggggatctctagagtcccgctggataaaactccggcgcgcccattacaagcccgctgccgcagatattcccgtggcgagcgataacccagcgcactatgcggatgccattcgttataatgctcgaacgcctctgcaaggttctttgctgccgttaacccgtctggtttgggcatgatactgatgtagtcacgctttatcgttttcacgaagctctctgctattccgttactctccggactccgcaccgccgtgttcttcggttcaagtcccaacatccgggcgaactggcgtgtttcattagcccggtagcatgaaccattatccgtcagccactccactggagacgacggaagatcgttgccgaagcggcgtttccaccgctcccagcatgacgtctgtactgtttcacaatactgaccggtatcggggatcccagccacgttttttcgcttcggtttcaatggcttcagcgccataaaggtgtgtgctacgccagtcgggcaagcagtcaccgcaactacgcgtttcggaccgctggcgccaactggtgctgtcgcagcgaccggcgcagtgtaaggtttcgcatggcctttgcgttcactcaggaacagctcagggtgcgcaactgcccgggaaatatcgcccagccagacatttttaccgttcagcgcgctgtcgttcgggatggaatcaccgagaacaatcgccatttcagcgtcgttcggattgtcgatgatttccagttttgcttttcgcgccgccgcgccagcagggtcttcgccatataggcgcgtgccgagattagcgtcaataatcagcagcgttttcat

SEQ ID NO: 24998 - DNA, 1962 bp, Homo sapiens
  SIMILAR (1962)..(1372): 1001254mologous to Escherichia coli proline-tRNA ligase,accession number U70214,Smith-Waterman Score=1010.
ctggtcctcagtggctccctgagcccccgtggtggcaacagcttggccaccatgaggcgcagtctcaaccgcttccccacctgtcaagtcaggcagggaggccttgtgcttggcgaggcgttgggctctcaggtgattgctcttcagcgtgctgcccgtaaaaaaggcgtcgtccacgtgttgacggtcaaagcccgacatcgggccggtatccagtcccagcgcccggcaggcgacgatcagatagcccgcctgcatggaactgttgcgaaacgctgtttcttcggcaagttgtgggctggaggtaaaccaactgcgggcatcaccgtggggaaacagtagtggtaaccgttcataaaattcactgtcccaggcgacgatagcggtgacgggcgcggtcagggttttttgcagattgccgctggaaagtgccgggcgcagacgttcttttccttctgccgtgcgggtaaacacgatccgtgccggagaacagttagctgatgtcggcccccatttcatcagggcataaatctcccgtaacgtctcatcgctgacgggtgtctcccgccagccgttgtgagtgcgggcatcggtgaacagggtgctaagcgcacctgggctaacggcttcgttcatagcaattcggtgatgtaacaggctggcaagcccgttgagtaacagagcattaaacgtttcgggatcggtcacgttgcaggcgtgtccgccatagggcatcaccattttctggctatcgggcagggcggcatgaagttcactggaacatgctgttggcaccagcagatcatcactggcgcagatgatttgcaccgggggatcaacggagttcactgcagacagttccagattatttttatcatccgataaccagatcacgccatcatgaatcgttgcctgcagcgtcatggtacgatcggcaaaggcgcttactttcgccagttgttcatcgtccagataccagacggaaagattggcaaactgcacacatttgctctgattttgctgccaccagatttgcgccgcccgactattataggtaaacagcgccacttctgcggcctgggtgcaggctttcttaatccgccgctcatccggcagccccagctcaatccacaaatcaatgcccaggtgatcgttacgcagccacgcttccggctcatcatcggcacacaaaccacgggtaaattgcagacgttcatcagcatatttcagccacgccagcaagcgcagcatcatacgctcctgggtttctgaaggatggcgcgccagcgtcagagaggcatcgagaaactggttgcggtcgagatcggccacattaaccgtcgctttataaattgtcggggatcctccgtccgtatcaaccagcgtcatttcctgggtagcagcagcgcgcggttctttcggcgcgatagcttctgccagttcaatgttcgctgcatagtcagaggtgtcggagaagaccacatcgtcttcaccgctctgcgccagcacctggaattcgtgagaggcgctcccgccgatagaaccggtgtcggcttgtacggcgcggaaatccagccccatgcggctgaagattttgctgtaggccgcatacattgcatcgtaggtttcctgcagggattcctgagaagtatggaaagagtaagcatctttcatcaggaattcgcgggaacgcatgacgccgaaacgcggacgcacttcgtcgcggaacttggtctggatctgatagaagttcagcggcagctgtttgtaagagctaagctcgttacgaatcaggtcagtgataacttcttcatgagttgggccgagtacgaacggacgctcgccacggtcaacaaaacgcagcagttccggaccgtactgttcccaacgaccactctcttgccacaaatcggctggctgaaccaccggcatcgacacctcgatcgcaccggcgttgttcat

SEQ ID NO: 24999 - DNA, 4174 bp, Homo sapiens
  SIMILAR (248)..(1039): 1001254mologous to Escherichia coli K12 flavoprotein; electron transport,accession number AE000114,Smith-Waterman Score= 1332.
ccagtgccaaagccttgcatgcctccagttcgactctaaaggatttcagccacatggtgggcgttaaccggctccgcaaaccattttcgcccatcaataaagataaaaatgcgccgatcttccagtacgcggattacggcattgttggcgacgccgtgaagatccttccggcgctgaccgcagctttagcgcgttgatccactctggcagggctgcattttggccctgccgctgacagggagctcttatgtccgaagatatctttgacgccatcatcgtcggtgcagggcttgccggttcggttgccgcactggtgctcgcccgcgaaggtgcgcaagtgttagttatcgagcgtggcaattccgcaggtgccaagaacgtcaccggcgggcgtctctatgcccacagtctggaacacattattcctggtttcgccgactccgcccccgtagaacgcctgatcacccatgaaaaactcgcgtttatgacggaaaagtcagcgatgactatggactactgcaatggtgacgaaacctcgccatcccagcgttcttactccgttttgcgcagtaaatttgatgcctggctgatggagcaggccgaagaagcgggcgcgcagttaattaccgggatccgcgtcgataacctcgtacagcgcgatggcaaagtcgtcggtgtagaagccgatggcgatgtgattgaagcgaaaacggtgatccttgctgatggggtgaactccatccttgccgaaaaattggggatggcaaaacgcgtcaaaccgacggatgtggcggttggcgtgaaggaactgatcgagttaccgaagtcggttattgaagaccgttttcagttgcagggtaatcagggggcggcttgcctgtttgcgggatcacccaccgatggcctgatgggcggcggcttcctttataccaatgaaaacaccctgtcgctggggctggtttgtggtttgcatcatctgcatgacgcgaaaaaatcggtgccgcaaatgctggaagatttcaaacagcatccggccgtttgcaccgctgatcgcgggcggcaagctggtggaatattccgctcacgtagtgccggaagcaggcatcaacatgctgccggagttggttggtgatctgcacgagcgcagccttatctttgttgccagcggtccggccgggaactcaaaggagactgccagtgataaactggaggaagccctaccaaccaaaaactgggaagtaccaggagccaattggaacacccctgggaatggaataccaagtgtaccagagaagttgaagggaatgttaagtgccccgaactaccgccggatggtcctgcctgcaccgctacaaatattgttactacaaaacgccaaaggcggagagttattaggtgccgcaggtgggcaaatagcgtttaacctcggtagcgccgtcggcgcatattgcggaggtatgatgctgacgctggggctggcatataattacgtggcgctgcctgccgccctgctttcgtttgctgcgatgtcgtcgttgctgctgtatggtcgctataagcgccagcaagcggcggatactccggtgctggcgaaaccactggggcagctcgacaatgcgcccttccggtgtgaaaacgtaaatctcatccgggaagagatcggatttaacgctctcgataaattcaaacgaactaccggcgctctgttgcagctccagcaggctttgcatccagcgctgggcgcggatttgtgcggtagtactggtttcgccgtgctctttataagcccagtgcgcggcaacacccatctccgccatctggtccatatcttcggtacggatctggacctcaaccggcactccgtgcgggccgatcatcgaggtgtgcaaagactgatagccgttcgcttttggaatggcgatatagtctttcacgcggcccggacgcggcttgtacaggctgtgcatctggcccagcacgcgataacaggtgtcagaatcattgacgatcacgcggaaagcgtagatgtccatgatcgagtaaaaacgctgctctttgagcaccattttgcagtaaatcgaataaagatgcttctcccgaccactgacgcggcacggtattcccgcttcctgcaaacgcccttcgatttcagaaagaatcttctggatcatctctttacggttgccgcgcgcggctttcaccacttttagggttttttgcagattgccgctggaaagtgccgggcgcagacgttcttttccttctgccgtgcgggtaaacacgatccgtgccggagaacagttagctgatgtcggcccccatttcatcagggcataaatctcccgtaacgtctcatcgctgacgggtgtctcccgccagccgttgtgagtgcgggcatcggtgaacagggtgagggcggcttcacggtgatgtaacaggctggcaagcccgttgagtaacagagcattaaacgtttcgggatcggtcacgttgcaggcgtgtccgccatagggcatcaccattttctggctatcgggcagggcggcatgaagttcactggaacatgctgttggcaccagcagatcatcataatacgcccagaaattcggtagtaacagggcggtcatccgctgcttaaagcggttgagtactggataactccgccgcttttcgaaaaagatttgggaaccagttgtcggcatcccgtgcaaatcaccatcggcaaaccggaggagctgcaacgggtcagccaggtcattacactggagccggaagggcaggtggtagcggatgcgcttattacgtttgtttgtattgatcgtcatggtgcgcacgccgtccactaaaacaggggtaccggtaggcgcgtggcgcggataaccgtcggcgtaccctgcggcgacaatgccgattcgctgttcatcgcgcgcagtatagcgaccgccgtagcccacacgctcgcccgcttttagcgtctggacaccaataatctcactgcttagcgtcatcaccggacgtaatccggtattggcgatatcacgccactgaccggacggcgaagcgccatacaaaataatgccaggccgaacccagtcaaaatgcgcttccgggtgccacagagtcgccgccgaattggacaacgaacgccgacactccagcccctccgccgccttgttaatacgcgccatcgcgccggaaattccatcaagatgttccgctttgggcaaatgcgacattagggtcatttcgccaacattcgccattgcccgcaactgctgccagacggtaagcacgcgatcgggctggaagcccaaccgattcatcccactgttcacttttaggataaatattccaacggtgcttttagccgcgcattttgcagtgctttgagctgccagttgctgtgtacgcaggtggtcaggcggtgctggtcataaatctccagatcctgagcatggaaaaatccttccagcatcaggatcggtcctttccagccgcgctcacgtaacgttattgtcgtgtggggcggcgtgtggtggtgctttttgtggctttggtgttgcgtttttttcccttcggtttgggccaaccactttttttccccgttgcgcttgttttgtctggtttgtttttgtcgtgttgtttgttgttctttctgtttgtggggtttgggtggttttggtgtccagggctggtggatccggtcgtcatgcgtgccctctttatggatgcactgggccttgttacccttactggggcttttgtgccgttgtggctgggatggggcccgtgtgtgtcccgttgtctgctggcctggtctggttgtgtttcccgggttgattgcaccgggttgaattaccctgcggagcagcaggtcaggcgtcccgggtagaccgggttcgcctagccgttgttcttggtaaacccgtgatgccccgggtagccagaacatagcaccgttcatgggcggctgtacagcgggttgtttggccgtggtgttcgggtccttggcatatacgtatgccaggcatatttttgacaacacgatccacatgccatgcatttgctggtcagccgagcccatcccaagcatggccattccactccgtgggccattccacatccgttcatgccactggcatatcctcatcattgtacccacgggttcggtcat

SEQ ID NO: 25000 - DNA, 1935 bp, Homo sapiens; identical to SEQ ID NO: 24191
  SIMILAR (958)..(1698): 1001254mologous to Escherichia coli putative aliphatic sulfonate transport ATP-binding protein,accession number AJ237695,Smith-Waterman Score=1233.

SEQ ID NO: 25001 - DNA, 1203 bp, Homo sapiens; identical to SEQ ID NO: 13831
  SIMILAR (1)..(645): 991254mologous to Escherichia coli K12 putative aldose reductase (EC 1.1.1.21),accession number AE000129,Smith-Waterman Score=1069.

SEQ ID NO: 25002 - DNA, 2559 bp, Homo sapiens
  SIMILAR (661)..(1332): 1001254mologous to Escherichia coli K12 putative ATP-binding component of a transport system,accession number AE000399,Smith- Waterman Score=1134.
atgtgcaccggaaccgagaaggcccggattgtcatggacgatgagatacaccggaatatcatggacatattctttaaagcgccctttatcttcaaatgcggcacggaaaccggaggctttgaagaactcaaggaagcgcggcacgataccgcccgcaataaacacgccgccaaatgtcccgagattgagcgccagattgccgccaaaacggcccataatgacgcaaaacagcgacaatgcgcggcggcaatcggtgcagctgtcagccagcgcgcgttcgaaagtgtagccagaaaccctcacgcggacttctcgttattggcaaaaaaatgtttcatcctgtaccgcgcggttaaccgctgcggtcagacgctgcaactgttgcgggagaataatatagggcggcatcaggtaaatcagtttgccaaaaggccggatccagacaccctgttcgacaaagaatttttgcagcgccgccatattcaccggatgagtggtttcgaccacgccaatggcccccagtacgcgcacatcggcaaccatttcggcatcacgggcgggggcaatcgccagattcgagaatcgccaggctggcgttgctgccgcacaggccagcggattgcccataaaagtgacaatgcaggaggggaccgatgtcagtttacgcgtggcaatcgctgcatcttcgataatatttccctgaccgtgccgcgagggaagatcacggcgatcatggggccatcgggcatcggtaaaacgacgctactccgtctgattggcgggcaaatcgcaccagatcatggtgagatccttttcgatggtgagaatattccggcgatgtctcgttcgcgcctgtatacagtgcgcaaacggatgagcatgttatttcagtccggggcgttgttcactgatatgaacgtatttgacaacgtcgcctatccactgcgcgaacatacccaacttcccgcgccattgttgcatagtacggtgatgatgaagctggaggccgtggggctgcgtggagcggctaaactaatgccttctgaactttccggtgggatggcgcggcgtgcagcgctggcgcgtgcgattgcgctggagccggatctcatcatgtttgatgaaccttttgttgggcaagatcccatcaccatgggcgtactggtgaagctgatttctgagctgaacagcgcgctgggcgtgacttgtgtggtggtttctcacgatgtgccggaagtgttaagtattgcggatcacgcctggatcctggcggacaaaaaaattgtcgctcatggcagtgcccaggcgttgcaggcgaatcctgatccgcgcggagttaagccactcatgctgttaaatgcgctggcgtcgctcggacataaagggattaaaaccctgagaacgttcgggcgggccgggttaatgttattcaatgcgctggtcggcaaaccggaatttcgcaaacatgcgccgctgctggtgcgccagctctataatgtcggcgtcctgtcgatgctgattattgtggtttctggcgtgttcatcggaatggtgttggggctgcaagaaatcggcctgatgcgcgctacagagcaactctccagtatgtggcgcaagctggcagtcaactgcgtgattaatccactgactgccatctggaattgcccgaacggtgaattacgtcatcatccgcaagaaattatgcagatatgcgaagaagtcgcggcggtgatcgaacgcgaagggcatcatacttcagcagaagatttgcgtgattacgtgatgcagacggcagcgtgctgttgtaaacgcagaaaacgcttcgccagcaagcgacgaatcgtcaagggggccagccaggcaccgtacattgcgaagccaaaaaccagcatcagcgaggtgaaatggataaatcgcagcgcgatccaggttccgggtttcagcgaatcggccagtggaacaatcagttgcttttggtcctgctcatttcgcttcgccggtaatgttttaatattttcgttttttggccccgtgatttttgcaccactgaatcctgtttcaacaccttccgagaagtttaaagtgattgcctgcggtgcagctggtcacttggcgcgtgtgccggcagccagatcgccgtcgggtgatgggcaaaatcgtcatataccggacgccattcgcttcaccacgcaactccagacggcgacgagcattaataaacgaacccagcgcgtagcggcatctgccggcgctacaccaacatggcgagccgctgcaatcgcatcaggccattgtgcatatatgttcgcctaccagcgaccatttcacttcgcccactttttcgccatccagcaaaacttcccattcggaagcatcggtggtcagctttttcgcctgccagtgaccctgctcacccaccagctcctgctcgctccagcagccatcgccatggttgatgtcattttccggccagataatacggccctgccccggaacgatacgcaccagatggtggaactgtttctggatcgctttcaggtcgtcaaagaatcggcgtga

SEQ ID NO: 25003 - DNA, 1401 bp, Homo sapiens
  SIMILAR (921)..(412): 1001254mologous to Escherichia coli similar to 3- hydroxyisobutyrate dehydrogenases; similar to E. coli hypoth. 31 kDa protein in rnpB 3' region,accession number L19201,Smith- Waterman Score=842.
ctatacggggttggtaaagcgctgagcgccaacgttgatatactcacattgcactcccaggatgatcggattggcatgctcaacttgtacaacgatggcgtcagccagcacctgcacacggccaatgttggcattcgcaaaaatacgggctagcggaacatgcatcgagctgaaacctttggctagcatataggcaatcaatttatcggttggcatcggaaggatggtggacatatcaaagaacaacggattacgcgacaagcctttgcaaacgccgatttcaccgaacaacacggtgcgcactagatcgacattcggggacatggcatagatcaagtcagcatctttagcggtctgctcctggctggctgcgggagtcgcgcttttgactaccaaatgccggacactgtcggcggcggtaccgctcatcactttgacggcaacatcgaagggaagattcagggcttcgcacaaaacggcggcttctgccgaaagcgcattgagcgcgatgctcatgtagttgttgatgagcttaacgcggatccccatgcccggaccgccagcgttgatcaactcactgcccatcgccatcaggatcggtgtggcacgttcaacttgttcagcggtgccgccagccagcagtaacagagtaccggtaatggcatttgcagaagtacggcctaccggaacatccatcatgctgaagcctttggcttgcatatcggcaatcaatttatcggtttgcagcggatggatggtggacatatcaatgaccagcgcatcggtagataagccttcgcaaacgccgttttcaccgaacaacacgttgcgcaccagatcgccattcggcaacatggtaatgataaattcggcatctttagcggcctgcgccgggttggcggcgggagtcgcacctttgtcggacgccaatctctgacatgtgggcagcacctcgtccggcgacccgtacagaaggtagagcgtcctggccggcaggccgctgtgaaaagaggggcccacacacgaaacgcaccgactagaatatgagaccactaccacaaaaacagcatgtgttcgccatttgacacacttgtagcgatacaacgtggaacagacgtacatctgggagatcacgcgacataccgcaaaagttacatgacacagacgtatgacaactacctcggggaacgcaaccattcgccaacagccgcagaacacattacgcaacacccgactacgcccgccgccgccagcttcgcgctgccaactatcttcgacaaattctgcgccatcgacggcggtcagctgctgacaaatcgtatcctgaaggttgagcagaaactgtttaaatgactccggcagaatatcttcaacgtcgttgagcttaaaacgctcgctcat

SEQ ID NO: 25004 - DNA, 3505 bp, Homo sapiens
  SIMILAR (1486)..(1962): 931254mologous to Escherichia coli K12 putative ARAC-type regulatory protein,accession number AE000274,Smith-Waterman Score= 756.
  misc_feature (1)...(3505): n = a,t,c or g
atggcgcggcgtgcagcgctggcgcgtgcgattgcgctggagccggatctcatcatgtttgatgaaccttttgttgggcaagatcccatcaccatgggcgtactggtgaagctgatttctgagctgaacagcgcgctgggcgtgacttgtgtggtggtttctcacgatgtgccggaagtgttaagtattgcggatcacgcctggatcctggcggacaaaaaaattgtcgctcatggcagtgcccaggcgttgcaggcgaatcctgatccgcgcgtacgtcagtttctggttagtgcgtgggcgtcgtggggtggcgctcgggactcgccgcggccgagtgagatcaatctgctccttaacgcacgtgtccttttggccagagcgtcggtgaccccgcttggtgtggcggcggtctgccgctatcgatatcgccactgcagcttaaggctaccgtggaactttcggcgaattctcaggttctccgctgtggacccgtggaggaaccagtgggccacagtgattgcagagcggcgcggcttatccggcctacgggtaggtatatccggctttggtggaggcgcgctccaaatccaggttgaacaaaacatacacaaaaaatatagatctccgtcacatttttgcgttatacaggaagctcgccactgtgaaggaggtactgctatgacgtcactctctcgtccgcgcgtggagtttatctccaccattttgcagaccgtactcaatcttggtgatcatcaacctgattacaacgatattttgtcgcaacgtattcaaagtagccaaagggcgctgggactggaagtcaatctggcggaagaaaatgaactgacgatggactctcttaccgaaagcctggaatgggccgatgtggtggtgattggtcccgttaaaataggaaagcagccacacgttaatgcaatcaaaaatggctttattcgcttaatgaatatggctatccgcatttggtttagtactttccgtctgaaagacgacgttgttatttcatctgtgataacggcgcttgaacttggttatcgcgcaattgataccgcacaaatctatgataacgaagccgcagtagaaccgatggcggctgcttatgttcagccttctcgtcgcccgaccgatggtcgctacggcgaaaagggcccaacagctgcagtcacccgggtagaccgatcatcccagggcaccacacgggtacacgcacaccacgcggagttgcggcgcccaacagtacggccgcgaaacgcgcccaaaaacaccggctcgctttccggcaatttactggctgatttcgtacgcggaaatcctgaagaaagttttccgcccgacgtcgtggctggcattcatatgcatcgacgtatcgacgtattgactgacaatctgccggaagtccgcgaagcacgggagtggtttcgtagtgaaacgcgccgcgttgcgcctattacgctggatgtcatcgcagtgacaatgccgacaacatgttgcacattgaaaatatcgcccttatgccgggaattaattttaaccctggcaaacaggacgacgactcagcgtgctgagccaatgacccgcagattaattcaggtcctgtttgatgaactccctcagcagccacaacaacagctgcacctgcccgtttcttctcatcctaaaatccgcacgatggtggagatgatggcgaaagggcctgtcgagtggggggcattggggcaatgggctggcttttttgcgatgagtgaacgcaatcttgcccgactgatagtaaaagagacggggttgagttttcgccagtggcgtcagcagttacagctgattatggcgcttcagggattagtgaaaggcgatactgtacagaaagttgctcatacgctggggtatgattcaacaacggccatttattactatgttaagaaagcctgggaaaacggcaggtaccagcttataccatcggcgctacggcgtttcacttctgagttcggcatggggtcaggtgggaccaccgcgctactgccgccaggcaaattctgttttatcagaccgcttctgcgttctgatttaatctgtatcaggctgaaaatcttctctcaatccgccaaaacagcttcggcgttgtaaggttaagcctcacggttcattagtaccgagtcaaacggaagaacgacactcgcacggacaccacgccaaggatcgtcgatcaagtggctgtgtacgaaccccggtagcccgacatgccctaccggacatggtggaccaccgtagacacatcgcaggccacccggaaaggcaccacgtgtcggtaccgcttggtatcgcggagcctgaacgcgaccggtccacttattcacctttcgggacctccggagcaaccccaaaagggaaagcaaccgaatgtgaactagctccctgttcagataggagctttacaggttatctctcagacggaaacagagggtacgagagcatacagctcgttgggattccgataggcaccaaggacgtaggcgactgtcacatcganactctgagcccaagcggcgccggaggaagacggcgagttatgcagttattaggtgccgctacttcctgctatcactacgctacactggactcgactgcgactcaggtcagttcagagctgcaggcgacgcgagtaatcagctcagctcacaaggcgagtaagtacgggttataccacagcaatcagggcgatacacgcacggaaacgaagcatggtgaagcacacagggccagcaaaaagggccaaggaaaccggtacaaaagggccgacggttgcgacgggcagagattatcggacgttattaggggcgaccggcattcatattacccggtctttacccctatcgcacatacaaccgtttggacctcttcgggccttgtgcagacccttctggaggatctggcatttccggggacattgagcgtgaaggccgctaaagatgccgaatttatcattaccatgttgccgaatggcgatctggtgcgcaacgtgttgttcggtgaaaacggcgtttgcgaaggcttatctaccgatgcgctggtcattgatatgtccaccatccatccgctgcaaaccgataaattgattgccgatatgcaagccaaaggcttcagcatgatggatgttccggtaggccgtacttctgcaaatgccattaccggtactctgttactgctggctggcggcaccgctgaacaagttgaacgtgccacaccgatcctgatggcgataggggcaagagaagagaggatggggtctcctgtgcgctcggtcgacaattccgccgtgttgtcttcagaattgccaatctggttcctggaagcgcgtggaccgtgcgcaccgtttgcacttaatacagcctttcggggcacaacgggcgcaatcccccaagggatattggcaacccgaattagtaaagacaaggctgcgccgtacacaaatagggaacccattatatga

SEQ ID NO: 25005 - DNA, 1422 bp, Homo sapiens
  SIMILAR (615)..(680): 1001254mologous to Escherichia coli similar to E. coli pyruvate formate-lyase,accession number U00006,Smith-Waterman Score =108.
atgagtacagatagcattgagggcagcaatatttgtgatatcggccatcgcgactgggcacctgtaccgctgctctcatcgtttatcagcgattgtctggaaaaaggccgcgatattaccgatggcggcgcgcgttataacttctccggcgtacaggggatcggtatcgccaacctgagcgattctctccatgcgttgaaagggatggtttttgagcaacagcgtttaagttttgacgaattgctgtcggtattaaaagccaacttcgcaacgccagaaggcgaaaaagtccgcgctcgcttaattaaccgcttcgagaaatacggtaacgatatcgacgaggtggataacatcagcgccgaactgttgcgccactactgcaaagaagtggaaaaataccagaacccgcgcggcggctacttcacgccgggatcgtataccgtttctgctcacgtcccgttgggatcggtggttggcgcgacgccagacggtcgttttgccggagaacagctggcagacggcggcttgtcacccatgctgggccaggacgcacaagggccaacagcggtactgaagtcagtcagtaagctcgataacacgctgctgtctaacgcgccttctttgtcgaactgtcgaaggagatccaggatgacatcatccgccggacagcgcatcagctgtaacgttgtggaaacgcgccgcgatgatgtggcgcgcattttcaacattcagcgttattcactgaatgacggcgagggcattcgtacggtggtcttttttaaaggctgtccgcatctttgcccgtggtgtgctaatccggagtcgatctccggcaaaatccagacggtacgcagagaggcgaaatgtctgcactgtgcgaaatgtttgcgtgatgcggatgaatgcccctccggggcgtttgaacggattggtcgcgatatcagccttgacgctctggaacgggaagtgatgaaagatgacattttctttcgcacgtccggcggcggcgtcacgctttctggcggcgaagtgttaatgcaggcggagtttgctacccgttttttacagcgactgcggctgtggggtgtgtcatgcgccattgaaactgccggagacgcaccagccagcaagctattaccgctggcgaaattgtgcgatgaagattgttcgggggatcctctagatcgacctaaagcagcagctgcaacattgcctatctcggcgcacgtctcgacgaacgtactatcatcaaacagaagggatacgaacaggcgatgctggatgcaggcctggtgccatatagcgtgtatggttgagcaatcttcttcttactcttccggtattgaactgattcgccaggcgcggcgggaatatccgcagctggatggcgtggaggggagtgcgcggggtacagtaacttga

SEQ ID NO: 25006 - DNA, 379 bp, Homo sapiens
  SIMILAR (377)..(9): 901254mologous to Escherichia coli similar to E. coli pyruvate formate-lyase activating enzyme,accession number U00006,Smith-Waterman Score=565.
gccttcgggattttatcaagcaggagggctagggtcatgttcaccacatcccgcgcatgagtcgcgtccataatttttaaatcgaacaacgcttcatcgcacaatttcgccagcggtaatagcttgctggctggtgcgtctccggcagtttcaatggcgcatgacacaccccacagccgcagtcgctgtaaaaaacgggtagcaaactccgcctgcattaacacttccccgccagaaagcgtgacgccgccgccggacgtgcgaaagaaaatgtcatctttcatcacttcccgttccagagcgtcaaggctgatactgcgaccaatccgttcaaacgccccggaggggcattcctccgcatcacgcaaacatttggccc

SEQ ID NO: 25007 - DNA, 1455 bp, Homo sapiens
  SIMILAR (236)..(316): 371254mologous to Escherichia coli Nodulation protein V (EC 2.7.3.-),accession number D90844,Smith-Waterman Score=40.
atgaatgagttggtgcagatcctgaaaaatacccgtcagcatttaatgacgggcgtttcacacatgattcccttcgtggtatcgggcggtattttgctggcggtttccgtcatgttgtatggcaaaggcgcagtgccggatgccgtagccgatccaaatctgaaaaaactgtttgatatcggcgttgcgggcttgacgctgatggtgcctttcctcgcagcgtacatcggttattccattgcagagcgttctgcgctggctccgtgcgctatcggtgcctgggttggtaacagctttggtgcgggcttctttggtgcactgatcgccgggattatcggcggcatcgtggtgcattacctgaagaaaattccggtgcataaagttctgcgctcgcggatcggcagcggcgaaaggaatcgccccttcagtaacgccaacacagcccatcaccagtgccgctttgccggtttcgcgctcttctgcggagaaatttttacgaccaatcagcgtcgccagccccatccccagcggcgggatacaaatacccacggcagcgatggccaccacggtataactgatacgaatcgagctcggctacccgaaagcgaaacccactttcggaacgcgatggaatattccgctatcggtatggcgttagtgggcaccgagggacaatggctgcaaaccaacaaagcgctctgccagtttctcgggtacagtcaggaagagctgcgcggactcacctttcagcaactgacctggccggaggatctcaataaagatctccaacaggttgaaaagctgataagcggtgaaataaacacctattcaatggaaaaacgctactacaaccgcaatggcgatgttgtctgggcgttgcttgccgtctcactggtgcgccacacggatggcacgccgctctattttatcgctcagattgaagacattaacgagctaaaacgcaccgaacaggtcaatcagcaactgatggagcgcatcactctggctaacgaagcgggcgggattggcatctgggagtgggagttgaagccgaatatttttagctgggataagcggatgttcgagctgtatgaaattcctccacatatcaaaccgaactggcaggtgtggtacgagtgcgtgctgccggaagatcgccagcatgccgaaaaagtgattcgtgattcgttgcaatcacgctcgccctttaaactggaatttcgcattaccgtaaaagacggtattcgccatatccgcgccctcgccaaccgggtactgaataaagaaggcgaagtcgaacgtctcctcggcatcaatatggatatgaccgaagtgaaacagcttaacgaggcattgtttcaggaaaaagagcgcctgcacattacgcttgattccatcggtgaagccgtggtctgtattgatatggcgatgaaaatcatgataccctcgcattag

SEQ ID NO: 25008 - DNA, 1516 bp, Homo sapiens
  SIMILAR (1315)..(911): 991254mologous to Escherichia coli similar to E. coli pyruvate formate-lyase,accession number U00006,Smith-Waterman Score =669.
tcaaccgtaaacagcagagcgcccaaatctatcggcgtacgctgcaactctactaatcataaggatcgtgatgcctgaatcgttgatggtcatacgttcttcctcgacgctgcgtaacattgggaatggatgacgttctccgcagatagcgtatcttcggtacatacgctcacggacgatcttccgctggagtcgctggccgatcagcccggtgccggaaatgttcatcttttgatccaccagagggccttttatatcgttcctgttcaccattgatggcagcgcgccggaactgatgcgcaagaaaatcctccgccacggcaagaaagtgggcttcatcaatctaatcaaggatggcatgaaaggagtgaccgttttatgacttctcccgtcaatgtggacgtcaaactgggcgtcaataaattcaatgtcgatgaagagcatccgcacattgttgtgaaggccgatgctgataaacaggcgctggagctgctggtgaaagcgtgccccgcaggtctgtacaagaagcaggatgacggcagtgtgcgcttcgattacgccggatgtctggagtgcggcacctgtcgcattctggggctggggtcggcgctggaacagtgggaatacccgcgcggcacctttggtgtggagttccgttacggctgatgttggtttgatacgtaacgccgcactgactctcattgcgaaaacagggatatgcagacatttcgcctctctgcgtaccgtctggattttgccggagatcgactccggattagcacaccacgggcaaagatgcggacagcctttaaaaaagaccaccgtacgaatgccctcgccgtcattcagtgaataacgctgaatgttgaaaatgcgcgccacatcatcgcggcgcgtttccacaacgttacagctgatgcgctgtccggcggatgatgtcatcctggatctccttcgacagttcgacaaagaaggcgctgtatccggcaacgcgcaccaccagcccggcataatcttgtgggcgctgttgcgcttcccgcaacgtgtcggcgttcaccacgttaaactgaatatgttgtaacttaagctgggtaaacgcccgtaagaagtcggccagtttgcgtaatcctgcttcaccttccagggtcgccggagtgaatttcacgttcagcaacgtaccgttagacagcagcgtgttatcgagcttactgactgacttcagtaccgctgttggcccttgtgcgtcctggcccagcatgggtgacaagccgccgtctgccagctgttctccgggaaaacgaccgtctggcgtcgcgcaaccaccgattccaacggacgtgactttgtcatacagccagtcaaatccccaggcgttgtaccaccaggtgcccagcagacggcccggcgcactgttggcgatggaggtcaccagagtacgtttacccagccacagccaggctgccagcagaatgccgaccaccgcgaccacgccagaggtaatttccagggtcaacat

SEQ ID NO: 25009 - DNA, 1377 bp, Homo sapiens; identical to SEQ ID NO: 10753
  SIMILAR (13)..(342): 921254mologous to synthetic construct InsB peptide,accession number Z37515,Smith-Waterman Score=525.

SEQ ID NO: 25010 - DNA, 370 bp, Homo sapiens
  SIMILAR (1)..(222): 971254mologous to Escherichia coli glyceraldehyde 3-phosphate dehydrogenase (AA 1-339),accession number X14436,Smith-Waterman Score=363.
atgcacgatcaacaggttattgatgcataccatcctgacctgcgtcgcacccgggcagccagccagtcgatcattccggtcgatactaaactggccgccggtatcacacgattttttccgcaatttaacgatcgctttgaagcgattgcggtacgtgtgccaaccataaatgtgacggcaatcgatttaagcgtgacggtgaagaaacctgtaaaaaccgatgtgggtggtgccggaacggtcaaactgaatcgctgccagatcgctcggataagtcggcaggatgtaataaccccacctggctgcgttttcgagaaggcgctgacgttattgatcgccagcggaagaaatgatacactagcacgtcaaa

SEQ ID NO: 25011 - DNA, 1119 bp, Homo sapiens
  SIMILAR (325)..(290): 751254mologous to Escherichia coli K12 putative outer membrane protein,accession number AE000204,Smith-Waterman Score=45.
ttaaaatctgaatgtcatatcgaattcaacgtataagttgtgttctctgtcaccgtcataaggtcgtttttcccagcgtagcgttgcgccagcatcaattatgtcattccaaataatgcgttgcccgtagccgagttgggtaaggacatccgtgccataatgtttttgccaggaggcaccaacacttgcgctgaatatttgctcccagctattttcatagctttgccataacaaatggcttgcctcaaatgccggaacaatatccaacgtttttataggcctgtagccccgggtatcgtgtctctgtattttgttcgtaatacagatgtagaacagattaaaataatcaataaattgtgtctgctcattggtgtctccggtaggaggcttgacggtgtaaccactcattcgactgtaggcactgtcggataagttataaaaaccttgcgtagaatagcgatatcccgggatacgaccagcagtgtaggtacgctcctgatagttaacggtcagtgggaagaagtcttgacctggtctggcttttttctggccaacaacggtaacgaataccgcggtgtcatccatgctaaccataacagcggcagtagcctgacgagccatcatgccggtttccagagtcgcggtgtgttggccgtactggaatttacgaacgatcggattaagcaatgtaatatcctttctctttcttagacagtaccttacggcactggtgttaatacccgatcttctgcgcatcctcgcgactaatgacaaccctaacccagctctatgtgggtaaagcctctcattagccgcgcgaacctccaggcgctcgatgaggtgggtgtaacgtgctacgtctttacgtttcaggtagtcgagcagtttacgacgctgagaaaccatgcgcagcagaccacgacggctgtggtaatcttttttgggtaccgagctaaagtgtgtcagaacgtgctgaaaagtctggcgcgtaaaaatgggtcttcgactgatgaaaaagaagacgaccaaagatatcggcatcaagtttgaagagcgttttgctggcaagaccatcgtgcgcgtcaacatcagcgatgcagtaaaacgtgctgacgccat

SEQ ID NO: 25012 - DNA, 786 bp, Homo sapiens
  SIMILAR (505)..(783): 1001254mologous to Escherichia coli similar to phosphotransferase system enzyme II,accession number U00006,Smith- Waterman Score=450.
atgactttcttacggccggttgcggtcggcgatgtggtgtgctgctatgcatttggccagtcgcgcgaccacgtagccatcgccgccgttattaccatgaccgcacagcaccagccagtggcgggcgtcaggatacgccgaacgacacacctggaatgcggcctcgccagcgcgaagcatcagctcatagagtgtgagccccagcacatctgccgcctcgcgttctccgcggcggatatcgtcggcgtacaacttcctcttatgattatagattttcttttatcatttagagacaaaaagaagtctccaatagtagctgaaagttttcagagctgtagagaacaaccatcttttgacaatgaaatgggtgcgcagtgctatgcaggctggggtggtctgattgtgctgccggtggttgaaggcaagctgggttatatctcagcagtggctgtcggagcagtggtgacggctgtttgtgtgaacgtgctgaaaagtctggcgcgtgttgcccatacctatatggcagcagaggcgctggaaagtgccgcgaaagcgaaaggctgggaagtgaaagtagaaacccaggggtcaattggtctggaaaatgaactgactgcggaagatgtggcgagcgctgatatggtgattctgaccaaagatatcggcatcaagtttgaagagcgttttgctggcaagaccatcgtgcgcgtcaacatcagcgatgcagtaaaacgtgctgacgccattatgagcaaaattgaagctcacctggcgcaaaccgcttaa

SEQ ID NO: 25013 - DNA, 2186 bp, Homo sapiens; identical to SEQ ID NO: 13717
  SIMILAR (945)..(1508): 981254mologous to Escherichia coli genF peptide,accession number M27058,Smith-Waterman Score=935.

SEQ ID NO: 25014 - DNA, 4106 bp, Homo sapiens; identical to SEQ ID NO: 15849
  SIMILAR (2061)..(2960): 931254mologous to Escherichia coli phenylacetaldehyde dehydrogenase,accession number X99402,Smith-Waterman Score=1407.

SEQ ID NO: 25015 - DNA, 706 bp, Homo sapiens; identical to SEQ ID NO: 21576
  SIMILAR (642)..(4): 1001254mologous to Escherichia coli genF peptide,accession number M27058,Smith-Waterman Score=1081.

SEQ ID NO: 25016 - DNA, 1372 bp, Homo sapiens
  SIMILAR (1067)..(1369): 991254mologous to Escherichia coli similar to phosphotransferase system enzyme II,accession number U00006,Smith- Waterman Score=495.
atgtgccccattgaggaaactgcgtcatccttcggcggcaaaccgctgtcgatggtactggttattcagatgtttatgctgctgaccggggcgctgattattatcctgaccaaaaccaatcccgcgtctatctcaaaaaacgaagtcttccgttccggtatgatcgccatcgtggcggtgtacggtatcgcatggatggcagaaaccatgttcgcaccggcttgctacggttattacatcctgccgacttatccgagcgatctggcagcgattcagtttgaccgttccggcaccacccacatcggtcgcttcgtcatcaaccacagctttattctgccggggttgattggtgtgagcgtatcgtgcgtcttcggctggatcttcgccgcgataaagcgtgacgccgccgccggacgtgcgaaagaaaatgtcatctttcatcacttcccgttccagagcgtcaaggctgatatcgcgaccaatccgttcaaacgccccggaggggcattcatccgcatcacgcaaacatttcgcacagtgcagacatttcgcctctctgcgtaccgtctggattttgccggagatcgactccggattagcacaccacgggcaaagatgcggacagcctttaaaaaagaccaccttcgacaaagaaggcgctgtatccggcaacgcgcaccaccagcccggcataatcttgtgggcgctgttgcgcttcccgcaacggtcgccggagtgaatttcacgttcagcaacgtaccgttagacagcagcgtgttatcgagcttactgactgacttcagtaccgctgttggcagcattgttatgctggcggtgatcatgggtctgatgctggcgttcgatatgggcggtccggttaacaaagtggcctatgccttcatgctgatttgcgttgctcagggtgtttataccgtggtggccatcgctgccgtgggtatttgtatcccgccgctggggatggggctggcgacgctgattggtcgtaaaaatttctccgcagaagagcgcgaaaccggcaaagcggcactggtgatgggctgtgtttggcgttactgaaggggcgattcctttcgccgctgccgatccgctgcgtgtcattccttccatcatggtcggttcagttggtggtgcagtaactgcggcgctggtcggtgcgcagtgctatgcaggctggggtggtctgattgtgctgccggtggttgaaggcaagctgggttatatcgcagcagtggctgtcggagcagtggtgacggctgtttgtgtgaacgtgctgaaaagtctggcgcgtaaaaatgggtcttcgactgatgaaaaagaagacgacctggatttggattttgaaattaattaa

SEQ ID NO: 25017 - DNA, 789 bp, Homo sapiens
  SIMILAR (1)..(732): 1001254mologous to Escherichia coli Ribose transport ATP- binding protein RbsA,accession number D90794,Smith-Waterman Score= 1207.
atgaagattattgccggtattacccctgctgatagcggtacgctggagattgagggcaacaactacgtcagattaacgccagttcatgctcatcagctgggtatttatctcgttccccaggaaccgctgcttttcccaagcctgtcgataaaagaaaacatcctgtttgggctggcaaaaaaacagctctccatgcagaaaatgaagaacttgctggcggcgctgggctgccagtttgatctgcatagtctggcaggatcgctggatgtcgccgatcgccaaatggtggaaatcctccgcgggctgatgcgcgactcgcggattctgatcctcgatgaacctaccgcctcgcttacccctgcggaaaccgaacgcttgtttagtcgcttgcaagagctgcttgctactggcgtgggtattgtttttatctcgcataagctgccggaaattcgccagattgccgatcgaattagcgtgatgcgcgacggaaccatcgccttaagcggcaaaaccagcgaactgtctaccgacgacattattcaggccatcaccccagcggtacgggaaaaatcgctctctgccagccaaaaattatggctggagttacctggtaaccgcccacaacatgccgccggaacgccggtgctgacactggaaaatctgaccggcgaaggtttcaggaatgtcagcctgacgctcaatgccggagaaattctgggcctggctgggctgaactggccgagacgctctatggtctgcgtactttgcgtggcggacgcattatgctga

SEQ ID NO: 25018 - DNA, 1335 bp, Homo sapiens
  SIMILAR (610)..(1326): 961254mologous to Escherichia coli Ribose transport ATP- binding protein RbsA,accession number D90794,Smith-Waterman Score= 1132.
atgggttttatgcagccagagccagaaaacgaggagacatatcaggaagataatcagcggaacggggagtcccagcacatccaggttagcgaaatctgtaaacgccatcgggaatccaccaataccttcgtaccccgtcgctccagccataccggaaagcagcagagcgctttcggcaaacagatacagcgtgccaagcgtaatcaccagcgggacgctggcggcgataaattattacagcagagaagggacgctctcgcgaacagcagctggccatactccacactgaacctggccgatatgcggcagttgcagcagcagcatagtcaaacgagactggccgataccgccgccgatggtctgcggcatttcaccgcgcagcagcgcctgatgccactccagctccaggcgatcttcgtcaccggtcagcgccagttgatgcttcagcgtgtcggcatctacacggatccccatggaggaaagctcaaacgcatcttccagtaccggcttgccgccaatcccgacaaggaataccgcgccaagatctttcgctatcgcccgctcacgccctttggcatcaagatccggataacgagacaaggatccccgattattgccggtattacccctgctgatagcggtacgctggagattgagggcaacaactacgtcagattaacgccagttcatgctcatcagctgggtatttatctcgttccccaggaaccgctgcttttcccaagcctgtcgataaaagaaaacatcctgtttgggctggcaaaaaaacagctctccatgcagaaaatgaagaacttgctggcggcgctgggctgccagtttgatctgcatagtctggcaggatcgctggatgtcgccgatcgccaaatggtggaaatcctccgcgggctgatgcgcgactcgcggattctgatcctcgatgaacctaccgcctcgcttacccctgcggaaaccgaacgcttgtttagtcgcttgcaagagctgcttgctactggcgtgggtattgtttttatctcgcataagctgccggaaattcgccagattgccgatcgaattagcgtgatgcgcgacggaaccatcgccttaagcggcaaaaccagcgaactgtctaccgacgacattattcaagccatcaccccagcggtacgggaaaaatcgctctctgccaaccaaaaattatggctggagttacctggtaaaccgccacaacattgccgcgggacgccggtgctgacactggaaaatctgaccggcgaaaggttcaggaatgttcacctgacgctcaatgccggagaaatttcactcggtacctactag

SEQ ID NO: 25019 - DNA, 2556 bp, Homo sapiens
  SIMILAR (1560)..(799): 851254mologous to Escherichia coli K12 putative dehydrogenase,accession number AE000371,Smith-Waterman Score=1086.
ttactccacttcctgccagtttttccgtttactggttttaccgatccccggattcatgctgttggtcggatcgttctcgcgatagaacttctgcaacgtctccggtgctttatacaaatgaccgacgttatgctcggcagggtactgcgcgccgcgctgctgtagcagttccagcatctgttcttttaacgcatgcacatccacgccttttttcactatgtaatcctgatggaagacatagcacataaaatggccgtaatagagcttgtgcaccagctggctgtcgatctccggcggtaaatgctcataccactcggtgtcgttacgccgcagagcgatatccaacgccagaatgtcttcgacttcatcggaatgcaccgcctgataacgaattgctgcgcccgcagcggcgaaacggtgtaaaaacgctttgctgccttcctccggcgtacagacaaagaaatcgccttcggcctgtttgaaataatccaccagccacgatttggcttcgcccacgccatcgcccgccatttttaacagcagatgatgctcgtatttatcgcgccagtttttcatgcgcggcggtaaatggctgcgcttgcgcagccgatttctgtcacgatggttacgcttgctgatctcgaaccgccacaagccgttcagccgccaccggagccggtggtagagccagaaccggaacttgagccgatccccgaaccgccaaaagaagcaccggtggtcattgaaaagccgaagccgaaaccagtgtggcttcaggaccacgcgcattaagccgtaatcagccgcagtatccggtatctggcgcccagcaacaaccaccaccggttcatcgtgcacgacgggcgctcttcccgccagtggctccgtcgatcgccatcccgggctaaagcacttcatatccatcgtcgatgaggctccagtgctcggagccgcaatttcttcactttctgcgacgaccgcagcaacacgatcgccgacgtgacgcattttcttgccgaacatacggcggtcaagcggtgccggttccggtgcgctctgaccacccggggtatagtagatatccgggcaattcaggtgagtaataacgtgaacgacgcccggtaaggcttcagctttgctgacatccagatgagtaatcagtgcgtgagcgtgtgggctacgtaacattttaatgacgcaggcgtcagccgttacgcggtcttcaacatagcagggtttcgcctgcaccattttcgcggcatcagttttaggataatgcttaccaatgacttctaggtcgtcacggaaagtcggagcgatatcaatggtggcctgcggattatttttacgtgcaaccgccagttcaatgacctgatagtattgctgccagccagcatcgcggctgaacaaaccagaaagcgcgtcgtcgatctcttcgcgggtaggtgcggcgatgcgatcgagaagatcggtgataatcagagctgcagctggatcgttataaccagactgcaccacgccaacatcaaccattgcctgttgctttagaaagctggcattggtatgatagcggaaataatgcaaggcctttaaatgtgggtcaatccggaacggggacgggctgaaaatacgattatcggtggcaatgccaccggtatcggaaccctgaatgtgcaggatcaagactctgtcatcacggtacgcagactctcttagagcgccctcaaaccaggaatacttgtgttcaaactcacccctgcggaaaccgaacgcttgtttagtcgcttgcaagagctgcttgctactggcgtgggtattgtttttatctcgcataagctgccggaaattcgccagattgccgatcgaattagcgtgatgcgcgacggaaccatcgccggcaccggtttcggcgatgatttcggttttacccatccgcttcgccagcaacgcctgccccagcacctggttagttttatgcgcgccgccgtgcagcaaatcttcacgcttgagatacagcgtggtgttcgtcccggctgtaatgttctggcatttggtcagcgcggttggacgcccggcatagtttttcagcaggtcgttgaactgagcctgaaattcaggatctttttgcgcactgacaaaagcttcttccagctggcgcagagcaggcatcaggatttgtggcacgtacatgccgccaaactcaccaaaataggggttaagtaatgttgtcattgttcctttccttaatatgcgcgcagcgtcgtgctgatttgtgccaattgcgacgtcagctcgttgttttccattggattggtcgggtcttggtttttcagctgcgccaccagcaaagtcagaaaactgctttgtaaatctgcggcgttgctcgcccgtgagcgaactactgctggtggtactgacgccggtatttgtcggatcggtggtggttaccgcaatggacatagctttctccgtgttgagcacttcaacattggcctgatagctgcgtgacgccgacatggtgttaaccatctctccgacaacatcaacgttcggcat

SEQ ID NO: 25020 - DNA, 1686 bp, Homo sapiens
  SIMILAR (1683)..(1177): 971254mologous to Escherichia coli No definition line found,accession number U00039,Smith-Waterman Score=807.
tcaagggcgataaaaaaccacttctttccccgcgaaactcttcaatgcctgccgtatatccttactggcttccgcagaggtcaatccgaatatttcagcatatttagcaacatggatctcgcagataccgtcatgttcctgtagggtgccatcagattttctgatctggtcaacgaacagatacagcatacgtttttgatcccgggagagactatatgccgcctcagtgaggtcgtttgactggacgattcgcgggctatttttacgtttcttgtgattgataaccgctgtttccgccatgacagatccatgtgaagtgtgacaagtttttagattgtcacacagacaccggggttcggtaaaagagtatctggtgtcatagaaattgccgatgggagtcgccgtcgtaaagctgctgcccttaccgaaagtgattttcgtgttctggttggcgagctgaatatgagcagatgcctgcattatccagattgggtaacgattatcgcccaccaagtgcttatgaacgtggtcagcgttatgcaagccgattgcagaatgaatttgctggaaatatttctgcgctggccccctttccgttgtggtattccaaccacccccaatttggcgccggttatcaggtggtactcgaaggcggaaagttttaattccaatccattgcggcgttttgtctaccgcgctgacaatgcccaaggtgacggtcaccagatggtgagcggaaagcgcaagatcgccggccagcacgtcggtttcaagttgctctaacatataaatcaagcttctttgcccggtgactggctgggtgtctttcaggtggatcgcggcgatacggtcaatgcccagtttcagttcggcgggaacatcattgccccaggcgctgaggttgccgacgtccgggtagacggtgaaccacggtgaggcgagcatctcgtcccattttttccatttgctgatggagttcataaacgcggtatccataatctccaccgccagcattacttgtgatgccgccgcctgttcgactgcccacgccagcccttcagcaaaacgttgccgggtgccttcgtcgtggtcttcgtaatagacgtcataacctgccagctggatggtgcgaatgccgagatcgcgcgccaggcgaatcgctttactcatgatttgcccgggagtcacccactgggtcacataaccatcgctcggcgcacgcactatcgtctgctcaaggttatattttgcttccgcgagctgtgctttcaggctggcgatttgagaatgttcacccaacaccaggctatccagctggctctggatctgtttttgttccgccgccgatgacttcacggaggcttcctgcgccagataattttgccgcgccacatcgatatcgcgttctgaaaacgggtttactttcgcctggctgccacgtgcgtaacgctgatactctttagcgaatttatcccgcgtggcctttgcctgctgagtattcgccgccatctcatctaactctgcgcccaacgcccgctgtttatgttctgcggtaacgatatccgccatcagccgatccacccgcgcctgataacgcgtcgggtccagtcgaaatagcacctcaccttttttaatcagcgtattttttttatccgtcacttcaatcaccacaccagtcacctgcat

SEQ ID NO: 25021 - DNA, 1509 bp, Homo sapiens
  SIMILAR (1048)..(1485): 981254mologous to Escherichia coli GALACTOSIDE TRANSPORT ATP- BINDING PROTEIN MGLA,accession number D90884,Smith-Waterman Score= 726.
atggcagcaagcgggctggaaacacgtttcgatgaagtggggaatttatacggtcgcctgaatggcaccgaatatccacaggaagtggttttgagcggttcgcatatcgataccgtggttaacggcggtaaccttgacgggcaattcggcgcgctggcggcgtggctggcaattgactggctgaaaacgcaatacggcgcgccgctacgtacggtcgaagtggtgactatggcagaagaagaaggcagccgcttcccgtatgtcttctggggcagtaaaaatatttttgggctggcgaatcctgacgacgtgcggaatatctgtgatgcccaacagttagccgatgtgctggaaggccactacatcagcgagaaacgttttttgctggaagcgcaagtctgtcagcaagattgccagaaacgcatcagcaccgcgataaatgaagtgcggatcggcagcggcgaaaggaatcgccccttcagtaacgccaacacagcccatcaccagtgccgctttgccggtttcgcgctcttctgcggagaaatttttacgaccaatcagcgtcgccagccccatccccagcggcgggatacaaatacccacggcagcgatggccaccacggtataaacaccctgagcaacgcaaatcagcatgaaggcataggccactttgttaaccggaccgcccatatcgaacgccagcatcagacccatgatataaagttgcctgtaagcaccagcagcaatgctgtgagcataaatgcacgtgtgcactctcacacgggtgttcccgccgaactgaaactgggcattgaccgtatcgccgcgatccacctgaaagacacccagccagtcaccgggcaaagtcccggacagttccgcgacgtgccgtttggcgaaggctgcgtcgatttcgttggcatcttcaaaacgctgcataaactgaactatcgcggttctttcctgattgagatgtggaccgaaaaagccaaagagccggtgctggagattattcaggcgcggcgttggattgaagcgcaggtccctatgttcacggcaacagaggcagtcccggtagcaaaagtggtggcaggaaataagcgttatcccggcgtcgttgcgctggataacgttaacttcacgctcaataaaggcgaagttcgtgcgctgttaggtaaaaacggcgcgggcaaatcgactctcattcgaatgcttaccggcagcgaacgcccggatagcggtgatatctggattggcgagacgcgactggaaggtgacgaagctacgctgactcgccgtgccgctgaactgggggtgcgcgcggtttatcaggagttaagtctggtggaagggctgacagtggcggaaaacctctgcctcggtcagtggccccgccgcaacggcatgattgatcacctgcaaatggcgcaggatgcccaacgttgcttacaggcgctgggcgttgacgttagtcttgaacaattggggatcctctatagtgtactataa

SEQ ID NO: 25022 - DNA, 639 bp, Homo sapiens
  SIMILAR (382)..(639): 961254mologous to Escherichia coli No definition line found,accession number U00039,Smith-Waterman Score=429.
atggccgcgccagccccgatcagcgcctatctccacgccggatcgatggtgaaagtgggcgttaacatttttgcccgcgctatgatcgacggcggcaatatcccgcatgtgattggcggcgttggcatggtcatggcactgccagagcaggatatgaagcggttgctagcctggtcgaccatcactcaacgtaggctggatgtactatcggcttggtcggtctccatcttacggctcggcggcatggcgctggagggcagcatcgcctacatcgtaataaacttctgtgatgttaagccacagagatttcggggcttatctgttccagcagccagcattaccgtagtgcttatccagcagttcgttttgcatcgcagggagctgcggcgcaagctggcgcttcccgctcaccatctggtgacgttcacctggggcaatgtcagcgcggtagacgaaacgcggcaatggatggtaatcaaaccttccggcgtcgagtacgacgtgatgaccgccgacgatatggtggtggttgagatagccagcggtaaggtggtggaaggcagcaaaaaaccctcttccgatacaccaacgcatctggcgctctaccgtcgctatgccgaaattggcggtattgtgcat

SEQ ID NO: 25023 - DNA, 3028 bp, Homo sapiens; identical to SEQ ID NO: 18384
  SIMILAR (1925)..(2437): 991254mologous to Escherichia coli DEAD box protein (AA 1- 432),accession number X52647,Smith-Waterman Score=871.

SEQ ID NO: 25024 - DNA, 1662 bp, Homo sapiens
  SIMILAR (844)..(1623): 991254mologous to Cloning vector pZC320 SopA,accession number U26464,Smith-Waterman Score=1354.
atgtcggtggatgaaaccgacgaacggctctcacgtcttgactggagcgccgcacaaaggacttcgctggttgccgcgatgatcgaaacaggtgttgggatcccgtcgatgtgcctgtccgcacatcgtcgctttccctttggtagccgtgacgaggcagtgcgcgaacgggcgcgggaaatcatgagtaaagcgattcgcctggcgcgcgatctcggcattcgcaccatccagctggcaggttatgacgtctattacgaagaccacgacgaaggcacccggcaacgttttgctgaagggctggcgtgggcagtcgaacaggcggcggcatcacaagtaatgctggcggtggagattatggataccgcgtttatgaactccatcagcaaatggaaaaaatgggacgagatgctcgcctcaccgtggttcaccgtctacccggacgtcggcaacctcagcgcctggggcaatgatgttcccgccgaactgaaactgggcattgaccgtatcgccgcgatccacctgaaagacacccagccagtcaccgggcaaagtcccggacagttccgcgacgtgccgtttggcgaaggctgcgtcgatttcgttggcatcttcaaaacgctgcataaactgacactcctggctaaatacaaaagcttgcaatgggacaaagtactgaggctggaggaggtgcaggctaaactagggattagtctagaagaaatgctgttggtcacagaagatgcccttcatcctgaaccctataaccctgaggagatctgcaggtgtctgggaattagcctggaggaactccgaacccaaatcctgagtccaaacactcaagatgacgtatttccaccggtgatcggggttgctgcccataaaggtggcgtttacaaaacctcagtttctgttcatcttgctcaggatctggctctgaaggggctacgtgttttgctcgtggaaggtaacgacccccagggaacagcctcaatgtatcacggatgggtaccagatcttcatattcatgcagaagacactctcctgcctttctatcttggggaaaaggacgatgtcacttatgcaataaagcccacttgctggccggggcttgacattattccttcctgtctggctctgcaccgtattgaaactgagttaatgggcaaatttgatgaaggtaaactgcccaccgatccacacctgatgctccgactggccattgaaactgttgctcatgactatgatgtcatagttattgacagcgcgcctaacctgggtatcggcacgattaatgtcgtatgtgctgctgatgtgctgattgttcccacgcctgctgagttgtttgactacacctccgcactgcagtttttcgatatgcttcgtgatctgctcaagaacgttgatcttaaagggttcgagcctgatgtacgtattttgcttaccaaatacagcaatagtaatggctctcagtccccgtggatggaggagcaaattcgggatgcctggggaagcatggttctaaaaaatgttgtacgtgaaacggatgaagttggtaaaggtcagatccggatgagaactgtttttgaacaggccattgatcaacgctcttcaactggcagtgttgttcatagtactttctgtgacaatggaaatgtctga

SEQ ID NO: 25025 - DNA, 749 bp, Homo sapiens
  SIMILAR (97)..(2): 341254mologous to Homo sapiens neutral protease large subunit,accession number M27826,Smith-Waterman Score=39.
ttatggaagcagaacaaaggggcccatttccacctccccccaggctgctgtaggatgcagaggaggacagtggggcagggagggaagggcccaggacaaggccatctttgtttccgtgttgttcctccctgaggcctctgcaaggaaagccaagtccgaagtcaaaagacgccacttttcttccactctctctctgcagaagccttcatcctctcattcactcaacaggtatttatggagctccagggtaccaggctgtgggccaggggcttccactgtgagagttacctaaagctcggcatccgtgatggtctacggggcttccgaggcgatcgggcagcatcagccttcagccgctaagccgagaagatctgggaaggagtcagtcagagagccttgggccagagttccaggggctctgggagtggctgccagggtctagggctgtgaagcatctcagggttatatttgatgaaaaagagcctaaacgctatctgatttgggataaagaaaaaggagcattaaccttgactatgcctttggctccagccacctttttaagagtaaattgctgggcaggtgggggagggctagtcacggaacgaaactgtaagcccgaccagaaaatgaaaggaattgaaattaagagaagggagagattgaagtgtggctccaagattgaaaggagaaagaggttgagggatagtgagggaggttggagaagagtagaggccgcttaccggatttga

SEQ ID NO: 25026 - DNA, 3331 bp, Homo sapiens
  SIMILAR (562)..(1356): 831254mologous to Escherichia coli Ribose transport ATP- binding protein RbsA,accession number D90794,Smith-Waterman Score= 1017.
  misc_feature (1)...(3331): n = a,t,c or g
atgccgcatcgacaacacggtccacagatgacaccgagtcatcaacgcacgactataaaccgcgaccagcgggaacagcagcccatcggcacagcggcaccacagaccagaccacaatccgcgccctattgtgaacctcacacccggagaaggacactgcagccacacaacagaggcttcagaaccgcgaagtacacgagcacccaagccagaaagtaccacatggctcgaccagagcggagcaacgacagcgaccacccagtacacacaaggagccgatggaatgcgacacaaacagaacgacacacacagcaccacgtctcgccgccttcgtccctacgcacgctcagaaccaactgcacgtcacacgcacaccaccgatatcatcgccatgcacagtggcaccgagtaggccttttggacgtaaagccaaccggagtcccctccaacacggtgttctccccgccgaaaaacgccctttgggcggaccgggtggacacctcaaggggccgaaccactgtagagcaggacaaccaccctaacggaggcaacgtggtggggactccaagcgacaacaacttttggctagagacaacagggggggaccctaataaagagtattatcaccaccaccattacaatgaagattattgccggtattaccccctgctgatagcggaaccgctgcttttcccaagcctgtcgataaaagaaaacatcctgtttgggctggcaaaaaaacagctctccatgcagaaaatgaagaacttgctggcggcgctgggctgccagtttgatctgcatagtctggcaggatcgctggatgtcgccgatcgccaaatggtggaaatcctccgcgggctgatgcgcgactcgcggattctgatcctcgatgaacctaccgcctcgcttacccctgcggaaaccgaacgcttgtttagtcgcttgcaagagctgcttgctactggcgtgggtattgtttttatctcgcataagctgccggaaattcgccagattgccgatcgaattagcgtgatgcgcgacggaaccatcgccttaagcggcaaaaccagcgaactgtctaccgacgacattattcaggccatcaccccagcggtacgggaaaaatcgctctctgccagccaaaaattatggctggagttacctggtaaccgcccacaacatgccgccggaacgccggtgctgacactggaaaatctgaccggcgaaggtttcaggaatgtcagcctgacgctcaatgccggagaaattctgggcctggctgggctggtggggaccaggacgcacagaactggccgagacgctctatggtctgcgtactttgcgtggcggacgcattatgctgaatggtaaagagatcaataaattatccactggagaacgtttactgcgcggtctggtttatctgccggaagatcgccagtcatccggactgaatctcgatgcttcgctggcctggaacgtctgcgcccttactcataaccttcgtggattctgggcgaaaaccgcgaaagataatgccaccctggaacgttatcgtcgggcgctgaatattaaattcaaccaaccggaacaagctgcacggacattatccggtggcaaccagcaaaaaatcctcattgccaaatgcttggaagcttcgccgcaagtattgattgtcgatgagccgacgcgcggcgtggatgtctcggcccaactagtaaatgtcgcggttgccctaccgagcgactacggtcagagtcggctcaaggacggcagtcagtgcgtggaaggttgtatgcgagtcaagaatcgatgcaaaatctacggacaactgactgggcggatggctggcgtgcatggtttaggcttgaccctgggtgttcgtcagaccggcacacaaggggacggacttaccttccactgtgagagttacctaaagctcggcatccgtgatggtctacggtgcttccgagtgatcaggcagcatcagtttcagccgctaagccaagaagaagtcagtcagagagccttgggccagagttccagcggctctgggagtggctgccaggcgcggcaaatccggcgcaagtggctggcgatttccatgcgcaaatcgacgctatctggggaggtgcgcgtgcgtaatcatcagttagggatttatgaaaaagcgctggcgaaagatctctcctggccggagcggctggtgctggcaaaaagctgcggttttgattttgtcgaaatgtcggtggatgaaaccgacgaacggctctcacgtcttgactggagcgccgcacaaaggacttcgctggttgccgcgatgatcgaaacaggtgttgggatcccgtcgatgtgcctgtccgcacatcgtcgctttccctttggtagccgtgacgaggcagtgcgcgaacgggcgcgggccatcatgagtaaagcgattcgcctggcgcgcgatctcggcattcgcaccatccagctggcaggttatgacgtctattacgaagaccacgacgaaggctacccggcaacgtttgctgaagggctggcgtggcagtcgcacaggcgctggcatcacaacaaatggacagaatggcacgagatgctcgcctcaccgtggttcaccgtctacccggacgtcggcaacctcagcgcctggggcaatgatgttcccgccgaactgaaactgggcattgaccgtatcgccgcgatccacctgaaagacacccagccagtcaccgggcaaagtcccggacagttccgcgacgtgcccgcggtagacgaaacgcggcaatggatggtaatcaaaccttccggcgtcgagtacgacgtgatgaccgccgacgatatggtggtggttgagatagccagcggtaaggtggtggaaggcagcaaaaaaccctcttccgatacaccaacgcatctggcgctctaccgtcgctatgccgaaattggcggtattgtgcatacccactcgcgccacgccaccatctggtcacaggccgggctggatctccccgcctggggcaccacccacgccgattatttttacggtgccatcccctgcacgcgacagatgaccgcagaggagattaacggcgaatatgaatatcagaccggcgaagtgatcattgaaaccttcgaagaacgtggcaggagtccggcacaaatcccggcggtgctggtgcattctcacggnccgttcgcatggggtaaaaacgccgccgatgccgtgcataacgccgtagtactcgaagaatgcgcctatatgggtctattctcgcgccagcttgcgccgcaggtccctgcgatgcaaacgaactgttggtaa

SEQ ID NO: 25027 - DNA, 2505 bp, Homo sapiens
  SIMILAR (1270)..(1157): 781254mologous to Escherichia coli Xylulose kinase (EC 2.7.1.17) (Xylulokinase),accession number D90793,Smith-Waterman Score=154.
atgctcaccatcactggccatcaagaaatgaaaatcgaaaccacagtgagataccatctcacaccagttagatggcaatcattaaaaagtcaggaagcacaggtgctggagaggatgtggaaaataggaacacctttacactgttggtgggactgtaaactagttcaaccttgtggaagtcagtgtggcgatttctcaggccgcgagcgcgggctgctggcaccaattactgacgtggttaaacgtgggctctgtatattggctggagcgcaggcgctaaccttgcttgcccaactatcgtaccaccaacgatatgccgattgtcgatccgcaaggtttcgatgcgtaaatctgttcccgctgcaaatcaacccgcacttcaccaacgcgctgccgaaggccataaaggtgaaacccgtgagcagcgtattcgcgaactgctggcgtcgcgccagaactgacgattattggtctaccggaaggattcacaatattaatactgtcccgtccttcatcttcatccggctgttccagcacactgtaagccaccaacaaaacagcgagttcaggcgctgcatatctcccagcgatcgagtgggcgtgggaatagcggcgattaagaatgcgaaaacgatgtttgctggacgcaaacgacgagcgctgcatgaacaggcaacgtacaacgttgtagaagacgtgggaattagatacaggaaaaggatgacagagtacgaacttcgagctctgtacctcatctacaatcttggcggggctgaactcccgctgagtaacaccgtgccaccggagaaaaccgaggcacgcaacgcaaaatattacaattctgataattcgcccgttcttgccgcacgcacgggcggtattctcacgcattcaagtctgaatggttccagcacctccatgcactgcagaacaggccgaatggctgattcattcttaccgcagcgcgggttcgaggttaagaaagctctcagtctcgactatcggcactgtggcctaatggcgattaccatcacactgaaacagtcattaccgttatggtaccggcgcaatggtgttgtgctggcactgcgacaaccactgcgtgaccagacatcggaatcactggagctgcttgctcaacaaaatcgacagcatggaagatcggcattacgccccacgacccaggcggcacccggactggccatctttccagcagcgtataggtgtcgatgcctaaacgttcggcaatcagttttcttcggcacagaaagcatcgcggaaccagcgcatggagaaagaatatcggcacgtagccagccatatccagcaatgcaggtttccagtcacgggtggttagatcaaaagtcccgtggtgccagcgttagagggatccaccggcagttcgccgctggccggggtttgcagaatggcgtatttccggactatccagccaggcattcagtttattctgccgctaaattggcgctctctggcggccattacgcgttgtttaacggtggcgctgtttctcccggcactaccgttttactcaaaatgccggggggtggtaatggatctccagtgagagatcgaagcggtcgagaaagggccccgagagccgggctgggattcatcgccgcaacaagctggaaacgggcggataggttatttttgctcgtgtgcgtgaaagatggatctgcccggattaatcggctctcgcaaggcatccagtgtacgccgttcaaattcagctccggcagcgtatgcgcgtggtggtcaacgggctttggtaatcaagcgttttcgcaggtgaataagaatcagcatatccagtccttgcaggaaatttatgccgactttagcaaaaatgagaatgagttgatcgatagttgtgattactcctgcgaaacatatcccacgcgtccggagaaagctggcgaccgatatccggataacgcaatgatcaaacaccgggcgcacgccgagtttacgctggcaaaatcactgcaatggtatgaaccacaggcgagagcagtaaaatggcggtcaaattggaatagccatgcaggccattatgatatctgccagttgccacatcagcggaggcttagcaaggtgccgccgatgaccgttgcgaaggcgggattcatacagcggccagacatccgtcatccatatcaccacgcaaagggtgacagcaggctcataagacgccccagcgtcgccatagtgcgtcaccgaatacgtgcgcaacaaccgtcttccggagactgtcatacgcgtaaacagccagcgctggcgcgatttagccccgacatagccccactgttcgccatttccgcgcagacgatgacgtcactgcccggctgtatgcgcgagaatgcgccgcagagactcatcgcggctgatccttttagggattcgttaaactgcgcatcaatgctgatgccaatttcagggcaatctgctgccacgcctggaaatgcagatgcgcggtatcggtga

SEQ ID NO: 25028 - DNA, 1745 bp, Homo sapiens
  SIMILAR (329)..(811): 921254mologous to Escherichia coli K12 putative 2-component regulator,accession number AE000453,Smith-Waterman Score=733.
atgaccgatctggttttccgtattgtaagcattagaagcaaggtccagcttgcaccaaaggaaagttcatcctttgtccgctgcatttttgcgagcatcattccaccgccagaacaactcaacttcacttgcacaaataaacaggaatcagccactaaaattcacgaattagcgggctacagcagcgatatcttatgcacataatggtgactcaaggagggcttatgtcactgtcaattgttcatacccgcgcagccctgggagtaaatgcgcccccgatcactgttgaggtacatatcagtaaaggtctacccggcttaacgatggtgggcttaccagaaacaacggtaaaagaagctcgcgatcgcgtggcagcgccattatcaatagcggatatgaatatccggcgaaaaaaatcaccatcaacctggctccagctgatctgccaaaagaagggggacgatatgatttacctatcgccattgcgttgctggcggcctcagaacagcttacagccaataagttagatgaatatgaattagtcggagaactggcgcttacaggcgctctgcgcggcgttcccggcgcaatctccagtgcaactgaagctattaagtcgggcagaaaaattatcgtcgcgaaagataacgaagatgaagtggggctaattaacggtgaaggatgcctgatagccgatcatctgcaagctgtctgtgcgtttctggaaggtaagcacgctctcgaacgcccgaaaccaactgatgcagtatcccgggcgctacaacatgatctcagtgatgttatcggtcaaggaacaaggaaagcgagtactggaaattaccgctgctgccgggcacaaccttttactgattggtccgccgggaacaggtaaaacaatgctcgccagccgtattaatggcctgttgccagatttaagcaatgaagaggcactggagagtgctgcgatattaagtctggtaaatgctgaatcagtacaaaaactatggcggcagcgcccgttccgctcacctcatcacagtgcatcgttaactgcgatggtaggcggtggcgcaattccagggcccggtgaaatttcgctggcgcataacggcgtgctttttcttgatgagctacctgaatttgaacggcgtacactggatgccttgcgagagccgattgaatccgggcagatccatctttcacgcacacgagcaaaaataacctatccagcccgtttccagcttgttgcggcgatgaatcccagccctaccggacattatcagggaaaccataaccgctgcacgccagaacagacattacgttatctcaaccggctctcggggccctttctcgaccgcttcgatctctcactggagatcccattaccaccccccggcattttgagtaaaacggtagtgccgggagaaagcagcgccaccgttaaacaacgcgtaatggccgccagagagcgccaatttaagcggcagaataaactgaatgcctggctggatagtccggaaatacgccaattctgcaaacttgagagcgaagatgcgatgtggttggaaggaacactgatccatctggggttatcgattcgtgcctggcagcggttattgaaagttgcacgaaccattgctgatattgatcagtctgacattatcacaccaacgtattgcgggaaagcagacgcaagaaatagcggcaatgtctgtccgtccagtcgagcattggtgcaacgctaa

SEQ ID NO: 25029 - DNA, 503 bp, Homo sapiens
  SIMILAR (259)..(306): 1001254mologous to Escherichia coli TatD protein,accession number AJ005830,Smith-Waterman Score=79.
ctcgccagaagcttacgcaaaaaacgcccgtatgtgctggttggtgcattcgttgtcgggtgttgctgacgccgccggatgtcttctcgcaaacgctgttggcgatcccatgtactgtctgtttgaaatcggtgtcttcttctcacgcttttacgttgtaaagggcgaaatcgggaagaggaaaacgacgctgaagcagaaagcgaaaaactgaagaataaattcaaccgcccgtcagggcggttgtcatatggagacaggatgtttgatatcggcgttaatttgaccagttcgcaatttgcgaagaccgtgatgatgttgtagcgtgcgcggttgggtttgcgatgaacgaccggactggagctgcgggaacttttgccgttgattccggcggaaaaattatgatcgaaactgatgcgccgtatctgctccctcgcgatctcagcgccaagccatcgactagtcggtaccactgcgtgattgaagcgcgagcgtggtttaag

SEQ ID NO: 25030 - DNA, 407 bp, Homo sapiens
  SIMILAR (3)..(131): 461254mologous to Vibrio cholerae z35r,accession number AJ231094,Smith-Waterman Score=112.
ctggttatgcaccagctatagggtatgtgcatacaggaaagcctctttcctttgtttacgatattgcagacatcattaaatttgacactgtagtaccgaaagcttttgagatagcgcgtcgtaaccctgggatatttttcgcaggtagtaaaacattagcccaattgattccgcttatagaggacgtgcttgccgctggagacataaaactgcgggcccacctgaagatgacagcctgttgcatccggtcctgttcatgggagatgcggcatcgaagtgtgaatgagatatggccgcgcactgaaatgtctccgggtaaaagcgatatcctagttgttgagtacgcaagggtaaaagggagtccgaaacatagaagatcgaaaaaaaacgacacgaaaggacagtga

SEQ ID NO: 25031 - DNA, 1266 bp, Homo sapiens
  SIMILAR (424)..(936): 981254mologous to Escherichia coli KbaZ,accession number AF228498,Smith-Waterman Score=880.
atgtttgatatcggcgttaatttgaccagttcgcaatttgcgaaagaccgtgatgatgttgtagcgtgcgcttttgacgcgggagttaatgggctactcatcaccggcactaacctgcgtgaaagccagcaggcgcaaaagctggcgcgtcagtattcgtcctgttggtcaacggcgggcgtacattctcacgacagcagccagtggcaagctgcgactgaagaagcgattattgagctggccgcgcagccagaagtggtggcgattggtgaatgtggtctcgactttaaccgcaacttttcgacgccggaagagcaagaacgcgcttttgttgcccagctacgcattggcgcagatttaaacatgccggtatttatgcactgtcgcgatgcccacgagcggtttatgacattgctggagccccagatggtcgaaaactacgaaacgctgattttcgaagcgcactctaccgattatcaaacgccgcaatcgctgcgccagctggtgattgaccactttgccattctgaaagttggcccagcgctgaccttcgccctgcgtgaagctctgttctctctggcggcgattgaagaagaactggtgccagcgaaagcctgttctggtctgcgtcaggtgctggaagacgtgatgctcgaccgcccggaatactggcaaagccactaccacggtgacggcaacgcgcgtcgtctggcgcgtggttatagctactcggatcgcgtgcgctattactggccggacagccagattgatgacgctttcgctcatctggtacgtaatctggcggattcaccaattccgctgccgctgatcagccagtatctgccgctgcagtacgtgaaagttcgctccggcgagctgcagccaacgccacgggaactcattatcaaccatattcaggacatcctggcgcataccacacagcctgtgaaggccaataagcaaaacaaagaggaacacgctatgccaaatattgttttaagccggattgatgaacgcttgattcacggtcaggtcggcgttcaatgggtcggatttgcgggggcaaatctggtgctggtagccaacgatgaggttgccgaagatccggtacaacaaaacctgatggaaatggtactggcagaagggatcgccgtacgtttctggacgctgcaaaaagttatcgacaacattcatcgcgccgccgatcgacagaaaatcctgctggtttgtaaaacacccgccgatttcctgacgctggtgctttga

SEQ ID NO: 25032 - DNA, 753 bp, Homo sapiens
  SIMILAR (399)..(4): 1001254mologous to Escherichia coli TatC protein,accession number AJ005830,Smith-Waterman Score=675.
ttattcttcagttttttcgctttctgcttcagcgtcgttttcctcttcccgatttcgccctttaccaacgtaaaagcgtgagaagaagacaccgatttcaaacagacagtacatcgggatcgccaacagcgtttgcgagaagacatccggcggcgtcagcaacatcccgacaacgaatgcaccaaccagcacatacgggcgttttttgcgtaagtcttctggcgaggtaatccccatccagcacagcagcacaattgctaccggcacttcaaaggagacaccaaacgccataaacagcgccataacgaagcttaaatagctggcgatgtcggtggaaacctgcaccccttccggcgcggtattggcaaggaagccaaatgccagcggaaagaccacaaaaggggatctgttcggtctgggatactgtatcgtgtacagcacggttgtcgtttctttggttgcttcgcagtgtttatcgtctcgtatggtctggtgtttcgcctcttgtgtattgttcgtgtcagtttggtttggtgcttgtttgtgtcttctgttatttgatttgtttttcgtctttttgtcatatactgttttctctgtgtctttgtgtttcatctgcgtgtgtggtgtatttttagtgtgctttgccttctgggtgtggtgatttgtgtatgttccgtgggtatattgcgttcgttcgtctgtacgtgcgttgagattcgcatctatatccgggtggctacgcgcgcacat

SEQ ID NO: 25033 - DNA, 1161 bp, Homo sapiens
  SIMILAR (574)..(804): 981254mologous to Escherichia coli K12 putative dehydratase,accession number AE000370,Smith-Waterman Score=391.
atgattcctcatccgaagctggaaggggatagatcaacccaagcattgcccccaactccggttatacgggttactgaacggcgaaacttgaactgggtaggcaccactattgggtttgtgcatacaggaaagcctctttcctttgtttacgatatggcagacatcattaaatttgacactgttgtaccgaaagcttttgagatagcgcgtcgtaaccctggtgagccggaccgggaagtccgtttggcgtgcagggatatttttcgcagtagtaaaacattagccaaattgattccgcttatagaggacgtgcttgccgctggagaaatacaaccgccggccccacctgaagatgcacagcctgttgccattccgcttcctgtttcactgggagatgcaggccatcggagaaggcggtctggtcgggtgtcggaagtaagctggcgttcaggcgtcatgagtttccgccgcgccagcggggataaaccgcagccgaagccaaaggtgatgccagaacacgctgagtgtccgcctgctgccaggcgaggccaaatgatgagtatatgtccgtgtttcgcattgaagattgatatcgccgataacaaatttttcaacggcgaaacatcaccgctcttttcgcaaagccaggccaaactggcgcgccagttccaccagaaaatagctggttatcgcccaacaccgctttgtgcgctggacgatctcgcaaacctttttggtgtgaagaaaattctcgtcaaagacgaatcaaaacgattcggtctgaacgccttcaaaatgcttggcgcacctgaaaaatgccatcggcgaaaaaatgactttcgcgaccaccaccgacggcaaccacgggcgcggtgtggcgtgggcagcacagcaactcggacagaatgcggtgattacatgccgaaaggttctgctcaggaacgcgttgacgccattctgaacctcggtgccgagtgcatcgtcacggatatgaactatgacgataccgttcgcctgaccatgcaacacgcgcagcagcacggcggggaagggggacaggacacggcatgggaaggttacaccaaaatcccaaccgggatcatgcaaggcgacgcaactctggcagatgaagccgtcgagcaatgcgtgagggatccttag

SEQ ID NO: 25034 - DNA, 2019 bp, Homo sapiens
  SIMILAR (493)..(2007): 911254mologous to Escherichia coli acriflavine resistance protein,accession number M96848,Smith-Waterman Score=2303.
  misc_feature (1)...(2019): n = a,t,c or g
atgtgtgacggcggtgtgtacagccaaaggaacgtggtcacctcaaagacaccatcatacactaaatcattattagattttcaatttcatcagaataacgacagttttaccgctacattgttcaacaacgtcttagttttaacccatagcaaagataatccttgtttatggattggctcaggtatagcggatatcgatatgttccgcggtaatttcagcattaaagataaactacaggagaaaattgcgcttaccgacgccatcgtcagccagtcaccggatggttggttaattcatttcagccgtggttctgacattagcgccacgctgaatatctctgccgacgatcaggggcgtttattgctggaactacaaaacgacaaccttaaccacaaccgtatctggctgcgccttgccgctcaaccagaggaccatatctacggctgcggcgaacagttttcctacttcgatctgcgtggcaaaccgttcccgctatggaccagtgaacaangccgatccgccggtagcgtgacaattacccttaccttccagtccgggaccgatcctgatatcgcgcaagtgcaggtggagaacaaactccagctcgccacgccgttgctgccgcaggaggttcagcagcaggggatcagtgttgaaaagtccagtagcagctatttgatggtggcgggctttgtctctgataacccaggcaccacacaggacgatatctcggactatgtggcctctaacgttaaagatacgcttagccgtctgaatggcgtcggtgacgtacagcttttcggcgcacagtatgcgatgcgtatctggctggatgccgatctgctaaacaaatataaactgacaccggttgatgtgattaaccagttgaaggtacagaacgatcagatcgctgccggacagttgggcggaacgccagcgttaccagggcaacaattgaacgcctcgattattgctcagacgcggtttaaaaatccggaagaattcggcaaagtgaccctgcgcgtaaacagtgacggctcggtggtacgcctgaaagatgtcgcacgggttgaacttggcggtgaaaactataacgttatcgctcgtatcaacggaaaaccggcggcgggcctggggattaagctggcaaccggcgcgaatgctctcgataccgcgaaagccattaaggcaaaactggcggaattacagccattcttcccgcagggaatgaaggttctctacccttatgacaccacgccattcgtccagctttctattcacgaagtggtaaaaacgctgttcgaagccattatgctggtgttcctggtgatgtatctgttcttgcagaatatgcgagcaacgctgatccccaccattgcggtacccgtggtgttgttagggacgtttgccatcctcgccgcttttggttactccatcaacacactaacgatgttcgggatggtgcttgccatcgggctgctcgtcgatgatgcgatagtggtggtggagaacgtcgagcgcgtgatgatggaggataagctcccgccaaaagaagcgacggaaaaatcgatgtcgcaaattcagggcgcactggtgggtatcgcgatggtgctgtcagcggtatttattccgatggcattcttcggcggttctactggggcaatttatcgccagttctctatcaccatcgtttcggcaatggcgctttctgttctggtggcattgattcttacccctgcgttatgtgcaacgctgcttaaacccgtctctgctgagcatcacgaaaataagggcggtttcttcggttggtttaataccaccttcgatcatagcgttaaccactacaccaacagcgtcggcaaaatcctcggatccacaggacgatatttactgatctatgtgaatcagctcggtaccaaagagatcgtgcatagcggtaaatttattcgacaacagcagccagatagcaaaatcacgcagcagccagacggtaaaactcgccgccgccactgccggtaa

SEQ ID NO: 25035 - DNA, 1482 bp, Homo sapiens
  SIMILAR (1480)..(962): 381254mologous to Escherichia coli K12 putative lyase/synthase,accession number AE000501,Smith-Waterman Score=194.
atggactggtggcgctatgtcgcgcatctgcaagcagaccgtgccagaaatgatcgttatgtcaacacctgcttctgtgaatacacttctcacggtcactgcggtgtgctgtggagcatggcgtcgaccacgacgcgactctcggaaaattcaggcagcgagcgtggttgccgctgctgcccgtgcccactttgttgcttaaattatgagcccgttggcggcgatatatatatgaggaatcagttaagggcatcatttaaaatttacggcgcgcgacgaaccgatgatcaccttgctcgacaatttgcttcccgagaatggttggtgttccacttattttcggcttcgggcaaatccgatcaaaactattctcgacaatcaaagcgcctggacagtaaagggaatattaaacgctgtcgggttccgttaataaagaagcagaacaaatcgcgtggttgcaacatcgatgtaatagaggcgcgtttgtacttatcgacaagacagggatccgcactcatattcctgtggctcggttgcctgcatcatgctggaacctggtacacgggtttcgcatcagctgtacgcctggctgcgcaagttggaacattgttggtatgggtggggaagcgggcgttcgtgtttatgcttctggtcagcctggagcataaaaacaacgcacgagaagaaagacgcgaccacacgaaaacacaacacaacacagaccgcgacaaagcaacagggatattacggtttctgttatcacgccgggagccacttctcgctgcacggaatgttgtgttcaagagccgtctgttccaacatccgtatcaggcgagaggcgtgattaatccggccagcgttccccgaccatgccaccagataaacggcgatatcaagctccatagtactgatagctccgctacaccgagcagggcagtacagcctagacgatcgtctagtgcttactgcacaccagatcgtttgccaggagttgcggcgggttatacagagtgcaggcgtaccgacctgaatgcccatccgtatagcgtcgtctttgtctttgcaccaatatcaatccacatttgtcgacagaaggtgactgcgtgcgctgtcgcctttggcaaagtggtaggacttaatgccgatacaccccatgactggcctttgtccccggtgagggtgacgatggaaccagccatagtgacctggcaggaccgcttacgcgttcaaagcgtaaaatccagacggctctattttcgcaccataaaaccgacttcatccatatgcgcaaaaatcatcagtcgcacgcatcgggtttatcactaccgtagcgcgcgacgacattcccaagcctgctcgccagacctcttttgcctgacgcctgaattcgcacagcatgacgtcgcgacagcgttttcgtgtcctgaaatcgcattgtgctgcaaaagcgagacagggtttcctgcacagaaaatgacatag

SEQ ID NO: 25036 - DNA, 1613 bp, Homo sapiens
  SIMILAR (710)..(9): 991254mologous to Escherichia coli K12 putative permease,accession number AE000463,Smith-Waterman Score=1231.
tcttgcaaacgtttttcattgagtgtgtaaatgaatcccatcgtcaatgcagcaataattgccagtgcacaaggccagataaaaatgagctgacgcaaaccctgtaatgtcgcatcgctttgcgcgatgttgggaacataaccaatttgcgtcagcataatgcctggcaagaagccagcaagtgcggcagaaattttacgaaagaaggtataaccggtataaacagaaccttcggcacgaataccggttttccattcaccgtaatctacggtatctggtaccagtgcccagttcaggctgtttacaaaggccgtgccaaaaaaggcgacacaagagaacatgacgaaagtgaaagagttacttccccagaaataattcagtatatcacccaccgcccacagcaccatgccagccagataaacctgttttttaccaaaacattttacagttaatggcaccagtaatacgccgatgaggatgcatcccatactgaagaatcccatccacgacaataaattaatatcattcagcacatactgggtgtaatagacctgaatcgccagtttgatattaaatgccgccagggtacacaagttagcaatgcataaaaccagcaatggcggattccgaaatatcgcgcaaaatgatttgagaatactggctttatgtccggttggcgttgtgtccacataatgctctttgacgcctctggcaggccgactgcaaagaaaatgcgggctggcgactattactggactttcttcccacagcctacgtttgtcagcacgcagaagtattactgccatgttgataacagttgctatatgaacttcgactttagtgccccggaataccatgcacactggcgctacggtctgttgatggtgggtgagagtcaacatggactgggtgcgaacgccatccaggctagccagtgtttcaaagctgccaaccagcccctgggtgctgatgccacgtttcttcaacagatcaaaggagaaatcatctgcttcggactctttatcacgggagtatttagcattgatagcgccttctgcgatatcacctaattgtgagcgggaaagctgggaagccacaccgctggtagctgaaatggcatcgcgtgcggcaacgatcgcataagaagctttcatttcagccagcgagtgacccaacgcgacgtggcccagttcatggcccagaacgccttcaatttcgttgtcattcatcatgtccatcaggccactgtagacacgaacacagccgttcgccatcgcccatgcgttgacgtcgctggtcatataaaccttatagttgaccggcgtgccattaatattgttacccaatgctttggcgatttttgccagacgtttaccgtacttgctggatttacttgcgacttgattgccgctgtccatttcggcacagccctgattggcaatcgcttttgcatcggcatcgcttaatgttgctgctttataggcatttaaaccggagctgatagccatattggtatcaataccgtgggtattttgacaccctgtcagtaatgctgcagaggtcgcaatcgccagcagtaatttagtattcttcatgtgaatcatccgttgcat

SEQ ID NO: 25037 - DNA, 2661 bp, Homo sapiens
  SIMILAR (1054)..(1854): 1001254mologous to Escherichia coli Acyl-CoA dehydrogenase (EC 1.3.99.-),accession number D83536,Smith-Waterman Score=1429.
atggcccgcgtatggctgtgcgattttatcccatatggctacctgcccaccctgaacgctatgcctgagtccacccgtaaacagattatgccctggacccgcctgagcggtagcttgcacacttggaaccgcacgccaaacagacgaatcggcagatacccatccggcctccctcccgattcggcgaaccggccccgcagggaaccagacgcatgccggtccttgcacagcccagcaaagtaccgaggtaaccccaaccgggacaggctggaccatcagcagaacggactcccagctcgagggaaagatacgcccagatccaacaagccatccataagccagtggaccaacacgaaaccacagccgcggcaccaaccgcgaggcaaaaaaggccacaaatcaccggccccggaaatgcccaaacccccacaagccacgtcgtcaacacgagaacaaaccaagtacggggcggcagaattatggcgtagcccatggaagacgcgttacattgaactgaaagctcgtggaccaatggcctgtgtgacaatttcgttaaacgtttgttgtgcccaccttgtgcgcctggtcatggtcactctaaagcagacggatcccattcgaaaccttggcgaaatgccgtcaaaatcgcaaaccaaaaaagcacgggaggttcatttgcactctttgcacttgcaggagctggcacaggagcaggagccccctgcaaggaagagaaaaacgcagtgggcagtgagtgagaggaagaaggccgatcatacccgggccaatcatcagcactgcacccagcgttacgaccatcttacgggaaacgatcaggttcacaccaaaccaacgctggaacagcggcggcaggtaaccaccgaggatacaaccgaggtcagcaaacagcatcggcatccaggcgaacatcgcgatctctttcaggttaaagccgtaaactttaaacatgaacagcgggatccacgcgttaaaagtaccccaggccggttctggggtatcgcgctgccgcgtttcctggcagaaccggcctggggcaagccggactggaaaaagctgcataactatccgcagccgcgcctgaccgccgaagagcaagcgtttctcgacggcccggtagaagaagcctgccggatggcgaatgatttccagatcacccatgagctggcggatctgccgccggagttgtgggcgtaccttaaagagcatcgtttcttcgcgatgatcatcaaaaaagagtacggcgggctggagttctcggcttatgcccagtctcgcgtgctgcaaaaactctccggcgtgagcgggatcctggcgattaccgtcggcgtgccaaactcattaggcccgggcgaactgttgcaacattacggcactgacgagcagaaagatcactatctgccgcgtctggcgcgtggtcaggagatcccctgctttgcactgaccagcccggaagcgggttccgatgcgggcgcgattccggacaccgggattgtctgcatgggcgaatggcagggccagcaggtgctggggatgcgtctgacctggaacaaacgctacattacgctggcaccgattgcgaccgtgcttgggctggcgtttaaactctccgacccggaaaaattactcggcggtgcagaagatttaggcattacctgtgcgctgatcccaaccaccacgccgggcgtggaaattggtcgtcgccacttcccgctgaacgtaccgttccagaacggaccgacgcgcggtaaagatgtcttcgtgccgatcgattacatcatcggcgggccgaaaatggccgggcaaggctggcggatgctggtggagtgcctctcggcccagccagaagctgcgaactttgttgctaccgacgtgaccgatatgtttgaacaacagtttatcgaacgcgttgacgtcattgttcttcgccgcttccatctcttccagcacgtacggatggcaacgaatcgctccttgtccgaagatcatcatgctgcgggtcagaatgttagccccttcaacggtgatggcaatcggtgcgccctggtaagcacgcgccaggaagttgctttgcccgagcataatgcctttaccgccggtaatatccatcgcatcaataatcgactgctgcccgcgcaaggaaacgcctggttcttcatccccagcgccatcttacttggtgcgcttcatggcctggaaccagggcactcaaaaacgatgatggcggcgtttatcatcgccatcaaaggcaccattaaacaagcggtgatgctcggactggcagcaactatttcgcataccgcagtggtctggttaattgcctttggcgggatggtgatcagcaagcgctttactgctcaatcagcagaaccgtggctccagctgatttccgcagtgatcattattagcaccgcgttctggatgttctggcgtacctggcgcggcgaacgcaactggctggagaatatgcacgggcatgattatgagcatcatcatcacgatcacgaacatcaccacgaccatggacatcatcaccatcacgaacatggcgagtatcaggatgcccatgcacgagcccatgccaatgacattaaacgacgctttgatgtagagagtcaccacctgcaatttcgttcgttctag

SEQ ID NO: 25038 - DNA, 356 bp, Homo sapiens
  SIMILAR (285)..(118): 911254mologous to Escherichia coli o113,accession number M87049,Smith-Waterman Score=273.
aggctttcaggccattttcaccgaacccgatggtgaggctcgctccatgctattgcttaatcttattaataaagagattaagcacagtgtgaagaataccgagttccgcaaactctaaaacgcaatcccaaacagtgttttgacattagcatccgtggtggcagccagccatgcggcatcttctccacgccagtgcgcaatacgttgcaaaatatggggcagatgggctggctcgttgcgccgggatgatggctttggcgtgagatccgcaagcacaatcgctggtgtgcctgcccacgcaaacccggacgggctggaatctcaatggctttgaggtggggttcaggccatgcgtc

SEQ ID NO: 25039 - DNA, 2635 bp, Homo sapiens
  SIMILAR (1088)..(1159): 371254mologous to Escherichia coli K12 carbon starvation protein,accession number AE000165,Smith-Waterman Score=42.
atgaacaaatcagggaaatacctcgtctggacagtgctctctataatgggagcatttgctctgggatacattgctttaaatcgtggggaacagatcaacgcgctgtggattgtggtggcgtcggtctgtatctatctgatcgcttaccgtttttatgggctgtatatcgccaaaaatgtgctggcggttgacccgacgcgtatgacgccagcggtgcgccataacgacgggctggactatgtgccgacggacaagaaagtgctgttcggtcaccattttgcggccattgccggagcaggtccgctggtggggccggtactggcggcgcaaatgggctacctgccggggatgatctggctgctcgctggggtggttctcgccggtgcggtgcaggatttcatggtgctgtttgtttctacgcgccgtgacggtcgctcgctgggtgagctggtcaaagaagagatggggccaaccgccggggtgattgcgctggtggcctgctttatgatcatggtcattatccttgcagtgctggcgatgatcgtggtgaaagccctgactcatagcccgtggggaacatataccgttgcgttcaccattccgctggcgctgtttatggggatctacctgcgctatctgcgtccggggcgtattggcgaagtgtcggtcatcggtctggtattcctgattttcgccattatctctggcggctgggtggcagaaagtccgacctgggcaccgtactttgactttaccggcgtgcagttgacctggatgctgcggctcattaacaggagtataatgatggatttttctttaactgaagaacaagaactgctgctggccagtattcgcgaactgattacgactaactttccggaagagtatttccgcacctgcgatcaaaacgggacatatccgcgtgagtttatgcgggcgctggcggataacggtatttccatgcttggcgtgccggaagaatttggtggtatccctgcggattacgtcacccaaatgctggcgctgatggaagtgtcaaaatgcggtgctccggcatttttaattaccaacggtcaatgtattcacagtatgcgccgtttcggttctgcagagcagctacgtaaaacggcagagagcaccctggaaacgggtgatcccgcctatgccctggcgttgacggaaccaggtgctggctcagataacaacagtgccactaccacttacacgcgtaaaaacggcaaggtctacatcaacggacaaaaaacctttattaccggtgcgaaagagtacccgtatatgctggtgctggcgcgcgatccgcaaccgaaagatcccaaaaaagccttcaccctgtggtgggtcgactccagtaagcccggcattaagattaacccgctgcataaaatcggctggcatatgctcagcacctgcgaagtctatctcgacaacgtggaggttgaagagagcgacatggctattgccgaatgcgcctttgaagatgccgcccgctatgccaaccaacgtatcgcttttgtcattaaaactaaacaggttgaatttcaacttcaggttggtgttccactctattttcggcttcgggcaaatccgatcaaaactattctcgacaatcaaaagcgcctggacagtaaagggaatattaaacgctgtcgggttccgttaataaaagaagcagaacaaatcgcgtggttgcaacgtaaattgggcaatgcggcgcgcgttgaagatgtgcatcccatatcggaacggccacagtatttttctggtgatggtaaaagtggaaagatccaaacggtttgctttgaaggtgtgctcaccatcaacgacgcgccagcgttaatagatcttgtacagcaagatcgcgtctccatgatctttctgcaatatgggcagatcgatgtaatagatggcgcgtttgtacttatcgacaagacagggatccgcactcatattcctgttggctcggttgcctgcatcatgctggaacctggtacacggggttcgcatgcagctgtacgccttgctgcgcaagttggtacattgttggtatgggtgggggaagcgggcgttcgtgtttatgcttctggtcagcctggaggtgcgcgttcagataagctgctctatcaggcaaaacttgctctggatgaagatttgcgtctgaaggtcgtacgtaaaatgtttgaacttcggtttggagaacctgcgcctgcccggcgctccgtagagcaactcagaggtatagaaggcagtcgcgtgcgggcaacctacgcacttctggcgaagcaatacggcgtgacatggaatggacgtcgctacgatccgaaagactgggaaaagggggatacgatcaagcaatgcattagcgctgcaacttcctgtgtatacggcgtaactggagaggggatacttgagggtggtgatgcgcagatattgcgtgagcccctccctggtacgaaattgggacttcttaattggcctgtgttcgacgctttggaaagccgttctacccgggagcgcgacggaaaacctgggggcgagatttgcggggaaactgccaatattcttataagggggccggaaaaccggcccctgagaagggacccccctgggaagccaa

SEQ ID NO: 25040 - DNA, 5128 bp, Homo sapiens
  SIMILAR (528)..(1661): 971254mologous to Escherichia coli K12 putative glycosidase,accession number AE000463,Smith-Waterman Score=2045.
tactatatctcgggcgcgccctcgacaacgttatgagtgggatgaccctgctgaaaccccactttgttgtgttgcacggcacagataaccagcgcacctaacaggtcgaacactgccagaactgcgaacagcgggctgaagccgatggtgtcagccagtgcaccgacaaccagcgcaaacagcgtacttgccagccatgcggacatcccggttaaaccgtttgccgttgccacttcgttacgaccaaacacatcggaagagagcgtaatcagcgcgccagacagtgcctggtgggcaaaaccaccgatacacagcagcataattgcgacatacgggttggtgaacaggccgatcatacccgggccaatcatcagcactgcacccagcgttacgaccatcttacgggaaacgatcaggttcacaccaaaccaacgctggaacagcggcggcaggtaaccaccgaggatacaaccgaggtcagcaaacagcatcggcatccaggcgaacatcgcgatctctttcagcgcacgctgaatatctctgccgacgatcagaggcgtttattgctggaactacaaaacgacaaccttaaccacaaccgtatctggctgcgccttgccgctcaaccagaggaccatatctacggctgcggcgaacagttttcctacttcgatctgcgtggcaaaccgttcccgctatggaccagtgaacaaggcgttggtcgcaacaaacaaacctatgtcacctggcaggccgactgcaaagaaaatgcgggcggcgactattactggactttcttcccacagcctacgtttgtcagcacgcagaagtattactgccatgttgataacagttgctatatgaacttcgactttagtgccccggaataccatgaactggcgctgtgggaagacaaagcaacgctgcgttttgaatgtgctgacacatacatttccctgctggaaaaattaaccgccctgctgggacgccagccagaactgcccgactggatttatgacggagtaacgctcggcattcagggcgggacggaagtgtgccagaagaaactggacaccatgcgtaacgcgggcgtgaaggtcaacggcatctgggcgcaggactggtccggtattcgtatgacctcttttggcaaacgcgtgatgtggaactggaagtggaacagcgaaaactacccgcaactggattcacgcattaagcagtggaatcaggagggcgtgcagttcctggcctatatcaacccgtatgttgccagcgataaagatctctgcgaagaagcggcacaacacggctatctggcaaaagatgcctctggcggtgactatctggtggagtttggcgagttttacggcggcgttgtcgatctcactaatccagaagcctacgcctggttcaaggaagtgatcaaaaagaacatgattgaactcggctgcggcggctggatggctgacttcggcgagtatctgcccaccgacacgtacttgcataacggcgtcagtgccgaaattatgcataacgcctggcctgcgctgtgggcgaagtgtaactacgaagcccttgaagaaacgggcaagctcggcgagatccttttctttatgcgcgccggttctaccgcgacattggcggttaacaccaccctgtttgagatgaagcgcagcaaagagctggtgctgcgctggtgcgatttcagcgccttcacgccgatgatgcgcacccacgaaggtaaccgtcctggcgaacactgggcgtttgcggggacgcaaaacatcgccatttggccgtttaccccgttttacaccctgaacctacctgaaaaggcgcgcctgaataaatccgccacgcacacaacacaacacaacgcacaccccacgggaggacgcaacaccaacgacaggaacacacaacacacacggcacgccacacaacgccaaccaccaccacaagacaaacaacccacgaacacaaacacaggcacacaacacaaagcagagcagagttcaaccgaactgctattggtgttcatcatcggcctcgtcgttctggggccgcaacgactgcctgtggcggtaaaaacggtagcgggctggattcgcgcgttgcgttcactggcgacaacggtgcagaacgaactgacccaggagttaaaactccaggagtttcaggacagtctgaaaaaggttgaaaaggcgagcctcactaacctgacgcccgaactgaaagcgtcgatggatgaactacgccaggccgcggagtcgatgaagcgttcctacgttgcaaacgatcctgaaaaggcgagcgatgaagcgcacaccatccataacccggtggtgaaagataatgaagctgcgcatgagggcgtaacgcctgccgctgcacaaacgcaggccagttcgccggaacagaagccagaaaccacgccagagccggtggtaaaacctgctgcaggacgctgaaccgaaaaccgctgcaccttccccttcgtcgagtgataaaccgtaaacatgtctgtagaagatactcaaccgcttatcacgcatctgattgagctgcgtaagcgtctgctgaactgcattatcgcggtgatcgtgatattcctgtgtctgggctatttcgccaatgacatctatcacctggtatccgcgccattgatcaagcagttgccgcaaggttcaacgatgatcgccaccgacgtggcctcgccgttctttacgccgatcaagctgacctttatggtgtcgctgattctgtcagcgccggtgattctctatcaggtgtgggcatttatcgccccagcgctgtataagcatgaacgtcgcctggtggtgccgctgctggtttccagctctctgctgttttatatcggcatggcattcgcctactttgtggtctttccgctggcatttggcttccttgccaataccgcgccggaaggggtgcaggtatccaccgacatcgccagctatttaagcttcgttatggcgctgtttatggcgtttggtgtctcctttgaagtgccggtagcaattgtgctgctgtgctggatggggattacctcgccagaagacttacgcaaaaaacgcccgtatgtgctggttggtgcattcgttgtcgggatgttgctgacgccgccggatgtcttctcgcaaacgctgttggcgatcccgatgtactgtctgtttgaaatcggtgtcttcttctcacgcttttacgttggtaaagggcgaaatcgggaagagggcggttgtcatatggagtacaggatgtttgatatcggcgttaatttgaccagttcgcaatttgcgaaagaccgtgatgatgttgtagcgtgcgcttttgacgcgggagttaatgggctactcatcaccggcactaacctgcgtgaaagccagcaggcgcaaaagctggcgcgtcagtattcgtcctgttggtcaacggcgggcgtacatcctcacgacagcagccagtggcaagctgcgactgaagaagcgattattgagctggccgcgcagccagaagtggtggcgattggtgaatgtggtctcgactttaaccgcaacttttcgacgccggaagagcaggaacgcgcttttgttgcccagctacgcattgccgcagatttaaacatgccggtatttatgcactgtcgcgatgcccacgagcggtttatgacattgctggagccgtggctggataaactgcctggtgcggttcttcattgctttaccggcacacgcgaagagatgcaggcgtgcgtggcgcatggaatttatatcggcattaccggttgggtttgcgatgaacgacgcggactggagctgcgggaacttttgccgttgattccggcggaaaaattactgatcgaaactgatgcgccgtatctgctccctcgcgatctcagcgccaaagccatcatcccggcgcaacgagccagcccatctgccccatattttgcaacgtattgcgcactggcgtggagaagatgccgcatggctggctgccaccacggatgctaatgtcaaaacactgatctttctgacaaataatggccagatcgatgtaatagatggcgcgtttgtacttatcgacaagacagggatccgcactcatattcctgttggctcggttgcctgcatcatgctggaacctggtacacgggtttcgcatgcagctgtacgcctggctgcgcaagttggaacattgttggtatgggtgggggaagcgggcgttcgtgtttatgcttctggtcagcctggagagcaactcagaggtatagaaggcagtcgcgtgcgggcaacctacgcacttctggcgaagcaatacggcgtgacatggaatggacgtcgctacgatccgaaagactgggaaaagggcgatacgatcaaccaatgcattagcgctgcaacttcctgtttatacggcgtaactgaagcggcgatacttgcagctggttatgcaccagctattgggtttgtgcatacaggaaagcctctttcctttgtttacgatattgcagacatcattaaatttgacactgttgtaccgaaagcttttgagatagcgcgtcgtaaccctggtgagccggaccgggaagtccgtttggcgtgcagggatatttttcgcagtagtaaaacattagccaaattgattccgcttatagaggacgtgcttgccgctggagaaatacaaccgccggccccacctgaagatgcacagcctgttgccattccgcttcctgtttcactgggagatgcaggccatcggagtagctgaaatgagtatgttggtcgtggtcactgaaaatgtacctccgcgcttacgaggcagattagccatctggttgttggaggtacgtgcaggggtatatgtaggtgatgtatccgcaaaaattcgtgaaatgatctgggaacaaatagctggactggcggaagaaggcaatgtagtgatggcatgggcaacgaatacggaaacgggatttgagttccagacatttgggttaaacaggcgtaccccggtagatttgtatggtgtctaagggtggtgtcttgtgtgtacctgctaggatatcaacaatctagctgatctacggcggcgcgcccgtgaaatcgttatc

SEQ ID NO: 25041 - DNA, 659 bp, Homo sapiens
  SIMILAR (453)..(1): 1001254mologous to Escherichia coli K12 orf, hypothetical protein,accession number AE000336,Smith-Waterman Score=762.
ttccatcgctcgcgccaggtgacgttgggtgacgtgggagatttcgtgcgccataactgaagccagttgactttcgttatcggaataacggaacagggcagagtgcagcaccacgttgccgccaaagaaagcaaaggcgttaatttcgtcgttgttgatcagaaaaaaatgaaacggtgtcttaaccgaattggcatgcgaaaccagacgcatccccagcgaattaatatattgcgttaacagcgggtcattaattaacggcgcgctgccgcgtagctggcggacataatagtcgcccatctgcatttcctgaccaatggaaagcgtgcttcctgcggaggttcccatatccggcaaggtgtctgcgctgtcggcaaacgccggggctacctgaccaatggtcatagcagcaatgagggttgcaaccaggttttttttcaactgcctgaacataacctctatcctgtatttctggagatagtcatttgaccgatactgtgaaatatcgttcccaccgcgccgcctttgagtgtaacggcgaagattagcccactcaaatgacttttcagtttcctgaatccgctcataaaaataaaagtgttttttgcggcgtttcgacactattgcggatctccgggtcggagatgaattgtaatcga

SEQ ID NO: 25042 - DNA, 1540 bp, Homo sapiens
  SIMILAR (931)..(1539): 1001254mologous to Escherichia coli 5'-phosphoribosyl-5-amino -4-imidazole carboxylase II (purK, EC 4.1.1.21),accession number M19657,Smith-Waterman Score=1061.
tgggggaaatctgagcggacgcagatctgacgggcacgaccggtggagtaagttgataggataggaaagggcgctggggttaacagaagcgaaaaaggagcgtgagagaagaggacggtctttatctggaatgcggaagcttaccaactactgccgtaggttgtaggtgaggtgtaaacgtcaaaatcgccaagcttgggaaaagtttgccgcatcgccatcgtcacttttttacctgtcttgttactgctgtttttagaacgcatcagcgttaaaaaattgatgattgccttagggattggcgcgggactcacggcgtttaactatctgtttggtcagtcgctggatgccagtaaatacgtcacttcaactatgctgtttgtctatattgtgatcattattggcatggtgtggagtattcgttttaaaacaatttcgccacacaaccatcgcaagatattacgtttcttttatctggtggtcgggctggtggtggcgctggcggcggtggagatggcacaaattatcctcaccggtggcagcagtattatggagtcgatttcgaaatatctgatttacagcaacagctatgtgctgaatttcattaaattcggcggcaagcgcacgacagcactttatttcgaaccggcatttttcgctctggcattaatctcaatttggctcagcatcaaacagtttggtatcaaaacgcctaaaacagatgatatgattctcgcagggataatattatccggatcgttttcaggggttatgccctttatcctgttttatttgctggagtgggcatttcaatatctgaataaagaggcgattaagaaaaagttcccgttagcattggcccaggaggcatgcaagagttgcccatgcaaagcccagaccgacgaagtgctggaaaacccggacccgcgagtcgggctggacgctgaaccggcggcggtgccttttcaacaaagcgtgattaccgctgagatagaacgctggccggaaaccgcattaacccgcgagctggcgcgccatccggcctttgtgaaccgcgatgtgttcccgattattgctgaccgtctgactcagaagcagcttttcgataagctccacctgccgactgcaccgtggcagttacttgccgaacgcagcgagtggcctgcggtgtttgatcgtttaggtgagctggcgattgttaagcgtcgcactggtggttatgacggtcgcggtcaatggcgtttacgcgcaaatgaaaccgaacagttaccggcagagtgttacggcgaatgtattgtcgagcagggcattaacttctctggtgaagtgtcgctggttggcgcgcgcggctttgatggcagcaccgtgttttatccgctgacgcataacctgcatcaggacggtattttgcgcaccagcgtcgcttttccgcaggccaacgcacagcagcaggcgcaagccgaagagatgctgtcggcgattatgcaggagctgggctatgtgggcgtgatggcgatggagtgttttgtcaccccgcaag

SEQ ID NO: 25043 - DNA, 768 bp, Homo sapiens; identical to SEQ ID NO: 9290
  SIMILAR (181)..(765): 941254mologous to Escherichia coli Glycolate oxidase subunit GlcD,accession number D90811,Smith-Waterman Score=977.
  misc_feature (1)...(768): n = a,t,c or g

SEQ ID NO: 25044 - DNA, 3117 bp, Homo sapiens; identical to SEQ ID NO: 4899
  SIMILAR (2305)..(2814): 881254mologous to Escherichia coli K12 Mg2+ transport ATPase, P-type 1,accession number AE000495,Smith-Waterman Score=785.

SEQ ID NO: 25045 - DNA, 819 bp, Homo sapiens
  SIMILAR (236)..(3): 1001254mologous to Escherichia coli Glycolate oxidase subunit GlcD,accession number D90811,Smith-Waterman Score=382.
agcgatgaatagcgttcctgcgcggcaagacgggcgatcagcgccacatctgcggttgaacgcggaaataccaccgcatcggggagaagttggtaaatactgttgtcggtcgacattgtcagacgatcggcataacttgtcgccgtatcgccggtaaaaccttgttgctccagctcttgcaaaaaattaagcaccagttgaacgacgccgggtgcctgggaaatctgtggaatcattatattgaccctttcctgcggtctgtgatgtaggtcgatacactattctttcaggctgctgcaatagcgcactgaaaggtgatgtttgtttactctatggatttcgtgttgcaggaaggcggcaagcgagtgaactccaggagcttacaatagtaagtgactggggtgaacgaacgtagccgcagcacatgcaacttgaaatacgacgagtaaatcgtttgcgtgttgcctgagttgttgtaccacatttttttctaacacgcccatcagaattaagggcagaatcggcctgttaaaaaccgctgaaattgctcatcattatgcaggtgagtttcgcgtgttcacgtcgcgtcgacgatttgacgcacaaaaaaggtgaaaagtagttatggtaaatgttcgtcagcccagggatgtcgcacaaattctgctttcggtgctgtttttagccatcatgattgtggcatgtctgtggatttgttcaaaccctttattctcggctttgcatgggccggtacggtggttatcgccacctggccggtattgttacgtttgcaaaagatcctctagagtcgagcagcag

SEQ ID NO: 25046 - DNA, 3660 bp, Homo sapiens; identical to SEQ ID NO: 24309
  SIMILAR (232)..(951): 991254mologous to Escherichia coli selenocysteine synthase,accession number M64177,Smith-Waterman Score=1201.

SEQ ID NO: 25047 - DNA, 720 bp, Homo sapiens
  SIMILAR (190)..(101): 931254mologous to Escherichia coli Glycolate oxidase subunit GlcD,accession number D90811,Smith-Waterman Score=141.
atgttgtgtcagcatccgttcattatcgtagtaacaacgacaattcctttctgtggcaacatccaccaagacgctccagatcgtgtgcatatcattcagcagatttacccagcgtttccgccaattcgacgggtaaaggttgcgtatcgagaatatcgccccccaacaacaccgcgcgtacgccaacgatccctgaccggatgcatcggtattgatcatcccaccgagcgttgcccggttgctggtcgaaagttccggcgcaaaaaagtagccgaacggtttcaggtactgattgagttgatcttttatcaccccggcctcaacgcgcacccagccctcttcagggttaatttcgatgatgcggttcatatggcgggacatatcaacaataatcccctggttgagcgcctgaccgttagtgccggtgccgccgccgcggggggtcgatacactattctttcaggctgctgcaatagcgcactgaaaggtgatgtttgtttactctatggatttcgtgtagccaggaaggcgcaagcgagtgaactccaggagcttcacaatatcagtgactggggtgaccgaacgttagccgaggacatgcaccttgaaataaaggccaaacagcggcgcaagacggccaaacatatgcccaaaggtggccacatgtttcgggttacgcgggctgaaaaggcagtaaatggagccgaatacacagactaa

SEQ ID NO: 25048 - DNA, 5059 bp, Homo sapiens
  SIMILAR (1980)..(2225): 741254mologous to Escherichia coli K12 catalase; hydroperoxidase HPI(I),accession number AE000468,Smith-Waterman Score=271.
atggtgaccggcattcttccgctgttgattagcctgctggttatcatgaacgcactgattaattttatcggtcagcatcgtattgaacgttttgctcaacgttgcgccggtaaccctgtttcccgttacctactgttaccgtgcattggcacgtttgtcttttgcaatccgatgaccctaagcctgggtcgctttatgccggaaaagtacaaacccagctactacgcggcggcctcttatagctgccactcaatgaatggcctcttcccccatatcaaccctggcgaactgtttgtttatcttggcattgccagcggtctgacaacgctgaacctgccacttggcccactggcgtgcagcagctgctggagatcccactacggaatagtcgcgcgcatcttccagcgaaacgccacggttgaggaacgctggcaccaccacttcatcgttaaagatttgcggaataccggtaccgaagcgaatggtttcggcggttttcatcaggaacggcgtgtcgatcaaggcgttagtgcgcacgccgaggttcggttgcggcgtcaaggcaaaggaacgaaagcacgttcaccgcgctacgtccgttctcggttaacccgccgagcagtgcggtatagtgatcatcccaccgagcgttgcccggttgctggtcgaaagttccggcgcaaaaaagtagccgaacggtttcaggtactgattgagttgatcttttatcaccccggcctcaacgcgcacccagccctcttcagggttaatttcgatgatgcggttcatatggcgggacatatcaacaataatcccctggttgagcgcctgaccgttagtgccggtgccgccgccgcggggggtcgatacactattctttcaggctgctgcaatagcgcactgaaaggtgatgtttgtttactctatggatttcgtgttgcaggaaggcggcaagcgagtgaactccaggagcttacaatagccgagcgcgtacgggcggagctggcgcgttttctcgaaaacccggcagatccgcgttatctggcggcgagctggcaggcaggccataccggcagtggcctgcattatcgccgttatcctttctttgccgccttgcgtgaacgcgcaggtccggtaacctgggtgatgatgatcgcctgcgtggtggtgtttattgccatgcaaattctcggcgatcaggaagtgatgttatggcgtggcctggccattcgatccaacactgaaatttgagttctggcgttacttcacccacgcgttaatgcacttctcgctgatgcatatcctctttaacctgctctggtggtggtatctcggcggtgcggtggaaaaacgcctcggtagcggtaagctaattgtcattacgcttatcagcgccctgttaagcggctatgtgcagcaaaaattcagcgggccgtggtttggcgggctttctggcgtggtgtatgcgctgatgggctacgtctggctacgtggcgaacgcgatccgcaaagtggcatttacctgcgacgtggggttattatctttgcgccgatctggattgttcgccgatggtttgaaatgacgccgacccagtggagcaactatttcttcgagaacctgttcaagtatgagtgggtacagacccgcagcccggctggcgcaatccagttcgaagcggtagacgcaccggaaattatcccggatccgtttgatccgtcgaagaaacgtaaaccgacaatgctggtgaccgacctgacgctgcgttttgatcctgagttcgagaagatctctcgtcgtttcctcaacgatccgcaggcgttcaacgaagcctttgcccgtgcctggttcaaactgacgcacagggatatggggccgaaatctcgctacatcgggccggaagtgccgaaagaagatctgatctggcaagatccgctgccgcagccgatctacaacccgaccgagcaggacattatcgcatctgaaattcgcgattgcggattctggtctgtctgttagtgagctggtatcggtggcctgggcatctgcttctaccttccgtggtggcgacaaacgcggtggtgccaacggtgcgcgtctggcattaatagccgcagacgcgaactggcgatgtgacacgccgacagccgattcgtgctctgcactgttctggaagaaaatccagaaagagtctggtaaagcctcgctggcggatatcatagtgctgccttggtctgtttgttgttgagaaatccgcaagcgccgcaggtttgagcattcatgtaccgtttgcgccgggtcgcgttgatgcgcgtcaagatcaaaactgcaattgggatgtttgagctgctggagccaattgctgacggtttccgtaactatcgcgctcgtctggacgtttccaccacagagtcactgctgatcgacaaagcacagcaactgacgctgaccgcgccggaaatgactgcgctggtgggcggcatgcgtgtactgggtgccaacttcgatggcagcaaaaacggcgtcttcactgaccgcgttggcgtattgagcaatgacttcttcgtgaacttgctggatatgcgttacgagtggaaagcgaccgacgaatccaaagagctgttcgaaggccgtgaccgtgaaaccggcgaagtgaaatttacggccagccgtgcggatctggtgtttggttctaactccgtcctgcgtgcggtggcggaagtttacgccagtagcgatgcccacgagaagtttgttaaagacttcgtggcggcatgggtgaaagtgatgaacctcgaccgtttcgacctgctgtaatctgaccccgttcagcggctgcttgctggcagtcgctgaacgttcgaccagcggggcgggaatttttccccccgattcgccctgggtcagcatccgactgcgcatattttcggccagtgcatcaataatgcccgcgtccattaacgccggatagcggcgcggcaacgtgccggcaaagtcagaaagcttattgagcatccccggcatatcgcggattaagtagatgccctggttgcaaccctcattgctgctatgaccattggtcaggtagccccggcgtttgccgacagcgcagacaccttgccggatatgggaacctttctgtcttgtgttgttctctcctgtctgtgttgttgtctgtgtgcttttgttttctgttttgtcgttgtgttttttgctttgtcgtgtctctttctgtttggtgtctgcgttcgtgtgttctgtgttcctcggtgtcaccacgctgcgttttacagacgccgtattctttcccccgatattacacccggttccaaatagcccgcacgcctgtaaatacctattacccggcttaaatatcgaaccggtaaaaaacagcgataccggagtaaaaagatataattgcacgcgaaaattgcggttatcaccaaaagcgttgatcatcatttttatcactttccccatgtaccacagtgataaaaacaccgcgaaccaggaaaaataaataatcagcagatacaaaccattgtctatggtttttccgacatccgcaccgttaaatattccgaatgatgcgacatattcataaagtgagccaaatctgactacaccgtcaatatgggtcaaagaataaccgaccatcaccagcggaccgacaatacgataatatgatgacgatccttccgtacctaaatcgcccagacgggtggaaatataaggaaacgcgattaccacaccaaccaggaatacagccagagaaatcaatgctaacggtaactttttcttaatcgcctctttattcagatattgaaatgcccactccagcaaataaaacaggataaaggtcataacccctgaaaacgatccggataatattatccctgcgagaatcatagcatctgttttaggcgttttgataccaaactgtttgatgctgagccaaattgagattaatgccagagcgaaaaatgccggttcgaaataaagtgctgtcgtgcgcttgccgccgaatttaatgaaattcagcacatagctgttgctgtaaatcagatatttcgaaagtctctttgttgcttccttgtgctgctgtggtgtcattgtgttgtctggtgttctgttatgtcgtttctgtgtctgtgttatgtcatgtcggcacaactgaccatcagcaactttgctatcgttcgtgagcttgagattgattttcatagcggcatgaccgtaataactggcgagaccggcgcgggtaaatctattgcaatagatgccctcggtctttgtctcggtggtcgcgctgaagcggtgccgcttgcgcaccgtatagtcggcggctccatccggtctcgggaactcgccaggatccccacgcaattttcgggtcaacaatttcttcgcagctttaatggtggtagcaagaccacgcagttccagcttgccgtagatgaacggtttgaacagctccagtgccattttcttcggcagaccgcactgatgcagacgcaggtatggacctacggtgattacagaacgaccggagtagtcaacacgcttaccgagcaggttctgacggaaacgaccctgtttacctttgatcatgtcggccaaagatttcagaggacgcttgttagaaccggtgatcgcacgaccgcgacgaccgttatccagcagggcgtctaccgcttcctgcagcatacgtttttcgttacgtacgatgatgtccggcgcagccagatccagcagacgtttcagacggttgttacggttaatgacgcgacgatacagatcgttcaggtcagaagtcgcgaaacgaccaccatccagcggaaccagcggacgcagatctggcggcagtaccggcagaacggtcaggatcatccactctggtttgttaccagactgaacgaacgcttccagcagtttgatacgcttggtcagctttttacgcttggtttcggagttggtttcgttcagctcttcacgcagctgttcgcactcttgctccagatccatgctcttcagcagagcctggattgcttccgcccccat

SEQ ID NO: 25049 - DNA, 2568 bp, Homo sapiens
  SIMILAR (2472)..(2504): 1001254mologous to Klebsiella sp. putP,accession number M63160,Smith-Waterman Score=51.
tcaccttgtatgacaacgtgctcgtcgagcgaatcggtccgccacgtaccacggcatttccgccaaccaagacatgatgtttaacacacaattaccttccacaatggcatattccgccacctgcgaacgtaatgaatcgtcggaatggcatcttcttctatgccagctttcacctgccgtgaccgtagactttagcgcaatcgcatagccagacattgttctcttcttaccttcaatactggcaaaatcaaaaacttcggcgcgatgttcaataaagcataccggacgacggcatcgccataaatttgtgcctggtggacaatagcgaggcgctaacccttgcgcgatcataaatttggagcaggagttgatgtcgggcgttaagccttgtgcggcgacgatcatagaatgttgatcaattaggcgtgaccaaatattgttatccgtggcgtaaaactcttccagagcacgccggtgaccggaacgcgtattaccggaatcacgcgccgcgaaagcagaggcatctggcgaatcagcaaatcctatgtggaaaccgttgcacgaccacgccaaggacggttcatcggaacgcacgggaaacgcgagaacatttaaggcgacgtacaagcgtacaaaaaacggcactccccttcggtggacgaacattgcctcctttgttttgtcccagcgttcattaataagggagccgaaaatggacggggcaccaatctgtgttccgacaaacagtttactagtcagataactggaacgcgtcacccataatgccaagttcataccgacatcggagtggtacttgttgcacttgggctgctcgattataagtaccgcggcgtattgatcgagatacgagtgtctttcgaggtgatagcccactacgagaccgcctacacaactcttatcggcacccggtttttcaccataaaacgtcacagccagcaggaaatcagcgtcgggccaatgtactggaaaaagcctaacgttgagagacgcagcgcgtggcagcggcggtaaaacacaacagcggtacggtagtgacaatacggcggcgatcagcagtaaattcagcgacatcgggttttgccccatatgctggttgaggtcacgctgaatgctgataatttcatcgtgagggataacggccccgtgtgacaccagaggcactggcgcgaattggcgaacgcttctatcgcccaccggacaaaccgctaccggcagcgggcttgggctatcgattgtccagcgatcgccaaattgcatggcatgaatgttgaatttgggaatgcggaacaagtggatttgaggcgaaggtaagctggtaacttctctgtctatgagagccgtaaaacgactctcatagattttacttggcacagaagttgtaccccattgttccgctaggttaaccagagggaacctgtgagaaaaccatcccgaatccgataacccattcccaaaccaggattcgtacgcggctgtaatcaccacaagcgtcaattgaccagttccattaaattttggctggcagcgttcaaccgaggtgttaatctgccacgtaaactcgccgtcaacagcagcgatgacaatatcaccatggcggcggtaatagcgccgccgaacgaaacagctctccgccccgctgctgcttggcgtttcagcaattggttggtgacgataattctggtggcatttatggcctggctgctggcaaagacggctttggacgcagtttttatgccacgggcgataatttacagggcgctcgtcactgggcgttcgtactgaagccattcgcattgtggcattttcgttgaacgccgaacgcgatttcgatgatttacgcgatagcggcccgctcattgccatgatacttttcatcatgcctacgctgtcaagtatctcatcccggcgcttaaaccctggcgttccatcggaaatctgattcgctgatcgtgggtatccactccgacagaggttcccggattcacccaacggaattaacatattcgcctgatagggtctaaccgcactgttgcctggaccttcgctgcgtgctggatatgactgcgcaagtgcatattcactcaccgatgtgaaaaatgtgctgacgatccctctgtcggcgttaggcgtccggttggcgataatcgttataaagtcaaattgttgcgtaatggtgaacacgcgagcgtgaagtgacgattggcgcacgtaacgataccgatgttgaattgtcaaagggcttgaagcgggcgatgaagtggtgattggtgaggccaaccaggagctgcacaatgacgcctttgctcgaattaaaggatattcgtccagcgatgttggtgacattttgtgtctaatctttggcatgatattgattgggtttatcgcctggcgatcaacgaaaactttgacgactatattctgggcggtcgtagtcttgggccattcgtgacgcattatcggcgggtgcgtcggatatgagcggctggctgttaatggggttccgggcgctgtttttctttccgggatttccgaaagctggatcgccat

SEQ ID NO: 25050 - DNA, 1778 bp, Homo sapiens
  SIMILAR (1173)..(1628): 851254mologous to Escherichia coli L-arabinose transport system permease protein AraH,accession number D90794,Smith-Waterman Score=635.
atgcactacatcgactactgcgtgtttctctacttcacatctctgttacgtgacagcacagcaccgacaaccgcagcacacaacgcacacgccacgtacaataacgacaccgcggaccggcaggcggtaacggcccacaccagccacacgggggtaaccagcgcgacgcaatttgccctcggaggggaaggttggacaagagattgcaggaatgggggcacaaactcttgtcgggacgtccgtgtactgatccgatccccttctgggctgcgccctatttcggcgaaggagaaatacaatgctcaatacgattgtccccttttcaagggcttcctttcgtatacacgcaaaccaaataagaaaacaatagcacgcaacggtacagccgcgtttgtccttcaaattctgtttcgtgccagtgccacctttccggtgtccgcattagtagtaactcaaaacaaatggggtctacgcagtccgcaggtatcggatcgtagtgcttacattatacttttacatcacacctatacttccctaatttttggttcgtactcccaaggtgggttcttcgctatccaagcagcctctttagggtttccgtccgaaaatcggcgctatacgatggcttgtagtaagtgcagctgttttgtttctccgcatggttttgtggggcgtccttgccttttgcttcgcgcgcccttcttgtggttctttttccgggttttgccgttgttaccgcggtcgcctcccgttatttgtcttcgtggcggacttgcccttctctccctcggatctgccgaccgcgttgaaagccccctggacatgcaccaaccggaacaagctgcacggacattatccggtggcaaccagcaaaaaatcctcattgccaaatgcttggaagcttcgccgcaagtattgattgtcgatgagccgacgcgcggcgtggatgtctcggcccgtaatgatatctaccagctgttgcgcagcatcgccgcacaaaatgtggctgtgctgcttatctcctccgacctggaagagatcgaactgatggcagatcgtgtgtatgtgatgcatcagggcgaaattacccactctgcactgaccgagcgcgatattaatgtcgagactattatgcgcgttgccttcggcgatagtcagcgtcaggaggcgtcatgctgaagtttattcagaacaaccgtgaaatcacggcactgctggcggtggtgctgctgtttgtattacccggttttctcgaccgccagtatttaagtgtgcaaacgctgaccatggtttatagcagcgcgcaaatcctgatcctgctggcaatgggcgcgacgctggtaatgcttacgcgcaatattgatgtttcagtgggttcgattaccggaatgtgcgcggtgctgttggggatgttactgaacgcaggatattcactacctgttgcttgtgtcgcgactttactgcttggtttgctcgcgggatttttcaacggtgtcctggtcgcgtggctaaagatcctgccattgttgccacccttggcacggttgtacagaggcctcatgtcgctgtggactggcggccactggtttgaggggtacccgcgaattgaaaagccgtcgccccctgttgctggcgttcaccactggtgtgtgacacaaatcgggggactaagacctgcggtggcaaaacgggttggcccagatttaccgggggacaataagggcgccaagggggtcctgaacacgttggacaactacggagtggacgggaagtgtgtg

SEQ ID NO: 25051 - DNA, 2228 bp, Homo sapiens
  SIMILAR (739)..(1095): 1001254mologous to Escherichia coli L-arabinose transport system permease protein AraH,accession number D90794,Smith-Waterman Score=576.
atggttacgatcgctggcattattttgggaggtctggcgctcgttggcctgatcacttacttcggtaagtggacctacctgtggaaagagtggctgacctccgtcgaccataaacgcctcggtatcatgtatatcatcgtggcgattgtgatgttgctgcgtggttttgctgacgccattatgatgcgtagccagcaggctcttgcctcggcgggcgaagcgggcttcctgccacctcaccactacgatcagatctttaccgcgcacggcgtgattatgatcttcttcgtggcgatgcctttcgttatcggtctgatgaacctggtggttccgctgcagatcggcgcgcgtgacgttgcgttcccgttcctcaacaacttaagcttctggtttaccgttgttggtgtgattctggttaacgtttctctcggcgtgggcgaatttgcgcagaccggctggctggcctatccaccgctatcgggaatagagtacagtccgggagtcggtgtcgattactggatatggagtctccagctatccggtatagctgttgcgcacatcgccgcacaaaatgtggctgtgctgcttatctcctccgacctggaagagatcgaactgatggcagatcgtgtgtatgtgatgcatcagggcgaaattacccactctgcactgaccgagcgcgatattaatgtcgagactattatgcgcgttgccttcggcgatagtcagcgaggcgtcatgctgaagtttattcagaacaaccgtgaaatcacggcactgctggcggtggtgctgctgtttgtattacccggttttctcgaccgccagtatttaagtgtgcaaacgctgaccatggtttatagcagcgcgcaaatcctgatcctgctggcaatgggcgcgacgctggtaatgcttacgcgcaatattgatgtttcagtgggttcgattaccggaatgtgcgcggtgctgttggggatgttactgaacgcaggatattcactacctgttgcttgtgtcgcgactttactgcttggtttgctcgcgggatttttcaacggtgtcctggtcgcgtggctaaagatccctgccattgtttgccacccttggcacgttagggtttgtacagaagcatcatgttgctgtggactggcggccaatggattgaagggttacccgccgaactgaaacagctctccgccccgctgctgcttggcgtttcagcaattggttggttgacgataattctggtggcatttatggcctggctgctggcaaagacggcgtttggacgcagtttttatgccacgggcgataatttacagggcgctcgtcaactgggcgttcgtactgaagccattcgcattgtggcattttcgttgaacggctgcatggcggcactggcgggaattgtgtttgcttcgcagattggttttatccccaaccagaccggtaccgggctggagatgaaagcaattgcagcctgcgtgctgggcggcattagtttgctcggtggttccggtgcgatcattggtgcggtactcggcgcatggttcctgacgcagatcgatagcgtactggtgctgttgcgcattccggcatggtggaatgattttatcgcgggtctggttctgctggcggtgctggtgtttgatggacgcctgcgttgtgcgctggaacgtaatctacggcggcaaaaatatgcccgctttatgacgccaccgccatccgttaaacccgcttcgtcagcaaccagtgactttatctgcattggcattgtcgccctaccgctaacgatggtgattgtcagtggcgggatcgatatttcgtttggttcgaccatcggcctctgcgccattgcattgggcgtactgtttcaaagtggtgtgccgatgccgctggcgatactcctgaccttactgctcggcgcattgtgcgggctgatcaacgccggattaattatctataccaaagttaacccgctggtgattacgcttggcacgctgtatctgtttgccggaagcgctctgatgctttccgaagaacagaagaacacaaagaagacacgacaaagagaagacaaaaagaaagagaaaaagaaacagcgaaagagagaagaaaaaaagaaggcacgagacagacagagaaagcagaggaagcgagaagagacagacacagcagaagatatgagagcacagacactttcaccgaacaaccgcccgatagtgtaa

SEQ ID NO: 25052 - DNA, 1206 bp, Homo sapiens
  SIMILAR (583)..(410): 1001254mologous to Escherichia coli Respiratory nitrate reductase 2 a chain (EC 1.7.99.4),accession number D90787,Smith- Waterman Score=310.
ctattctgccggggttaagttcaacttggggttccccttcctcccaaattttggccggtttgccggaaccagtcccttgccttggccctgtggcctttcaccggcgggagattttccggggattaatccataagggttgtaataccacgtcgtttcttgacccagatgacccacgcacacttgcgaaaatgctttggctataccttcgtagatttcccagtcgctgcgtgattcccacgccggatcgaccgccgcagaaagcggatgaataaacggatgcatatccgaggtgttcatatcgtctttttcgtaccaggtgacggtgggcagaacgatatcggagaacaggcaggtactggacatgcggaagtcgagcgtcaccagcaggtcgagcttgccttcaatcgcctgcagtttgccactcgacttcttccggtttgatcccgtcgctggcaccgagttcctcgccctgaatcccgctttcggtccccagcagatacttctgcatatactcgtggcctttgccggaggagccaagcaggttagagcgccagacaaacaaattacgcggatgattgctgctgcatatctggttgttcgcaggccatacgtaaatcgcccgatttcagcgctggcatcggcgagcggtgaaagtaactcctgagcagagactttttcatagcgccattggctggaatgattgtagaaaaacgaggtgctgttcatttggcgcggtggtcggttccagtcgagcgcaaaggccagtggcaaccagccggtttgtgggcgcagtttttcctggccgacatagtgtgcccagccgccaccgctttgcccgacacaaccgcagaagatcagcatattgatcatcccgcggtagttcatgtccatgtgataccagtggttaacacctgcgccgaggataatcatcgagcgcccatgcgttttatgggcggtatcggcaaattcacgggcgatggtttcaatatactggcgcggcacgccggtaatttgctcaccccaggctggggtgtacggtttgatttcagcgtaatctttcgcactgttttcatcttccagcccgcgatcgaggccgtaattcgccagtaccaaatcataaacgctgaccaccggacaggtgttgccatcgactaacgtcaggtttttaacgggcaattggggaccaccagtcgttgcgactggcat

SEQ ID NO: 25053 - DNA, 1386 bp, Homo sapiens
  SIMILAR (1)..(435): 521254mologous to Escherichia coli pot. PBP 1A,accession number X02164,Smith-Waterman Score=304.
atgcgccacggctatcccgcccgggcaaatgtgcttgtgaaagtgggcgagtcggcgtgggataacaacaaagattaccgatacgctaaggcgctgccaacctatggtccgctgctgcctgccgcagtcaccagcgcaatcctcagcaagcgacggcgatgctggcggacgggtcgaccgtcgcatgagtatggaaggcgttcgctgggcgcgtccttaccgttcggatactcacaaggaccgacgccgcgtaaagtgaccgatgttctgcaaacgggtcagcaatctgggttcgtcaggttggcgatgcatggtggctggcacaagtgccgaagtgaactcggcgctggtgtcgatcaatccgcaaaacggtgccgttatgcgctggtcggtggctttgatttcaatcagagcaagtttaaccgcgccaccaggcactgcgtcaggctggagcgcatctgcctgcacatagccagagtggccatcatcagcaaaccgcccgctaaaagtcgaatttttgtgcccgcatgtgaacccctgatcaactatcctggtaataaaaaaactgcccgtttcgtctttcacccacttagcaacgacaatggtcgctacgccgttaccgaccagttagtcagcgcacgagcttctgacataaagcgggtcgataccgaggatagcgccagacccgctaccggcaaatggcccaccgcagagagcgtcaaccccaggacgataaagccactacccgtaaccgtgcgccggtccggctataggggggaggagaggcggggggacggagaggagagggaggaggaagaagtcgaaggcaacgggctggaacaggaagcttaccctttccgattcgccagagcgatgccctggcacatccccagcgacctaccatcagtacccgccggctacgcgatcaacgcctgtccccaagtcatccccagtagaagcaactacaaccaccggcccggtaccctacagccggccgtaatagcgcccctaaaccaaactgagcggccaccactgaccgcgaccacagggcacctatcggctgccccacgggctcggtccatagctttatcgggaagcgagagcaaaggcaactgttgtgatgccgtaacgccggcttgctgccgccatcggcccgaccatctttgtgatgtggacccgaatgcgtccttaagtcgcgaagagattttcggtccggtctggtggtcacgcgtttcacatcagaagaacaggcgctacagcttgccacgacagccagtacggccttggcgcggcggtatggacgcgcgacctctccgcgcgcaccgcatgagccgacgcctgaaagccggttccgtcttcgtcaaaactacaacgacggcgatatga

SEQ ID NO: 25054 - DNA, 696 bp, Homo sapiens
  SIMILAR (1)..(309): 991254mologous to Escherichia coli K12 putative amidase,accession number AE000365,Smith-Waterman Score=524.
atgcaggacccgctgctggcgctgctggaggattacaacaaaggcgacctcgaaaagcaggtgccgccagcgcaaagtggtccacaaccgggtaaagcagggcgcgatcgtccgattgtcattatgcttgaccctggccacggtggcgaagactccggtgcggtggggaaatacaaaacgcgcgaaaaagatgtggtattgcaaatagctcgccgtttgcgctctctgatcgagaaagagggcaatatgaaggtgtacatgacgcgcaatgaagacatcttcattccattgcaagtgcgcgtacgaaagcccagaaacagcgtgctgacctgtttgtctctatccatgccgacgcctttaccagtcgtcagccgagcggttcctctgtgtttgcgctctcaaccaaaggcggaatgtgctcatatcgtgggtcaggatgtctacagtagtgatgtttgcaggaatctgaattttgtcgaaatttatatagaatgcttaggttcactccaagttaaaatgtgtgacgtgcctgttctgcaagcagttgtcaacagtattaagcataggcgggctttagaggcgcgggacttccacacttcctctccgaagccctgcgccggtgccgtagccaatgacaggccacgttgtgtcccagcagccaatcggaagggcctgagcctgaagacgtgcatttga

SEQ ID NO: 25055 - DNA, 1944 bp, Homo sapiens; identical to SEQ ID NO: 24780
  SIMILAR (1030)..(1446): 991254mologous to Escherichia coli NarV protein,accession number D90786,Smith-Waterman Score=712.

SEQ ID NO: 25056 - DNA, 2322 bp, Homo sapiens
  SIMILAR (1845)..(946): 771254mologous to Escherichia coli Respiratory nitrate reductase 2 a chain (EC 1.7.99.4),accession number D90787,Smith- Waterman Score=1303.
  misc_feature (1)...(2322): n = a,t,c or g
gtcgctggcaccgagttcctcgccgtgaatcccgctttcggtccccagcagatacttctgcatatactcgtggcctttgccggaggagccaagcaggttagagcgccagacaaacaaattacgcggatgattgctgctgctatctggttgttcgcaggccatacgtaaatcgcccgatttcagcgcctgggcggtaaattctgtgggggataatccggccttgtcggcttcagctttaatcccgagcgggttacgccccagctgcggcgcagaaggtagccagcccatacgttcggcgcgaacgttgaaatcaatcagatgcccgctgtacttactggcatcggcgagcggggaaagtaactcctgagcagagactttttcatagcgccattggctggaatgattgtagaaaaacgaggtgctgttcatttggcgcggtggtcggttccagtcgagcgcaaaggccagtggcaaccagccggtttgtgggcgcagtttttcctggccgacatagtgtgcccagccgccaccgctttgcccgacacaaccgcagaagatcagcatattgatcatcccgcggtagttcatgtccatgtgataccagtggttaacacctgcgccgaggataatcatcgagcgcccatgcgttttatgggcggtatcggcaaattcacgggcgatggtttcaatatactggcgcggcaccctggtaatttgctcaccccaggctggggtgtacggtttgatttcagcgtaatctttcgcactgttttcatcttccagcccgcgatcgaggccgtaattcgccagtaccaaatcataaacgctgaccaccggacaggtgttgccatcgactaacgtcaggtttttaacgggcaattggcgcaccagcaccggattgtgttttacgctgcgaaaatgcggattttcaatgcngcgcaatggattccagattccatttgcccttctcgccccagcggaaccaatagaaccgttcggcgcaaccatttcgccattggtattaaaggcgacagttttccattccggattgttttcctggcccagcgcatcaaccagatcagcagcgcgcagcatacgacctgcagcgtagtaaccgtcgcgttcttccagcatcaccagcatcggcatgtcggtgtagcgacgcacatagtcggtgaaatactggcttgggttgtcgaggtggaattcacgcagcattacgtggcccatcgccagcgccattgccgcatcggtgccctgtttcggtgccagccacagatcgcacagtttggcgatttcagcgtagtctggtgtgacggcaacagttttggtccctttgtaacgcacttcagtaaagaagtgagcatccggggtacgcgtctgcggcacgtttgacccccaggcgatgatgtagctggagttgtaccagtcagcagattccggtacgtcagtttgctcgccccaggtttgcggagacgcaggaggcaagtcgcagtaccagtcgtagaagcttaagcaagtaccgccaatcagcgagagatagcgtgcacccgatgcgtaagaaaccatcgacattgccggaattggcgagaaaccagcaacacggtccgggccgtagtttttgatggtgtaaacgttagatgcggcgatcagttcgttcacctcctgccaggaagaacgaacaaatccaccgcgtccacgcgcctgcttaaagcttttcgctttatcggcgtcttcaatgatagaagcccatgcctcaaccggatcgctatgcagcgccttcgcttcacgccacattttcatcaggcgtttgcgcatcatcgggtatttcaggcggttggcactgagcttgacatccacagaactttccagagatggattggtggcttcgggaacttttgtataatgggtcagcgacttatattctgtagcaaggttaaccgaataggggagccgaaggaaaccgagtcttaactgggcgttaagttgcagggtatagacccgaaacccggtgattgtttcacccgcctgctgcgtcgccgcctgttccagcaaatcccagaaggtttcgccgctgcgatcacaaatccactcatcgcctttcaggtcaaaatggtagccgccctgtttggttgccagccatacctggtgcagcggctcctggcggttgataatgattttgctgccattctcaaaggtaatggtcagtacgccgccgttgatttcgcagtcgatatcgctgtcgccatcccagtcgtccaggcgttcttcaatggtcagccagagttgatcagccaggcgatgaaattcactgtcgttcat

SEQ ID NO: 25057 - DNA, 2409 bp, Homo sapiens
  SIMILAR (1059)..(292): 931254mologous to Escherichia coli hopQ,accession number U18997,Smith-Waterman Score=1168.
ctacaagtcttgccgaatgtgcgtcttggggtataaatcacctaacgcacaagtcaccatgtcgatcactagttgaccgtcgttatctggagcgccctcatactcctggcagtaccattcaggaataggcttgaggaagttcgtggttctatcacgtgaacagtatgacgtctctttgagagcatccgctaaatgccccccagtgtgggcacatcgatactgtgggcgtacgtcaagccacgtggtaacactggtccccaagcgcctgtctggggctctgaagcgtgtgaccgatttatttttacgggtaaaaatgccgcccagcgccaacgtttctccgcttttgacctcgacctgcgtttcgatctcctgcttatcaatcgccagcacttcgccatcggcctgctgtagcacctgccccggaacgttctggctgatgtgtaatttcagccggatgcgacctttttgtaacaccgtgggcgtgacctccatccccaggacggcctctttaaattccaccgacgtcgcgccactttccccgctggaaacctgatatggaatttcgctcccctgtttaatgctggcaggctgaagatgtgaggccagcagacgcggactggcgataatatccagctgctgtttttgttcgagcgcggaaagctcaagatccagcaagcgtccgttgatgcgcccaatgttaaaaccgacatgcgttgtcgccgtcgctacggagaggtcgctaccaagcgtggtgacttgcccaacgccaccagcgtgttgcgcatcggccagcgtccatttcacgcctaactcacgcaaacttttttcattaatggtgacaatatgcgccgacagctcaacctgcccgaccggcagatccatttgcgctacccactgttcaagcgcgcttaacgccgttttgttatctcgtagcaaaaggcgattggtgcgtttatcgacggtcatactccctttggcactcagtagcttctccccgcgttcgccagtctccccggttagggtattgagggtatactgcgaattcaccgggaattttgctggccccgctgtcgctccggggggaaatgtttttgccgcaggatgctcccaaaagtgttccgccgtataaacggggaaagagcgtggcaataaactaagtaggagtttgaaggttccacaatcgagccgtacttcgacactaaaacgccttttgaaggccctgggcaacccggatacttctgggtctcctggtaaataaataacagcgttgagtacaaccgactctggataaataacgcgtattgcactaggtgcggcgattccgacgctctggttggtctgtgtttgcgcggtacagggttgagtcggtctgttcggactggtccaggtaaggggtggcggaagccgccgcagcagcagtcggagagtcgaacacagaaccggactctcctctatcgaaccgcctaaccatagcgtagctctagcagatagccggatatccgcagtttgaacagctttgccagtagggtctattgacctactgaacttcggttgacatctcgttggaaaaagcgcaggtagaggcagcccggctccgggagccacaaaaatggtaatccataagatcattacttgtttgttcttccccttacacgcgcacttattctcaagtcgtaatcgacacagaggcgacacggcggctgcacctagcagctggacgtcacatgtggtaccccaatacgataaggtctgtgcttttgattctggtgcctggttgtttccagagtcagggtttggtagcttggttgggttaagcaatttaccctttctgagtcgtgaactccagttacttctgcggtctttggtattccctgcacacagggtccactcatggaaatactggatgggactgaggaatgtatactcggcaaaggtgtctgactccctcatgcttgctggttggttgactgaccagcagctgcaacagttacccctgtgtgtgggcccttttgtggctctggtctcagtgtaaacaaagagtaaactccctgtcgtcaaggaaacgttcaatttaaaccaggcctggctaggagacactcgccatattaccctgctaaaatggtggccttggatgtaggtactcaagtggactggtgaatgtgtcatgccaggccttctatgagtttccccaggccttctaggagtttttatctttttaatgcagggagaggaggagctctccatatgaccctgcatcatagggtgggcagtggctggtgttacccaagttccaggagtcggctgtcggaagcttgagtggcattcgtactctgtctcgagctgcacctcgtccaggcgctctcctgtgcagttgtcgacctgccgatcttgttgtttgtataaacccat

SEQ ID NO: 25058 - DNA, 1389 bp, Homo sapiens
  SIMILAR (675)..(58): 991254mologous to Escherichia coli Respiratory nitrate reductase 2 a chain (EC 1.7.99.4),accession number D90787,Smith- Waterman Score=1106.
tcatttggcgcggtggtcggttccagtcgagcgcaaaggccagtggcaaccagccggttgtgggcgcagtttttcctggccgacatagtgtgcccagccgccaccgctttgcccgacacaaccgcagaagatcagcatattgatcatcccgcggtagttcatgtccatgtgataccagtggttaacacctgcgccgaggataatcatcgagcgcccatgcgttttatgggcggtatcggcaaattcacgggcgatggtttcaatatactggcgcggcacgccggtaatttgctcaccccaggctggggtgtacggtttgatttcagcgtaatctttcgcactgttttcatcttccagcccgcgatcgaggccgtaattcgccagtaccaaatcataaacgctgaccaccggacaggtgttgccatcgactaacgtcaggtttttaacgggcaattggcgcaccagcaccggattgtgttttacgctgcgaaaatgcggattttcaatgccggcaaagtaggggaaggccacgcctgcaacagcgtcatgttgaccgagcagggttaacgacaattcggtttccgtaccggcggcaatggattccagattccatttgcctttttctccccagcggaaaccaatcgaaccgttcggcactaccaattcacctgcggatattaaactggccagttcaatagtgtcgtcaacggattggctgacttcgcggctgtagcagtcatttcggtcaaacgtttcccggatatggctttcaagcacttctgccatcagcccattagccgcgccccgaacggcagcgatctgttggagtatggcacggcattcggcatcaccctccagcgaccgttccagagcatcaatctgcccccgaatacgacgaactcgagtaaggacctttttcttctcttccggagtactgggcatttcgcacctcatcatcttacagcaacagctgatggccacatcactgcgtccatcctgggtggtgtagctcccctgcatcagatgctgaccaaacacccgcacctgggtttcgtcgagatgttggcgaccgtgattggtttgcgtggcgtcaatgcctgttgaaatcagcactgacgcgtcggcgtccagtggcgtaatagtgatttccagcgcaatgagcggcagttggtctgccgaaacaaagcgacggctggcgatggtgtaacctgagccgttgcatttatgggcaatctccatccccacgacatcaggcaggttcaccagttcgttgatttcaccttttcccgcccgatgatacagccccgccagatacatccctcgcgtctggcgcgtgtaatcttcttcatggctggcgcgaagcccaagatagccgttcccctgcgccat

SEQ ID NO: 25059 - DNA, 3153 bp, Homo sapiens
  SIMILAR (996)..(7): 891254mologous to Escherichia coli RhsC protein precursor,accession number D90709,Smith-Waterman Score=1570.
tcaggatccttcgctgatatggctgatgtctgtcagccagccgcgttcgtcatactgccaccgctctgcggtttcgccattcacggtgcggtgcgtgaggcggtctgcttcgtcatagtgccagtgggtgaccagcccctcatcctcgctgcggataagtttgccggtcaggtcgtggtgataacgctgtgtgcggccgtcaaagccggtttcctgtatcagccggtcgagtacatcgtaacggaaggtggtgtggctgccgttttcactggtcaggcggatgacccgtccggcagcatcgtattccatactgcgcgtcagaccgccctgcgtggtacagatggcttttccccacgcatcgtactgtgtcccgtttctgctgccgtccggggcaatgacggtggtcaggtcaccggcggcgttgtattcataccgcgtttcatggccctgcgtgtctttcacggcaattaactgtccacggctgtcgtatgcgcggtactgactcagcccttcctcgcggtgcaccgccgtcatctgcccgaagcggtcatggtcataacgggttacataaccggaacagtcggtgaagctcagcaactgaccgtaacggctccacgtcatggttttccggctgccggtggcatcttccgttgcgcagggtaagtcactgtgtggattatcataacggtagcgggtgatatcgccgtcaggggcagtttcctgaatcagacggcccaattcatcatattcccggcgcaattccagcccgtcaggcccggtggctgacgttaactggttgtggtggttatagtaaaacgccgatgccctgcatccggcgtggttatgcgcgtgatgaggcccgtcaccacatccgggctgtactctgttgatacctgcggcatccgtctgtgccctgagcctgcccacggcgtcaaactgactctgcgtgacgctgccgtccgggggatcctctagcagagtctcgctccgtcccccgggcgcgtatcccacaatccaacgccgccagcgacgccactcctcacgcgggctgttgcattcctgtgggtatacgatgcagcgattcgcctgccgaatacggtagccgtttgccaccaatgtccaggtgagatcaaggtcttcgactttagtacgatccgagaaaccgaacttacgcaatacatcagtacggaacatcccgcaggcaccgctgataataaacggtgcgccacccaggagctgctgtagcgtgcgcttcataacaatcatcggcaactttacggtcgcgcggatgtgcggtaacagacccgcgcctttcaacgcagtagagggaatgccgcctacggcatcggcaccgcgctcaatttctgccagcatatagcccattccgtcttgatcgggcggaacataggtgtcggcatcacttaaaaaaacctggtcgcaggtggcgtaattgaggccattcatcagcgcaccacctttaccggtatttttttgcgtgacggcaacaaagcggtcgccccatttgcgtttgacttccgccatgaccgcgcaaatcggcacttcaaccgttggcgtaaagtagcggatgcgcacatcgctgtcgtcgctgtgcagcagaaaagcagtttccgaatggcctaactcgcgggcgataagctgcatttgcgcttcgctaagattatcggcggggaaaacaacaccggcagaattgccgcgaaacggttgtgaggtaaaagcatcgacgtggtacacaatttgatatcgacgagtaaagtactcaaacggcgcgctccacacatgcaccagtcgggtgaacgggaagagcaggaagatggtcattcccaacaccagatgcaggcggaagacgaacgctacgccgttgagcatctctgacgatccaccacggaaagtgacaatgctttgcgcccaacccaccagcttcatcatttcgctaccatcaggatactgtgctgaaaacggtatggtacttagccccaacagacactggatcagcaaaatgctcatgatgatgatatccggcgtagtggaagtggcacgcacgcgctgatttgtcagcctgcgccacagcagtcctgcgctgccaatcgacgtctcagtgcaggtactaactgtacatgcaacatggaaacttccagtattatcagccccagaaaaagagtttatttcagtagtaaagtccacaggaatcgtagagacaaggggtgtccccagcaaatcccgagagaactgctgcatccgcgctttctggcgcagataggtatcaaagcacatgcaaatgttgcagatcagcaagcgacctttcgccgtcacctgtattcccttctcatccacatccaccagcccatcttttgctaacggggcgagcagcttgagatcttccgcaaagtaatcagcgaagtgcaaatcccactgtttctcaataggggcgtaatccagacggaagttgcagatgagcgacgtgttgttctctgccttcgaagatctagctccctcagcctccccacgttgtccacctctccaataccattgctccactgggaagctggcccggaggtgctctaccacgttcatctctcgcagcccagggctgtctccaagatcaggctgcattagggtggccaaacattctggtttgccttggattgccaggacacgaaacttgcagtacttcccactcccattcattccacatccttgtctagccttctcaggccccagggccttatctccacggactgctccacccgggctcccttgcccttgggtttccatttggttggagcaatgggaggtaccagtaggagactggcagaggcctccggggagcatgaagagggagtccgaggcgatgtttttgagttgatcctcacgagagctgtatgaggataccctcagcagccctgcattattattctcatctttacaggtgaggaagccacgatttagagacagttgggaactccaggtaaaagcactctttttgatttcaatccatttggtttgttccaggtcttgaggccagggagttcggtttgccctcacagctgccccgtccattcccacagtcaccccacactgtacatcgtcctgtggccatgctgatggtgcctccagaggccgtggcttctccat

SEQ ID NO: 25060 - DNA, 4089 bp, Homo sapiens
  SIMILAR (2015)..(2863): 951254mologous to Escherichia coli K12 putative amidase,accession number AE000365,Smith-Waterman Score=1343.
ttattgaaagataacgccccggcgtgtgacagctcgccgcttaatcaatatcagcgacgctttagccaggatgtcgcgccgcaatatgtcgacatcagtgcgggaggtgggaaatgattcagtatctgaacgtctttttttacgatatctacccgtacatttgtgcgacggtgtttttcctcggcagctggctgcgctacgactacgggcagaacacttggcgcgcctcctcaagtcaaatgctcgataaacgcgggatggtgatatggtcgaatctgttccatatcggcattttggggattttcttcgggcacttgttcggcatgttaacgccgcactggatgtacgcgtggtttttgccagtggcaagcgaaacaactcatggcgatggtgctcggcggtatttgcggtgtgttgacgttgattggcggcgcaggactgctgtggcgcaggctgacaaatcagcgcgtgcgtgccactaccactacgccggatatcatcatcatgagcattttgctgatccagtgtctgttggggctaagtaccataccgttttcagcacagtatcctgatggtagcgaaatgatgaagctggtgggttgggcgcaaagcattgtcactttccgtggtggatcgtcagagatgctcaacggcgtagcgttcgtcttccgcctgcatctggtgttgggaatgaccatcttcctgctcttcccgttcacccgactggtgcatgtgtggagcgcgccgtttgagtactttactcgtcgatatcaaattgtgtaccacgtcgatgcttttacctcacaaccgtttcgcggcaattctgccggtgttgttttccccgccgataatcttagcgaagcgcaaatgcagcttatcgcccgcgagttcggccattcggaaactgcttttctgctgcacagcgacgacagcgatgtgcgcatccgctactttacgccaacgtttcgtgttattaccggtcgagcgcaaaggccagtgcaaccagccggtttgtgggcgcagtttttcctggccgacatagtgtgcccagccgccaccgctttgcccgacacaaccgcagaagatcagcatattgatcatcccgcggtagttcatgtccatgtgataccagtggttaacacctgcgccgaggataatcatcgagcgcccatgcgttttatgggcggtatcggcaaattcacgggcgatggtttcaatatactggcgcggcacgccggctggggtgtacggtttgatttcagcgtaatctttcgcactgttttcatcttccagcccgcgatcgaggccgtaattcgccagtaccaaatcataaacgctgaccaccggacagcaccggattgtgttttacgctgcgaaaatgcggattttcaatgccgccaaagtaggggaaggccacgcctgcaacagcgtcatgttgaccgagcagggttaacgacaattcggtttccgtaccggcggcaatggattccagattccatttgcctttttctccccagcggaaaccatcgaaccgttcggcactaccaattcacctgcggtataactgctacgttttccactgcggatgtgcttcgcccagtcatcaccagtctagacggatccccggcatacttaagtctggttccttcatgcagacaatcttcaggcagcagcacatctctcagcttgtggggactggtggttggacaaggagcaaacacactagtcaattcatccagcaatccaatgctgtggagctgctacccgcttcagatgcttcctaagaccacgagccacgagtgtattaggcacggcacaagcagcatgcttacgggtatcgatatcggcaatcgccacgatgttatggcgtttcaggtaagaagagaggtcttcggtattacggaagttggctggcaatcagcggcagttcgcgaatcaccagaccttgtgcatgtacctgagaagattcttcatcggcgtcattggtgccgacattgccaatatggggataagcgcgggtgccatgtggctattgagcgtaagtcaggtcagtctggctgcggtcagccaggtcgtggcggtgcgcgtctggcctgcgtccagctacacccgcgtgacggtggaatcaaatcgtcagctgaaatataagcagttcgcgttgagtaaccctgaacgcgtggtggtggatatcgaagatgtaaacctgaactcggtactcaaggggatggcggcacaaattcgtgcagacgacccgttcatcaagtcggcgcgcgtcgggcaatttgacccgcaaaccgtacggatggtttttgaattaaagccaaacgtaaaaccgcagctgtttgcccttgcgccggtcgccgggtttaaagagcgtctggtgatggacctctatccggccaatgcacaggatatgcaggacccgctgctggcgctgctggaggattacaacaaaggcgacctcgaaaagcaggtgccgccagcgcaaagtggtccacaaccgggtaaagcagggcgcgatcgtccgattgtcattatgcttgaccctggccacggtggcgaagactccggtgcggtggggaaatacaaaacgcgcgaaaaagatgtggtattgcaaatagctcgccgtttgcgctctctgatcgagaaagagggcaatatgaaggtgtacatgacgcgcaatgaagacatcttcattccattgcaagtgcgcgtagcaaaagcccagaaacagcgtgctgacctgtttgtctctatccatgccgacgcctttaccagtcgtcagccgagcggttcctctgtgtttgcgctctcaatccaaaggggtgcaagaccagtcggtgaccgctatgtcgaccacaccatgttcgatatggtacagtcgctgaccattgccgacagcctgaagtttggtaaagcggtactgaataagctcggtaaaatcaacaagctgcataaaaatcaagttgaacaggccgggtttgccgtattaaaggcaccagatattccctccattctggtcgaaacggcgtttatcagtaacgttgaggaagagcggccaaacggccagccgggccatccacttgatcccgcaaccaccatgggcaccttaatcgactgcgcccacgccgactcggttcaatagctttaattcgggaaggcgaaagcaaagggcaactgttgttggatggccgtaacgccgggctggctgccgccatcggcccgaccatctttgtggatgtggacccgaatgcgtccttaagtcgcgaagagattttcggtccggtgctggtggtcacgcgtttcacatcagaagaacaggcgctacagcttgccaacgacagccagtacggccttggcgcggcggtatggacgcgcgacctctcccgcgcgcaccgcatgagccggacgcctgaaagccgttactacgccgccagtgcgaataaatatgcaccattcgacacgctgaatgagtcaatcacctgcgacgtttgcgtggttggcggcggctataccgggctctcctccgcgctgcatctggcggaagcgggctttgacgtagtggttctcgaagcctcacgcatcggctttggcgcaagcgggcgcaatggcggacagcttgtgaactcctacagccgcgacatcgacgtgatagaaaaaagcgcgacggcgacaacgcatgtcggttttaacattgggcgcatcaacggacgcttgctggatcttgagctttccgcgctcgaacaaaaacagcagctggatattatcgccagtccgcgtctgctggcctcacatcttcagcctgccagcattatacaggggagcgaaattccatatcaggtttccagcggggaaagtggcgcgacgtcggtggaatttaaagaggccgtcctggggatggaggtcacgcccacggtgttacaaaaaggtcgcatccggctgaaattacacatcagccagaacgttccggggcaggtgctacagcaggccgatggcgaagtgctggcgattgataagcaggagatcgaaacgcaggtcgaggtcaaaatgcggagaaacgttggcgctgggcggcatttttacccgtaa

SEQ ID NO: 25061 - DNA, 295 bp, Homo sapiens
  SIMILAR (273)..(4): 841254mologous to Escherichia coli NH3-dependent NAD synthetase,accession number M15328,Smith-Waterman Score=454.
ttactttttccagaaatcatcgaaaacggtaattggcggacggcgtttatgttcggttttcagataccagttctctattgttctggcgacctgttgaggtacgtttttcccttccagatagtcgtcgatattgtcataggtcacgccgagtgccacttcatctggcagagaagggcgatcatcttccagatcggccgttggcgctttctgacgtttgttgagacgatacagcggattaatgtccgtaccgccgtcaccatatttagtgaagaaccgtaagctcatttctaaaaat

SEQ ID NO: 25062 - DNA, 1080 bp, Homo sapiens
  SIMILAR (1)..(774): 991254mologous to Escherichia coli UDP-N- acetylmuramoylalanine-D-glutamate ligase,accession number D10483,Smith-Waterman Score=1322.
atgctactggatgatgagtgtgaactgtacgtgctggaactgtcgagcttccagctggaaaccacctccagcttacaggcggtagcagcgaccattctgaacgtgactgaagatcatatggatcgctatccgtttggtttacaacagtatcgtgcagcaaaactgcgcatttacgaaaacgcgaaagtttgcgtggttaatgctgatgatgccttaacaatgccgattcgcggtgcggatgaacgctgcgtcagctttggcgtcaacatgggtgactatcacctgaatcatcagcagggcgaaacctggctgcgggttaaaggcgagaaagtgctgaatgtgaaagagatgaaactttccgggcagcataactacaccaatgcgctggcggcgctggcgctggcagatgctgcagggttaccgcgtgccagcagcctgaaagcgttaaccacattcactggtctgccgcatcgctttgaagttgtgctggagcataacggcgtacgttggattaacgattcgaaagcgaccaacgtcggcagtacggaagcggcgctgaatggcctgcacgtagacggcacactgcatttgttgctgggtggcgatggtaaatcggcggactttagcccactggcgcgttacctgaatggcgataacgtacgtctgtattgtttcggtcgtgacggcgcgcagctggcggcgctacgcccggaagtggcagaacaaaccgaaactatggaacaggcgatgcgcttgctggctccgcgttaccagtgtaccagtgttgaacttgatgaaaacagtaatcttgccagtctccaaatcagtctgaatggtatcatttaccttgatgaggggatcaaggtagcggatgctgtgagcatcatgagtcaccagatgagggattccttttgtgcccacaaagatttttctcactttacccaatttgtacttaccctcctcgggtgtaatacgatgtacagcaaagcgacccttggtgtcatagatcagatggatttcatacacaaaattgttgtcgctcatgacatggaccaagagtcctgtgctccttataatcag

SEQ ID NO: 25063 - DNA, 1267 bp, Homo sapiens
  SIMILAR (104)..(901): 941254mologous to Escherichia coli RhsB core protein with unique extension,accession number U00039,Smith-Waterman Score=1343.
gcagctcgacaatgcgcccttccggtgtgaaaacgtaaatctcatccgggaagagatcgccgatgctcaggcagagattgcagtaagcatgcagctgctgcctacttaccaatatgaatacgatgctcccgtacgggtaatccccctgaccagtgaaaccgtcagccacaccacctgccgttacgatgtacttgaccggctgatacaggaaaccggctttgacgtccgcacacagcgttatcaccacgacctgaccggcaaacttatccgcagcgaggatgagggtctggtcacccactggcactatgacgaagcagaccgcctcacgcaccgcaccgtgaagggtgaaaccgcagagcggtggcagtatgacgaacgtggctggctgacagacatcagccatatcagcgaagggcaccgggtggcggtgcattacaggtatgatgagaaaggccggctgaccggtgagcgtcagacggtgcatcacccgcagacggaagcactgctctggcagcatgagaccagacatgcgtacaacgcgcaggggctggcgaaccgctgtataccggacagcctgcccgccgtggaatggctgacctacggcagcggttacctggcaggcatgaaactcggcgacacaccgctggtggagtacacccgcgaccgcctgcaccgggaaacgctgcgcagcttcggccgttatgaactcaccaccgcttatacccctgccgggcagttacagagccagcacctgaacagcctgctgtctgaccgcgattacacctggaacgacaacggcgaactcatccgcatcagcagcccgcgccagacccggagttacagctacagcaccaccggcagactgaccggcgttcacaccaccggtactgagctcgagttattcttcgatattttgacgttttgcctgatgtggtgggtattccatgccaacacgccggaaacgcaaacgctgttccagtcgggatggtttgtggtgggcttactgtcgcaaacgctgattgtgcatatgatccgcacccgccgtgtgccgtttattcagagctgtgcatcgtggccgttaatgatcatgaccgtgatcgtgatgattgtcgggatcgcattgccgttttcaccgctggccagttatctgcaattacaggcgctgccgttaagctatttcccgtggctggttgcgattctggcagggtatatgacattaacccagttggtgaaagggttctatagccgtcgttacggctggcaataa

SEQ ID NO: 25064 - DNA, 939 bp, Homo sapiens
  SIMILAR (321)..(76): 971254mologous to Escherichia coli K12 putative 2-component sensor protein,accession number AE000384,Smith-Waterman Score=397.
tcataaagcgccccagatccgccgattccaacgctgcggcttttgaatttgctcgtcgtcgacgttatcaaacgggatttgatcaaccagacgagtagcgcgatcgatcccggaatgtaattggagcagtgcttttttccgcgcctgcggatcatcgtcagagagctgcgcaacttcggtttgcactttcagcgccgttaacgggctacgaagttcgtgagctgcgtcggaggtaaagcgtcgttcacgaaccatcatcgcatgtgtgcgggcgaacagttgatttagcgactcaaccagtggccgcacttcgctgggtaataaaaatataatatgttttatctgcaaccataaggaaatgataatgattttcacgtcaagttgctgcgataatttatcaatagatgagattatcgaacgtgcgttggcgatgtgcggtttgctacattcacagatgttcttcgccacttccagcagcaggtcatcaggggtgatttcaggatcgtagataaaggtcaggttcggtgaaacctgcttcaactctgcatctgcacgtaagatcgcgcgggtaatgggcgaatcagacgggccgatattggcgtgcataaaggcgtctggcagggttctgtcgaggtaacgccagaaacgttttattcgaacatcgatctcgtcttgtgttagaattctaacatacggttgcaacaacgcatccagttgccccaggtagaccggcatcgatgtgaccgacggtacgtggtggtaaagaaagcggttcgataatcgaatcaccgatggtctgacgtgggtccagcgaagcgtaagggtccttgaaaaataaactgaatatcccggcgtaatgccggctccactgaagaatcgcagttctaagcaacaacaaccgttgctgactgtaggccggataaggcgttcacgccgcat

SEQ ID NO: 25065 - DNA, 1764 bp, Homo sapiens
  SIMILAR (638)..(600): 761254mologous to Escherichia coli K12 Mg2+ transport ATPase, P-type 1,accession number AE000495,Smith-Waterman Score=48.
ctacgtgccattcagtttcacacaggttgcagtgcaggtaacgtagcccctgagtggtgccaatttgcaccatgctggacaccggcatagaaccacaaaccgggcaatattgacgttgctcgccgtattcagcgcggctttgccggggatcagattggccatctgcgcccagtagagcgacagtgcagcccagataaacggcgctttatcgctgctgacggacgagaaatcagaggcaaacagcgcgctggccatatcttccagctcctgagtcgatgccttctccagattctcaatcactgccagcgccgggccgctcatttcaggtttcagctcagcaatcagcgccatcagcagcttttgccagtgcttatcacgcggcagaacgtgaatatccagcgggggcttgccttgtgcgctggcttctttaatgcgcgcagtcagatccatctccagcggatggtcgtacagcaccacttccgccgtccagtttggataaggtggggcgctaaatatttcatttttcaccgtcatgatgtcttcaaattggttttctggatcggactctagagatccccggtaccgagctggaattctgacccgacaatcatcacgatcccggccatgaccattaacggcccacgatgcacagctctgaataaacggcacacggcgggtgcggatcatatgcacaatcagcgtttgcgacagtaagcccaccacaaaccatcccgactggaacagcgtttgcgtttccggcgtgttggcatggaatacccaccacatcaggcaaaacgtcaaaatatcgaagatcgagctgatcggtccgaagaagatcataaagcgccccagatccgccggattccaacgctgcggcttttgaatttgctcgtcgtcgacgttatcaaacgggatcgccacctgtgacacatcgtacagcaggttctgaataagcaagtgtaacggcaacatcggcaggaagggcaagaaagcactcgctaccagcacgctgaacacattaccgaagttagagctcgccgtcattttgatgtatttcagcatgttggcgaaagtgcgacgtccctcaataaccccctcttccagcaccatcaggcttttttccagcaggatgatatcagccgcttcacgggcaatatctaccgcgccgtccacagatacccaactatacccagcgcgtaagccgggcgcatcatcaatatcatcgcccataaagccgaccgggtactgaccgggctggtggaccgcttcgggcgcacacagacgttccaccgcgaagccgccggtgaattcagcggcgaaatcaccggcgtgacggatggtgcctggcgtcacttccggctggtactgaccacgcaggcgcagcgggcagaagaagcccggcagcaggccatttccggcggacggaaccgtccgcttttcctgactactgtcgcgcgctggtgcgctatcgctggagcccacgcggcgaactggcggtggtgtatgaccgtagtggcaaacaggtggcagctttacgtcagacatcaccgccacgtcatccgccagacgcgccacaacgcccatatcatgggtcaccagcagcattcccggcgcttgtttttgcataatgctttccagcagatcgaggatgcgcgcctgtgctaccacgtcaaggtcggtggtcggttcatcggcgatgataaacggtgattcacacagcaccgccatcgcaatcatcatgcgctgcgacatgccgccgctcat

SEQ ID NO: 25066 - DNA, 1401 bp, Homo sapiens
  SIMILAR (1401)..(856): 1001254mologous to Escherichia coli phosphoacetyltransferase,accession number D17576,Smith-Waterman Score=905.
cgcaagaatggtttcatcgttatcctgcaagctatattcttcagcccactgcaggaccttgcgagccttgaaccttttttcacactcggcgctttcaaatttatccatgccattgccgacccattctggctcatccatttccgcatcatcgtaaatgctatccagccattgccggtaagcatcagggaaaaataaggatgctccattaagctcctcaatatgttgctgcgtccgccacatgactctaacgttgctataaatatgctcatgtcgtccgtaaccctcgccatcaggcagcaaaatggtggcaacaggaatctcaaaaccagcgggacgatatttgcgatgatggcgatgtaaacggcccaatcgttggaaaagcaaatctgcaggacaatgcttcccttcgatcatccctttaatcgatcctttcacccaaaatgccatatacatatggatcaggatggcgtggatcaggatgatacccgcagccgcgtggatcagcaggctgtagcgaacaacctgcatcgggaagtactgcgcaaagtacggacgccagataatcaccccggtcaccagcagcacgaaaatcatgctcatgatcgaccagaacatcatcttttgcccggcgttgtacttaccgacatccgccactttatgctcattgcctttcaatacttcgacaatgttcaacagccacggaatatctttcttatccgggatgttgtgatgcacaaaacgcacaaacataaacatcagtgcgacgaaaatcgcaatgccgaagaacgggtgcaaaatgcgtcccatagcgccaccaggaagaagcaaatcaccacggtccagtgacaggcgcgatgggcgagtacgaccctgttcatcaaccggtgcgttcagtttgttaacgataacgccggtgatgttggtgtttttggcaccgccgaagctgttgcgggtcagttcgatacgctctttcagctgttccggggtgtcagtgccctgagacataacgaagacgatttccgcattcagcgttttagcgatttcgtagttcagagactgggcaaactggtgcttacgtgtcgggaccagaccttcaaccagaacgacttcagcgtctttggtgttagcgtggtagtttgcgacgatctcttccatcagcacatctttctgattgctggaaagcagaccttcaacgtagctcattttcagcggttcagcggccgtcgtggtggaagagttcgcacgcacgatagtcgtagtctgatcgggcgcatcgccaccggtacgcggctgagcgataggtttgaaaacgctcagacgaacgcctttgcgttccattgcacggatcacgccaaggctgacgctggtcagaccgacgctggttccggtagggatcagcat

SEQ ID NO: 25067 - DNA, 1215 bp, Homo sapiens; identical to SEQ ID NO: 4903
  SIMILAR (849)..(292): 631254mologous to Escherichia coli No definition line found,accession number U00039,Smith-Waterman Score=452.

SEQ ID NO: 25068 - DNA, 4752 bp, Homo sapiens; identical to SEQ ID NO: 9224
  SIMILAR (3136)..(3885): 921254mologous to Escherichia coli No definition line found,accession number U00039,Smith-Waterman Score=1200.

SEQ ID NO: 25069 - DNA, 4653 bp, Homo sapiens
  SIMILAR (2304)..(1504): 891254mologous to Escherichia coli O157:H7 aspartokinase II and homoserine dehydrogenase II,accession number AE005625,Smith- Waterman Score=1162.
ttaggagatattttcagtggtctggataataatgaccagaggagatgtagtaaccatcagccggtggcgcgtgtccagtagcccattggaaacgtggaacaagaggtgggcaaaaatcagtcctgcaccctttagcctattgcccatctctaggctggaaaagtctgagggtgactggttgcctgaaactgttatctcagctttcaatatgccttcatcactaagcttaatcatttccagcttatgatttaaagtgagagatgtgtgacacttctttccatttgaacacttagaggccattatagggttattaattggcctaatttcaatattgttgtgtctcagggaataggaaagcgcctggcgaattcgtggcttgtttttactctgtttcatcggatttagcgttaaaggaatagtccgtttccgggcaacaataagttgtaagcaaccaagcgcaggaatatgcgcattcaatagttttcctccgtgtttgttccacgggagaacgtggaaacggctggcgtgtagcacttcaaaattcaacaaagagagccagtccagctgccgcatcagagtaaacatccggctgttatagggcgaggttttgcgcaataccggcacaagtttgcgtaatcccataaaactgatgggattgaagccactaatgaccagccagccatcatcaatcaatacccgatcggcttcacgcaataaacgatgcggatcggtgcaccacggcaatgtatgtgccagtagacaaacatcaacggatttatcggcaaaaggaagatgaagtgggtccgcctgtacctggacgggcattccttgcgcagaaacattcacttgatgagaaaccgcgcacgcttcgcaattgatttctgcgcttaaattgccaatcttaagcagatgaaaaccatacattttagtgaaccacgggttgagctggcgctccagcgccttgcgataaagctttccccagggcaaatcgccccagcaatcaggagccacgacagtttgagggactcttgccggtttcatcacaaccttccgtttcacactgagaggtaatctatgaatcttaacagtattcccgcctttgatgacaattacatcaaaaattgcagtgccgatacgaaccatcgtgctacctgccgcaatggcggcttccatatcgtccgacattcccagagagagcgtgtcgatatgcgggtagcgcgttttcagtccggcaaatgctacagccatttggcgtgcaacttcaaactgccttacatattctgactcaggcgcagggattgccatcaacccgcgcagacgtaaacgcggtagttcagcgaccgcagctgccagctcgtccagttcagccagttgaatcccggacttaggggatcctctagatcgacagcagcaagctgcattaggcttggtgaggaaactaaaaacgccctgctgtgttgcagcaacggcatcgggaatagaaccatgcgcggtaagaataattaccggcattcccggctgcactttctggatttcagcaaacagctgcataccgtccatttcatccatccgcaggtcgctgatgactaaatctactttttcgcgattcagcactttacgcggtcgggcactgtataccccggcgacgtcgctccagatggttacgcgagaaacacccgccagcgcaccgatttgtgtcgcggaatagtcggaaccgttacgccccagcagcaccgtttcaccggcgttgttgcggctgataaatccggtcaccaccagacgtttgcccggatgttgcaccagcagctgttgcagcaacgggtaagaaagcccttcatcaacctgcggttgtgcggcgcgttcagcgcgtaaaaactcgcgggcatcaagccaggccgctggcagcccttgttgattaagtaccgcagacatcagacgtgccgaccatacttccccgtggcccaccacttccgcatacactgcgtcgttaataccgctgtcgagcagcgccgccaggcgctcaaggtcgctgacaaaagcgctaatgaggctatcggcttcttcagcgggtagcagaccgctaatcagatcgcactgatagcgacgcagcgtttgttgaacctgatgcgcagagagacgatcggtctggcttagtttcaaccagttaatcaactggttagtggtgctaccggcggcggaaaccaccatcatatcgtcaggctgagagtactccgccataatgcccgcgacacgcaaataacacttcacatcagccagactactgccaccaaatttatgcagctgacagacctttatatctatcagatgggaacctgcttcctgttcccagaaggcgatagaaggcccccagatccaggtggagccagcagctcccccaccacttggaggcagccaggcagtttcttggcacagatcagccagcactatgatatccgccagcgaggctttaccagactctttctggattttctccagaacaggcagagcacgaacggctgcggcgttcacatcccagtcgcgctgcggcattaatgccagacgcgcaccgttggcaccaccgcgtttgtcgccaccacggaaggtagaagcagatgcccaggccaccgataccagctcactaacagacagaccagaatccgcaatcgcgaatttcagatcgataatgtcctgctcggtcgggttgtagatcggctgcggcagcggatcttgccagatcagatcttctttcggcacttccggcccgatgtagcgagatttcggccccatatccctgtgcgtcagtttgaaccaggcacgggcaaaggcttcgttgaacgcctgcggatcgttgaggaaacgacgagagatcttctcgaactcaggatcaaaacgcagcgtcaggtcggtcaccagcattgtcggtttacgtttcttcgacggatcaaacggatccgggataatttccggtgcgtctaccgcttcgaactggattgcgccagccgggctgcgggtctgtacccactcatacttgaacaggttctcgaagaaatagttgctccactgggtcggcgtcatttcaaaccatcggcgaacaatccagatcggcgcaaagataataaccccacgtcgcaggtaaatgccactttgcggatcgcgttcgccacgtagccagacgtagcccatcagcgcatacaccacgccagaaagcccgccaaaccacggcccgctgaatttttgctgcacatagccgcttaacagggcgctgataagcgtaatgacaattagcttaccgctaccgaggcgtttttccaccgcaccgccgagataccaccaccagagcaggttaaagaggatatgcatcagcgagaagtgcattaacgcgtgggtgaagtaacgccagaactcaaatttcagtgttggatcgaatggccaggccagccataacatcacttcctgatcgccgagaatttgcatggcaataaacaccaccacgcaggcgatcatcatcacccaggttaccggacctgcgcgttcacgcaaggcggcaaagaaaggataacggcgataatgcaggccactgccggtatggcctgcctgccagctcgccgccagataacgcggatctgccgggttttcgagaaaacgcgccagctccgcccgtacgcgctcggctattgtaagctcctggagttcactcgcttgccgccttcctgcaacacgaaatccatagagtaaacaaacatcacctttcagtgcgctattgcagcagcctgaaagaatagtgtatcgaccccccgcggcggcggcaccggcactaacggtcaggcgctcaaccaggggattattgttgatatgtcccgccatatgaaccgcatcatcgaaattaaccctgaagagggctgggtgcgcgttgaggccggggtgataaaagatcaactcaatcagtacctgaaaccgttcggctacttttttgcgccggaactttcgaccagcaaccgggcaacgctcggtgggatgatcactataccgcactgctcggcgggttaaccgagaacggacgtagcgcggtgaacgtgctttcgttcctttgccttgacgccgcaaccgaacctcggcgtgcgcactaacgccttgatcgacacgccgttcctgatgaaaaccgccgaaaccattcgcttcggtaccggtattccgcaaatctttaacgatgaagtggtggtgccagcgttcctcaaccgtggcgtttcgctggaagatgcgcgcgactattccgtagtgggatctccagcagctgctgcacgccagtgggccaagtggcaggttcagcgttgtcagaccgctggcaatgccaagataaacaaacagttcgccagggttgatatgggggaagaggccattcattgagtggcagctataagaggccgccgcgtagtagctgggtttgtacttttccggcataaagcgacccaggcttagggtcatcggattgcaaaagacaaacgtgccaatgcacggtaacagtaggtaacgggaaacagggttaccggcgcaacgttgagcaaaacgttcaatacgatgctgaccgataaaattaatcagtgcgttcatgataaccagcaggctaatcaacagcggaagaatgccggtcaccat

SEQ ID NO: 25070 - DNA, 720 bp, Homo sapiens; identical to SEQ ID NO: 9287
  SIMILAR (531)..(620): 931254mologous to Escherichia coli Glycolate oxidase subunit GlcD,accession number D90811,Smith-Waterman Score=141.

SEQ ID NO: 25071 - DNA, 912 bp, Homo sapiens
  SIMILAR (1)..(657): 991254mologous to Escherichia coli TldD protein,accession number D44451,Smith-Waterman Score=1138.
atgccggtagtacttggcgcaggttggccgggcgtgctgttgcatgaagcggttggtcacggtctggaaggcgacttcaaccgccgtggcacttcagtatttagtggacaggtcggggagctggtggcttcagaactgtgtaccgtggttgatgatggcacgatggtcgatcgccgaggttcggtggcgattgatgacgaaggtacgccaggccagtacaacgtgctgattgagaacggcattctgaaaggctacatgcaggataaactcaacgcgcgtttgatggggatgacgccgactggcaacggtcgccgtgaatcctacgcccatctgcccatgccgcgtatgaccaacacctatatgctgccgggtaaatcgaccccgcaggaaattattgaatccgttgagtacggtatctatgcaccgaactttggtggcggtcaggtggatatcacctccggcaaattcgttttctccacttcagaagcatatctgattgaaaacggtaaagtaacgaagccggtgaaaggcgcaacgttgattggttccggtatcgaaaccatgcagcagatttcgatggtaggcaacgacctgaaactggataacggcgtgggtgtctgcggtaaagaagggcgaagtttgccggttggcgtggggccagccaacgttgaaagtcgatatcctggattgttggcggtactgcgtcataatttcactattttcagaacgatagttaatctttctacgtgcacgaacggtcccctcgcccctttgggaccccgggttgacacgttgtcccgacttttggtgggaccaaaaaggtgcaaccgtccccatggaatatccggaatgttgggcaaagttaaaatccgggccaaggggttaacccggaaggccttccgcaaatttccg

SEQ ID NO: 25072 - DNA, 1860 bp, Homo sapiens; identical to SEQ ID NO: 4900
  SIMILAR (616)..(1071): 961254mologous to Escherichia coli No definition line found,accession number U00039,Smith-Waterman Score=708.

SEQ ID NO: 25073 - DNA, 1180 bp, Homo sapiens
  SIMILAR (105)..(647): 981254mologous to Escherichia coli glucose-1-phosphate adenylyltransferase,accession number U18997,Smith-Waterman Score= 949.
tatccaagctcggtacccggagatccgtcgtatgggcgtgatcacccagtaccagtcccacactctggtgcagcacattcagcgcggctggtcattcttcaatgaagagaatgaacgagtttgtcgatctgctgccagcacagcaaagaatgaaaggggaaaactggtatcgcggcaccgcagatgcggtcacccaaaacctcgacattatccgccgttataaagcggaatacgtggtgatcctggcgggcgaccatatctacaagcaagactactcgcgtatgcttatcgatcacgtcgaaaaaggcgcacgttgcaccgttgcttgtatgccagtaccgattgaagaagcctccgcatttggcgttatggcggttgatgagaacgataaaattatcgaattcgttgaaaaacctgctaacccgccgtcaatgccgaacgatccgagcaaatctctggcgagtatgggtatctacgtctttgacgccgactatctgtatgaactgctggaagaagacgatcgcgatgagaactccagccacgactttggcaaagatttgattcccaagatcaccgaagccggtctggcctatgcgcacccgttcccgctctcttgcgtacaatccgacccggatgccgagccgtacttggcgcgatgtgggtacgctggaaactttatggaaagcgaacctcgatctggccttatccgcgtgtcatgcatgcctgcaggtccaccgctgccactgccagcagcaaggtcagaagcgccgaaagcagcaggaactgttgcgagcgttccatcgatcgccccagcgcgccttcgtcctgttccagaccccgtcgagctggttctcgttgccgccgaatttataacgccaggtgacccgactccccggctgcacggctccggttttatcgacatccgccagattcatcatcagacgcggagccatctggaaggggttaaaaccggaatccggttcctgaatcacttctccggcaatccgcaaggtggcatcgcccacgtcaatggtgtcgcccgttttcaggttaagcagtgccatcaggcgtggggccagcaatacgctgcccgcctgcggtttcaggccagggggattagtttgcagatcgccatacatcgggtagatatcatccaccgctttgacgttcgccagctgcg

SEQ ID NO: 25074 - DNA, 591 bp, Homo sapiens
  SIMILAR (91)..(387): 1001254mologous to Escherichia coli Phospho-N-Acetylmuramoyl- Pentapeptide-Transferas e,accession number D10483,Smith-Waterman Score=521.
ctgcccccttattaacacgtagcccactccggttgtgcggctgaaaccctgaactgtgtggtccatgggtcccgttgtggggacaccagcccgtccaatccgtacgtctggtgcgtgttggtggtgctggtaggttacggtgttattggctttgttgatgattatcgcaaagtggtgcgtaaagacaccaaagggttgatcgctcgttggaagtatttctggatgtcggtcattgcgctgggtgtcgccttcgccctgtaccttgccggcaaagacacgcccgcaacgcagctggtggtcccattctttaaagatgtgatgccgcagctggggctgttctacattctgctggcttacttcgtcattgtgggtactggcaacgcggtaaaaagctttcgtgcctgcaggtccatgacagatatcatcaccttcgccacgcaccatcatgttgccttcgtaagcctgaaggaatttcgtacgggctttttgcaacgtggaatcgtcatccagcatggcatcgttttgcgcgtcataacaggtttttagccacgcgccgccactttcaggtaacaccagcaatggcgcggacat

SEQ ID NO: 25075 - DNA, 3390 bp, Homo sapiens; identical to SEQ ID NO: 4901
  SIMILAR (3390)..(2749): 981254mologous to Escherichia coli formylglycineamide ribonucleotide synthetase (EC 6.3.5.3),accession number M19501,Smith-Waterman Score=1123.

SEQ ID NO: 25076 - DNA, 4247 bp, Homo sapiens
  SIMILAR (3810)..(2944): 991254mologous to Escherichia coli Glycolate oxidase subunit GlcD,accession number D90811,Smith-Waterman Score=1457.
tcatcgacaacacagcctgttaagctctggtggagtgccatcgtttattggtgggctggtggtgtttgtgtcggcagcgttcaatgcacaagctgaaacctggttcgatcctgcttttttcaaagatgatccctcaatggtggccgatttgtctcgtttcgaaaaaggacaaaaaataacgccaggtatcgtgtcgatattgttctgaacgcgacgcaagcgccgtggaatgaacattacaaaatgtatgactatatccgcaacgagctgaccttgtgacataagactcaccgggtcgtaatccaatttaatgctctgccagcaatgccggaacgatatgtccgttcggcaaatgaccaggaaattatacggcccaaacaccgccagcacgccgtgcgggcgatgtcgcaggctcgccgcgccgtccggcatttcactacgctgctcgccggtacgaacgtgatacgccttaattgatatcgcgattttattgatcatcgccgtcacttcggttgccgcttcccagcgcggcttacccgtttctctggcaataatcgcggttaattcggctttattgctttccagcagtgcggcaaagcgttcgacaacggcatgacgttcagcaaatgaaagccgcgcccagcgcggaaacgccgcacgggctgcccgacaagcctgctcgacctgagcggcatcggcatcattgccttgccataacacctcgcccgataccggattacgcttcacacgcgatgcgcccagacgaacgcgatccccggcgtggcatttgagggcatccagttgtgcggcggttaaaatcaaacgctcggttgccggatcggtacgcaccagcaccacgcggaaatggtgataattttcattggcgaccaggcaggctgggaaatcgccctgcgcaggctgcccttctgccacttccaccagccgacttttacggatggcgcgcacgcggtcgatgtcacactcaagcgtcggcccaccgtcaaagatgtcgatatagttacggtagcgaaaaccttctttctccagcaccgcgcgggcaggcgcggtttgcggatgtacctgaccgatgacgtcctgggcttcgcccaggcgtttgccgaagcaacgggcgatcatacacgacatccggcagatcaggtgatcccgcagcaagatccgcgaatacctttgatttgatccaatttttctggtcgtccgaataacagatgcgcgtaacgtcgtggcatcctgaccttcattacttaaatgaacgtcgagcgcaccactggggtgttcaatatgatatgccgtatctacagaagggacgatttgtcgggtgacggtgccttccaatgcacaactactggaaatagcaatagcaccggttatcgccagcgcgcgatggcaagaatgcggcataaaataacgcacattaattgccccgcctttctgcgctggagaaataagcacaggtttagggataaccatattactgacatcacctaagcccattgctttacccgcttgtagacggatagattcaatgcgggctaataatgctttgtcggcatccagttccgccggtaattcataacctgtttttcccagatattcagccggaataatgacgactggcatcgccatatcgatacaggtcaccgggacatcgtcaaaataatcaatctgattatcagtcgggaaaacttttccggttttggttccagcggcattcaggaaagtgagcgcaaccggtgcggcagtacccggtacgccgtcaattctggcgctaccctcgtactcgacaacaccatttggcgtttgcacatcagcttcgatgaacgtacccgtattgacgttgcggatacgtacgcgagtaactggcgaagtcgctgcaatcaaaccattttcaatggcgaatgccccaacaccagacagcatattgccgcagttaggcgtggtatcgacacgttgctcatgaacgattacctgcgcaaacagataatcgacatcagcacgcggatcgctggaacggctaataatggcgactttactggggtagccggtaccttcgattaatccgtctggtttgggcatgatactgatgtagtcacgctttatcgttttcacgaagctctctgctattccgttactctccggactccgcaccgccgtgttcttcggttcaagtcccaacatccgggcgaactggcgtgtttcattagcccggtagcatgaaccattatccgtcagccactccactggagacgacggaagatcgttgccgaagcggcgttccaccgctcccagcatgacgtcctgtactgtttcactgttgaagccgccggtagtgaccgcccagtgcagtgcctcacgatcacagcagtccagcgcgaacgtgacacgcagtctctctccgttatcacagcagaactcgaacccgtcagagcaccatcgctgattgctttctttcacgggcactctgggcgttatctcttcgaaacggacgattttgccgtcgcgcattccctgataaagcggggcagggaccagcgcttccgttgacggaccatgattgataagcagggcgtagttccagccatacttgatttgatcttcggtggtagatgccccgccctggatggttaacccggcatcgccgctaatagcggttgccagtaattcagaaagaagagattttgcggtacccggttcccccaccaacatcaaaccgcggccggtagcaagagtgactaacatacgttcgacagcggaggggctaatcaccactttacggctgatattttgcgcttcgtcgccaaggataaaagcacgggccgcaggcaaacttaactgccaaccgggcgggcaaggtgcgttatcattttgttttaattttgccagttcatcggcgtataacacagcagcaggcggacgctgcaaatgattattcagacggcgcactttaggcaagcgtgtaatatccagccgcgcttcggtaataaaggccagcgtcccttctgaacccgtcagaatgcgcgtcaggtcgaactcggtcatctcatcgttaaagacatgacgcagatcgtaaccggtaagaaagcggttaagtttggggaagttgtcgataattaactggcgttgctgacggcaacgttgataaaccgtgttataaattcgcccgattgtggtattggatttacccagcgtttccgccaattcgacgggtaaaggttgcgtatcgagaatatcgccccccaacaacaccgcgcgtacgccaagtacgtgatctgacgttttgccatagaccagcgatccctgaccggatgcatcggtattgatcatcccaccgagcgttgcccggttgctggtcgaaagttccggcgcaaaaaagtagccgaacggtttcaggtactgattgagttgatcttttatcaccccgggctcaacgcgcacccagccctcttcagggttaatttcgatgatgcggttcatatggcgggacatatcaacaataatcccctggttgagcgcctgaccgttagtgccggtgccgccgccgcggggggtaaagatcagcgatgaatagcgttcctgcgcggcaagacgggcgatcagcgccacatctgcggttgaacgcggaaataccaccgcatcggggagaagttggtaaatactgttgtcggtcgacattgtcagacgatcggcataacttgtcgccgtatcgccggtaaaaccttgttgctccagctcttgcaaaaaattaagcaccagttgaacgacgccgggtgcctgggaaatctgtggaatcattatattgaccctttcctgcggtctgtgatgtaggtcgatacactattctttcaggctgctgcaatagcgcactgaaaggtgatgtttgtttactctatggatttcgtgttgcaggaaggcggcaagcgagtgaactccaggagcttacaatagtaagtgactggggtgaacgaacgtagccgcagcacatgcaacttgaaatacgacgagtaaatcgtttgcgtgttgcctgagttgttgtaccacatttttttctaacacgcccatcagaattaagggcagaatcggcctgttaaaaaccgctgaaattgctcatcattatgcaggtgagtttcgcgtgttcacgtcgcgtcgacgatttgacgcacaaaaaaggtgaaaagtagttatggtaaatgttcgtcagcccagggatgtcgcacaaattctgctttcgg

SEQ ID NO: 25077 - DNA, 4944 bp, Homo sapiens
  SIMILAR (964)..(1737): 941254mologous to Escherichia coli Phospho-N-Acetylmuramoyl- Pentapeptide-Transferas e,accession number D10483,Smith-Waterman Score=1257.
atggtcatcttttttggccgggaaaatctgcctgctttaaaccagaacgatgtgctggtgtacgggcatacccattgccagggccgaaaaggggggggattttcacttaccccgctcgggggtattccaaggggggatccccttaagcaagactactcgcgtatgcttatcgatcacgtcgaaaaaggcgcacgttgcaccgttgcttgtatgccagtaccgattgaagaagcctccgcatttggcgttatggcggttgatgagaacgataaaattatcgaattcgttgaaaaacctgctaacccgccgtcaatgccgaacgatccgagcaaatctctggcgagtatgggtatctacgtctttgacgccgactatctgtatgaactgctggaagaagacgatcgcgatgagaactccagccacgactttggcaaagatttgattcccaagatcaccgaagccggtctggcctatgcgcacccgttcccgctctcttgcgtacaatccgacccggatgccgagccgtactggcgcgatgtgggtacgctggaagcttactggaaagcgaacctcgatctggcctctgtggtgccggaactggatatgtacgatcgcaattggccaattcgcacctacaatgaatcattaccgccagcgaaattcgtgcaggatcgctccggtagccacgggatgacccttaactcactggtttccgggcgtgggccgacgcttgagtgtgacatcgaccgcgtgcgcgccatccgtaaaagtcggctggtggaagtggcagaagggcagcctgcgcagggcgatttcccagcctgcctggtcgccaatgaaaattatcaccatttccgcgtggtgctggtgcgtaccgatccggcaaccgagcgtttgattttaaccgccgcacaactggatgccctcaaatgccacgccggggatcgcgttcgtctggtgcgcctatggtgcgattcgccaggtgatgcgccagtgccagttgttgatgattatcgcaaagtggtgcgtaaagacaccaaagggttgatcgctcgttggaagtatttctggatgtcggtcattgcgctgggtgtcgccttcgccctgtaccttgccggcaaagacacgcccgcaacgcagctggtggtcccattctttaaagatgtgatgccgcagctggggctgttctacattctgctggcttacttcgtcattgtgggtactggcaacgcggtaaacctgaccgatggtctcgacggcctggcaattatgccgaccgtatttgtcgccggtggttttgcgctggtggcgtgggcgaccggcaatatgaactttgccagctacttgcatataccgtatctgcgacacgccggggaactggttattgtctgtaccgcgatagtcggggcaggactgggcttcctgtggtttaacacctatccggcgcaggtctttatgggcgatgtaggttcgctggcgttaggtggtgcgttaggcattatcgccgtactgctacgtcaggaattcctgctggtgattatggggggcgtgttcgtggtagaaacgctttctgtcatcctgcaggtcggctcctttaaactgcgcggacaacgtattttccgcatggcaccgattcatcaccactatgaactgaaaggctggccggaaccgcgcgtcattgtgcgtgtctggattatttcgctgatgctggttctgattggtctggcaacgctgaagggtaaaaatgtcgtcattatcggcctgggcctcaccgggctttcctgcgtggactttttcctcgctcgcggtgtgacgccgcgcgttatggatacgcgtatgacaccgcctggcctggataaattacccgaagccgtagaacgccacacgggcagtctgaatgatgaatggctgatggcggcagatctgattgtcgccagtcccggtattgcactggcgcatccatccttaagcgctgccgctgatgccggaatcgaaatcgttggcgatatcgagctgttctgtcgcgaagcacaagcaccgattgtggcgattaccggttctaagggcaaaagcacggtcaccacgctagtgggtgaaatggcgaaagcgccgggggttaacgttggtgtgggtggcaatattggcctgcctgcgttgatgctactggatgatgagtgtgaactgtacgtgctggaactgtcgagcttccagctggaaaccacctccagcttacaggcggtagcagcgaccattctgaacgtgactgaagatcatatggatcgctatccgtttggtttacaacagtatcgtgcagcaaaactgcgcatttacgaaaacgcgaaagttacgtgtaagcgcctgcaatacacgggcggttgtacttttccccaccgcgacactgccagcaatactgataatgtaaggaatgcgttgcccgttggtaccaagaaactgttccagaactgcctgacggcgcagattcgagcttatatagaagttcagcaaacaccaaagccggaagataaagtcaaagcggtgaccgagctgaatcaacatgcgccgctggcgatggtcggtgacggtattaacgacgcgccagcgatgaaagctgccgccatcgggattgcaatgggtagcggcacagacgtggcgctggaaaccgccgacgcagcattaacccataaccacctgcgcggcctggtgcaaatgattgaactggcacgcgccactcacgccaatatccgccagaacatcactattgcgctggggctgaaagggatcttcctcgtcaccacgctgttagggatgaccgggttgtggctggcagtgctggcagatacgggggcgacggtgctgggaccgaagcacgtaccctgtcccaatcgtcgtgatgaagagaacatgccgggttcccgccgcgaagtgaaaaacgcgcgggaagaaggcgtagagttcaaattcaacgtccagccgctgggtattgaagtgaacggtaacggcaaagtcagcggcgtaaaaatggtgcgtaccgaaatgggcgaaccggacgccaaaggccgtcgccgcgcggagatcgttgcaggttccgaacatatcgttccggcagatgcggtgatcatggcgtttggtttccgtccacacaacatggaatggctggcaaaacacagcgtcgagctggattcacaaggccgcatcatcgccccggaaggcagcgacaacgccttccagaccagcaacccgaaaatctttgctggcggcgatatcgtccgtggttccgatctggtggtgaccgctattgccgaaggtcagctggagcaacaaggttttaccggcgatacggcgacaagttatgccgatcgtctgacaatgtcgaccgacaacagtatttaccaacttctccccgatgcggtggtatttccgcgttcaaccgcagatgtggcgctgatcgcccgtcttgccgcgcaggaacgctattcatcgctgatctttaccccccgcggcggcggcaccggcactaacggtcaggcgctcaaccaggggattattgttgatatgtcccgccatatgaaccgcatcatcgaaattaaccctgaagagggctgcatgacagctgcctgcgtgaagccatcagtttctcagtcaatggcccctcgccaagggctcttcgaggatctcccgtcatcacagtgccgtttattggcgcttaaacacgttctcctgaacctactaagggaccgttacgatgaccgccagtcagcattattcaccacgacaaatcccgcgctggccgcagatagacgaatctcgctggaaggagaaactcgcgaaatcacaagttacttcccgatgcagtttgttcgctacagcctgctgatccacgcggctgcgggtatctcgctgatccacgccatcctgatccataggtatatggcattttgggtgaaaggatcgattaaagggatgatcgaagggaagacacccacgccgttatccagtttcaggtcgttgccaaccatcgaaatctgctgcatggtttcgataccggaaccaatcaacgttgcgcctttcaccggcttcgttactttaccgttttcaatcagatatgcttctgaagtggagaaaacgaatttgccggagaacctgctgtacgatgtgtcacaggtggcgatcccgtttgataacgtcgacgacgagcaaattcaaaagccgcagcgttggaatccggcggatctggggcgctttatgatcttcttcggaccgatcagctcgatcttcgatattttgacgttttgcctgatgtggtgggtattccatgccaacacgccggaaacgcaaacgctgttccagtcgggatggtttgtggtgggcttactgtcgcaaacgctgattgtgcatatgatccgcacccgccgtgtgccgtttattcagagctgtgcatcgtggccgttaatgatcatgaccgtgatcgtgatgattgtcgggatcgcattgccgttttcaccgctggccagttatctgcaattacaggcgctgccgttaagctatttcccgtggctggttgcgattctggcaggcgttttcgtggtggccaccgatcatgcagcagaagccattaccggattcttcactaaatatggtgacgtcggtacggacattaatccgctgtatcgtctcaacaaacgtcagggtaaacagttactggcggcattagcttgcccggaacacctttataagaaagcgccaacggccgatctgcgcagatgatcgcccttctctgccataacacagtggcactgccccgtgacctatgacaatatcgacgactatctggaagggaaaaacgtacctcaacaggtcgccccaacaatagagaactggtatctgaaaaccgaacataaacgccgtccgccaattaccgttttcgatgattcctggaaaaagtaa

SEQ ID NO: 25078 - DNA, 1219 bp, Homo sapiens
  SIMILAR (334)..(834): 841254mologous to Escherichia coli o361,accession number L10328,Smith-Waterman Score=744.
atggtggtggctgcttccaagatggtggcaagcctcgtgttctctgccctggggttcttggcctcacagattccaaggaatggaatcttgggccatgtggaactgtggcaagcctttagcccaatcaagagtggcaatgggtgccttgctggatcaagagcacagcagacaccctgccagatccagagggatagaagtcagcggcgggtctgcgactgcggccggcatcagtggtggacagcgagcgaaagctcagctcgagctgtaacaaacacggaccagaagagtgcagttgcaagatttaatagaatatgtcgctatccatcagtggtctcggacaaacatccggtgccgttctactcttgcatctttgatgattcgataactaactgttattcatggagcatcagcaaagacgggtattttatttttggcggtgcatatccaatgaaagacggtcagacgcgtttcttgacgatgaaagataaaatgagcgcctttcagttccagtttggtaagacggtgaaaagcgaaaaatgcacggtgctgtttccctcgcgcgggcaggattttgtatgcggtaaggacaacgcctttctgattggtgaagcggcgggatttatcagcgccagctcgctggaggggattatctatgcgttgtatagcacagacattccgcgttcggtgttactgaagcagccagacaagctcaatcccgcttattggcgtgccacccgcctagtgtgtataacactcttcggccagatagtaaacaccatatgcatggccgcaccggatttaagaaaatggattatgctcagtcctgtggctcataaagggcatcatctagagtgggtcctgcacgacatgcaaattctaccagtaccgagacctagtggatgcatttgttcagggagctcaacttttttttgcaattggggttgcccatatgataggccccagtggcagctgtacccttccatgtgtctatgtgttcacattggtccagctccagtcagaagtgagaaagttgaatccaaaagggccatatcgaaagtagatcaggattcagctttcagaggatgctgtagatctggaaatcgcaacggaggaagaaagatcgttgctgtaagcctgaaaaaagtatcgggtgctgctaaaccgtgtggacacttccgtagcaccagatatcgagtggcttattcaaccataataaaca

SEQ ID NO: 25079 - DNA, 1161 bp, Homo sapiens
  SIMILAR (487)..(981): 961254mologous to Escherichia coli DNA replication protein DnaC,accession number D90774,Smith-Waterman Score=818.
cttggcattcgcacaccttcaactgaacaaccgattgaatttctctccggcggcaatcagcaaaaagtgttgctttcacgttggctactgacccgaccgcaatttctgatcctcgatgagccaacccgcggcattgatgttggtgcccacgccgagatcatccgcctgattgaaacgctatgcgccgatggtctggcgctgctggtgatctcctccgaactggaagagctggtgggctatgccgatcgggtgattatcatgcgcgatcgcaaacaggtggcggagatcccgctggcagagctttccgttccggcgatcatgaacgccattgcggcgctgatgctaatcatagtgaccccagggtttgctgtgcagattaaaggagataattcaggtcgtggtgccgagcccagtgcctggcacagaacaggtttgcagtcagtgtttactgtcggtaccggtgacctcagctgtgcatgggagagaaagaaatgctcgttttcgaattaccaggtgcagaacgaagggcagcgatacgcgttgagtcaggcgaaatccatcgctgatgaactgatgaccgggtgtacaaattttgcgttcagcggaaaacctggtaccgggaagaaccacttagcggcagctatcgggaatcgcctgctgaaagacggtcacacagtgattgtggttaccgtggctgatgttatgagtgccctgcacgccagctatgacgatgggcagtcaggcgaaaaatttttgcgggaactgtgcgaagtggatctgctggttcttgatgaaattggcattcagcgcgagacgaaaaacgagcaggtggtactgcaccagattgttgatcgccggacagcgtcgatgcgcagcgtggggatgctgacaaacctgaactatgaggccatgaaaacattgctcggcgagcggattatggatcgcatgaccatgaacggcgggcgatgggccacacacaacaatgaccggaacagaatccattatgagcatttcagccgccataacacgaccgtgacccgcaataatttcgcccttttcgtcaatcagcaccggattaatccagccgaattgcttaatactttctaccagttgtgccacctgctcagtactgtgcgtcctggcgttgtgcgcatacggtga

SEQ ID NO: 25080 - DNA, 2478 bp, Homo sapiens
  SIMILAR (1842)..(1303): 1001254mologous to Escherichia coli matches PS00017: ATP_GTP_A and PS00301: EFACTOR_GTP; similar to elongation factor G, TetM/TetO tetracycline-resistance proteins,accession number L19201,Smith-Waterman Score=928.
tcaccccatcgcccgccgtttcatggtcatgcgatccataatccgctcgccgagcaatgttttcatggcctcatagttcaggtttgtcagcatccccaccgtgcgcatcgacgctgtccggcgatcaacaatctggtgcagtaccacctgctcgtttttcgtctcgcgctgaatgccaatttcatcaagagcgagcagatccacttcgcacagttcccgcaaaaatttttcgcctgactgcccatcgtcatagctggcgtgcagggcactcataacatcagccacggtaaccacaatcactgtctgaccgtctttcagcaggcgattcccgatagctgccgctaagtggttcttcccggtaccaggttttccgctgaacgcaaaatttgtacacccggtcatcagttcatcagcgatggatttcgcctgactcaacgcgtatcgctgcccttcgttctgcacctgggtaattcgaaaacgagcatttgcggtgcaatggctggatgccagagggattgcagaattttttccacccgcaagctgacgattctgacgggttgatctcctcacagacgtttcctggccttcggaaagttggcactcgcgccagtccggtaacggtcttaaaatgtcgccgcttaggtgtgacgcggccgagtcgttgcacttgaattctctgcaggtcctttgcgtggtaaaaatagcttcttcacccaacaccatgattttgtccgtacttctcctcctccgggcgaccagttgcaggagatcgttatcaagaatggtgatggtgcgctgtagctgattgaactgctggatttctttctgtgagcgttgatgcaactcggaagcttgcgaaaaaatcataaacgccagcacgctaagcattgagaaaatcgccagcgccgccatgacctccagcaatgtgaaaccctgctggcgattaatcatcttgtgcctgcccggatttattatcgatgctttgataacgcgtaagcaggttgtctgaccgctgggtaatgtcaccgttatggtgcgttccagaagcgtgccgtctttgcttgagtggatatcgctgcgccagttccactcttcgccatttattaactctttgccagaactggacgtgttttccagttcgaatgaatcttgtgactgaagctgggtatccgctatccacaatgccagcgtctcgttacgcattcgctcgatggcatttcgttgcccttgcatactgctcattaaagtcagagcaacagcgctgaaaatactcatcgcgcaataagcctcaaggcagtgccacccttctttaccgcagaacggcgaggtgttaacgcagaagaacatagaaacggtcggctcatcaacggagagtgccggcagcgcttcaacgttttgcgtgtcgcaaacggtgtcagaaatgttcagttcgccaaggcccgtgatcgcaacgatatcgccagcttccgccagatcggtttcgatacgttccagaccgaggtggcccagcactttaccgactttcgcgttgcgggttttgccttcgctatcgatgatagtgacctgctggttcggcttcactttaccgcgcttgatgcggccaatgccgataacgccaacatagctgttgtaatcgagctgagaaatctgcatctggaacggaccgtcaaggtcaacgtccggcgcaggaacgtggtcaacaatcgcctggtacagcggggtcatgtcttccgccatatcttcgtggtccagacccgcgataccgttcagcgcagaagcgtaaacgatcgggaagtccagctgctcgtcggtcgcgtcgaggttaacgaacagatcgaatactatgcggatgcattcgttataatgctcgaacgcctctgcaaggttctttgctgccgttaacccgtctggtttgggcatgatactgatgtagtcacgctttatcgttttcacgaagctctctgctattccgttactctccggactccgcaccgccgtgttcttcggttcaagtcccaacatccgggcgaactggcgtgtttcattagcccggtagcatgaaccattatccgtcagccactccactggagacgacggaagatcgttgccgaagcggcgttccaccgctcccagcatgacgtcctgtactgtttcactgttgaagccgccggtagtgaccgcccagtgcagtggctcacgatcacagcagtccagcgcgaacgtgacacgcagtctctctccgttatcacaagagaacttgaacccgtcaggaggacatcgctgattgctttctttcagggccactctgcctgtatgtgcccgtttcgatgggcggtaaagaagtttttcggtaagcaacaagggatgaacgagccggtccggggatctcggcggaacatcaataccacccgcgaccgccagataactgcgcatcccgtgctgcgggcgtttaagcgttaaacgctggcctgctttcat

SEQ ID NO: 25081 - DNA, 2586 bp, Homo sapiens
  SIMILAR (1630)..(2283): 1001254mologous to Escherichia coli O157:H7 putative transport protein,accession number AE005600,Smith-Waterman Score= 1090.
atggctcgcacaaaactgaaattccggctgcatcgggcagtgattgtcctgttctgtcttgccttgttagtggcgctgatgcagggagcgtcatggtttagtcaaaaccaccagcgacagcgtaatccacagctggaagaactggcccgcaccctggcgcgtcaggtgacgctgaacgttgcaccgctgatgcgtaccgactcaccggatgaaaaacgcattcaggcgatcctcgatcagttaacggatgaaagccgtatcctcgacgcgggtgtgtatgacgaacaaggcgatcttatcgcacgttctggcgaaagcgtcgaagtgcgcgaccggctggcgctcgacgagaacccgaccactgtgatgaatttcggaccgctacctctgaccgccaactggaccgattctcccggataccatactgcagctggtcgtctgtggaatatgagccccggtcagcttaaacgtggcgactatcagttgattgtgaaatacggtgaatttcttaacgaacagccggaactgaaacgcctggcagagcagctggggcgttctcgggaagccaaatcaataccgcgcaacgatgcgcagatggaaaccttccgcaccatggtgcgcgaaccggcgacggttcctgagcaggttgatggtctgcaacaaagcgatgatattttacgtctcctgccgccagaactggcgacactagggataacggaactggagtatgagttttaccgtcggctggtggaaaaacagttgctcacctatcgcctgcacggtgagtcgtggcgtgaaaaagtgatcgaacgtccggtggtacataaagattacgatgaacagccgcgcgggccgtttattgtctgtgtggatacttccggctcaatgggcggctttaatgaacagtgtgcgaaagcgttctgcctggccttgatgcgcattgctctcgcagaaaaccggcgctgctatattatgctattttccaccgagatcgtccgttatgagctttcaggcccacaaggcatcgaacaagcaatccgttttttaagccagcagtttcgtggcggcaccgatcttgccaaacccgttcttcctgtggcaccggactgggcgctgatcccgctgctgatcatcgccgcactggcgacggtgattgcctcgcaggcggttatctctggcgtcttctcattgacgcgtcaggcggtacgtctgggatatttgtcgccgatgcgcattattcacacctccgaaatggagtcagggcaaatctatattccgtttgtgaactggatgctctatgtcgcggtcgtgattgtgattgtcagctttgagcactccagcaacctggcggcggcgtacgggattgcggtgaccggaaccatggtgctgacgtctattctctcgactaccgtggcacgtcagaactggcactggaataagtattttgttgcgctgatcctgattgctttcctttgtgtcgatattccattgttcaccgctaacctcgataaactgctctccggcggctggttgccattgagcctcggtactgtgatgtttatcgtgatgaccacctggaagagcgagcgtttccgcttgctgcggcggatgcatgaacatgcaattaaaatgttatctcaagagaaatggacgatgagtgatatagcattaacggtcagtattctggctttggtggcagtcgtcggtttgtttatcggcaacgtcaaatttcgcggcataggattaggtattggcggcgtgctgtttggtgggatcatcgtcggccattttgtttctcaggcggggatgacattaagtagcgatatgctgcatgttattcaggaatttggcctgatcctgttcgtttatactatcgggattcaggtagggccgggcttctttgcctcattgcgcgtctccggattacgcctcaacctgtttgctgttctgatcgtcatcatcggtggtctggttaccgccatcctgcataaactgtttgatattccactgccggtagtgctggggattttctccggtgcggttaccaatacgccagcgctgggggcagggcagcagattttgcgcgacctgggtacaccaatggaaatggtcgatcagatggggatgagttacgcgatggcgtatccattcggcatttgcgggattttgttcaccatgtggatgttgcgggttattttccgcgtcaatgtcgagacagaagctcagcagcacgagtcttcacgcaccaatggcggcgcgctgatcaagactatcaatattcgccaagacggttattttatctttggcggtgcctatccaatgaaagacggtcagacgcgtttcacgacgctgaaagagaaaatgagcgcctttcagttccagtttggtaagacggtgaaaagcgaaaaatgcacggtgctgtttccctcgcgctggcaggattttgtctgcggtaaggacaacgcctttctgattggtgaagcggcgggatttatcagcgccagctcgctggaggggattagctatgggtaccgagaatcgaagtggagtgaatttgctgttcccgtggacacccctggattgtaa

SEQ ID NO: 25082 - DNA, 1080 bp, Homo sapiens
  SIMILAR (971)..(930): 851254mologous to Escherichia coli DNA replication protein DnaC,accession number D90774,Smith-Waterman Score=69.
cgatgctgctttcggctctgctggtaaattatcgcccggtatgcagtaacgaaatttaccgccctgatttacgcgaatcagacgacctttgctgattgccattgccagcgttgaagccactttgcgtgatgtggtaccaaacaatgtagccagctcatcagccgtttgtggtcctcgttgttcaatcgtcgcggttaaatcgcactctgagattttcgctactgttgctgtggtgatttcttccggcagttctgcctgcgctggctgttcctgctgaacattgttatcagccacacgccaggtgtacgcgcttttatcaacaaaaccagcctttttcagttcccatagttcgttcagcacttcttcacgactgatatcaagtcgcgcagcaagttctatggatgtggcttttcccattgctttcagtgcgtcaaaaacagtctccattaaatttttctcccggtaaaaattacttcgcaattcccatcgcccgccgttcatggtcatgcgatccataatccgctcgccgagcaatgttttcatggcctcatagttcaggtttgtcagcatccccacgctgcgcatcgacgctgtccggcgatcaacaatctggtgcagtaccactgctcgtttttcgtctcgcgctgatgccaaattcatcaagaacgtcttccagcaggcgattcccgatagtgccgctaagtggttcttcccggtaccaggttttccgctgaacgcaaaatttgtacacccggtcatcagttcatcagcgatggatttcgcctgactcaacgcgtatcgctgcccttcgttctgcacctggtaattcgaaaacgagcatttgcggtgcaatggctggatgccagagcgattcagaattttttccacccgcaactgacgattctgacggttgatctcctcacaacgtttctggcttcggaaagttgccactcgcgccactccgctaccgtcccctgaagcctggcgggatcgcactatccggtaacgagacggtgttaacctgtcggagtaacgtctcaggtcgaacaccttgcggcgcgacaacgcctgtgtactaat

SEQ ID NO: 25083 - DNA, 1647 bp, Homo sapiens
  SIMILAR (504)..(4): 911254mologous to Escherichia coli NlpE, a lipoprotein,accession number D49445,Smith-Waterman Score=797.
ttactgccccaaactactgcaatcctggttggggtaaaatttccctgccgtatcgggtgccaatactttagtcggcgcaccggtatccggattaccctcaagcgtaaagtgaccttctactgacagtaacaccggtttttcactgtgaccgcgcgcagccaggtagctacgctccagctctgcgttattcgctaccatgaaacgttttccggtcgcgcaatcagtgaaggtcgccgcatcagccatataaaaatacatgccccgcagggtcatcggcgtcataggtaaactggattgtgccgcttccagcgtatagttgaactgcgattcaatcggattgccttcacgatcgagcatctccagcgcatcgcctttcgcccgataatatgacttttcacctttgctgtcggttaataccagcttgtcagcggttcgcgcccatgtaccgtaggaagcggagccgactctaggttggcgcatcgacgctgtccggcgatcaacaatctggtgcagtaccacttgctcgtttttcgtctcgcgctgaatgccaatttcatcaagaaccagcagatccactcgcacagtccccgcaaaaattttcgcctgactgcccatcgtcatagcgtctttcagcaggcgattcccgatagctgccgctaagtggttcttcccggtaccaggttttccgctgaacgcaaaatttgtacacccggtcatcagttcatcagcgatggatttcgcctgactcaacgcgtatcgctgcccttcgttctgcacctggtaattcgaaaacgagcatttgcggtgcaatggctggatgccagagcgattcagaattttttccacccgcaactgacgattctgacggttgatctcctcacaacgtttctggccttcggaaagttgccactcgcgccactccgctaccgtctgtcggagtaacgtctcaggtcgaacacctttcggcgcgaacaagccctggtattcattggcgatgctgtgtcgaatcacctgctcaggtgaaaaaccctgctggcggaatttttccagctcccgtatcgccccgttagcgccctgctccgttcgaatcggttttcgcaatgcctggcgaaattcaacccactcacgccaaaggaccacataaacgggaatatcttgtttttgatcagccagaccgtgaataccgcttgcggtgggggggtccatttcgcccaccataattgacgaacgctcattggtggccggcgggcttgccaggaaacttaacaccggtttggtccgtttgaatatcagtcccgcctcttcaatcgcttcgcgacggggaacatcttccacactttcaccctcttcaatcatcccggcaaccatctccagtagccaaggggtttcgctggtgtcgtacgcggcaatccgaatctgctcaatcagcacaagttcatcacgcagtgggtcaaagggtagcaagactgcggcgtgaccgcgctcaaaaatttcccgccgcacctcatgactcatttgcccgttgaatagacgatgacgaaatctataaagatctaatgaaaaaaagccgcgataaagtgtttctcgtgcaataatttgtacatcgtttttgccaaatgtaacgggcaggttgtctggcttaagcat

SEQ ID NO: 25084 - DNA, 1805 bp, Homo sapiens
  SIMILAR (577)..(630): 831254mologous to Escherichia coli o361,accession number L10328,Smith-Waterman Score=78.
  misc_feature (1)...(1805): n = a,t,c or g
atgcgatttaccgatgtnaactggaacctgacgccgtatgcatcgttaacggggttcaccgctgataaccccgaatatcatttatccaatggcatgaaatcgaaatcagtcgatacccgcagtatatatcgtgaactgggcgcaacgctgagttacaacatgcgtctggggaacggtatggaagttgagccgtggctgaaggcggctgtgcgcaaagaatttgtcgatgataaccgggtgaaagtgaatagtgacggtaatttcgtcaattatttgtcgggcagacgtggaatataccaggcaggtaaagatttagatcgcttcaaaaatctggtcctggtgcacgccgcacgttatgccgccgacttaagctatttgccactgatgcaggaactggaaaaacgctacgaaggaaaactgcgcattcagacggtggtcagtcgggaaacggcagcggggtcgctcaccggacggataccggcattaattgaaagtggggaactggaaagcacgattggcctgccgatgaataaagaaaccagccatgtgatgctgtgcggcaatccacagatgacaaggaggctgatccccgccagcgttgaggtttatcacgacagcctgtgcccgaaaaatctggcacggctgggagcaacatattaccgcccgctatctggtcggtgccgatggcgcaaactcgatggtgcggcgacatctctacccggatcatcaaatccgtaaatatgtcgctatccagcagtggttcgcggagaaacatccggtgccgttctactcctgcatctttgataattcgataactaactgttattcatggagtatcagcaaagacggttattttatcttctgcggtgcctatccaatgaaagacggtcagacgcgtttcacgacgctgaaagagaaaatgagcgcctttcagttccagtttggtaagacggtgaaaagcgaaaaatgcacggtgctgtttccctcgcgctggcaggattttgtctgcggtaaggacaacgcctttctgattggtgaagcggcgggatttatcagcgccagctcgctggaggggattagctatgcgctggatagcacagacattctgcgttcggcattgcgaaaaccgattcgaacggagcagggcgctaacggggcgatacgggagctggaaaaattccgcccagcagggtttttcacctgagcaggtgattcgacacagcatcgccaatgaataccagggcttgttcgcgccgaaaggtgttcgacctgagacgttactccgacaggtgcagaacgaagggcagcgatacgcgttgagtcaggcgaaatccatcgctgatgaactgatgaccgggtgtacaaattttgcgttcagcggaaaacctggtaccgggaagaaccacttagcggcagctatcgggaatcgcctgctgaaagacggtcagacagtgattgtggttaccgtggctgatgttatgagtgccctgcacgccagctatgacgatgggcagtcaggcgaaaaatttttgcgggaactgtgcgaagtggatctgctggttcttgatgaaattggcattcagcgcgagacgaaaaacgagcaggtggtactgcaccagattgttgatcgccggacagcgtcgatgcgcagcgtggggatgctgacaaacctgaactatgaggccatgaaaacattgctcggcgagcggattatggatcgcatgaccatgaacggcgggcgatgggtgaattttaactgggagagctggcgtccgaatgtcgtccagccaggaattgcgaagtaa

SEQ ID NO: 25085 - DNA, 372 bp, Homo sapiens
  SIMILAR (123)..(308): 291254mologous to Caenorhabditis elegans histidine-rich; contained in tandem repeat,accession number U23523,Smith-Waterman Score=66.
  misc_feature (1)...(372): n = a,t,c or g
attgaaactgctgtgccatcattattgatacctgacctcattgatgtgcatgctcagtccctggctgcgctgcaggcttactctcactggttagcacagtattgcagtgaagttcaccggcagaacacgcagcagttcgtgacactcatctctactaccatggatgcaatcacacctctaatcagcaccaaggtccaagacaagctgctgctatctgcgtgccacttactggtctcactggccaccaccgtgcggcccgtctttctgatcagcatccctgcagtgcagaaagtattcaacagaatcactgatgcctctgccctgcgacttgtcgataagagaatgagcagcagtggcccgtgcgctccatcn

SEQ ID NO: 25086 - DNA, 377 bp, Homo sapiens
  SIMILAR (236)..(295): 401254mologous to Homo sapiens Granulin D,accession number R41882,Smith-Waterman Score=36.
tgaagctctaggcctgctactgcctggggacacggacttctgctgctgccacctgcgccagccctaccttccacctggaaatcccgcggggtggcccatgcagaccaggcgcacgtggctcatggggcagaattgccaaggacagctcacgacagtgccaccttctcaccattccagccaaggagagatgtgacgttggaactgctctggcacttctgtcaagcctcccccgccccaattgccttgagatctctgctctttgtcagagatttgcaaagactcacgtttttgttgttttctcatcattccattgtgatactaagaaactaagaagcttaatgaaaagaaataaaatgcctatgttgttgttctagaaa

SEQ ID NO: 25087 - DNA, 1011 bp, Homo sapiens; identical to SEQ ID NO: 2197
  SIMILAR (731)..(660): 331254mologous to Arabidopsis thaliana F24O1.6,accession number AC003113,Smith-Waterman Score=40.

SEQ ID NO: 25088 - DNA, 1338 bp, Homo sapiens
  SIMILAR (874)..(1305): 991254mologous to Homo sapiens Homo sapiens secreted protein gene clone hm236_1,accession number W95633,Smith-Waterman Score= 709.
atggccctagctgccatcgtctccttcatggaccgctgcagtcgcctcctaactggactccagccattcacgcctcccttcaggtacgaagatgccctggtgctcctgctcacagaggtgttgaatcgaatccagttcagatacaaccaagcccagctggaggagttggatgatgagactctggatgacgatgtccaagacaagctgctgctatctgcgtgccacttactggtctcactggccaccaccgtgcggcccgtctttctgatcagcatccctgcagtgcagaaagtattcaacagaatcactgatgcctctgccctgcgacttgtcgataaggcccaggtgttggtgtgccgagccctctctaacatcttgctgcttccgtggccaaaccttccagagaatgagcagcagtggcccgtgcgctccatcaaccatgccagcctcatctctgcactctcccgggactatcgcaacctgaagcccagtgctgttgccccacagagaaagatgccactggatgacagacacaggttgaacatcacggcggagaacgactgccggcggctgcactgctccctgagagacttgagctccctgctgcaggccgtgggccgcctggccgagtactttatcggggatgtgtttgctgcacggttcaatgatgccctcacagtcgtggaaagcatgcttcttatgggatctgtcccggctctgcgtccctcccctgatgtgaaggccgagctgtttgagctccttttccggacgctccatcacaactggaggtacttcttcaagtccaccgtgctggccagtgtccagagggggatcgctgaggagcagatggagaatgagccccagttcagtgccatcatgcagacactcagcgtcttagaagatattgtggagaatatctcgggggagtccaccaagtctcgacagatttgctaccagtcgctgcaggaatctgttcaggtctccctggccctctttccagcttttatccatcagtcagatgtgactgatgagatgctgagcttcttcctcactctgtttcgaggccttagagtacagatgggtgtgcctttcactgagcaaatcatacagactttcctcaacatgtttaccagagagcagttagccgagagcatcctccacgagggcagcacaggctgccgggtggtggagaagtttctgaagatcctgcaggtggtggtccaggagccaggccaggtgttcaagcccttcctccccagcatcatcgccctgtgcatggagcaagtgtatcccatcattgccgaggagcagctgctgaagaacactggcttctggtga

SEQ ID NO: 25089 - DNA, 2407 bp, Homo sapiens
  SIMILAR (724)..(1827): 641254mologous to Homo sapiens Homo sapiens secreted protein gene clone hm236_1,accession number W95633,Smith-Waterman Score= 984.
  misc_feature (1)...(2407): n = a,t,c or g
gacacaggttgaacatcacggcggagaacgactgccggcggctgcactgctccctgagagacttgagctccctgctgcaggccgtgggccgcctggccgagtactttatcggggatgtgtttgctgcacggttcaatgatgccctcacagtcgtggaaaggttggtcaaagtcactctgtacggatctcagataaaattgtacaacattgaaactgctgtgccatcagtattgaaacctgacctcattgatgtgcatgctcagtccctggctggcggctgcaggcttagtgctcactggttagcacagtattgcagtgaaattcaccggcagaacacgcagcagttcgtgacactcatctctactaccatggatgcaatcacacctctaatcagcaccaaggtccaagacaagctgctgctatctgcgtgccacttactggtctcactggccaccaccgtgcggcccgtctttctgatcagcatccctgcagtgcagaaagtattcaacagaatcactgatgcctctgccctgcgacttgtcgataaggcccaggtgttggtgtgccgagccctctctaacatcttgctgcttccgtggccaaaccttccagagaatgagcagcagtggcccgtgcgctccatcaaccacgccagcctcatctctgcactctcccgggactatcgcaacctgaaagcccagtgctggtgccccacagagaaagatgccactggatgacaccaaactgattatccaccagacacttcagcgtcttaggaagatattgtgggagaatatctcggggggagtccaccaagtcttcgacagattttgcttaccagttcggttgcagggaatctgtttcaggtctccctgggcctctttccagctttttatccatcagtcagatgtgactgatgagatgctgagcttcttcctcactctgtttcgaggccttagagtacagatgggtgtgcctttcactgagcaaatcatacagactttcctcaacatgtttaccagagagcagttagccgagagcatcctccacgagggcagcacaggctgccgggtggtggagaagtttctgaagatcctgcaggtggtggtccaggagccaggccaggtgttcaagcccttcctccccagcatcatcgccctgtgcatggagcaagtgtatcccatcattgccgagcgtccctcccctgatgtgaaggccgagctgtttgagctccttttccggacgctccatcacaactggaggtacttcttcaagtccaccgtgctggccagtgtccagagggggatcgcttgaggagcagatggagaatgagccccagttcagtgccatcatgcaggctttcggacagtcctttctccagcccgacatccacctttttaaacaaaatctcttcttacttgggagactctcaacaccaagcagaagctgttaccacaagaaggatcttccgggactgccatggttgttccagtttgtgaacgtgctgctccagggtcctgggtccacaagtcccatgatcttctggcaggagggagattgggcatcggcattcttacaacatggcctcagtcgactttgaatggcttctttgccgccttcctcccagagttcctggaccagctgtggatggtgtgggatgccaaccagaaaagtgtgctggggcggaattttcaagatggatcggctatgcccctgccttccaggacctgcgcctcattcacccagaatgtgcacaggctggtcgacgacctgcggcttacttacagactctggcaacgacagccttgccccctggggactgtggaagcttttagggccttgcttactgcctggggggacaagggatttcttgctggttgccacctgacgccagccttaccttccaccacagatgtctcccagatgggccttggtcacactccttgggcttctcccaccgcaagcaacgttgcctggccttttgccgctcctccacatcttggccgctgcccagcagagctgcgtntctgggtccacctgagcactggacggtgctcccagggcgttggagcaggcggaggggtgtgtggccaggatttaggggcctgggaattccctgagctcatgtcagttactcctaaacggcacattctgatggcggaaggagacagcatcccggtcactgttcccattgagtcacaaggagatggaggcccaaagcatgactcacctggggtcacagagctggaagccaaactgattatccaccagacactcagcgtcttagaagatattgtggagaatatctcgggggagtccaccaagtctcgacagatttgctaccagtcgctgcaggaatctgttcaggtctccctggccctctttccagcttttatccatcagtcag

SEQ ID NO: 25090 - DNA, 6493 bp, Homo sapiens
  SIMILAR (1943)..(2893): 1001254mologous to Homo sapiens Homo sapiens secreted protein gene clone hm236_1,accession number W95633,Smith-Waterman Score= 1614.
  misc_feature (1)...(6493): n = a,t,c or g
atgagaaagtacaacagccttgttgttgatatgaggaaggtttcagtggtttggatagaccaagctagccacaacattcccttaagccaaagccaaatccagatcaggcccttcaattctgtgaaggctgagagaggtgaggaagctacagaagaagagttggaagctaacacagctagcggctgtgcctctcgacttcacagctatcttctggctctccactgcttcactgtgcgcctttgtggtgtgccctctccccacctgtttgcctccagcactgcttctttgccagagtcacctggttgctgcatgcactcactggtcactaaatccccatgcggggatcctctagagcccgacgatgccaccttgtttaaacaaaatctcttctacttggagactctcaacaccaagcagaagctgtaccacaagaagatcttccggactgccatgctgttccagtttgtgaacgtgctgctccaggtcctggtccacaagtcccatgatcttctgcaggaggagattggcatcgccatctacaacatggcctcagtcgactttgatggcttctttgccgccttcctcccagagttcctgaccagctgtgatggtgtggatgccaaccagaaaagtgtgctggggcggaatttcaagatggatcgggtgtgcgagggaatcagttctctaagtcgactgcagaatgagctcagctatatcgagaagtttactgactttcttcggctctttgtgagtgttcacctaagaagaatcgagtcttactcccagttccctgtggtggagtttttgacacttttgttcaagtacacatttcatcagcctactcatgaaggttacttctcttgtttggatatctggacgctgtttttggactatctgacaagtaaaattaaaagtcgtcttggagacaaggaagcagttctcaacaggtacgaagatgccctggtgctcctgctcacagaggtgttgaatcgaatccagttcagatacaaccaagcccaggctggaggagttggaatgatgagactctggatgacgatcagcagacggagtggcagcggtacttacggcacagcttggaggtggtggccaaagtgatggagctcctgcccacgcacgccttctccacactgttccctgttcttcaggacaatttaggaagtttatttgggattacaacagtttatagtcacttcagggtcaggacacaggttgaacatcacggcggagaacgactgccggcggctgcactgctccctgagagacttgagctccctgctgcaggccgtgggccgcctggccgagtactttatcggggatgtgtttgctgcacgggttcaatgatgccctcacagtcgtggaaaggttggtcaaagtcactctgtacggatctcagataaaattgtacaacattgaaactgctgtgccatcagtattgaaacctgacctcattgatgtgcatgctcagtccctggctgcgctgcaggcttactctcactggttagcacagtattgcagtgaagttcaccggcagaacacgcagcagttcgtgacactcatctctactaccatggatgcaatcacacctctaatcagcaccaaggtccaagacaagctgctgctatctgcgtgccacttactggtctcactggccaccaccgtgcggcccgtctttctgatcagcatccctgcagtgcagaaagtattcaacagaatcactgatgcctctgccctgcgacttgtcgataaggcccaggtgttggtgtgccgagccctctctaacatcttgctgcttccgtggccaaaccttccagagaatgagcagcagtggcccgtgcgctccatcaaccatgccagcctcatctctgcactctcccgggactatcgcaacctgaagcccagtgctgttgccccacagagaaagatgccactggatgacaccaaactgattatccaccagacactcagcgtcttagaagatattgtggagaatatctcgggggagtccaccaagtctcgacagatttgctaccagtcgctgcaggaatctgttcaggtctccctggccctctttccagcttttatccatcagtcagatgtgactgatgagatgctgagcttcttcctcactctgtttcgaggccttagagtacagatgggtgtgcctttcactgagcaaatcatacagactttcctcaacatgtttaccagagagcagttagccgagagcatcctccacgagggcagcacaggctgccgggtggtggagaagtttctgaagatcctgcaggtggtggtccaggagccaggccaggtgttcaagcccttcctccccagcatcatcgccctgtgcatggagcaagtgtatcccatcattgccgagcgtccctcccctgatgtgaaggccgagctgtttgagctccttttccggacgctccatcacaactggaggtacttcttcaagtccaccgtgctggccagtgtccagagggggatcgctgaggagcagatggagaatgagccccagttcagtgccatcatgcaggctttcggacagtcctttctccagcccgacatccacctttttaaacaaaatctcttctacttggagactctcaacaccaagcagaagctgtaccacaagaagatcttccggactgccatgctgttccagtttgtgaacgtgctgctccaggtcctggtccacaagtcccatgatcttctgcaggaggagattggcatcgccatctacaacatggcctcagtcgactttgatggcttctttgccgccttcctcccagagttcctgaccagctgtgatggtgtggatgccaaccagaaaagtgtgctggggcggaatttcaagatggatcgggtgaggagagaaagaggccgggctaagaggagggcagagtgggcacgcaagcctggcacctgtgcagcaaggagggggcacattgaggcctctgggcgtggtctgtgcccaccctgcagcttggcggcagctcacgagatgcctgctgacctggtgctgtagcctgattgaggggcacagccttttccccagtcttggtgtctgtagcacgtatgttcttagtctcagccatggaggtcccgagttcctggctctgcagcccctccatttgtcttggcatctttgttcatacccaggaccctgccgttctccctcctgggtgatgagccccggtggggccagcattggagtgtgcccaggcttgcattcaggctgagatggttggtgcttgggagctgcacttctgggtccccagggttagaggtgggacccaggttccccggctgtcttgggctctttccagaccagccccagctcagcttgggctgagttgctgccaggtcctgggaggagccctcctagtactcaccctcttgtcccactgctgccacctgtgcagggactgtcaggtgggctgtccccacccgtgcagcacctcggtgggagctgggtgctgctggctcttggtgtccatgaggccatcttgttggagcctgacagtgcctgggacctccttccccatggggctcacctgttctcttcttcctgtgtcaggtgaccaggcctctctcttgcctgataggaacttctgggaacttttccttgtaccgttttatacttgatgaaattaggaaaagaaatcgctttctccctggtcctcttggggttcttgacctgagtcctctgtgaagcagcttgtccacggctccaccgtagtgctcagatgcacacattgctctcactggtgcaaacctggccgcctgctttcctcatttgccacgtgtggcagggaagcttttgcttagactcatcctgttctcctttgtcttggggtcttccttttcttgggacttgttctctcctaagcctcttccagttcacttcagcccctggatatgttttttcctttttctagaggccagatcctaatacttaatgatcagcttctaacgacatcaatatcagtcaactttttgatttaaagctgtggtttcaaaatctagttataggccaggcgcggtgtctcacacctgtaatctcagcactttgggaggccaaggcgggcggatcacttgaggttagggggtttgagaccagcctggccaacatggcgaaaccctgtctctactaaaaataaaaaaaattagtcaggtgtggtggcacacgcctgtaatcccagctgcttgggaggctgaggcacaagaatctcttgaacccgggaggcagaggttgcagtgagcggaggttgtgccactgcactccagcctgggcggcagagtgggactttgtctcaaaaaaaaaaatctagttatatcagaagcacctggggtacttattaaaaatggagaaacagacttctgtgttctacccaggaaggtctggtttggcatttgggagccactgatttaaaagacatcccttagttggttttttgagggtaaaataaaagaatcaccaccttccattcagtcacgcactgtgtgtttgaagccagctgcttctcaagccccgggccaggaactggggcaccagtcccagccttcaccaagtctttcatggtagacaggccaatacagcaccctctgtggaccacatagtgccaagcatgtgacatgtcttggctcgagtaagccttctaacaagcctctgaagtgtgggtcctgttactcccccatttcacagatggtgggggctcagaaggtgagcagttcacagaacttggaagtggtagagctgcgaagcaggaggcagacctgggtgttctggccccagagcctgcacacactccccagaagcagattgctcaggacagaggcgctgagctggctgctggggccaggaaataggaggcatctgtgcagactttgggaagaggcaggctttgaatggagttctggaagaggaatagtggttgggcaggaaaatgaacttggtcctgctcatggctctgctggggcttgctgggcctgtttgagtcctcaccgggacctacactgaaaaaaaaagcagggtctcaccagtgtgcatgatggcggaggtcagggcctcacttctggcccagggccttccatggcccacgctgcgcccagtgggacaggccttgggactgtgtttgctgctgctcgggtggctctcgaggggcaggggcggcctgggagccccgttgggtaaagggtcttgcagacattgctcggtgttgcgcgttcacctcaaggggccatggtgaagaagagggctgtcaccacagccatgtctgcgtttgaggggccggactcaggagcaagtgtgctggtctcttcagtgtgagctggggccagcttcttcatggtgcagcgctttggtctttctgtccttagactagtggttctggtagggcttggtggcagccttgtggtgaggactcagtgagttgatgtctgtatgttgattgcagcagtgtctggcacccgagaggccctatggacgtattcctcttgttctttttctcccacagcgcctggcacagagtctctgtgacacgcagtgcaacagtgaatagaagttttgagttttagaaagtgctcccctatcttcagtgcacactctgggatggaagtagctgttggggtctggtgggtgggtgacctggtgtgttgttggctgcagctatgcccctgccttccaggacctgccctcattcacccagaatgtgcacaggctggtcaacgacctgcgctactacagactctgcaacgacagcctgccccctggcactgtgaagctctaggcctgctactgcctggggaacacggacttctgctgctgccacctgcgccagccctaccttccaccacagatgtctcccagatgggccttggtcacactccttggcttttcccacccgcaagcaacgctgcctgcctctgccgctcctccaaatcttgcccgctgcccagcagagctggcttctgggtcccacccttgagcacttggacggtgctccccagggcgttggaaccaggcggaggggtgtgtggcccaggtacctaggaggccaccaggaaaatcccgcggggtggcccatgcagacccaggcgcacgtggctcatggggcagaatttgccaaggacagctcacgacagtgccacctttctcaccattccagccaaggagagatgtgacgttggaactgctctggcacttctgtcaagcctcccccgccccaattgccttgagatctctgctctttgtcagagatttgcaaatgactcacgtttttgttgttttctcatcattccattgtgatactaagaaactaagaagcttaatgaaaagaaataaaatgcctatgttgttgttctagaannnnnnnnnnnnnnnnnnnnnnnnccctcgggggggggccgggaccccatttccccttataggggggggtataacaattccggggcggcggtttaa

SEQ ID NO: 25091 - DNA, 877 bp, Homo sapiens
  SIMILAR (1)..(852): 691254mologous to Escherichia coli DnaB replication protein (dnaB),accession number K01174,Smith-Waterman Score=896.
atgatctcggttgcgaatgagattgccgaagctggttttgatccgcaggggcgtaccagcgaagatctgctggatctggctgaatcccgcgtctttaaaattgccgaaagtcgtgcgaacaaagacgaagggccgaagaacatcgccgatgtgctcgacgcaaccgtggcgcgtattgagcagttgtttcagcagccacacgatggcgttaccggggtaaacaccggttatgacgatctcaacaaaaaaaccgctggcttgcagccgtcggatttgatcatcgtcgccgcgcgtccgtcgatgggtaaaacaacatttgcgatgaccctcgtcgaaaacgccgggcgaagtgttgcaggataaaccggatacttatcttctcgctggagatgccatcagaacagatcatgatgcgttctctggcgtcgctgtcgcgcgttgaccagactaaaatccgtaccgggcagctcgatgacgaagactgggcgcgcatttccggcaccatgggtattttgctcgaaaaacgcaatatctatatcgatgactcctccggcctgacgccaacggaagtgcgttcccgcgcacgccgtattggcccgtgaacacggcggcatcgggcttatcatgatcgactacctgccactgatgcgcgtaccggcgcttttcgataaccgtacgctggaaattgcagaaatctctcgctcgctgaaagcactggcgaaagaactgaacgtgccggtggtggcgctgtcccacttgaaccggtctctggaacaacgtgccgaggaacgcccgggcaactccgacctgggggaatctggctctatcgagcaggatgcggacctgatcctctagagtccccctgggggatggaagc

SEQ ID NO: 25092 - DNA, 1872 bp, Homo sapiens
  SIMILAR (323)..(625): 411254mologous to Escherichia coli DnaB replication protein (dnaB),accession number K01174,Smith-Waterman Score=129.
ttagacggcggaccagtacccaatccgattattacacccaggagcaattgttatcccagttacaggacaattatcccaacccgttgggcaaacaactttcccgaacagataggtctgtacccattccggagtgacatccacgagatatacccacaccgtgacacttggtacccgaacgctccagtcgaaagagaaccgggtgtgagtcaaaattaccagttggttgatgtcaaacagtgctcttccagggacccttaaactgttggctcttattttaaagtgttctacctgtgtaagagttttacctagatctgaactgcggaatctggaacgccagggcaactcgatagcgtcggtggttttgctttctggcagagctgtcaaaaatacgccaagtgcggctaacatcagtgccttgcggacatcgtgcgtgaacgtgccgttgtccgtgagatgatctcggttcgaatgagattgccgaagctggttttgatccgcaggggcgtaccagcgagatctgctggatctggctgaatcccgcgtctttaaaattgccgaaagtctgcgaacaaagacgaagggcgaaatccgatgttcgacgaccgtggaaaacgtggtgagccgtcggatttgatcatcgtcgccgcgcgtccgtcgatggtaaaacaacatttgcgatgaacctcgtcgaaaacgcggcgatgttgcggataaaccggtacttatcttctcgcagactaaaatccgaccgggcagctcgatgacgaagactgggcgcgcatttccggcaccatggtattttgctcgaaaaacgcaatatctatatcgatgactcctccggcctgcgccaacggaagtgcgttcccgcgcacgccgtattgcccgtgaacacggggcatcgggcttatcatgatcgactacctgcaactgatgcgcgtaccgggctttccgataaccgtacgctggaaattgcagaaatctctcgctcgctgaagcactttgagaaattagccctaatttgcgggtgccggaataacggtacaacccgctattgtaagagcttgctggcgtaaaggtaatattggcctgcacaactagcggaataggttgcttaacgtaataacctgacgcgctacgaccgggtataatacttgggacattagagacttgtgtaggaaaccatggccggctactacccccgcggaatgcctttacggtaatacaactaccgataacagttagcctaccggtatgcctttgtgttgctagtacggatgcgggtatacgcctgcccttagcgcgatacacaaaatgtgggctaattggcagcagcaccgactgtgaatggccaacgcggatgtactttaggagtgcacgaataaacctgcggagaacggttgatatccgcgatacgggggaatatttgttagtggcagccttttgtgagcgtgttggaagagatgtatagaccgctcggcgccgcatgccagcgaatgcgccgcgacccagacgtaaacgttctacgcccacgacaccccacttggcagcggccggcacgccataccgcagactaccgcggaccccgaccgacggcggccgcttggggcagaaccgcttgagagaagagcgggtagtggggggactggatggggaaatgatattgccggctatacaatcgcctgtgacgttaaacacaggaatatgaggaattgcggcagcagtgaccacgcaataggcgcccaacctggacactggggctgatgccgacggcactaaacggatacgccacttaacgacagtgttgccgcacgtcttgcctcgcccttcctgaatttccgtttggcagcattggtctgtgcttaccggcaccat

SEQ ID NO: 25093 - DNA, 525 bp, Homo sapiens
  SIMILAR (154)..(402): 841254mologous to Escherichia coli tas,accession number Y14609,Smith-Waterman Score=334.
atggctgtcagcagaatgaatcttgttggctcaggcctgaagactgcactggattcttttgctgacttgaaccttttcatgccttcagctcttttagatcgatttatgaagaaacacaatctaaacagaccaataaaaggtaaggagattgaatcagaaataaaaagatactcatcaaagaaaagcccaagaactggtcattccgtcgcggcgtatgttgatatcgccagacgtcatggcctggaccctgctcagatggcgctcgcgtttgtacgccgtcaaccgtttgttgccagcactctgctgggcgcaaccacgatggatcagctgaaaactaacatcgaaagtttgcatctggagttaagcgaagacgtattagctgaaattgaagcggtgcatcagcgccgttattgccagcgcaaacagcgcaccgaagccaatgccaatgggcacgaccgggatgcctatcattaccgccagcgagtaaatgcccagcatcaacaacatggcgctgttttcgccaag

SEQ ID NO: 25094 - DNA, 884 bp, Homo sapiens
  SIMILAR (641)..(883): 571254mologous to Escherichia coli antizyme,accession number L13078,Smith-Waterman Score=200.
ttatgttttgctggcacgttttttaggaggaggtcgtcaaccgcaccaggcctcgatcaccaggctggagggggggcacggttcttttcaacagcccggcgatgatggacatctgcaaagacaccgccaaaattggccctttctcaggccagggttctggattaccggtgaaagcggcaccgggaaagagttgattgccagagcgattcactacaattcgcggcgggcaaaggggccgttcataaaagtcaattgcgcggcccttccggaatcgttgctcgaaaagtaaactgtttggtcatgaaaaaggtgcatttactggtgcacaaaccttgcgtcagggattatttgaacgagccaacgaaggtactctgctcctcgacgaaattggcgaaatgccgctggtactacaagccaaattacggttcattctacaggaacgggaatttgaacggattggcggccatcagaccataaaagttgatatccgcatcattgctgccaccaaccgcgacttgcaggcaatggtaaaagaaggcaccttccgtgaagatctcttttatcgccttaacgttattcatttaatactgccgcctctgcgcgatcgccgggaagatatttccctgtgtagctaatcacttttttgcaaaaattcagtagtgagaatcagcgcgatattatcgacatcgatccgatggcaatgtcactgcttaccgcctggtcatggccgggaaatattcgagacctttccaacgatatgtgaacgcgccgtcgtgatgaattcaggcccgatcattttttctgaggatctttcgccacagattcgtcagccagtctgtaatgctggcgaggtaaaaacacccctgtcggtgagcgtaatttaa

SEQ ID NO: 25095 - DNA, 2472 bp, Homo sapiens
  SIMILAR (85)..(1374): 861254mologous to Escherichia coli NtrC/NifA-like protein regulator,accession number U17902,Smith-Waterman Score=1895.
atgccatcagatatatcgctcgccagttgccggctacgcgcaacctcacgcttatttaccgatcaccgcaggcaatcagactgtatgactgctattaatcgcatccctattgtggatgatgaagataatgttcgccgattcgaaacacattgtgcgaacaacgtacgcacagcattacacctgtttgccgatattcaccctgatgtggtgttgatggatatccgcatgccagagatggacggcatcaaggcactaaaggagatgcgcagccatgagacccggacacccgttattctgatgacggcctatgcggaagtggaaaccgccgtcgaagcgctacgctgcggagccttcgactatgttattaaaccgtttgatctcgatgagttgaatttaatcgttcagcgcgctttacaactccagtcaatgaaaaaagagatccgtcatctgcaccaggcactgagcaccagctggcaatgggggcacattctcaccaacagcccggcgatgatggacatctgcaaagacaccgccaaaattgccctttctcaggccagcgtcttgattagcggtgaaagcggcaccgggaaagagttgattgccagagcgattcactacaattcgcggcgggcaaagggggcgttcattaaagtcaactgcgcggcgctgcgggaatcgttgctcgaaagtgaactgtttggtcatgaaaagggattatttgaacgagccaacgaaggtactctgctcctcgacgaaattgggcgaatgcgctggtactacaagcaatactacgcattctacaggaacgggaatttgaacggattggcggcatcagaccataaaagtgatatcgcatcattgctggcaccaacgcgactgcaggcaatggtaaaagaaggcaccttccgtgaagatctcttttatcgccttaacgttattcatttaatactgccgcctctgcgcgatcgccgggaagatatttccctgttagctaatcactttttgcaaaaattcagtagtgagaatcagcgcgatattatcgacatcgatccgatggcaatgtcactgcttaccgcctggtcatggccgggaaatattcgagagctttccaacgttattgaacgcgccgtcgtgatgaattcaggcccgatcattttttctgaggatcttccgccacagattcgtcagccagtctgtaatgctggcgaggtaaaaacagcccctgtcggtgagcgtaatttaaaagaggaaattaaacgcgtcgaaaaacgcatcattatggaagtgctggaacaacaagaaggaaaccgaacccgcactgctttaatgctgggcatcagtcgccgtgcattgatgtataaactccaggaatacgacgccaccggcttctttcgtgacggcatgaccatcatggtgggcggatttatggggattggcactccatcccgcctggttgaagcattactggaatctggtgttcgcgacctgacattgatagccaatgataccgcgtttgttgataccggcatcggtccgctcatcgtcaatggtcgagtccgcaaagtgattgcttcacatatcggcaccaacccggaaacaggtcggcgcatgatatctggtgagatggacgtcgttctggtgccgcaaggtacgctaatcgagcaaattcgctgtggtggagctggacttggtgggtttctcaacccaacgggtgtcggcaccgtcgtagaagaaaggcaaacaagcattgacacttcgacgcgcaaaaggccatttgaactgggacgtccgtcgcgcaataatgacaagggcatccgcccgagatcaggcgctggatcggaagaatatccgcgaacgctgcatgacagcctcaagcgcctacagactgattacctcgatctttatcaggtgcactggccgctgcgcccgttctactgcttcggcaaactcggttatagctggacggattctgcgcctgcggtttcgcagctggatacgctggacgcactggcagagtaccaacgcgcgggaaaaattcgttatatcggcgtgtcgaacgaaactgcatttggcgtaatgcgctacctgcatctggcggacaaacacgatctgccgcgtattgtcaccattcagaacccttacagtctgttaaaccgcagttttgaagtaggtctggcagaagtcagccagtatgaaggggtcgaactgctggcctattcgtgcctgggtttcggcacgctgaccgggaaatatctcaatggtgcaaaacccgctggcgcacgtaatacgctctttagtcggttcacccgctatagcggtgagcaaacgcaaaaagccgtcgcggcgtatgttgatatcgccagacgtcatggcctggaccctgctcagatggcgctcgcgtttgtacgccgtcaaccgtttgttgccagcactctgcctgggcgcaaccacgatggatcagctgaaaactaa

SEQ ID NO: 25096 - DNA, 894 bp, Homo sapiens
  SIMILAR (1)..(522): 981254mologous to Escherichia coli IS5 39.3kDa protein,accession number U70214,Smith-Waterman Score=898.
atgaatttccgccacctgctggagcagcatcaactggcccgccaattgttcaagaccatcaatcgctggctggccgaagcaggcgtcatgatgactcaaggcaccttggtcgatgccaccatcattgaggcacccagctcgaccaagaacaaagagcagcaacgcgatccggagatgcatcagaccaagaaaggcaatcagtggcactttggcatgaaggcccacattggtgtcgatgccaagagtggcctgacccacagcctggtcaccaccgcggccaacgagcatgacctcaatcagctgggtaatctgctgcatggagaggagcaatttgtctcagccgatgccggctaccaaggggcgccacagcgcgaggagctggccgaggtggatgtggactggctgatcgccgagcgccccggcaaggtaagaaccttgaaacagcatccacgcaagaacaaaacggccatcaacatcgaatacatggaagccagcatccgggccagggtggagcaccatttcggatcatcaagcgacagttcggttcgtggaagccagaccaatctgtcagaggcagtcttcgacggcctgctacagtgctctaaagtgcacttggtgcattggagcagcagcaaggagaaagccaggaggagctggggagatccagcggggaagcgagagaaagaacggcaggaaacggagggcccaagccacaggcctttccagctttgtgagagccgtattacaggtgcggtgataattgaaaaccatgtggagttaaccgaccacgccgtcgttgaagcctttgatggcgacacggttcatgtccgtggtccaaaagtcattaacggcgaggagcgcattacgcgaacgccgctggcagggttattgtga

SEQ ID NO: 25097 - DNA, 1617 bp, Homo sapiens
  SIMILAR (1)..(1005): 1001254mologous to Escherichia coli L-arabinose transport system permease protein AraH,accession number D90794,Smith-Waterman Score=1673.
atgctgaagtttattcagaacaaccgtgaaatcacggcactgctggcggtggtgctgctgtttgtattacccggttttctcgaccgccagtatttaagtgtgcaaacgctgaccatggtttatagcagcgcgcaaatcctgatcctgctggcaatgggcgcgacgctggtaatgcttacgcgcaatattgatgtttcagtgggttcgattaccggaatgtgcgcggtgctgttggggatgttactgaacgcaggatattcactacctgttgcttgtgtcgcgactttactgcttggtttgctcgcgggatttttcaacggtgtcctggtcgcgtggctaaagatccctgccattgttgccacccttggcacgttagggttgtacagaggcatcatgttgctgtggactggcggcaaatggattgaagggttacccgccgaactgaaacagctctccgccccgctgctgcttggcgtttcagcaattggttggttgacgataattctggtggcatttatggcctggctgctggcaaagacggcgtttggacgcagtttttatgccacgggcgataatttacagggcgctcgtcaactgggcgttcgtactgaagccattcgcattgtggcattttcgttgaacggctgcatggcggcactggcgggaattgtgtttgcttcgcagattggttttatccccaaccagaccggtaccgggctggagatgaaagcaattgcagcctgcgtgctgggcggcattagtttgctcggtggttccggtgcgatcattggtgcggtactcggcgcatggttcctgacgcagatcgatagcgtactggtgctgttgcgcattccggcatggtggaatgattttatcgcgggtctggttctgctggcggtgctggtgtttgatggacgcctgcgttgtgcgctggaacgtaatctacggcggcaaaaatatgcccgctttatgacgccaccgccatccgttaaacccgcttcgtcagcaaccagtgactttatctgcattggcattgtcgccctaccgctaacgatggtgattgtcagtggcgggatcgatatttcgtttggttcgaccatcggcctctgcgccattgcattgggcgtactgtttcaaagtgagccttctctgcatgatggcttcttatatgccatgcagaattctcaccatgaatttgtgatctgcaatattaaaaatgttctctttgtggctgttgaacatggaaaggagtcctttcggccagcaaagttgccaaggcttagctgcgagcccgtcatggaggaaaaaggtcaggagaaaagcagtctgttggagaacgggacagtccaccagggagacacctcatggggctccagcggttccgcatctcagtccagacagggcagggacagccactcctccaacctgtccgaacagtaccccgaatggccagccgaagacatgtttcaccatcccgcgtcatgcaagctcatcaagggaaagactaagtcagaggagtccctctctgatcttacaggttccctcctccccctgcagcttgatattgggccctcacttttggatgaggggctgaatgtcacggaaaaaaataagtaa

SEQ ID NO: 25098 - DNA, 1051 bp, Homo sapiens
  SIMILAR (941)..(1048): 1001254mologous to Escherichia coli f300,accession number M87049,Smith-Waterman Score=186.
atggacggcatcgccacgctgaaagagatcaaagcgttaaacccggcaattccggtgctgattatgactgcgtactccagcgtcgagacggcggtagaggcactgaaaactggggcgctggattatctcatcaagccgctggatttcgataacctacaggcgacgctggaaaaagcgctcgcgcatacgcacagtattgatgctgaaacacctgcggtgactgccagccagttcggtatggtcggtaaaagcccggcgatgcaacacctgctcagtgaaatcgccctcgtcgcgccatcggaagccacggtactgatccacggcgattccggcaccggaaagagctggtcgccagggcgattcacgccagtagcgcacgtagcagaaaaccgctggttggttgcaattacaggcaactggctactgtttatctgggccgagaacaaacaccatatgctggaagcgagccttggttactttatgaacccgctggtgaacattgtgctggggatgattttcctcggcgagcgattccgccggatgcaatggctggcggtgattctggcgatatgtggcgtgttagtccagctgtggacttttggttcgctacctattatcgcgctgggactggcatttagttttgccttctacggtctggtacgcaagaagattgccgttgaagcgcaaaccggcatgttaatcgaaaccatgtggctgctgcccgtggcggcaatttacctgtttgctattgccgacagctcaaccagccatatggggcaaaacccgatgtcgctgaatttactgctgatcgccgccggtattgtcactaccgtaccgctgttgtgttttaccgccgctgccacgcgcttgcgtctctcaacgttaggctttttccagtacattggcccgacgctgatgttcctgctggctgtgacgtatttatggtgaaaaaccgggtgccgataagatggtgactttcgcctttatttgggtggcgctggcaatttttgtgatggatgcgatttatacgcagcgtagaacgtccaaataa

SEQ ID NO: 25099 - DNA, 1848 bp, Homo sapiens
  SIMILAR (1185)..(574): 931254mologous to Escherichia coli coproporphyrinogen oxidase,accession number X75413,Smith-Waterman Score=1060.
tcaatttatcggttgcagcggatggatggtggacatatcaatgaccagcgcatcggtagataagccttcgcaaacgccgttttcaccgaacaacacgttgcgcaccagatcgccattcggcaacatggtaatgataaattcggcatctttagcggcctgcgccgggttggcggcgggagtcgcacctttgtctaccagatgccgcacagcttcggcgttcacatcaaagacgcgaagttgatgcccttgctgcaataaattgctcgccattggcgaacccatttgtcgggcggacgggtcgtcaccgacgagcgccttatcacgtctgcgcagcacgccgatatccctgtggccgacggaaaccacggcaacacccccagtgcccacaaactcgttatatgcactgttcctgatttcagttacatctggccagttgtcatctatctgctgggatcctctagagtcgacataatgcatgcagctgcatgcagtgctgcccttctcttcgatttttgccgtcaccatcacgatcggaatgtcagaaaaaggtatacccgagagacgtggtcctctcttaataaactcacttaacgccgcttctgggctgccatcttttggctgataatcatattcccagcgtaccagtggcggcattgacatcaggatagactcggtgcgcccgccagtttgcaggccaaacagcgtgccgcgatcccagaccagattgaactcgacataacgaccgcgacgatataactggaaattgcgctcgcgctcgccgtaggccatcgctttccgtcgctcgacaattggtaaataagcgtcggtgtagcctttgcctaccgcctgcataaaggcaaaacagcggtcgaaatctggcgtgttcaggtcatcaaagaacagcccgccaataccgcgctgttcgttgcgatgtttgaggtagaagtattcgtcgcaccactttttgtaacggggataaacgtcttcgccaaatggcatgcacaggtcacgggcggtgcgatgccaatgaatagcatcttcttcaaaaccatagaatggggttaagtcgaagccaccgccaaaccaccagacgggatcggcacccggtttttcggcaataaaaaaccgcacattcgcgtggccaaccttacccaataccagttgctgggccaacactatgctgattggctcaagggaattgggaatccgctcaagccagtcaggtccattgctaggcgtaagggtgtggtgctcaggtgcagagggacacaggggcttctcaggggaaggatggaaaccagaaaatggcattcgcgcgtataagttcacatcatcataggcatcattcaggaactcagcctgtttcaggcaaccttcaaggataaaaccattgcgcaaagcgacctggttgctttgcggattgtccacccgacatttgatcacgaagcgtctaagttcaccagactgggcgtaatgatgaatcaatgcctgcagcgcctgagaaatgatcccctgcccctgatgagattcgtccagccagtagcctatttcagcggttttattcagtggttcaatacgattaaacgagataacgccgataagttcatcttctttgaaaatcatgaacattttggcatagccgcgttgatgcaacatcacattaccctgcaccgtttttcgcgtgtcctctttgacgctctcctgctgcaggattttgagcatctcatcttttaactgtagcttttgttttttcatgcggaccacttccgcattgtaccctcgaccgtcggaaccttcctttctggcaatttcatgatcaagtttattgtgtttatcgaacaaggacat

SEQ ID NO: 25100 - DNA, 2941 bp, Homo sapiens
  SIMILAR (1467)..(1237): 961254mologous to Escherichia coli K12 putative 2-component sensor protein,accession number AE000384,Smith-Waterman Score=386.
atggcgatccagctttcggaaatcccggaaagaaaaacagcgcccggcaaccccattaacagccagccgctcatatccgacgcacccgccgataatgccgtcacgaatggcccaagactacgaccgcccagaatatagtcgtcaaagttttcgttgatcgccaggcgataaacccaatcaatatcatgccaaagattagacacaaaatgtcaccaacatcgctggacgaatatcctttaattcgagcaaaggcgtcattgtgcagctcctggtttggcctcaccaatcaccacttcatcgcccgctacaagccatatgacaatcaaaacatcggtatcgttacgtgcgccaatcgtcacttcacgctcgcgtgtttcaccattacgcaacaatttgactttataacgattatcgccaaccggacgcctaacgccgacagagggatcgtcagcacatttttcacatcggtgagtgaatatgcacttgcgcagtcatatccagcacgcagcgaaggtccaggcaacagtgcggttagaccctatcaggcgaatatgttaattccgttgggtgaatccgggaacctctgtcggagtggatacccacgatcagcgaatcagatttccgatggaacgccagggtttaagcgccgggatgagatacttgacagcgtaggcatgatgaaaagtatcatggcaatgagcgggccgctatcgcgtaaatcatcgaaatcgcgttcggcgttcaacgaaaatgccacaatgcgaatggcttcagtacgaacgcccagtgacgagcgccctgtaaattatcgcccgtggcataaaaactgcgtccaaagccgtctttgccagcagccaggccataaatgccaccagaattatcgtcaccaaccaattgctgaaacgccaagcagcagcggggcggagagctgtttcgttcggcggcgctattaccgccgccatggtgatattgtcatcgctgctgttgacggcgagtttacgtggcagattaacacctcggttgaacgctgccagccaaaatttaatggaactggtcaattgacgcttgtggtgattacagccgcgtacgaatcctggtttgggaatgggttatcggattcgggatggttttctcacaggttccctctggttaacctagcggaacaatggggtacaacttctgtgccaagtaaaatctatgagagtcgttttacggctctcatagacagagaagttaccagcttaccttcgcctcaaatccaccttgttccgcattcccaaattcaccattcatgccatgcaatttggcgattcgctggacaatcgatagcccaagcccgctgccggtagcggtttgtccgggtgggcgatagaagcgttcgccaattcgcgccagtgcctctggtgtcacaccggggccgttatccctcacgatgaaattatcagcattcagcgtgacctcaaccagcatatggggcaaaacccgatgtcgctgaatttactgctgatcgccgccgtattgtcactaccgtaccgctgttgtgttttaccgccgctgccacgcgctgcgtctctcaacgttaggctttttccagtacattggcccgacgctgatttcctgctggctgtgacgttttatggtgaaaaaccgggtgccgataagagttgtgtaggcggtctcgtagtgggctatcacctcgaaagacactcgtatctcgatcaatacgccgcggtacttataatcgagcagcccaagtgcaacaagtaccactccgatgtcggtatgaacttggcattatgggtgacgcgttccagttatctgactagtaaactgtttgtcggaacacagattggtgccccgtccattttcggctcccttattaatgaacgctgggacaaaacaaaggaggcaatgttcgtccaccgaaggggagtgccgttttttgtacgcttgtacgtcgccttaaatgttctcgcgtttcccgtgcgttccgatgaaccgtccttggcgtggtcgtgcaacggtttccacataggatttgctgattcgccagatgcctctgctttcgcggcgcgtgattccggtaatacgcgttccggtcaccggcgtgctctggaagagttttacgccacggataacaatatttggtcacgcctaattgatcaacattctatgatcgtcgccgcacaaggcttaacgcccgaccatcaactcctgctccaaatttatgatcgcgcaagggttagcgcctcgcgtattgtccaccaggcacaaatttatggcgatgccgtcgtccggtatgcttttattgaacatcgcgccgaagtttttgattttgccagtattgaaggtaatgaagagaacaatgtctggctatgcgattgcgctaaagtctacggtcacgcgcaggtgaaagctggcatagaagaagatgccattccgacgattcattacagttcgcaggtggcggaatatgccattgtggaaggtaattgtgtgttaaaacatcatgtcttggttggcggaaatgccgtggtacgtggcggaccgattctgctcgacgagcacgttgtcatacaaggtgagagccgtattacaggtgcggtgataattgaaaaccatgtggagttaaccgaccacgccgtcgttgaagcctttgatggcgacacggttcatgtccgtggtccaaaagtcattaacggcgaggagcgcattacgcgaacgccgctggcagggttattgtgaatcgataatacgcgcgtataagttcacatcatcataggcatcattcaggaactcagcctgtttcaggcaaccttcaaggataaaaccattgcgcaaagcgacctggttgctttgcggattgtccacccgacatttgatcacgaagcgtctaagttcaccagactgggcgtaatgatgaagaatggccataggtcta

SEQ ID NO: 25101 - DNA, 2571 bp, Homo sapiens
  SIMILAR (1285)..(1112): 381254mologous to Escherichia coli Ribose transport ATP- binding protein RbsA,accession number D90794,Smith-Waterman Score= 55.
  misc_feature (1)...(2571): n = a,t,c or g
ttaccaacagttcgtttgcatcgcagggacctgcggcgcaagctggcgcgagaatagacccatataggcgcattcttcgagtactacggcgttatgcacggcatcggcggcgtttttaccccatgcgaacggnccgtgagaatgcaccagcaccgccgggatttgtgccggactcctgccacgttcttcgaaggtttcaatgatcacttcgccggtctgatattcatattcgccgttaatctcctctgcggtcatctgtcgcgtgcaggggatggcaccgtaaaaataatcggcgtgggtggtgccccaggcggggagatccagcccggcctgtgaccagatggtggcgtggcgcgagtgggtatgcacaataccgccaatttcggcatagcgacggtagagcgccagatgcgttggtgtatcggaagagggttttttgctgccttccaccaccttaccgctggctatctcaaccaccaccatatcgtcggcggtcatcacgtcgtactcgacgccggaaggtttgattaccatccattgccgcgtttcgtctaccgcgggcacgtcgcggaactgtccgggactttgcccggtgactggctgggtgtctttcaggtggatcgcggcgatacggtcaatgcccagtttcagttcggcgggaacatcattgccccaggcgctgaggttgccgacgtccgggtagacggtgaaccacggtgaggcgagcatctcgtgccattctgtccatttgttgtgatgccagcgcctgtgcgactgccacgccagcccttcagcaaacgttgccgggtagccttcgtcgtggtcttcgtaatagacgtcataacctgccagctggatggtgcgaatgccgagatcgcgcgccaggcgaatcgctttactcatgatggcccgcgcccgttcgcgcactgcctcgtcacggctaccaaagggaaagcgacgatgtgcggacaggcacatcgacgggatcccaacacctgtttcgatcatcgcggcaaccagcgaagtcctttgtgcggcgctccagtcaagacgtgagagccgttcgtcggtttcatccaccgacatttcgacaaaatcaaaaccgcagctttttgccagcaccagccgctccggccaggagagatctttcgccagcgctttttcataaatccctaactgatgattacgcacgcgcacctccccagatagcgtcgatttgcgcatggaaatcgccagccacttgcgccggatttgccgcgcctggcagccactcccagagccgctggaactctggcccaaggctctctgactgacttcttcttggcttagcggctgaaactgatgctgcctgatcactcggaagcaccgtagaccatcacggatgccgagctttaggtaactctcacagtggaaggtaagtccgtccccttgtgtgccggtctgacgaacacccagggtcaagcctaaaccatgcacgccagccatccgcccagtcagttgtccgtagattttgcatcgattcttgactcgcatacaaccttccacgcactgactgccgtccttgagccgactctgaccgtagtcgctcggtagggcaaccgcgacatttactagttgggccgagacatccacgccgcgcgtcggctcatcgacaatcaatacttgcggcgaagcttccaagcatttggcaatgaggattttttgctggttgccaccggataatgtccgtgcagcttgttccggttggttgaatttaatattcagcgcccgacgataacgttccagggtggcattatctttcgcggttttcgcccagaatccacgaaggttatgagtaagggcgcagacgttccaggccagcgaagcatcgagattcagtccggatgactggcgatcttccggcagataaaccagaccgcgcagtaaacgttctccagtggataatttattgatctctttaccattcagcataatgcgtccgccacgcaaagtacgcagaccatagagcgtctcggccagttctgtgcgtccggcccccaccagcccagccaggcccagaatttctccggcattgagcgtcaggctgacattcctgaaaccttcgccggtcagattttccagtgtcagcaccggcgttccggcggcatgttgtgggcggttaccaggtaactccagccataatttttggctggcagagagcgatttttcccgtaccgctggggtgatggcctgaataatgtcgtcggtagacagttcgctggttttgccgcttaaggcgatggttccgtcgcgcatcacgctaattcgatcggcaatctggcgaatttccggcagcttatgcgagataaaaacaatacccacgccagtagcaagcagctcttgcaagcgactaaacaagcgttcggtttccgcaggggtaagcgaggcggtaggttcatcgaggatcagaatccgcgagtcgcgcatcagcccgcggaggatttccaccatttggcgatcggcgacatccagcgatcctgccagactatgcagatcaaactggcagcccagcgccgccagcaagttcttcat

SEQ ID NO: 25102 - DNA, 2106 bp, Homo sapiens
  SIMILAR (742)..(1638): 921254mologous to Escherichia coli mannitol-1-phosphate dehydrogenase,accession number U00039,Smith-Waterman Score=1424.
  misc_feature (1)...(2106): n = a,t,c or g
atgcgtcttaccggcaggctgggacatagtgtgtcagacgaagtcacaggcgtcctgccagcagtggctggaagcccactggcgtactctgacaccgacgaattttacccagttgcaggaggcacaatgagccagcatttacctttggtcgccgcacagcccggcatctggatggcagaaaaactgtcagaattaccctccgcctggagcgtggcgcattacgttgagttaaccggagaggttgattcgccattactggcccgcgcggtggttgccggactagcgcaagcagatacgctgcggatgcgttttacggaagataacggcgaagtctggcagtgggtcgatgatgcgctgacgttcgaactgccagaaattatcgacctacgaaccaacattgatccgcacggtactgcgcaggcattaatgcaggcggatttgcaacaagatctgcgcgtcgatagcggtaaaccactggtctttcatcagctgatacaggtggcggataaccgctggtactggtatcagcgttatcaccatttgctggtcgatggctttagtttcccggccattacccgccagatcgccaatatttactgcacatggctgcgtggcgaaccaacgcctgcttcgccatttacgcctttcgctgatgtagtggaagagtaccagcaataccgcgaaagcgaagcctggcagcgtgatggcggtcgatctaaggatcccaatacgtttcggcgtcatgctgtcagcagcattggtgatgatgtcgttgatctgattgctcaggttgatttagtcactaccgccgttggcccggttgtgctggaacgtattgctccggcaatcgccaaagggcaggtgaaacgtaaagaacaaggtcatgaatccccgctgaacatcatcgcctgtgaaaacatggtacgcggtaccacgcagctgaaaggccatgtgatgaacgccctgccggaagacgccaaagcgtgggtagaagaacacgttggctttgtcgattccgccgttgaccgcatcgtaccgccttcggcttcggcaactaacgatccgctggaagtgacggtagaaaccttcagcgaatggattgtcgataaaacgcagttcaaaggcgcactgccgaacatcccaggcatggagttaaccgacaacctgatggcatttgtcgaacgtaaactcttcaccctgaaacacgnngaccattcggacgcgattctcgacgagaaaatccgcgcggtggtaaaaggtgcgatggaagaaagtggtgcagtattgatcaagcgctacggctttgacgctgacaagcatgcggcgtacatccagaaaattctcggccgttttgagaacccgtatctgaaagatgatgtagagcgcgtaggccgtcagccactgcgtaaactgagtgctggcgaccgtctgatcaagccactgctcggtacgctggaatatggtctgccacataaaaacctgattgaaggtattgccgctgcaatgcacttccgcagtgaagatgatccgcaggctcaggaactggcagcactgatcgctgacaaaggtccgcaggcggcgctggcacagatttccggtcttgatgccaacagcgaggttgtatccgaggcggcgaccgaaagctgggtgaaaacaccgatgcgccagaccccgttccccggcattgtgccggacgagagcgatcgcgcggcagaaacccggtcaacgctgacctcttccggtgcgatggcggcggtgattggcttccagtcgccgtataacgaccagcgcagcgtgattgcgctgttggcagatagcccacgcggttatgaaatgcttaacgatgcggtgaacgatagcggcaaacgcgccaccatgttcggttcggtcgcggtgatccgcgagtccggtatcaacagcctacgtgttggcgacgtttattacgtaggtcatctgccgtggttcgagcgcgtgtggtatgcgctggcaaaccatccgattctgctggcggtgctggcggctatcagtgtgatattgctggcatgggtactgtggcgtctgctgcgaattattagtcgtcgtcgtcttaacccggataacgagtaa

SEQ ID NO: 25103 - DNA, 785 bp, Homo sapiens
  SIMILAR (401)..(336): 541254mologous to Escherichia coli phnA protein,accession number J05260,Smith-Waterman Score=66.
gcaatcgcgtcggaacagttaccggcaaaagagaggtagggacttacggcatgatggtgacctcagttaagagaagccagttaagtgtagttcgaatttatacagatgagaggcggcctgataagacgcgcgagcgtcgcatcagcagttggcactgttgccggatgcggcgtaaacgccttatccggcctacgaggcatcgaagagctacctttcaccttcagatctttaatgatgtaacgctgtcgccgtcagccagcagattgccgttagcatctttaacgatagctcgtcgctttcctgtgcaggttctgcgtcgttccattcgtaggcacttccgggcagatgtacatgccgttatcttccgaacggtacaatttatgcagctcgtcgacatctggttaaaggtttttgcaagcagaccaagctcattcggcagttggtatccagcggcggcgagtcgaactgcccgtgttcaatacgctgacggcggtaaccagctgattcagcggggcaaccacctgatggcgtatgcgggcaaagtaaaaaagaccagcgtgaaaataccgatgccgccagccagggaatcgccaccaccagcagcattttgcgttcagcgtagtgctgtaaagccatacgaacaggtctatctgattaacataattattaatattggcctgatacacggcaaatcgcccttgctgagccgattattcatctccagccagttggcttcagatgcgcatagcgagtttttactgcttctggcacataccagacgtgag

SEQ ID NO: 25104 - DNA, 5421 bp, Homo sapiens
  SIMILAR (1570)..(2232): 981254mologous to Escherichia coli O157:H7 putative oxidoreductase, Fe-S subunit,accession number AE005366,Smith- Waterman Score=1174.
atggtgaaagttgcaggggagtgccgagtaagagcctcagcacacttgccagggcttaacaggagcacaaaaaacacagaggaccgaggcgcaaacaaccaagaaggcacaaacacacagaagacacgcggagaaacaaacgagagactcaaaaagaacgaacacagagatctgcgcttagctcgttacccagcaaaggagaacaacaaacaaggcgataaaaacaaaccacgaacgtacgaaaagttaaccggcacagtaacacaccaggagccacctcatcacgcggatcaatctccaggcctgtgtctctttcgtacttctcgagctcaggtggagagaggtcccacagtgttgctgctgatatctcaagaaaatcaaatagaaagatatgacagtgacaaccattcacagctcaacctctgcctcagagtgccgaccgtcaccacacaaaggagagattatgatattgctgaacggtaccgacagaaaggcatcaaattgcctgccaggaaggagagattaatgactattgctgaacggctgcggcaggaaggacatcaaattggctggcaggaaggtaaattagaaggtttgcatgaacaagccattaaaattgctttgcgcatgctggaacagggctttgatcgtgaccagggcatcgctgtagagcatcgtgtcaacgccaacagcgacaaagttcgctccccacgccaggcattgctgcgccatatcaggagccacagccagaaaaccagccgctttacccgcagcacggatccgccgaatactggtttcaataattcgctgcacttccgggtgcccggcgttatccgggtagcccaacgacgcagaaagatccgcaggtccaataaacacgccatcaatcccttcgacgtcgaggatttcgtccaggttatccagtgccgttttactttccacctgcaccaacagacaaagcgaatcgtaacttgcgccatagaaatcattcatcgcctgttcaacatggtcatagaccgcgttgtaccatgggttggtggcttcgcgagactggaaataagtgtcaggattggcggacgtaccgcggatcaccggatgttccgggttgagtgcccgggcgcgatgagcatcaatttcgacctgcggcatgagatcaagaatcgtgtcatcggccagcgggacaattttattgatttcgtgggacgtgcggaaaccatcaaagaaatgaataaatggcacgcggcttttcagcgtcgcgatttgcgaaatgagagcaaagtcttgcgcttcctggacgtttgctgcacacaacatcgcgcaacccgtctggcgcaccgccataacgtcggaatgatcgccaaaaatagagagtgcatgtgtggcaacggtacgtgccgctacatgcaggacaaacgggttttcaacatccggagtgctccattgcgtcatcaagtcggcagccagatagggagacacgaagctggtcggcgaaccctaagaagcccgcccccggaccccccgcccaatgcccccggggtccgaaccccccgagttcgggaaagcacggcaactggcccgatggccactacgcgctgggaaaaacgccatatcgccgaagagatccccatctggaaagaggaactctgtacccaatgtaaccactgcgttgccgcttgcccacactcagctattcgcgcaaaagtggtgccgcctgaagcgatggaaaacgcccctgccagcctgcattcgctggatgtgaaatcgcgtgatatgcgcgggcagaaatatgtcttgcaggtggcaccggaagattgcaccggttgtaacctgtgcgtcgaagtttgcccggcgaaagaccgtcagaatccagagattaaagccatcaatatgatgtctcgcctggaacatgtcgaagaagagaaaatcaattacgatttcttcctcaacctgccagaaatcgaccgtagcaaactggaacgtattgatattcgtacatcgcagctgattacaccgctgtttgaatattcaggtgcttgctccggttgtggcgagacgccgtatattaaattactgactcagctctatggcgaccggatgttgatcgctaacgccactggctgttcttcaatttatggcggtaacctgccctctacaccgtataccaccgatgccaacggtcgtgggccggcatgggcgaactctctatttgaagataatgccgaatttggcttgtttccgcctgacggtcgatcaacaccgtgtccgcatgctgcgtcggaccggctagtacgggaaatccacaagtcattaccacacggcccaaaatgcaactccgaatacacctacgaagataacggcatgtacatctgcccggaatgtgcctacgaatggaacgacgcagaacctgcacaggaaagcgacgagctgatcgttaaagatgctaacggcaatctgctggctgacggcgacagcgttaccatcattaaagatctgaaggtgaaaggtagctcttcgatgctgaaaattggcaccaaagtgaaaaacatccgcctggttgaaggcgaccataacatcgattgcaaaatcgacggttttggccggataaggcgtttacgccgcatccggcaacagtgccaactgcctgatgcgacgcttgcgcgtcttatcaggcctacaaattcccgcaccatccgtaggccgataaggcgttacccgcatccgcaacagttgaaaagctggagaaaatgccgcatcaccgacgataccgccgagaatcgccactgcgttcagaccgatttggaccacggtaaagaacatgccgggattttcctgcatattcagaacgcgttgggcatttatattgccttcatcagccaccagtttaagtttgattttgcgccagatcctcggaaggggaagttgattaatttgtgtgaaatacacattgaaagccgattcgaagaaagtgaaccggcatttctcagtggcatagtactacgccgtcatatgacagacgccaattccgccaattccaaaatgcatgcagctgccttaccccaccacgtgctaagggcaggagttgagtcagctgtggcctgccctgggggctggggtccttggggagaacacgggcatgttgatttggacactcattcagcaaacatctacgaagcacctgctgtagaatgcactggacgttgccaatccgtacaacaggtgatagtgaacgccaagagaggccccctttgtcctcacggaccttctcttgtaggagcaggaagagtgaggaaaacttttaacagctcccagcagatgcccgtatgtctcattgagcctgtgttcgcttctaaactgatccctgttagagcgatcttcggatcaatcggtccgatcgtgcagggtaaatcgaccctgttccgtatgatctctgctcaggaacagccggacagcggcaccatcactttgggtgaaacggtgaaactggcgtcggttgatcagttccgtgactcaatggataacagcaaaaccgtttgggaagaagtttccggcgggctggatatcatgaagatcggcaacaccgagatgccaagccgcgcctacgttggccgctttaactttaaaggggttgatcagggtaaacgcgttggtgaactctccggtggtgagcgcggtcgtctgcatctggcgaagctgctgcaggttggcggcaacatgctgctgctcgacgaaccaaccaacgacctggatatcgaaaccctgcgcgcgctggaaaacgccctgctggagttcccgggctgtgcgatggttatctcgcacgaccgttggttcctcgaccgtatcgccacgcacattctggattaccaggatgaaggtaaagttgagttcttcgaaggtaactttaccgagtacgaagagtacaagaaacgcacgctgggcgcagacgcgctggagccgaagcgtatcaagtacaagcgtattgcgaacttcagcaccaagttactttttgtcgacctgcttaagaatgcctacctatacgatctccatttaccgttgttaaacctgatgctgacgccagatgagcgcgaagcgttggggactcgcgtgcgtattgtcgaagagctgttgcgcggcgaaatgagccagcgtgagttaaaaaatgaactcggcgcaggcatcgcgacgattacgcgtggatctaacagcctgaaagccgcgcccgtcgagctgcgccagtggctggaagagaatcaccgcaggcaacggcaaagtagccgaacgcgcctcgccgcgctggctggcgttttcaatcaccacccaactgaaagtgctgtcaccatcgatgccagcttcaatcgccacccaggtgaggagacgaggcaaagccgatacgaggacgaaggagaagacacccgagagcgaggagtgatattatctgtacatggggagccaaagcagcaatctccagcaaagtcgcgcgttattcagtttttccagcagggctttgttatccggacgtacagcgatgcccaggccggtgccaaaatattgcggatcggtcactttctcagtagcaacaccaagttgtggattggttttcagccattcgtttaccaccgctgtgtcaccaaataccccatcaatacgaccatttttcagatcgataaaggcattctgataactgtcataagagacagttttcacttccgggtgctgatcctgaatatatttctggccagtacagggggtcacttcctgtctcgtattacctgtcgggtccagtactttctcagcaaatccttgcgtatttctgggagttttctgtggtcgaaaagggcacggttgttcagcttctgcggaggtggattacccgcgtatggaccactccgggttatttggctttggatgctgctggatctgcgttcatgtctgccggcaccgatgtcttctcgtggatccggtcaccgttgtttcggtgattcccagccggccaccgttgttctgcgcaccagacgctggaaactgttcctgatcccggaagagtattcgccgccgcaggtgctggttgataccgatcggttccttgagatgaatcgtcaacgctcccttgatgatggctttatgcacgcagtgtttaacccgtcatttaacgctctggcaaccgcaatggcgaccgcgcgtcaccgcgccagtaaggtgctggaaatcgcccgtgaccgccacgttgaacaggcgctgaacgagacgccagagaagctgaatcgcgatcgtcgcctggtgctgctaagcgatccggtgacgatggcccgtctgcatttccgtgtctggaattccccggagagatattcttcatgggtgagttattacgaagggataaagctcaatccactggcattgcgtaaaccggatgcggcttcgcaataa

SEQ ID NO: 25105 - DNA, 1428 bp, Homo sapiens
  SIMILAR (1302)..(829): 1001254mologous to Escherichia coli ORF 2 (AA 1- 301),accession number V00279,Smith-Waterman Score=858.
ctaaacacggtgacggaggcgatgggcgtcgggcagattgatatcgatccgatggtcgctggtattatcactctcggttttatctacggtgcttattttaccgaaacgttccgtggtgcttttatggcagtgccgaaaggacatatagaggcggcgacggcgttcggttttactcgtgggcaagtgtttcggcggatcatgtttccgtcgatgatgcgttacgcccagaagcttggtgacgatgtcctccccagagctgtcttcttgcagagggcagatggtgtggatgaaaggtaggaaggtgtcggtgtagtcaaacaggtacaggtagagcagactcagcctgggggagctcttgagggcgtatagcaggaacagggacctgcctgggttcacagcggtagcgcccgtgtactggtcgcgactgatgttgctgcgcgtggtctggatattaaatcgcttgagctggtggtgaactttgagctggcgtgggaacctgaagttaatgtacatcgcatcggtcgtacagctcgtgcaggaaatagcggtctggcgatcagtttctgtgctccggaagaagcacagcgggccaatatcacttctagaccaccgcaccctgcgcacattgcctctgatcaccagtccacgccctgaagctgttttacgcagttgcagatgtgtcaccacgccacgaacgtagttagcccattgatagttttcatgtgcgacaatgggcgcatcgagggaaaactcgtcgagctgattttcataatcggctgccatcacgcgaactttacggtcatcgcgtggtgcacaactggatttgcccccattacaagcccgctgccgcagatattcccgtggcgagcgataacccagcgcactatgcggatgccattcgttataatgctcgaacgcctctgcaaggttctttgctgccgttaacccgtctggtttgggcatgatactgatgtagtcacgctttatcgttttcacgaagctctctgctattccgttactctccggactccgcaccgccgtgttcttcggttcaagtcccaacatccgggcgaactggcgtgtttcattagcccggtagcatgaaccattatccgtcagccactccactggagacgacggaagatcgttgccgaagcggcgttccaccgctcccagcatgacgtcctgtactgtttcactgttgaagccgccggtagtgaccgcccagtgcagtgcctcacgatcacagcagtccagcgcgaacgtgacacgcagtctctctccgttatcacagcagaactccaccggcccggtcagactggcggtttgatgcagtacatctttgcgcaccaggtaagtgccactaccgtggcggcggaccaccagcccccacgctaccagcaggtcaatggctttacggatggtcat

SEQ ID NO: 25106 - DNA, 2862 bp, Homo sapiens
  SIMILAR (736)..(1530): 1001254mologous to Escherichia coli UhpC protein,accession number M17102,Smith-Waterman Score=1415.
atgcgcacaatcctgacgatagatatccagctccgctatccacggcgaccaggcgcgtacgggactcataccttcctgaagtgtgcgttcagcaacaaacagcgtcgctttaccgtcaaacggtacgctatgagcagtcgtcagcaggcgcacagcatcagcgtagttgccttcaatggtgttttgcgtttctggcggccaggtatccagcaagccaagaaatgccacctgttcgccacgggcacgcagtcgcgccgcaataccctgcgccagcgtaccgccaagggaataccccagcagatgcgcttcgcagacttcatccaggtttgccgccgtctgcatggggccattggggcgcgggtgactgaaatgcccgaaaaatcgacccatttgtggaattcgaagaaaaacggcgagaagcaaccgctgaaactgcccaaggccaaaaacccggaacgccaaggaattggaacaccaaaaaacaagccgttccgggcccaattaaccctttcaccgcaaaccggcagaattggtttcgaatcccaatacgcccgggaagggctgaacaacattgtgaaacatgctgatgccagcgcggtcaccctgcaaggctggcagcaggatgaacggttgatgctggttattgaagacgatggcagcggtttgccgccgggttccgggcaacaaggttttggcctcaccggaatgcgcgagcgcgtaacggcgctgggtttgatgatgttgccgtttctgaaagcgcctgccgatgcgccattaatgactgataaatatgaaattgatgcccgctatcgctactggcgtcggcatattctgctgaccatctggctgggttacgcgctgttttacttcacgcggaaaagttttaacgccgccgtaccagaaatccttgctaacggcgtgctcagccgtagcgatatcggcctgttagcgaccctgttttacattacctatggcgtgtcgaagtttgtctccggcattgtcagcgatcgctcaaatgcccgttattttatggggatagggcttatcgccacgggcattatcaacattctgtttggcttctcgacgtcgctatgggcgtttgccgtgctctgggtgctgaacgcctttttccagggctggggttcaccggtgtgtgcgcgtctgttaacggcctggtattcacgtaccgagcgcggcggttggtgggcattatggaacacggcgcataacgtcggcggcgcactcattcccattgtgatggcagcggctgcgctgcattacggctggcgtgccgggatgatgattgctggttgtatggcgatagtcgtggggatttttctctgctggcggctacgcgatcgcccgcaggcgttaggtttaccggcggtcggtgaatggcgacacgacgcgctggaaattgctcaacaacaagaaggggcagggttgacgcgtaaagagatcctcaccaaatatgtgttgctgaatccgtatatctggctgctttcgttttgctatgtgctggtctatgtgtccggcggcgatcaacgactggggcaagaaacgcggcagctgcatgctaaaacgggctgtggtgagctgaagcgcaatgcccagcctattatgtttgccccgtcgttggttaatgaaggccagatcccgttcatcaagatgaaaatagcgcgccagttgcacgtcattaggttctgcagcataacaaccgtaattctgtttttggtcagagacactgcttgtccgatatttgatttaggatacatttttatgcgactttttggttacgcacgggtatcaaccagccagcaatctctcgatattcaggttcgggcactcaaagacgcaggcgtgaaagcaaatcgcatctttactgacaaggcatcgggcagttcaagcgatcggaaagggctggacttgctgaggatgaaggtggaggaaggtgacgtcatcttggtgaagaaacttgaccgccttgggcgcgatactgctgacatgatccagttaataaaagagtttgacgcccaaggtgtatccattcggtttattgatgacggaatcagtaccgatggggagatggccaggacgtttcagaccaagcaagtcgatggtttgcaggtcatgtgccatgtggagtattacttcgacggcaaaaacaaagcggttaaattcccgtgggatgacggcatgaaagtcgaaaatatggagcagtattacgacaaaattgccttctctgactggactaactccctgtcgaaaacgccaatgctgaaagcgcagcacccggaatatgaaacctggacagcgggcattcacggtaaaaacaacgtgacctgtatcgactgccatatgccaaaagtgcagaacgccgaaggcaaactctacaccgaccataaaattggtaatccgtttgataacttcgcccagacttgtgcgaactgccatacccaggacaaagctgccttgcaaaaagtggtcgcggaacgtaagcagtcgattaacgacctgaaaatcaaggttgaagatcaactggttcacgctcacttcgaagcgaaagcagcgctggatgcaggcgcgacggaagctgaaatgaagccaattcaggacgatatccgtcatgcccagtggcgctgggatctggcgatcgcttcccacggcattcatatgcacgcaccggaagaaggtttacggatgctcggtacggcgatggataaagcggcggatgcacgcaccaaactggcgcgcctgctggcgaccaaaggcatcacccatgaaatacccttttgtaatcccatgatcgcgggctgggttctgagaaggtccaacaaagttgataactgttaccaagactaa

SEQ ID NO: 25107 - DNA, 1347 bp, Homo sapiens
  SIMILAR (1)..(831): 961254mologous to Escherichia coli enterobactin synthetase component F,accession number U82598,Smith-Waterman Score=1420.
atgcgtcttaccggcaggctgggacattgtgtgtcagccgcagtcacaggcgtcctgccagcagtggctggaagcccactggcgtactctgacaccgacgaattttacccagttgcaggaggcacaatgagccagcatttacctttggtcgccgcacagcccggcatctggatggcagaaaaactgtcagaattaccctccgcctggagcgtggcgcattacgttgagttaaccggagaggttgattcgccattactggcccgcgcggtggttgccggactagcgcaagcagatacgctgcggatgcgttttacggaagataacggcgaagtctggcagtgggtcgatgatgcgctgacgttcgaactgccagaaattatcgacctacgaaccaacattgatccgcacggcattaatgcaggcggatttgcacaagatctgcgcgtcgatagcggtaaaccactggtctttcatcagctgatacaggtggcggataaccgctggtactggtatcagcgttatcaccatttgctggtcgatggctttagtttcccggccattacccgccagatcgccaatatttactgcacatggctgcgtggcgaaccaacgcctgcttcgccatttacgcctttcgctgatgtagtggaagagtaccagcaataccgcgaaagcgaagcctggcagcgtgatgcggcattctgggcagaacagcgtcgtcaactgccgccgcccgcgtcactttctccggcacctttaccggggcgcagcgcctcggcagatattctgcgcctgaaactggaatttaccgacggggaattccgccagctggtacgcaactttcagctgcaactctctatggacccgatgctcgatatgatgggaatgcagatgctaatggagaaatatggcgatcaggcgatggccgggatggatcacagccagatgatgggccatatggggcacggcaatatgaatcatatgaaccacggcgggaagttcgatttccaccatgccaacaaaatcaacggtcaggcgtttgatatgaacaagccgatgtttgcggcggcgaaagggcaatacgaacgttgggttatctctggcgtgggcgacatgatgctgcatccgttccatatccacggcacgcagttccgtatcttgtcagaaaatggcaaaccgccagcggctcatcgcgcgggctggaaagataccgttaaggtagaaggtaatgtcagcgaagtgctggtgaagtttaatcacgatgcaccgaaagaacatgcttatatggcgcactgccatctgctggagcatgaagatacggggatgatgttagggtttacggtataa

SEQ ID NO: 25108 - DNA, 3224 bp, Homo sapiens; identical to SEQ ID NO: 18387
  SIMILAR (1730)..(1158): 981254mologous to Escherichia coli transcriptional activator of the formate hydrogenlyase system,accession number U29579,Smith- Waterman Score=1003.

SEQ ID NO: 25109 - DNA, 1880 bp, Homo sapiens
  SIMILAR (1531)..(785): 971254mologous to Escherichia coli enterobactin,accession number M60177,Smith-Waterman Score=1245.
ccgcatcatgtgcctgagcctgttctggcacttcctggatgtggtttggatctgtgtgttcctgttgtttactgatgggggcgatgtatgagtatctacgatccagggcggtccaggaaggtaaacctctgaaggttatccgtacatcgagggaacgactgagggagaagacgcctccggattggaaactgcaggcggacgtcggcaggtgccggctaaccacatagggcaagggcacggaacacggggccggcattcccatcgcgttgatgaaatagttccaggtcaggaaactcaccatcaccgccagacaagcacgcccctgcgcttgcttagcaaggccaatgggtaaaccgacagcaaaaatcagcggcatattacggaataccgtccaaccgccctcttcaataatgtgtacgatttgcgcgaataaactgttcggatcggtcagtgattccccgacaaacatcgggttttgcagcaagatggcaagacccaccacaatcccggcgaagggaaacagcagcactggcgtgaacatcgcgccgccaaagcgttgaatttgactgagcatttccacatcctcttttctcaattctgtaagtaggaagcctgattggttatgcggcaggcctggagcgaggataggaagatgcgatcggcagaacatgacgacccaatgggattcgtgatcgctttcatgcttttcgttgggcggtagagatctacgttttcgcgaaaaagtagacctctgtgagcacaggtacacagcatcgaacacatcttcctgaagtgtgcgttcagcaacaaacagcgtcgctttaccgtcaaacggtacgctatgagcagtcgtcagcaggcgcacagcatcagcgtagttgccttcaatggtggtaaacaactccgttgaagtacttccctgctgtgctgccaggaaggcctcgcgttcgcggttaatctccgccagcacttccgggtccagaccattagcttctttttcctgccagttttgcgtttctggcggccaggtatccagcaagccaagaaatgccacctgttcgccacgggcacgcagtcgcgccgcaataccctgcgccagcgtaccgccaagggaataccccagcaggtaataagggccatgcggttgttgttcaagtaacgttgccagatgcgcttcgcagacttcatccaggtttgccgccgtctgcatggggccattggggcgcggtgactgaatgccgataatcgaccattgtggatcgagataacgcgagagcacgctgaactgccaggcaaaaccggacgcaggatggaaacaaaacagcgtcgggccattaccttcacgcaacggcagaatggtttcgaatcccatacgccgggtgctgtcttcttcagcatcaataatcgttgccagtttggcgacaggtgacgcgaccatcacttgccccggggttacctggcgggcaacctgccgacttaactgcgctgccagtttcattgccagtagcgaatgacgccaccgaaagaaatagagtatcacattggtgtccatggttattcccgttctccagtacgctcaggcggttcaccaggttgaattgttggaatatgtagccggtatgggcgcggcttttgcggatatcgcgggccaggcggccttcgcgctggactgtgcggcccagcagctcgatatggctaccgacagatttatcgccggtaatcaaaccgcttaagtgacgtaaaagggtggattttccggaacccgacggcccaagcagagccaccatttcaccgtgatgaatgttcagatcaaccgcatgcagcgcctgatgctgattgaaggttttggcgagcttctcgacacggataatcgtttgcat

SEQ ID NO: 25110 - DNA, 767 bp, Homo sapiens
  SIMILAR (141)..(52): 901254mologous to Escherichia coli similar to,accession number D90882,Smith-Waterman Score=132.
aatttgtaggccggataaggcgtttacgccgcatccggcgatattagtttacgccgttaacagattagctatcgtgcgcacaccaagtcccgtagcgcccgcagaccactgttcaaccggcgctttacgtcgccgagcagtcgatatgcagccagccttgctgatagttctcaacaaagtgcgacaggaagcccgccgccgtgctcgcgcctgccggatacgccgcgcttccggtattgttcagttcggcaaagttagacggcagctggctgcggtggaactccgccagcggcagacgccagaacggttcgttctcctgcgcggcactcgccagcaagcgaccggccagcgcatcgtcaaaactgaacagcgcgtgataatcattacccagcgcagttttcgccgccccggtgagggtcgccgcatcaatgatcatttccggtttctgcgcactggcatcaatcagaccatcggcaagcaccagacgcccttcggcatcagtgttcatcacttcaacttttttaccgttgcgatagaacctgcacaggaaagcgacgagctgatcgttaaagatgctaacggcaatctgctggctgacggcgacagcgttaccatcattaaagatctgaaggtgaaaggccggataaggcgtttacgccgcatccggcaacggtgccgactgcctgatgcgacgcttgcgcgtcttatcaggcctacaattcccgaccctccgtaggccggataaggttttacccgcatccgcacag

SEQ ID NO: 25111 - DNA, 3028 bp, Homo sapiens; identical to SEQ ID NO: 18384
  SIMILAR (1925)..(2437): 991254mologous to Escherichia coli DEAD box protein (AA 1- 432),accession number X52647,Smith-Waterman Score=871.

SEQ ID NO: 25112 - DNA, 1128 bp, Homo sapiens
  SIMILAR (726)..(409): 991254mologous to Escherichia coli ferredoxin,accession number Y11070,Smith-Waterman Score=564.
ctgctgtaactgcggggaatcttccagcaacatggatttcgagagtggaggtcgttcataaggaagatgtcgctcatcggaaaacagatgcagctcaccggtgaacccttgctggcgtacgaggccgcagccattgccgccgcttgcccgccaccgacaataatgatcgttttttctttcatcgtgcttccttaaagatccagcccagccgctacgtggcgaatgcgcgaatcgcttccaccgccagaatatgttcgccaaatcgctgacgcagactggcgacttttgccgccgacagttccagcgtggcaacctgcgcgccttcttcgataaatcgctcgaccagcgccagccctaatcccgatccgccgccggtaataaaaatggactcgttatgcagatcgctcatggctgcgcctccggtaagtcgatgaaaatgtcaccaccttcaacgtgtactggataagtggtgagcggatcggtggcgggcaggcataacgctttccccgttttcaggcaaaaactggcggcgtgtagcgggcactccaccgtggcgtcatcttccagatacccttctgacattgacgcattaccatggctgcaacgatcgttaatggcataaaactcgccgccaacgttgaacagggcgatgacgggcgaggtatcgatccggagagcctcagcctccggcacatccgcaacgggacacgcataaattcgattcatcagaacagtacaacccgcaacgcgttgggccgccggggaagcgtcgacagtgccagcaccattactggccgtccgccacttattctcctgaagcccggtacgacaggcacgttgcgcttgctgagaacggaaagcgacatcttgccctttttgtttcaggtagtcggcagccacttttttggcatccagtccttccacagcaatgctggcattcagttgctgcaatgtttttgcatcgaggctggcgaagactggctgtagccactgtgccatttgcggatactccctcaacaccgactcacgcaccactggtgcaggcgcgtagataggttgcacaccttgcggatcgcttaaggtttgcagccccagcgccgctaccgggccgtcagtgccgtaagccat

SEQ ID NO: 25113 - DNA, 868 bp, Homo sapiens
  SIMILAR (509)..(616): 661254mologous to Escherichia coli BENZENE 1,2-DIOXYGENASE BETA SUBUNIT (EC 1.14.12.3) (P2 SUBUNIT),accession number D90884,Smith-Waterman Score=117.
  misc_feature (1)...(868): n = a,t,c or g
cctgctggtcgactttagaggatcttctgagtagcgaaagatggcaggaagtgctcgataaaaccgccgcttaccatcaggaggtgatgaaatgagtgcgcaagtttcactagagttacatcaccgcattaggccagttttctcgttcaggaatccagctgctggaccgactgggaaatttcgggacggggtggcccaacttcgaccgaaagaggttcggttccaccatgcgcaccacagttaacgggcaaacacgcgtcccccgcaaaggcgtccagccgccgacaacctggatttttaatgacaccaaagaccagctggagcggcgaatcgcccgtctggaaacgggcatggcctgggcagaagagccgccgtcacgcacccgtcacttaatcagcaactgccagataagcgaaaccgacatcccaaacgtatttgctgtgcgggtaaattatctgctttatcgggcacaaaaaggagcgcgatgaaacattctatgttggaacgcgtttcgacaaagttcccccttctgaagaatacaacctggcgctgcttgaaacgggatatcgtcctggatcaagcggtaatcacttcccataacctgagtgtactgttctgatgaatcgaatttatgcgtgtcccgttgcggatgtgccggagggtgaggctctccggatcgatacctcgcccgtcatcgccctgttcaacgttggcggcgagttttatgccattaacgatcgttgcagccatggtaatgcgtcaatgtcagaagggtatctggaagatgacgccacggtggagtgcccgctacacgccgccagtttttgcctgaaaacggggaaagcgttatgcntgtccgccnncgatc

SEQ ID NO: 25114 - DNA, 318 bp, Homo sapiens
  SIMILAR (91)..(318): 941254mologous to Homo sapiens mucolipidin,accession number AJ293659,Smith-Waterman Score=359.
aacttggcgagctacgacgtctgcagcatcctcctgggcacctcgacgctgctggtgtgggtgggcgtgatccgctacctgaccttcttccacaactacaatttccgctcactctccatggtgtctgagtgcctgttctcgctcatcaatggggacgacatgtttgtgacgttcgccgccatgcaggcgcagcagggccgcagcagcctggtgtggctcttctcccagctctacctttactccttcatcagcctcttcatctacatggtgctcagcctcttcatcgcgctcatcaccggcgcctacgacaccatcaag

SEQ ID NO: 25115 - DNA, 513 bp, Homo sapiens
  SIMILAR (326)..(382): 891254mologous to Homo sapiens putative p150,accession number U93572,Smith-Waterman Score=83.
atggataagttcctggacacatacacactccaaagtctaaagcaggaagaagttgaatacctgaatagaccaataacaagttctgacattgaggcagtaattaatagcctatcaatcaaaaaaaaagtccagtaccagacagactcacagccaaattctaccagaggggaaaatctgggcaataccattcaggacacaggcatgggcaaagacttcataactaaaacaccaaaagcaatggcaacaaaagccaaaattgacaaatgggatctaattaaactaaagagcttctgcacagcaaaagaaactatcatcagagtgaacagggacatggatgaagctggaaaccatcattctcagcaaactatcacagatcagaaaaccaaacaccgcatgttctctcttggtgacctgagattattgaaggctgtgccttttcaactcatgggtaacagtgatattgttgtctccctctgggtgactcttctgaattgtgtccagtattctgtgtga

SEQ ID NO: 25116 - DNA, 380 bp, Homo sapiens
  SIMILAR (49)..(156): 751254mologous to Homo sapiens PRO1546,accession number AF116638,Smith-Waterman Score=157.
atggatgaagctggaaaccatcattctcagcaaactatcacaagaacagaaaaccaaacaccacatgttctcactcataagtgggagttgaacaaggagaacacatggaccccgggagaggaacatcacacactgggccctgttggcgggtgggggtgctgcggaaggatagcattaggagaaatacctaatgtaggcctagataatatattacttagccttgagaaactgagaaatcccccactgtgtcaccttctagagcccctgtcaaccctttgcaactccaagagacaagtcactcctactttccagaaaacattcagaagcaagcaccagcccttccccagaggtcaagcagcagaaagggccttccactgcag

SEQ ID NO: 25117 - DNA, 361 bp, Homo sapiens
  SIMILAR (126)..(1): 801254mologous to Homo sapiens Human secreted protein, SEQ ID NO: 7217,accession number G03136,Smith-Waterman Score=174.
atggatgaagctggaaaccatcattctcagcaaaatatcacaaggacagaaaatcaaacactacaggttctcactcataagtgggagttgaacaatgaggacacatggacacagggaggggaacatcacagactggggcctgttgctagaaaatctggaagcagaaactgctccgttgccctaacagggtctcatgccattccgaccttcaccaagcttagaagccaccatgtatgtggaagcaggttgcttcaagaatgtgtaggaggctctaattctctaggaaagtgcctgcttttaggtcatccaacctctttcctctctggccactctgctctgcacattagagggacagccaaaa

SEQ ID NO: 25118 - DNA, 1758 bp, Homo sapiens
  SIMILAR (1669)..(1592): 341254mologous to Homo sapiens Sequence encoded by cDNA of human serum albumin A (HSA),accession number R04223,Smith-Waterman Score=41.
tcactgactttctccccaggcccaaggtactgtcctcttttcatatctgttttggggcctctggggcttgaatatctgagaaaatataaacatttcaataatgttctgtacattttgcagtccaccagcaatgaatgagagttcctgctgctccacatctttgccagcatttggtgtcagtgttctggattctggccattccagtaggtgtgtagtggtaactccttgtttcaatttgtatttccctacattaggtatttcgcctaatgttatccctcccctagccccaaactccttgacaggccctggtgtgtgatgttcccttccgtgtgtccatgtgttctcattgttcaactcccacttatgagtgagaacatgcagtttctggttttctgttcttgtggtagtttgctgagaatgatggtttccagcttcatccatgtccgcattctggaatttgtactctccaagctgctcaaaaagctcacaattttgtttgattaaattctgaggctcttccacaagaggtttaaattcatcgaacactttggcatagcattcatgaggatctgcagcggcacagcacttctctagagtggtttcatatgtcttggcaagtctcagcagcagcacgacagagtaatcaggatgccttcttgcatattcatacaaaaacatgcccaggaagacatcctttgcctcagcatagtttttgcaaacatccttactttcaacaaaatcagcagctaatgaaggcaagtcagcaggcatctcatcattttccacttcggcaatgcagtgggatttttccaacagaggtttttcacagcattccttcagtttactggagatcgaatcttgattttcacagatatacttggcaaggtccgccctgtcatcagcacattcaagcagatctccatggcagcattccgtgtggactttggtaagatctgtcactaacttggaaacttctgcaaactcagctttgggaaatctctggctcaggcgagctactgcccatgctttgaaagctctttctccaaatttttggagactggcacacttgagtctctgtttggcagacgaagccttcccttcatcccgaagttcatcgagctttggcaacaggcaggcagctttatcagcagcttggcaacattctgtaaaagcagctttataccttttagcaaagaaaaggagttccggggcataaaagtaaggatgtcttctggcaatttcatataagtattttttcaaaaatgtctcttcattgtcatgaaaagcagtgcacatcacatcaacctctggtctcaccaatcgggggaggtttgggttgtcatctttgtgttgcaagaagcattcatttctctcaggttcttgttttgcacagcagtcagccatttcaccataggtttcacgaagagttgcaactgtgcataatttgtctccaaaaagggtatgaagtgatttgtcacaattttcagctgactcatcagcaacacatgtttttgcaaattcagttacttcattcactaattttacatgatcttcaaatggacactgctgaagatactgagcaaaggcaatcaacaccaaggctttgaaattttcttctcccaaatctttaaaccgatgagcaacctcactcttgtgtgcatctcgacgaaacacacccctggaataagccgagcttttaagtccctctgcccccagatcttccatgatgaaagagtccctctccttgactttcttcat

SEQ ID NO: 25119 - DNA, 2279 bp, Homo sapiens
  SIMILAR (1409)..(312): 891254mologous to Homo sapiens putative p150,accession number U93569,Smith-Waterman Score=1773.
tcccgggatgtgcttggtctaagattcacccccttgctcctctggattgtgcattccagagcgtgggcattagtggagtctgcagtgatgtcaacatgggagtgttgggtgggagatgagaggggtactggtgtgaaattggctggggcccacacagagctgccaacaggccctggtgtgtgatattcccctccctgtgtccaagtgttctcattgttcaattcccacctatgagtgagaacatgcggtgtttggttttctgtctttgcgatagtttgctgagaatgatggtttccagcttcatccatgtctctgttgtttcctgactttttaatggtcgctattctaactggtgtgagatgatatctcattgtggttttgatttgcatttctctgatggccagtgatggtgagcattttttcctgtgtctgttggctgcataaatgtcttcttttgagaagtgtctgttcatatccttcacccactttttactggggttgtttgtttttttcttgtaaatttgtatgagttctttgtagattctggatattagcactttatcagatgagtagactgcaaaaattttctcccattctgtaggttgcctgttcactctgatggtagttccctttgctgtgcagaagctctttagtttaattagatcccatttgtcaattttggcttttgttgccattgcttttggtgttttagacatgaagtccttgcccatgcctatgtcctgaatggtaatgcctaggtcttcttctggggtttttatggttttaggtctcatatttaagtctttaatccatcttgaattaatttttgtataaggtgtaaggaagggatccagtttcagctttctacatatggctagccagttttcccagcaccatttgttaaatagggtatcctttccccatttcttgtttttgtcaggtttgtcaaagatcagatagttgtagatgtgtggtattatttctgagggctctgttctgttccattggtcgatatctctgttttggtaccagtaccatgctgttttggttactgtagtcttgtagtatagtttgaagtcaggtagtgtgatgcctccagctttgttcttttggcttaggattgactcagcaatgcgagctcttttttggttccatatgaactttaaagtagttttttccaattctgtgaagaaagtcattggtagcttgatggggatggcattgaatctataaattacctctggcagtatggccattttcatgatattgattattcctatccatgagcatggaatgttcttccgtttgtttgtgtccccttttatttcattgagcagtggtttgtagttcttcttgaagaggtccttcacatccattgtaagttggattcctaggtattttattctctgcaaaaagttgtggagatgcttgaagaagtggtagtctgttgatgagaggtcaggtgaatatgaaggatgagccaaaacttggtagcccaatgcattgaacttttgaagcattggttgtgcgacgtgtggttgggcgttgtcatggagaagaattgggccctttctattgaccaatgccagttgcaggtgtggcagtttttggtgcatctcatagatttgctgagcatagtcctcagatataatggtttcaccaggattcagaaagttattgagctttttcacctttccaatttgcttcaaatgccaagcgaccctggaatggtcgacgtcaagctctttggcaacttcttgtgtggttgtaagaggatcagcttcaataattgctctcagttggcagttgttaacttctgatggctggtcactatgctcctcatcttcaaggctctcgtctcctctgcaaaacttcttgagcactgtacatttgttagcagttccttggccaaatgcgttgttgatattgcgagttgtctctgctgctttatgacccatttttaaattgaataagaaaatcactcgaatttgctttttgtctgacaccatttccatagtcacctgctgagttagtcttctacctcttgatgcctcatcttcctcaatgagattcatcagttgaaaatgatcacttctaacttgaaattctataatgttgaaagtcgttattttcctgaactttctgtagaagttgcaatggaagctggctgtaactagactggtagaaagatggcctcggtacaaatatggtggatctgcagtcaaccatgcttctccaacaggttttctagaaggagatccaagcagtacccactccat

SEQ ID NO: 25120 - DNA, 1878 bp, Homo sapiens
  SIMILAR (766)..(1323): 411254mologous to Mus musculus Rho-guanine nucleotide exchange factor,accession number U73199,Smith-Waterman Score=338.
atgctgctcagcaccctgcagtgcccagagcggttgagcatgaaagaccagctgatcgcacagagcctcctagagaaacagcagatctacctggagatggccgagatgggcggcctcgaagacctgccccagccccgaggcctattccgtggaggggacccatccgagaccctgcagggggagctaattctcaagtcggccatgagcgagaccctgtcctctcacttagacgcagattggcctgtcctggtggccatacctgaagtaagggtgtgcgcagggacagtggggctgaaatcccacggcacacagaagggggcaggcgatcaccaccccatcgagggcatccagagcctgatctgcaggcagctgggcagcgccaacggccaggcggaagacggaggcagctccacaggcccgcccaggagggctgagaccttcgcgggctacgactgcacaaacagccccaccaagaatggcagtttcaagaagaaagtcagcagcactgaccccaggccccgagactggcgaggccccccaaacagcccggacttgaagctcagtgacagtgacattcctgggagctctgaggaatcgccgcaggtggcgaggaaccccctacagggaccaccagctttcagccggggcaggtgtggtggtgcctaccagatgccagatgtccccggctattcctttgcctttgaatcagaaggccaggtggaggcgccaggcacggaatccgatccccgtctgcccaccgtcctggagtcggagcttgtccagcggatccagacactgtcccagctgctcctgaaccttcaggcggtaatcgcccaccaggacagctatgtggagacgcagcgggctgccatccaggagcgggagaagcagttccggctgcagtcgacgcgtgggaacctgctgctggagcaggagcggcaacgcaacttcgagaagcagcgggaggagcgcgcggccctggagaagctgcagagccagctgcggcacgagcagcagcgctgggagcgcgagcgccagtggcagcaccaggagctggagcgtgcgggcgcgcggctgcaggagcgcgagggcgaggcgcggcagctacgcgagcggctggagcaggagcgggccgagctggagcgccagcgccaggcctaccagcacgacctggagcggctgcgcgaggcccagcgtgccgtggagcgcgagcgggagcgcctggagctgctgcgccgcctcaagaagcagaacaccgcgccaggcgcgctgccgcccgacacactggccgaggcccagcccccaagccaccctcccagcttcaacggggaagggctggagggccctcgtgtgagcatgctgccatccggcgtggggccagagtacgcagagcgccccgaggtggctcgccgggacagcgcccccaccgagaaccggctggccaagagcgatgtgcccatccagctgctcagcgccaccaaccagttccagaggcaggcggccgtgcagcagcagatccccaccaagctggcggcctccaccaagggtggcaaggacaagggcggcaagagcaggggctctcagcgctgggagagctcagcgtccttcgacctgaagcagcagctgctgctcaacaagctcatggggaaagatgagagcacctcacggaaccgccgctcgctgagccctatcctgccccggcagacacagtcctgcgcccccaccagcccaccgccagctgacagcccctccgagggcttctctctcaaggccgggggcacagccctcctgcccgggcccccagctccctcgccactgccggccacaccactcagcgccaaggaggacgccagcaaagaagacgtcatcttcttctaa

SEQ ID NO: 25121 - DNA, 1395 bp, Homo sapiens; identical to SEQ ID NO: 6317
  SIMILAR (1172)..(1110): 851254mologous to Homo sapiens PRO1546,accession number AF116638,Smith-Waterman Score=93.

SEQ ID NO: 25122 - DNA, 635 bp, Homo sapiens
  SIMILAR (635)..(30): 891254mologous to Homo sapiens mucolipidin,accession number AJ293659,Smith-Waterman Score=921.
aactcccgcggcggaacttgccggaggtggggctgtccctggcactgtgcgatgtaaggcctgcagctcgctctcctctgcgcctgcgccgccgggatgcttgatggtgtacgtaggcgcccggtgatgagcgcgatgaagaggctgagcaccatgtagatgaagaggctgatgaaggagtaaaggtagagctgggagaagagccacaccaggttgctgcggccctgctgcgcctgcatggcggcgaacgtcacaaacatgtcgtccccattgatgagcgagaacaggcactcagacaccatggagagtgagcggaacttcacatgatagggccccagcacgatccagccacagaagcagtagcccaggtagatgacagccacgcagcagcagaagcgcatgacgctgggcagggccacccgcagtgtggcgatgaggatattgtagttgtggaagaaggtcaggtagcggatcacgcccacccacaccagcagcgtcgaggtgcccaggaggatgctgcagacgtcgtagctcgccaagttcttggcctcgatgccgatcttcatgatggtgcccgagatggtgagcacatcgctggtgacgagcaggatgtaccagccattgacaaattccag

SEQ ID NO: 25123 - DNA, 5114 bp, Homo sapiens
  SIMILAR (1502)..(1606): 341254mologous to Mus musculus Rho-guanine nucleotide exchange factor,accession number U73199,Smith-Waterman Score=44.
gctggcggagagcggcctgcgggcgatcgggccgagcctcgctcaaggagcacccccggggcaccctcctgtccgatggcagcccggccctgtccaggaatgtcggtatgacggtctctcagaaagggggtccccagccaacaccgagcccggctggccctgggacgcaactcggaccaatcacaggagagatggatgaagccgattctgcgtttttaaaatttaagcagacagctgatgactctctgtcccttacatctccaaacaccgagtccatttttgtagaagatccctacaccgcctcgctgaggagtgagattgagtcagacggccacgagtttgaagctgagtcctggagcctcgccgtggatgcagcctacgccaagaagcaaaagagggaggtggtgaaaagacaagatgtcctttatgagctgatgcagacagaggtgcaccacgtgcggacgctcaagatcatgctgaaggtgtactccagggccctgcaggaggagctgcagttcagcagcaaggccattggccgcctcttcccatgcgctgacgacctgctggagacgcacagccacttcctcgctcggctcaaggagcgccgccaggagtccctggaggagggcagtgaccggaattatgtcatccagaaaatcggcgacctcctggttcagcagttttcaggtgaaaatggggagagaatgaaagaaaagtacggtgtgttttgtagtggccacaatgaagctgttagtcattacaagttgctgcttcagcaaaacaagaaatttcaaaacttgatcaagaaaattggcaacttctccatcgtgcggcggcttggcgtgcaggagtgcattctcctggttacacaacgcataaccaaatacccagtgctggtggagcgcatcatccagaacacggaagctggcactgaggactatgaagacctgacccaggccttgaacctcatcaaagatatcatctcacaagtggacgccaaggtcagtgagtgtgagaagggccagcgcctcagggagatcgcagggaagatggacctgaagtcttccagcaaactcaagaacgggctcaccttccgcaaggaagacatgcttcagcggcagctccacctggagggcatgctatgctggaagaccacatcagggcgcttgaaagatatcctggctatcctgctgaccgacgtacttttgctgctacaagaaaaagatcagaaatacgtctttgcttctgtggactcaaagccacccgtcatctcgttacaaaagctcatcgtgagggaagtggccaacgaggagaaagcgatgtttctgatcagcgcctccttgcaagggccggagatgtatgaaatctacacgagctccaaagaggacaggaacgcctggatggcccacatccaaagggctgtggagagctgccctgacgaggaggaggggcccttcagcctgcccgaagaggaaaggaaggtggtcgaggcccgcgccacgagactccgggactttcaagagcggttgagcatgaaagaccagctgatcgcacagagcctcctagagaaacagcagatctacctggagatggccgagatgggcggcctcgaagacctgccccagccccgaggcctattccgtggagaggacccaatccgagaccctgcagggggagctaattctcaggtcggccatgagcgagatggagggcatccagagcctgatctgcaggcggctgggcagcgccaacggccaggcggaagacggaggcagctccacaggcccgcccaggagggctgagaccttcgcgggctacgactgcacaaacagccccaccaagaatggcagtttcaagaagaaagtcagcagcactgaccccaggccccgagactggcgaggccccccaaacagcccggacttgaagctcagtgacagtgacattcctgggagctctgaggaatcgccgcaggtggtggaggcgccaggcacggaatccgatccccgtctgcccaccgtcctggagtcggagcttgtccagcggatccagacactgtcccagctgctcctgaaccttcaggcggtaatcgcccaccaggacagctatgtggagacgcagcgggctgccatccaggagcgggagaagcagttccggctgcagtcgacgcgtgggaacctgctgctggagcaggagcggcaacgcaacttcgagaagcagcgggaggagcgcgcggccctggagaagctgcagagccagctgcggcacgagcagcagcgctgggagcgcgagcgccagtggcagcaccaggagctggagcgtgcgggcgcgcggctgcaggagcgcgagggcgaggcgcggcagctacgcgagcggctggagcaggagcgggccgagctggagcgccagcgccaggcctaccagcacgacctggagcggctgcgcgaggcccagcgtgccgtggagcgcgagcgggagcgcctggagctgctgcgccgcctcaagaagcagaacaccgcgccaggcgcgctgccgcccgacacactggccgaggcccagcccccaagccaccctcccagcttcaacggggaagggctggagggccctcgggtgagcatgctgccatccggcgtggggccagagtacgcagagcgccccgaggtggctcgccgggacagcgcccccaccgagagccggctggccaagagcgatgtgcccatccagctgctcagcgccaccaaccagttccagaggcaggcggccgtgcagcagcagatccccaccaagctggcggcctccaccaagggtggcaaggacaagggcggcaagagcaggggctctcagcgctgggagagctcagcgtccttcgacctgaagcagcagctgctgctcaacaagctcatggggaaagatgagagcacctcacggaaccgccgctcgctgagccctatcctgcccggcagacacagtcctgcgcccccaccagaccctggcttccccgccccgagcccaccgccagctgacagcccctccgagggcttctctctcaaggccgggggcacagccctcctgcccggccccccagctccctcgccactgccggccacaccactcagcgccaaggaggacgccagcaaagaagacgtcatcttcttctaaaagggccgtgactcaaggaaagtttttaatggaaagttgagccagaactaaaccagggagctgtctgaaatcatagcaccccatccgggtggcggggagatcaactccgagctgtttttccgaggcagtgaggaacggtgccggctctgcacggagctgaggacaggacagaccttgctttgagaaggagctgccggccggggccacgctccacagccgccgcgcgacagtggagccaagggttagggcaccaggaggggccaggtggcgtcggcagcatctgtccccagaatcaggcagaatccacttcccaaacagagccccacgcaggttcaccatgaacctcagggtcagggaatgagccaggcacgggggcatgggcagagagggccacggggcagggcccactgagggaacatcagtggccctccagtcaggttctgtgggtttggaagcccatcgtgaaaggggctgacctttgcccctttttacttggcattggttttgaaaccagctgtttcccaaactctgcttcccaagggcaaccgttgctgttcacacgctcagcctgtctgggggagcgggcctctagcttcagccagggcgggtacacaccctgggcacagggtcctcagcccccgggaaatgagctcccagggctggcgtcccaccttccaggtgggggctggcacatcacagactgtcgagagcgccatgtcccagggcatgcagaggttgcacctagagacgttgcagcaagtggacaagtggccgctgtgcgggcccctcgcttgtagtgagctgttgcagcttacggtccgttccctggaggggtggaggaaggaggtgttgggcagcatcaaaggtgctgggacatcccagggtggtgagatccatccacgatccagctccggtggagaaagggcccatgtcaagccttgttctgcaccccaagcattggtggtaggactgggtcctggctgatcgtccttgttcccagtggggtacatgtgagcccctgccagggccaagtccttctcccgaacccagggtcctgggaactgcagatcccggggggattcagcccttctcccactgtgctggcagaggcactcctgtgacgctgaatacagtgaacagggacattcccgccactcggggacagatgggcacaagggaggggaaactccatcaggaagtgctcccctgggcagaggcgcccactgggtgctgtgggctcaggagggggcggggcaggagctggtgccaaccgggaaccagagccccacagccatacagcccattggtgacaaggtcctgagaacacagtggccaggtgtccccaggctcctggcccctccgacgacctcaactctgcccagcccggtccctggccatcagcgacgctgtccgccccccgtcagatcccatgtgtgccatgtttatcatcagtgttttgtatttttgtactgagtatcggagcactttacagaagctgactgtacattcctgttctgttgtgaagagaacattcccagaccctggcaccctcctgagccggcgtgtgccggtccagccctccgagatgccacaattccttggatgggggagaagttcaaggaatttctgctcggccacgcggtgggaaccccgcgtccccgccatgtggcagaggggtctcagtcgtgctaggcatcgggcggcagcgccgacagcccttccctcgccagtgcccctcggccactcctgggttggagcccgattttatttgtaaagttgacagtcgagcaaatgttcctattttcgtgggatctgcacacgtctttgtcagttgtggtcatgatcttagtcacctgctaattatttttacaatgattacaacatttcctcactgcgggatatttctgacccgctttagaacttaagacctgattctagcaataaacgtgtccgagatg

SEQ ID NO: 25124 - DNA, 2053 bp, Homo sapiens
  SIMILAR (1619)..(1786): 831254mologous to Homo sapiens putative p150,accession number U93563,Smith-Waterman Score=254.
cttgtgccaagtccccaaggcaggaaagagcgtggcttatctcatctaagggactgaaggaaggctggtttgaaatgaaatgtgaggacagccaaaaacgagcttgaagatcaggaaggtccaaacacctgacagccttgaagttctgctcagggtctggactcctccgcacaacaagccccggtgtgtgatgttccccttcctgtgtccatgtgttctcattgttcaattcccacctatgagtgagaacatgcggtgtttggttttttgtccttgtgatagtttgctgagaatgatggtttccagcttcatccatgtcccatgctgttttggttactgtagccttgtagtatagtttgaagtcaggtagtgtgatgcctccagctttgttcttttggcttaggattgacttggcgacgtgggctcttttttggttccatatgaactttaaagtagttttttccaattctgtgaagaaagtcattggtagcttgatgaggatggcattgaatctataaattaccttgggcagtatggccattttcacgatattgattcttcctacccatgagcatggaatgttcttccatttgtttgtatcctcttttatttcattgagcagtggtttgtagttctccttgaagaggtccttcacatcccttgtaagttggattcctaggtattttattctctttgaagcaattgtgaaggggagttcactcatgatttggctctctgtttgtctgttattggtgtgtaagaatgcttgtgatttttgtacattgattttgtattctgagactttgctgaagttgcttatcagcttaaggagattttgggctgagacaagggggttttctagatatacaatcatgtcatctgcaaacagggacaatttgacttcctcttttcctaattgaataccctttatttccttctcctgcctaattgccctggccagaacttccaacattgagttttgaaacaggttgaagtcaaagaagctgagagtcaggaattctttggagagtgttgttgacatgctgttcttcccctctccctttctttggaagagaaggatgttgaggaacgtgagggtctcttggagtttgagggatagagtgtctgatatttggctcatgcctgaggaagcccaaaaatgtgtatcacggctgctgctgctgcagggtaaaggagcaagcacattgagcacccttgctttcactgttcccgctaagggggacctgccttccctaggctcacagtacagccaccttgcttctgcctgagcattttggctgtggcctggcacccttctgagagcccagcccccagaggcctgcagtctgccctggggatcctgctgctgttgctgcaactgccaccaccatgaatggtcgtatctgtaaacttctctcttacataccatttcgataaaccatctgatttccacttggataagtgaacatcccccaacaggccctggtgtgtgatgtttccctccatgtgtccatgtgttttcattgttcaattcccacttatgagtgagaagatgtgctgttcggttttctgttggtgtgttagtttgctgagaatgatggtttccagcttcatccatgtcccagccaaaaaaagcccaggaccagacggattcacagccaaattctaccagaggtacagagaggagctggtaccattccttctgaaatggttccaaacaatagaaaaagagcaactcctccccaacacattttatgaggccagcatcatcctgataccaaaacctcatttttggcaatctgatttgagtttccatggaaacagaagtgacagctgaggcctccaaactcttgtaactgatggggctcaggttaagtcttgcaaatgtcagttgtcccaaggtacccctgacaggccctggtgtgtgatgttcccctccctgtgtccatgtgttctcattgttcaactcccacttatgagtgagaacatgaggtgtttggttttcggatcttgtgatggtttgctgagaatgatggtttgcagcttcatccat

SEQ ID NO: 25125 - DNA, 774 bp, Homo sapiens
  SIMILAR (492)..(370): 871254mologous to Homo sapiens Human secreted protein, SEQ ID NO: 6834,accession number G02753,Smith-Waterman Score=184.
ccagactttccgatacatcctctgaaattttggtcgaagctgccaagcctccttcatttttgcattctgtgcacctgcaggcttattgtcctgtggaggccgccatgggttatggtttgtgccctccaaagcatcccaagctgtacctgggaccttttgatctgaggctggaactggggttgcctgtatgcaggaagcagtgtcttgaggcttctttggggcagcagggccctgggcctggcccgtgaaaccattctttcttcccagggctctgggccccctgacaggccccggtgtgtgatgttccccatccctgtgtccatgtgttctcattgttcaactcccacctatgagtgagaacatgcggtgtttggttttttgtccttgtgacagtttgctgagaatgatggtttccagcttcatccatgtccctacaaaggacatgaactcatcattttttatggctgcatagtattctgtggtgtatatgtaacatgcttgtcaatttaaaaacatgataagatgaacaccagtgaacacatcacctagagaatgaagcaaacatcaaaaattctattgcagcttcccgtgtggccctccgccatcccagctctctattccatgccagggatatcccattttgaacttcgtatttaccatgtcaatgtgctgttgacatttataggtaattttacatgtaaaactctatatatctctatgtgttgccaaacaataaatatttggccttgcttattttacagttttacaacaaaa

SEQ ID NO: 25126 - DNA, 3371 bp, Homo sapiens
  SIMILAR (2798)..(2821): 1001254mologous to Escherichia coli K12 ATPase of high- affinity potassium transport system, B chain,accession number AE000173,Smith-Waterman Score=41.
atgaatagagcaccaatcccaaagcaatcaaaagacaaaacatctagagaaaccaagaacacatcacgaagcaagacacgagaacggaccgatgagctagaaggcctaagcacagacaaccacgcagaaacacaacacgctgaaaccaataccgatatgacacacgaacgatacacccaaataagaaaccatacatacaaaacaacacaccaaatggaagacaaaagaacaaaaccaaaaagagaaaaagaaatacataatagacccgatgacatggctaaggctgggatcccccgcagcattctaaacactggacaccctggaaagctgatgcagacagaggtgcaccacgtgcggacgctcaagatcatgctgaaggtgtactccagggccctgcaggaggagctgcagttcagcagcaaggccattggccgcctcttcccatgcgctgacgacctgctggagacgcacagccacttcctcgctcagactcatgagcggtccggctatgttcctctctgtgtatgcgcaactcacacgaagttctacgaattcatggaggatgtcaatacagcttatactaagcgccacacgatgttccgctcactctccatggtgtctgagtgcctgttctcgctcatcaatggggacgacatgtttgtgacgttcgccgccatgcaggcgcagcagggccgcagcagcctggtgtggctcttctcccagctctacctttactccttcatcagcctcttcatctacatggtgctcaagctcttcatcgaaagtagcggtaccacgccccctgtcttggggttctcagatggcagtttcaagaataaagtcagcagcactgaccccaggccccgagactggcgaggccccccaaacagcccggacttgaagctcagtgacagtgacattcctgggagctctgaggaatcgccgcaggtggcgaggaaccccctacagggaccaccagctttcagccggggcaggtgtggtggtgcctaccagatgccagatgtccccggctattcctttgcctttgaatcagaaggccaggtgcggattggctttcagttgagatcctcgcccagtatctctcatgtccgcaaatttctacgaggctctatagaagaatttttccgcgggcggaatctaacaaccaatatacatagaacgagctcactgaagccacaggctgaaacagggggctacatctcccagcaagctgtaacttcagaaggcgaggtgcccagagtcctaaacaacaatccacagactattttccatcatgaaggccgcagtaaagcgcaggccaacagtctgaaaggggtgaaaaaaactgcctttgcccgcaagctgcgtgagccgaaatatggcgctgcggcggacaaagttcctgccgaccaacttcgtaaaggcgatatcgtactggtagaagctggcgatattatcccctgcgatggtgaagttattgaagggggtgcatcggtcgatgaaagcgccatcaccggggaatcggcaccggtgatccgtgaatccggcggcgattttgcctccgtcaccggcggcacgcgtattctttctgactggctggtgattgagtgtagcgttaaccccggcgagacatttctggatcggatgatcgcgatggtggaaggcgcacagcgacgcaaaacgccgaacgaaattgccctgaccattctgctgattgccctgactatcgtctttttactggcaaccgccacgctgtggccgttttccgcgtggggcggtaatgcagtcagcgtaacggtactggtggcgctgctggtctgtctgatcccaaccactattggcggcctgttgtcagcgatcggcgtcgccgggatgagccggatgctaagcgcgaatgtgattgccaccagcggacgtgcagttgaagcggcaggtgacgttgacgttctgctactggataaaaccggcaccatcacactcggtaaccgtcaggcggtcggagtttatccccgcgcagggcgtggatgaaaaatacgctggcctaacgccgcacaactggcttctcctggctgatgaaaccgccggaaaggccgcagtattgtgatcctcgccaagcagcgttttaacctgcgcgagcgcgatgtgcagtcgctccatgccacctttgtaccgtttactgcgcaaagccggatgagcgggatcaacatcgacaaccgcatgatccgtaaaggttctgtcgatgccattcgtcgccatgttgaggctaacggtggtcacttccctaccgatgttgatcaaaaagtcgatcaggttgcgcgtcagggagccacgccgctggtggtggtggaaggttctcgtgtgctgggcgttattgcgctgaaagatatcgtcaaaggcggtattaaagagcgcttcgcccagctgcgcaaaatgggcattaaaacggtgatgattaccggcgataaccgtctgactgccgccgcgattgctgcggaagcgggtgtcgatgattttctcgccgaagcgacaccggaggccaagctggcattgatccgtcagtatcaggcggaaggtcgtttggtagcgatgaccggcgacggcaccaacgatgctccggcgctggcgcaggcagatgtcgcggtggcgatgaactccggcacccaggcggcgaaagaggcgggcaatatggtcgatctcgactctaacccgaccaagttgatcgaggtggtgcacattggcaaacagatgctgatgacccgtggctcgctgaccaccttcagcattgccaacgatgtgggcgaaatacttcgccattattcccggcggcattcgcggcaacgtatccgcagttaaatgcgctgaacatcatgtgcctgcattcgcccgactccgcaatcctcagtgcggtgattttcaacgccttgattatcgtctttttgattcccctggcgttaaaaggcgtgagttataaaccgcttaccgcttctgccatgttgcgccgtaacttatggatttacggtctgggtgggctgctggtgccgtttatcggtatcaaagtcattgatttactgctgaccgtttgcggtctggtggacatggatgaagctggaaaccatcattctcagcaaactatcacaagatcagaaaatcaaacaacgcacgttctcactcataagtgggagttgaacaacgagaacacatggacacagggaggggaacatcacacaccggggcctgtcaaggccaaatacagcaaggatcctctgtgcttcaaaagcacacctcgggcttcccctcaggtcttccttgccttaggcaaaaagggccagagaagtgagaaccgtctttgcattttgcccatcagcaagtag

SEQ ID NO: 25127 - DNA, 261 bp, Homo sapiens
  SIMILAR (35)..(76): 781254mologous to Pseudomonas putida isocitrate lyase,accession number AF150671,Smith-Waterman Score=61.
ctgtggtggagcggatcaacaacaccttccgtcggccgatcagatccaatggtccgcgggcattgagccgggcgatccgcgcttgtcgattacttcctgccgatcgttgccgatgcggaagccggttttggcgtgtcctgaatgcctttgaactgatgaaagcgatgattgaagccgaaaaacctcgacgaaaaactattgccagcttccagcagcagctgtcggatatgggctacaagtccagttcatcacctctggcag

SEQ ID NO: 25128 - DNA, 447 bp, Homo sapiens; identical to SEQ ID NO: 13159
  SIMILAR (118)..(444): 991254mologous to Escherichia coli isocitrate lyase,accession number X12431,Smith-Waterman Score=562.

SEQ ID NO: 25129 - DNA, 1398 bp, Homo sapiens
  SIMILAR (250)..(684): 971254mologous to Escherichia coli hycF,accession number X17506,Smith-Waterman Score=776.
  misc_feature (1)...(1398): n = a,t,c or g
atgtatccctggtctgtccgggacagccagaggcggcccctgggcgctgcgtgccgcgacctacgcgactgcgcgaccctgcgctacatgctgcgcggcaacaccgtttccgatgcgccgctgattatcggtagcctcgaccgttgctattcctgtaccgaccgcatgaccgtggtcgatgtgcgtaagaagaagagcaaagtggtgccgtacaaagaactcgagcgttacagcattgagcgaatcgccatgtttacctttatcagagaagtcatcaagaccggcacggcgacctcgtcttatccgctggagccgattgcggttgatagaaacttccgtggtaagccagagcagaacccgcagcagtgcatcggctgcgcggcctgcgtcaatgcctgcccgtcaaacgccttaacggttgaaactgacctcgccacaggagagcttgcctgggagtttaatcttgggcactgcatcttctgtggacgctgcgaagaagtctgcccgacggcggcgatcaaactgtcgcaagagtacgaactggcggtgtggaagaaagaagacttcctgcaacagtcccgcttcgcgctgtgcaactgccgcgtctgcaatcgtcctttcgccgtccagaaagagatcgactacgccattgcgctgcttaagcacaacggcgacagccgcgcaggaaaaccaccgcgaaagctcttgagacttgcccggaatttcaagcaaatgggttatcgcagtgatattcggacatttaatagtcgggatatttataccgcccgcgataatcgtaagagctggcataacgtgacggnaagtacggtgattgccgctcatgaaggcaaagcgccgcagcagatcatcattatggcgcatctggatacttacgccccgctgagcgatgctgacgccgatgccaatctcggcgggctgacgttacaaggaatggatgataacgccgcaggtttaggtgtcacgctgcaattggcagaacgcttgaaaaatacgcctaccgagtatggtattcgatttgtggcgaccagcggcgaagaggaagggaaattaggcgctgagaatttactcaagcggatgagtgacaccgaaaagaaaaatacgctgctggtgattaatctcgataacttaattgttggcgataaattgtatttcaacagcggtgtccaaacccttgaggcacgccatcaacgaagttttaacacggttaaaccgtggcccgattcggtgatctctaatcgtccgtttgcgggtaataccggcagcgtagatgataacgacgaaatacagcgcaatctgaatgacactaactacaaccgcatgtgggaatacaataaccgcggcgtgggtagtaaagtggttgcagaggcgaagaagtaa

SEQ ID NO: 25130 - DNA, 2107 bp, Homo sapiens; identical to SEQ ID NO: 13164
  SIMILAR (5)..(631): 851254mologous to Pseudomonas aeruginosa probable chemotaxis transducer,accession number AE004685,Smith-Waterman Score=827.

SEQ ID NO: 25131 - DNA, 1629 bp, Homo sapiens
  SIMILAR (1020)..(4): 991254mologous to Escherichia coli Ig heavy chain-binding protein,accession number D90705,Smith-Waterman Score=1700.
ttatgggatctcaatggctaaataatcgctcgcccgccgccgaacttcatccacgcgggccatatcgtttgactgcaacgccgcatcaaaatcggtgatcacccggccgatctcttctcgctcgtcacccagcgcccgcgcccacaactcttccagtttggctttaaaggtgcgattgatgagcatatcgcgcggataaattttcaatgcggataaccgcgtccgactctcttcaatcgtgtgcgcgctcaatgttaccgggctgtggttaatcactctggacttaacgctgccgtcttccagaagcacgtcaacttcaagcaacccgttgatatcataactaaagcgaatatcaatcgactgataagccccggttttcttcaacggcacatcgaaggattccaccagaatgttgtttttaactttgtggttttctccctgatagacgttaaccgtaattgaatcctgttccgggtgcatggttgaataagtttctacacgcgacacgggcacagtggtgtttcgttcaataatcggcgagaaaatgccggaaacgccctggcggttaacttcaacgcccaacgagtaagggcaaatatcagtgaggattacctcttcaatatcttcactgcgtaagcggcaggcggcctggattgctgcgcccagcgcgacaatggtgctcggatcgtaactttgatacggtaatttgccaaacagacgcacggcgattcgctgcaccagcggcatttgtgacgcgccgccaaccagcaccagactgtcgatttgactcggcttcagacgcgcatcgcgcaacgcctgttcaatcggcactcgcaagcgattgagcagcggcaaccacaaatcttccagttcgttctcgtaaaattcgcattcccgcgtttcttcctgatactgccagcgaatgtgcaatggcgattgattgctacattttgccgcttccacacaggcgtacaaggctgccagttcactctcgttaagcgtggtcctggcgacatccgcgattatcagcaaaccaatcttgactggtataactccagaaacacgaccaagctggacgaatccgttaaccgcgtaatgccgcaattcaaagttgacggcaaaatggtctttgaacgcgatatggaaatgctggctccgggttataccaaacgctggaaccgcgcgcgcagtatttgtacgtgccgtatcgcgatcagagcgacatctataactacgactcgtctctgctgcaatctgactactctggcctgttccgggaccggacttacggcggtcttgaccgtattgcctccgtggcgtatctccgagcgttggggattgcgtggcgggattcagtacgatacacgtctggataacgtagcgaccagtaactccagcattgaataccgtcgggatgaagaccgtctggtacagctgaattaccgttacgccagcccggaatatattcaggctacgctgcctaagtactattccactgctgagcaatataagaatggtatttcgcaggtaggtgctgtcgccagctggccaattgccgatcgttggtccattgttggggcctactagttccccagtagtaaaccctgttttccttgccatagacaccat

SEQ ID NO: 25132 - DNA, 1275 bp, Homo sapiens
  SIMILAR (607)..(371): 481254mologous to Escherichia coli O157:H7 proline dipeptidase,accession number AE005615,Smith-Waterman Score=145.
atgcggctggcgtccacgccctgggtgatcaacgcgctggaacggaatccgcacgttgctgggagagacgcatgttcaggtcgtgaccaccgtgctgtcggtataaccaatcacgttaaccgccgttttcggatactcttcagtaccattgccacgccgctgcgcctgctgctgcgccaatcagcgcgcctttaccgcgatctttctcgaagaagagagcgcacaaataccgcgcccagagagagccagactggggatgcaattactgttcggtcgcggcagtttggcgatgcgctgatggaactggatgtggtaatccacaagctgacgcctgctttcatggtggcgatcagcgccagttgttcatcattacgtccttcaccagctgcgcgtagtcgttgtcactttttgccgaccaggacgggtcaggtcagccgcatagccgttatattctgccccggcatccagcggaaagctgcgcatctacttccggttgcctggataggtccaagttttggggtaaatgcgagtacccgcaagcgtgttcggttaagcgccacaatgttgtgtaaggtacgtcggtatcacgatgaccggtcgcggccagttcgactcagttttgaaggagcgatagtaatgcaggtagtcgataacccctttgggttgatgttgctggcctcaatacccagttgcagcgcacgttccggcacggaccgatataaccgatattgccgcgcgcagcaggcagcaggctaccatgccatcggctttcggcagcgcgatcacttccacatcttcagtccagaagaggtcggcagcgaaaaactcgacgacaaaactattgccagcttccagcagcagctgtcggatatggctacaagttccagttcatcaccctggcagaatggggttaagtcgaagccaccgccaaccaccagacgggacggcacccggtttttcggcgataaaaaaccgcacattcgcgtggctggtggaacatacggttatgcggatgcactacacagtgaaggccggtaccgactactaggatcgaaagatgcagctggcaataccgcgctgcgcatggcgatgcagactgcgagcaacatatccgccgtgagaaagcgaactccaacatttgtacttccaggtactgctggcaaacatcgccagcctgtatgccgtttatcacggccggttggcctgaaacgtatcgctaaccgcattcaccgtctgaccgatatctggcggcgggcctgcaacaaaaaggtctga

SEQ ID NO: 25133 - DNA, 1167 bp, Homo sapiens
  SIMILAR (130)..(921): 841254mologous to Escherichia coli ostA/imp,accession number AB013134,Smith-Waterman Score=1138.
atggtatttgacccggtttcgctggcggccctgacgcgtaaagtcggacgcaaagtgcgttacgtcattgttctgcggggacaaattgtcacagggttacgtcactggtatgcacgccgacgcggtcacgatccgcgggcaatgagcctgaccgggagttatagcagtgtctgggctgaagacgacattcagtttgattcccgttttctggaattaaaaggcgacacaaaaattgatctgaagcgtttttccagccaggggtatgttgagcccggaaaatacaatttacaggtgacgaccggtgtcacatctcgcatatatgatgatgctgccgttgaacgttttaatatttccgttggtcaaatctactatttcacggagtctcgcactggcgatgacaacataacatgggagaatgacgacaaaacgggttcactggtgtgggcaggcgatacttactggcgtatctccgagcgttggggattgcgtggcgggattcagtacgatacacgtctggataacgtagcgaccagtaactccagcattgaataccgtcgggatgaagaccgtctggtacagctgaattaccgttacgccagcccggaatatattcaggctacgctgcctaagtactattccactgctgagcaatataagaatggtatttcgcaggtaggtgctgtcgccagctggccaattgccgatcgttggtccattgttggggcctactactacgacaccaatgctaacaagcaagccgactctatgttaggtgtgcaatacagctcctgctgctatgcaattcgcgtcggttacgagcggaagctgaacggttgggataacgataaacaacatgcggtatatgacaacgcaatcggctttaacatcgaacttcgcggcctgagctccaactacggtctggaaccaaatgttcaaatcgaggggatttctatggaagcgcgggaagcaaccgctacgggtgaatcatgcatgcgcgtcgatgccattgctaaggtcaccgggcgggcacgatatactgacgattatgttatggcgggcatgtgttatgcgaaatatgttcgtagccctatcggacatggttatgccgtaagtatttatgatgaacaaagccaaaattttgccggggcgtaccgggcgaaattttaa

SEQ ID NO: 25134 - DNA, 2427 bp, Homo sapiens
  SIMILAR (1926)..(1955): 901254mologous to Escherichia coli K12 orf, hypothetical protein,accession number AE000509,Smith-Waterman Score=49.
atgaaacggataataacaggatgcctgctgctgaacttcgccatggccgctcaggcagagtgtaatatctccagtagcatacaaaatatcgactatggcaaacgaagtgctgccatgcgccaagttgaccggggtaatacaacacaattagcagacagaacaatcacgctggtaatgcaatgcgatcaggacgctcatattcgtgttcagttgaataccgctaatatttccaacaacggatttggatttggcccgaatggttcattaaatctgatcgccagcgatgcattttcagtcgttcacgtgcagaataacctcgacgacaatactattgccagcttccagcaacacctgtcggatatgggctacaagttccagttcatcaccctggcaggtatccacagcatgtggttcaacatgtttgacctggcaaacgcctatgcccagggcgagggtatgaagcactacgttgagaaagtgcagcagccggaatttgccgccgcgaaagatggctataccttcgtatctcaccagcaggaagtgggtacaggcgtttacgccgcatccggcaattctctgctcctgatgagggcgctaaatgccgcgtggcctggaattattgattgctcaaaccattttgcaaggcttcgatgctcagtatggtcgattcctcgaagtgacctccggtgcgcagcagcgtttcgaacaggccgactggcatgctgtccagcaggcgatgaaaaaccgtatccatctttacgatcatcacgttggtctggtcgtggagcaactgcgctgcattactacacggccaaacggtgtaggcctgataagacgcgccagcgtcgcatcaggcaaccggctcgggcgttggatgtcggatgcggcgtgaccgccttgtctgacctaccggggtgccgcacttcacagcggtgtaggcctgataagacgcgccagcgtcgcatcaggcaaccggctcgggcgttggatgtcggatgcggcgtgaccgccttgtctgacctacggggtgccgcacttcacggcagtttagcgaactaccgcgttgtcaattttctcttccgccttccagacgcgatgattctctctgtccttcttcgttcgtgtccttttgtattccctcttctccgccgtttgcgtgctggtgcccccgtgggtccgtattgcactgggactcccatcactcctttgccatccacacggttgtttgccccattgccaaaccggtgttcgatggccggaatgtacggcggcctacaaccggtgccgcatccggcaattggtgcacgatgcctgatgcgatgcttgacgcatcttatcaggcctacaatgggtaccggatcgatggctgaagaggctctggggacgagtttcaagaggttatgtgcgcattatagccggatgcgatgctggcgcatcttatccggcctacggggagccaggccgaataaaatcgtatgccggataaggcgtttacgccgcatccggcctattttaaggctgcgttttccccggcattcgcgggtcgtctttatattcggcggtggcaatccacgccgcgcaaaacagcgtcaaacgggcgaagaagtagaaaaatgccatcagccccagcacggaaccaaatgctgcgccagagggggatttgctgcatgccttgtcttcgaatacgtagtggtcttctggacctcgctacccgactctttttgccgaaagagttttccaacccgtattcgcggatcaatggtcccctcgctgtgggatttcccacccggggtcgatggccgtaaagggaagaccagttggaacggggtcccggggccgtgtgtcacttgtggtctgggcttaacgtgccctgaatctccgtgttgtcccgggctttccctgggggatgggtaccctgaaaaggtgtctgtgggaccaccaatcccgctaaaatttcaggccattctgcaggcatttcacgagatcttcggcgaaggatcctgccatattgcatccgttgccgtcgagagcggtgtaccggaacagccctttggcagtgaggaaacgcgcgctggcgcacgaaatcgggtagccaatgcccgccgtttacttccagaggctgatttttgggtggcgattgaagctggcatcgatggtgacagcactttcagttgggtggtgattgaaaacgccagccagcgcggcgaggcgcgttcggctactttgccgttgcctgcggtgattctggaaaaagtgcgtgaaggtgaggcgcttggtcccgtgatgtcgcgttataccggtattgatgagattggtcgtaaggaaggggcgatcggcgtgtttaccgccgggaaactcactcgcgccagcgtctatcaccaggcggtgatcctggcgctgagtccgtttcataatgccgtgtattaa

SEQ ID NO: 25135 - DNA, 1197 bp, Homo sapiens
  SIMILAR (1149)..(643): 941254mologous to Escherichia coli K12 putative pectinesterase,accession number AE000180,Smith-Waterman Score=816.
ttaacggcggtattgcaggatcacggtacgctggcagagcatgatatctatattgccggacgttttgagatggcgaaaattgcccgcgatctgttttgcagtgagcgtaatgcgcgggaagatcgcctgtttggcgatgcgtttgcatttattgcacatcctccattctttggccagaaccactctgttgttggtggttgcagtgttgaatactgggtggttgcagtgtgggaaggaatactgggtggttgcagtgttgaaattggaagttggactggtggcaccacctcgaggcccgggtctcgatttaaccttgtgttcccgttctaccaaaaagtcgattccccccctttgttccctcgcaagggaaaagacagctgcctgctgtatgcaaccaaatctaatcccaaaagcttggttctgccctgccctggtcgcacataacatcttttcttcttcttcttcctcttcttcttcttcttcttcctcttcttcttcttcttcttcttcttcctcttcctcctcttcctcctcttcctcctcttcctcctcttcctcttcttcctcttcttcttcctcttcttcttcctcttcttcttcttcttcttcttcttctttttttttttttgacagggtcttattcttcgcctctgcaaccactttactacccacgccgcggttattgtattcccacatgcggttgtagttagtgtcattcagattgcgctgtatttcgtcgttatcatctacgctgccggtattacccgcaaacggacgattagagatcaccgcatcggcccacggtttagccgtgttaaaaccttcgttgatggcgctatcacggatcaccacctgaccgttggtattggcatcaacatccagcgagcggcccagttgcgccacaccatcaccgaaagcattgaaacggctgtttacggcgaggaaaccgtagtaaatgttggacagcgtagccggtgcaaacacatacgcttcttgctgagtacgtgagttcaccacgcggaattcggtgttatcgaacaccactgcgccgcgaccagaaacgatattcacattcccttcaatgtagctgttggtcaccagcgtacgcggctgacgatcggttccacacggtctgccaccgttgttggtgcacaagggttttggcacgaaagttacgtgtaatgtgctggcccacat

SEQ ID NO: 25136 - DNA, 2922 bp, Homo sapiens; identical to SEQ ID NO: 2239
  SIMILAR (2182)..(2889): 991254mologous to Escherichia coli yejP,accession number U00008,Smith-Waterman Score=1203.

SEQ ID NO: 25137 - DNA, 1669 bp, Homo sapiens
  SIMILAR (1667)..(561): 931254mologous to Escherichia coli ostA/imp,accession number AB013134,Smith-Waterman Score=1822.
ttagcgattatcgagctgagcgcgaactttattcagctcggtggtgttgattcgatagggctggccattgacggacttgataagttttttggttttgagttttttgaagacggcgagcgtgcagtcggtcagcaacagcccttcgcggctgtagcattcaacggaagtgacgcggcctgaagaatcgcggacgtgcgcaatacgtctaccgcggtgtccgcattcgatttcggcgcattgataatcagtccggcccagaccgtagttggagctcaggccgcgaagttcgatgttaaagccgattgcgttgtcatataccgcatgttgtttatcgttatcccaaccgttcagcttccgctcgtaaccgacgcgaattgcatagcagcaggagctgtattgcacacctaacatagagtcggcttgcttgttagcattggtgtcgtagtagtaggccccaacaatggaccaacgatcggcaattggccagctggcgttctgtcctacctgcgaaagcacgcattcttatatgtgatcagcaagtgggatagtacttacacacgcgtagcctggttatattccggactggcgaagcgggaattcagctgtaccagacggtcttcatcccgacggtattcaatgctggtgatactggtcgctacgttatccagacgtgtatcgtactgaatcccgccacgcaatccccaacgctcggagatacgccagtaagtatcgcctgcccacaccagtgaacccgttttgtggtcattctcccatgttatgttgtcatcgccagtgcgagactccgtgaaatagtagatttgaccaacggaaatattaaaacgttcaacggcagcatcatcatatatgcgagatgtgacaccggtcgtcacctggttagcggaggcaatacgggcaagaccgccgtaagtccggtcccggaacaggccagagtagtcagattgcagcagagacgagtcgtagctatagatgtcgctctgatcgcgatacggcacgtacaaatactgcgcgcgcggttccagcgtttgggtataacccggagccagcatttccatatcgcgttcaaagaccattttgccgtcaactttgaattgcggcattaccgcggttaacaggatgtcgtccagcgttgggtcgtgatttccggacatataccagtcaagattggtttgctgataatgggttgccagcaacttcgctttggtattgatgctgccccagttattacagagcggcaaattgatggtcggttccaggtgaacacgggttgcttcaggcatgtcgtctctggtggtaacaaagtgcactgcctggccgtaaatacgcgtatcaaacggaccaacatcattctgggagtaattaacgtctaactgcggctctgccgagtagctactggtgttctgttcgctgaaaacctggaactgcttggttgaaacggtggcattgaagttttgcaccgcatagccaacgctgaatttttgcgttgcgtagccgtcagtactggaaccgtacttgttatcgaaatcattgaagtagctaggatcgctgaccttggtgtagtcgacgttgaaacgccacacctgatccatgaccccggagtggttccagtagaataaccaacgacgtgaactgtcatcgttcgggtgttcat

SEQ ID NO: 25138 - DNA, 2690 bp, Homo sapiens
  SIMILAR (37)..(1665): 911254mologous to Escherichia coli ostA/imp,accession number AB013134,Smith-Waterman Score=2681.
  misc_feature (1)...(2690): n = a,t,c or g
atgctgcatgcctgtaggtcgactttgaggatccccttgaggaaacaacgtggcgaaaaccgctataccattctggataacggtagctttacctcctgtctgccgggttctgacacctggagcgtggtaggtagcgaaattattcatgaccgcgaagaacaagttgcggagatctggaacgcccgctttaaggtgggtccggtaccgatcttttatagcccctatttgcagttgccggtgggtgacaaacgtcgctctggtttcttgatcccgaacgccaagtacaccaccaccaactactttgagttctacctgccatattactggaacatcgcgccaaatatggatgccaccatcacgccgcattatatgcatcgtcgtggcaacatcatgtgggagaacgaattccgctacctctcccaggcgggcgctggcttgatggaactggactatctgccttcagataaagtctatgaagatgaacacccgaacgatgacagttcacgtcgttggttattctactggaaccactccggggtcatggatcaggtgtggcgtttcaacgtcgactacaccaaggtcagcgatcctagctacttcaatgatttcgataacaagtacggttccagtactgacggctacgcaacgcanaaattcagcgttggctatgcggtgcaaaacttcaatgccaccgtttcaaccaagcagttccaggttttcagcgaacagaacaccagtagctacttcgcagagccgcagttagacgttaattactaccagaatgatgttgtgcactttgtaaccaccagagacgacatgcctgaagcaacccgtgttcacctggaaccgaccatcaatttgccgctctctaataactggggcagcatcaataccgaagcgaagttgctggcaacccattatcagcaaaccaatcttgactggtataactccagaaacacgaccaagctggacgaatccgttaaccgcgtaatgccgcaattcaaagttgacggcagaatggtctttgaacgcgatatggaaatgctggctccgggttatacccaaacgctggaaccgcgcgcgcagtatttgtacgtgccgtatcgcgatcagagcgacatctataactacgactcgtctctgctgcaatctgactactctggcctgttccgggaccggacttacggcggtcttgaccgtattgcctccgctaaccaggtgacgaccggtgtcacatctcgcatatatgatgatgctgccgttgaacgttttaatatttccgttggtcaaatctactatttcacggagtctcgcactggcgatgacaacataacatgggagaatgacgacaaaacgggttcactggtgtgggcaggcgatacttactggcgtatctccgagcgttggggattgcgtggcgggattcagtacgatacacgtctggataacgtagcgaccagtaactccagcattgaataccgtcgggatgaagaccgactggtacagctgaattaccgttacgccagcccggaatatattcaggctacgctgcctaacgtaaaccaccacataactatggagcatctgcacatgaaaacccgtacacaacaaattgaagaattacagaaagagtggactcaaccgcgttgggaaggcattactgcgcccatacagtgcggaagatgtggtgaaattacgcggttcagtcaatcctgaatgcacgctggcgcaactgggcgcagcgaaaatgtggcgtctgctgcacggtgagtcgaaaaaaggctacatcaacagcctcggcgcactgactggcggtcaggcgctgcaacaggcgaaagcgggtattgaagcagtctatctgtcgggatggcaggtagcggcggacgctaacctggcggccagcatgtatccggatcagtcgctctatccggcaaactcggtgccagctgtggtggagcggatcaacaacaccttccgtcgtgccgatcagatccaatggtccgcgggcattgagccgggcgatccgcgctatgtcgattacttcctgccgatcgttgccgatgcggaagccggttttggcggtgtcctgaatgcctttgaactgatgaaagcgatgattgaagccggtgcagcggcagttcacttcgaagatcagctggcgtcagtgaagaaaatgcgtcacatgggccgcanagcaagcgatcagccgtggcttgcgtatgcgccatatgctgacctggtctggtgtgaacctccaccgccggatctggaactggcgcgtcgttttgcacaagctatccacgcgaaatatccgggcaaactgctggcttataactgctcgccgtcgttcaactggcagaaaaacctcgacgacaaaactattgccagcttccagcagcagctgtcggatatgggctacaagttccagttcatcacctctggcaggtatccacagcatgtggttcaacatgtttgacctggcaaacgcctatgcccagggcgagggtatgaagcactacgttgagaaagtgcagcagccggaatttgccgccgcgaaagatggctataccttcgtatctcaccagcaggaagtgggtacaggttacttcgataaagtgacgactattattcagggcggcacgtcttcagtcaccgcgctgaccggctccactgaagaatcgcagttctaa

SEQ ID NO: 25139 - DNA, 1698 bp, Homo sapiens
  SIMILAR (604)..(1404): 981254mologous to Escherichia coli O157:H7 isocitrate lyase,accession number AE005633,Smith-Waterman Score=1388.
tgctcagccagatgctgggcgaagagatgaaagtcattgccagcgaactgggcgaagaacgtttctcccaggggcgttttgacgatgccgcacgcttgatggaacagatcaccacttccgatgagttaattgatttcctgaccctgccaggctaccgcctgttagcgtaaaccaccacataactatggagcatctgcacatgaaaacccgtacacaacaaattgaagaattacagaaagagtggactcaaccgcgttgggaaggcattactcgcccatacagtgcggaagatggggggaaattacgcgggtcagtcaatcctgaatgcacgctggcgcaactgggcgcagcgaaaatgtggcgtctgctgcacggtgagtcgaaaaaaggctacatcaacagcctcggcgcactgactggcggtcaggcgctgcaacaggcgaaagcgggtattgaagcagtctatctgtcgggatggcaggtagcggcggacgctaacctggcggccagcatgtatccggatcagtcgctctatccggcaaactcggtgccagctgtggtggagcggatcaacaacaccttccgtcgtgccgatcagatccatggtccgcgggcattgagccgggcgatccgcgctatgtcgattacttcctgccgatcgttgccgatgcggaagccggttttggcggtgtcctgaatgcctttgaactgatgaaagcgatgattgaagccggtgcagcggcagttcacttcgaagatcagctggcgtcagtgaagaaatgcggtcacatgggcggcaaagttttagtgccaactcaggaagctattcagaaactggtcgcggcgcgtctggcagctgacgtgacgggcgttccaaccctgctggttgcccgtaccgatgctgatgcggcggatctgatcacctccgattgcgacccgtatgacagcgaatttattaccggcgagcgtaccagtgaaggcttcttccgtactcatgcgggcattgagcaagcgatcagccgtggcctggcgtatgcgccatatgctgacctggtctggtgtgaaacctccacgccggatctggaactggcgcgtcgctttgcacaagctatccacgcgaaatatccgggcaaactgctggcttataactgctcgccgtcgttcaactggcagaaaaacctcgacgacaaaactattgccagcttccagcagcagctgtcggatatgggctacaagttccagttcatcaccctggcaggtatccacagcatgtggttcaacatgtttgacctggcaaaagcctatgcccagggcgagggtatgaagcactacgttgagaaagtgcagcagccggaatttgccgccgcgaaagatggctataccttcgtatctcaccagcaggaaaatcgcagttctaagcaacaacaaccgttgctgactgtaggccggataaggcgttcacgccgcatccggcaatcggtgccccggaccggcatcggttgcgcatcacgaaggtttaacacggctaaaccgtgggccgatgcggtgatctctaatcgtccgtttgcgggtaataccggcagcgtagatgataacgacgaaatacagcgcaatctgaatgacactaactacaaccgcatgtgggaatacaataaccgcggcgtgggtagtaaagtggttgcagaggcgaagaagtaa

SEQ ID NO: 25140 - DNA, 517 bp, Homo sapiens
  SIMILAR (96)..(458): 211254mologous to Xenopus laevis apical protein,accession number Z14997,Smith-Waterman Score=89.
gtctgtcgatggcactgaacaagtcggtagtaaataacgattcgcaaagggtatccgaaccgcgttcgtcagcagcggcaacgggcatttgggtctatgaacgttatcctgccgtatatggtgcgctgccgtacaccatcgatagtaagacaggggaagttatgtggaaatatcaggtagaaaacaacctgatgacaaccgaagctggagttgcagctgctgaagatgagatggcaacaggaacgcgttatgctttattgagaggcgatcaaaacagagattctctgaaggctgcaagagaaatttctcgccgcgttctcgggctgaagagtgtactaatccgacatatcactatgagctcactcctgaaatatcgtcatgacacggagatccggaaaactgcgatggtgcagcatgcgaatttagccaccaacattcagcgtctgtatcagcatgagctctactaccggaccaatggtcgcaaaggtgagcgtctgagcagcgtcgatctggaaac

SEQ ID NO: 25141 - DNA, 1463 bp, Homo sapiens
  SIMILAR (903)..(736): 961254mologous to Homo sapiens KB07 protein,accession number AF064606,Smith-Waterman Score=325.
ttagcccagaactttagcaacaacgcccgcgccaacggtacggccgccttcacggattgcgaaacgcagaccgtcgtccatcgcgatcgggtggatcagggtaacaaccattttgatgttgtcgcccggcattaccatctctacgccttcctgcgaaaagagcggcagctcatcttcttcaaattcaaatacgcccgcatccaatacgccggctaatggcggttcggctacaccagcacagggcactgttccgtctaattcttctgtagttgcctcctctgcaagcatgtgtcttatgttactacctaatgaaacgctcttcttaagcaccggattaaaggtgcgtttaatcatacgctcgccatcagacaatcctggagtgtccctttcaggccatccatctcccatggacagaaggctcttggcttggctaatgactgctgactgacgtccagacttaaccccagacctcagctccagtagcagggacgctgtccaaggtcttcttaccgccctccaggtactcaggccacagagagtcttgagagaggccccaggacctagggagatcccctcgagttgcaacagcacgtccccgacgccgcgctggccgcgctccaggatctctccggcaccgggaccgatgcaggggccacggggagcggtggtgtccagggcccggtcggaagtcagcaagtccagcttcagcgcgtttccctcgaggcgcccttgagcaagtctgtggccattcttggtgtagaagcaggtgccattgatgaggttgacacagcagccgatcacgtctcctgtggtgaatgtgggaccatagggctggccagtccctgaggagcagaacgaatgcccatcatcaccatggtaaccataggaatgtttgtcccaaccatgtggactctgtgaggtgctctcaagcacccgtagccggggctgctccgtgggcagcaagctgaagcggtccacctggagatagaactctgcgggcgcgccgccctcagcgacctggacatgaaccccgcagtcctgcagcagcagcagccggccctctgtcccgcggaagccgaactccttctcctcccagtccgaggtgtccagggcctcccgcgtcaccaggcatcggacactgtgggtcccgtcagacacaagcagcgtggccccgacgtcggacgtatcaggggcgtgggatgggcccgcgaccgcggcctcggcgtcctgtagtacgttctccataggcgcggtcatataggctatacatgtacccactctctttacgcacatgagcatccttcctccataagaatgcccattggtgtgattggcccattcttgcttgccctgtccctgaggcaccagggttttatgcagaggagggatacggtagatcatgctggtgtccacctgaaggtggtactggagccaaattggagcaaaagaacccaggtaggagg

SEQ ID NO: 25142 - DNA, 476 bp, Homo sapiens
  SIMILAR (1)..(474): 1001254mologous to Escherichia coli elongation factor Tu,accession number J01717,Smith-Waterman Score=809.
atcatcaaagttggtgaagaagttgaaatcgttggtatcaaagagactcagaagtctacctgtactggcgttgaaatgttccgcaaactgctggacgaaggccgtgctggtgagaacgtaggtgttctgctgcgtggtatcaaacgtgaagaaatcgaacgtggtcaggtactggctaagccgggcaccatcaagccgcacaccaagttcgaatctgaagtgtacattctgtccaaagatgaaggcggccgtcatactccgttcttcaaaggctaccgtccgcagttctacttccgtactactgacgtgactggtaccatcgaactgccggaaggcgtagagatggtaatgccgggcgacaacatcaaaatggttgttaccctgatccacccgatcgcgatggacgacggtctgcgtttcgcaatccgtgaaggcggccgtaccgttggcgcgggcgttgttgctaaagttctggg

SEQ ID NO: 25143 - DNA, 1221 bp, Homo sapiens
  SIMILAR (1212)..(103): 851254mologous to Escherichia coli ORF_f848,accession number U28377,Smith-Waterman Score=1641.
ttaaattagagctcggtgcccactgcgggttccaggtataaccacctccgagcaccacgatatagtccactttttgcgaattattccatgtcggataggtgctgcaaaccatttggtcggattcgagtacaggctgatggtttcagtaacgttctgtccctcttccgatactgctcccggatacttctcgacatcaactttgatgttcagatcccaccaggaacggcccagcatcaggcgtgtcagcggtttttccatatagttgagcgggtagctcgggttcatcatgcccgctttgctgctaccgtcaccgtagatcatgttgttatcgaccagcgattttttcagatctgcagaacacttggtgccgcctgcataggcatcattggcgtagcagttcaggaactcggtgaacgttttaaagcccagctcgtcatttttgccttcttcataacgatagctcgtatcgttccacagccagaccgacatgttctggtacagacgttccagatcgacgctgctcagacgctcacctttgcgaccattggtccggaagtagagctcatgctgatacagacgctgaatgttggtgcctaaatccgcagcctgcaccatcgcttttgcagtgtcggcgttaaggcttagttgcgtatactgtggaacatacatgccaccagtaaccggaacccccgtgccaggacgatattccaggcagttgacctcatagtgatatgccggattagtacactctttcagccccgggaacgcggcgaaaattttctccttcgcagccttcagagaatcctctgttttatgatcggcctcatcaataaaggcataacgcgtttcctgtttgccatctacatcttccagccagctggcaacttccagcttcggtttgtcatcaggtttgttttctacctgatatttccacttaacttcccctgtcttactatcgatggtgtacggcagcgcaccatctacggcaggataacgttcatagaagcgacatgcccgttgcgcgctgctgacgaacgcggttcggataccttgcggatcgtaaactgcctcatcgagcaaagcctggctggcggtgacaccggtaacaattttttgcaccgtctctttgccttccacctgcaaaccattcggcgcgtaatcactaatcgccgcgctgttcagtttttcgttaatcagttgttccagttcggtgtttttcat

SEQ ID NO: 25144 - DNA, 1624 bp, Homo sapiens
  SIMILAR (1)..(822): 1001254mologous to Methylomonas aminofaciens transposase,accession number AB026428,Smith-Waterman Score=1460.
atgtgcgaactcgatattttacacgactctctttaccaattctgccccgaattacacttaaaacgactcaacagcttaacgttggcttgccacgcattacttgactgtaaaactctcactcttaccgaacttggccgtaacctgccaaccaaagcgagaacaaaacataacatcaaacgaatcgaccgattgttaggtaatcgtcacctccacaaagagcgactcgctgtataccgttggcatgctagctttatctgttcgggcaatacgatgcccattgtacttgttgactggtctgatattcgtgagcaaaaacgacttatggtattgcgagcttcagtcgcactacacggtcgttctgttactctttatgagaaagcgttcccgctttcagagcaatgttcaaagaaagctcatgaccaatttctagccgaccttgcgagcattctaccgagtaacaccacaccgctcattgtcagtgatgctggctttaaagtgccatggtataaatccgttgagaagctgggttggtactggttaagtcgagtaagaggaaaagtacaatatgcagacctaggagcggaaaactggaaacctatcagcaacttacatgatatgtcatctagtcactcaaagactttaggctataagaggctgactaaaagcaatccaatctcatgccaaattctattgtataaatctcgctctaaaggccgaaaaaatcagcgctcgacacggactcattgtcaccacccgtcacctaaaatctactcagcgtcggcaaaggagccatgggttctagcaactaacttacctgttgaaaattcgaacacccaaacaacttgttaatatctattcgaagcgaatgcagattgaagaaaccttccgagacttgaaaagtcctgcctacggactaggcctacgccatagccgaacgagcagctcagagcgttttgatatcatgctgctaatcgccctgatgcttcaactaacatgttggcttgcgggcgttcatgctcagaaacaaggttgggacaagcacttccaggctaacacagtcagaaatcgaaacaatcttaccgggaaagtgtggacgtgcgatgagctggagatcatggctgacctgtgcgagcgtcatggtgtgcgggttatttccgatgaaatccatatggatatggtttggggcgagcagccgcatattccctggagtaatgtggctcgcggagactgggcgttgctaacgtcgggctcgaaaagtttcaatattcccgccctgaccggtgcttacgggattatagaaaatagcagtagccgcgatgcctatttatcggcactgaaaggccgtgatgggctttcttccccttcggtactggcgttaactgcccatatcgccgcctatcagcaaggcgcgccgtggctggatgccttacgcatctatctgaaagataacctgacgtatatcgcagataaaatgaacgccgcgtttcctgaactcaactggcagatcccacaatccacttatctggcatggcttgatttacgtccgttgaatattgacgacaacgcgttgcaaaaagcacttatcgaacatgaaaaagtcgctatcatgacccgcaacccatga

SEQ ID NO: 25145 - DNA, 894 bp, Homo sapiens
  SIMILAR (435)..(1): 1001254mologous to Escherichia coli OUTER MEMBRANE USHER PROTEIN PAPC PRECURSOR,accession number D90864,Smith-Waterman Score =744.
cgccatcgctttttgaccactgatgacggcaaatttgcggtagccaatggctccttcagttagcgtggcttgcaccaccgactgggttgcttcggcgttttccggcaatttgttgaggtcgatatacgcctgattgcgataataattgttaacgtcagaaacgacggctttaccaaacatattggtataaacagcagccccgttaccttccaccggaacatcggcaacgccatcggcatcaatcagcaggcgtgtcccgcccatattctgggtacggtgaagtgcgccgccgtgggtagtaagcgttgcgccgccctgtaacgacaagcccgcagaggtgtattgcccttcatggtagttcgcactgaggtcaacctgcgccagcgaaccatcatggctgtagtagccatcaacgctggtgtgtttgtcactggtgaaactgctggacgaaggccgtgcaagttcgaatctgaagtgtacattctgtccaaagatgaaggcggccgtcatactccgttcttcaaaggctaccgtccgcagttctacttccgtactactgacgtgactggtaccatcgaactgccggaaggcgtagagatggtaatgccgggcgacaacatcaaaatggttgttaccctgatccacccgatcgcgatggacgacggtctgcgtttcgcaatccgtgaaggcggccgtaccgttggcgcgggcgttgttgctaaagttcttgagcagctgcaaaaacaccagggaaataccattgaaattcgttacaccacgcatgaacaattcaaacaacaaaccgcagaaagtcaggcggtaattcgcagcggagaatgttctccgtatgcgaatatcattctctgtgctggcgtgacgttctgaggccgtcat

SEQ ID NO: 25146 - DNA, 2063 bp, Homo sapiens
  SIMILAR (1478)..(1627): 921254mologous to Escherichia coli malY,accession number M60722,Smith-Waterman Score=235.
atgaagaacttcatggagaacgtgctgcgctatctgtccgacgataaatggaagccggacgcgaaagccagcatgaccgtaggcaccaacctggatactgtctattttaaacgtcatggtcaggttacaggaaacagcgctgcgttcgacttccatccggattttgcgggcatctctgttgagcatttaagtagctatggcgatctcgatccgcaggaaatgccgctgctgatccttaacggctttgaatatgtgactcaggtgggtaacgatccttatgcaatcccgctgcgtgcagataccagcaaaccgaagctgactcagcaggatgtgaccgatctgatcgcctatctgaacaaaggtggatcggtgctgatcatggaaaacgtgatgagcaatcttaaggaagagagcgcgtctggttttgtgcgtctgttggatgccgcaggtctgtcgatggcactgaacaagtcggtagtaaataacgatccgcaagggtatccgaaccgcgttcgtcagcagcgcgcaacgggcatttgggtctatgaacgttatcctgccgtagatggtgcgctgccgtacaccatcgatagtaagacaggggaagttaagtggaaatatcacgtagaaaacaaacctgatgacaaaccgaagctggaagttgccagctggctggaagatgtagatgggaacaggaaacgcaactttagcaacgacgcccgcgccaacggtacggccgccttcacggattgcgaaacgcagaccgtcgtccatcgcgatcgggtggatcagggtcacaaccattttgatcttgtcgcccggcattaccatctctacgccttccggcagttcgatggtaccagtcacgtcagtagtacggaagtagaactgcggacggtagcctttgaagaacggagtatgacggccgccttcatctcttggacagaatgtacacttcagattcgcacttgcccacagaatcctaccgggaaagtgtggacgtgcgatgagctggagatcatggctgacctgtgcgagcgtcatggtgtgcgggttatttccgatgaaatccatatggatatggtttggggcgagcagccgcatattccctggagtaatgtggctcgcggagactgggcgttgctaacgtcgggctcgaaaagtttcaatattcccgccctgaccggtgcttacgggattatagaaaatagcagtagccgcgatgcctatttatcggcactgaaaggccgtgatgggctttcttccccttcggtactggcgttaactgcccatatcgccgcctatcagcaaggcgcgccgtggctggatgccttacgcatctatctgaaagataacctgacgtatatcgcagataaaatgaacgccgcgtttcctgaactcaactggcagatcccacaatccacttatctggcatggcttgatttacgtccgttgaatattgacgacaacgcgttgcaaaaagcactctatcgatcaagaaaaagtcgcgatcatgccggggtatacctacggtgaagaaggtcgtggttttgtccgtctcaatgccggctgcccacgttcgaaactggaaaaaggtgtggctggattaattaacgccatccgcgctaaaaagagtgcgaccatgattgataccaccctgccattaactgatatccatcgccaccttgatggcaacattcgtccccagaccattcttgaacttggccgccagtataatatctcgcttcctgcacaatccctggaaacactgattccccacgttcaggtcattgccaacgaacccgatctggtgagctttctgaccaaacttgactggggcgttaaagttctcgcctctcttgatgcctgtcgccgcgtggcatttgaaaacattgaagatgcagcccgtcacggcctgcactatgtcgagctgcgtttttcaccaggctacatggcaatggcacatcagctgcctgtagcgggtgttgtcgaagcggtgatcgatggcgtacgtgaaggttgccgcacctttggtgtgcaggcgaagcttatcggcattatga

SEQ ID NO: 25147 - DNA, 371 bp, Homo sapiens
  SIMILAR (170)..(21): 701254mologous to Escherichia coli glutathione transferase,accession number D38497,Smith-Waterman Score=172.
attcagtttcaccgcgtatcccagcgcagaaccgtaaacagataggcatcagcaattgtaaatctttgccgcagatcccagtgctcaatccttcagtgcctcgttcacatattgcagttcttctccagctgcgcgcgaactgtcggtttgtactcttccggtgtatagggcgaaacagagcgggaaatactgtttaccggtgccagaactggcggtcggggacgctgtcggcaagatactgcataatcgctacgcttccgtcagcaaagtaccgtcatccagcagcaatgcaggcacctgcccctagggttaacggcaaagtaatcgtcaccgttttcgagacgttttttcataaatccacactgacgagg

SEQ ID NO: 25148 - DNA, 616 bp, Homo sapiens
  SIMILAR (246)..(19): 931254mologous to Escherichia coli K12 putative dehydratase,accession number AE000370,Smith-Waterman Score=360.
ctaaggatccctcacgcattgctcgacggcttcatctgccagagttgcgtcgccttgcatgatcccggttgggattttggtgtaaccttcccatgccgtgtcctgtcccccttccccgccgtgctgctgcgcgtgttgcatggtcaggcgaacggtatcgtcatagttcatatccgtgacgatgcactcggcaccgaggttcagaatggcgtcaacgcgttcctgagcagaacctttcggcatgtaatcaccgcattctgtccgagttgctgtgctgcccacgccacaccgcgcccgtggttgccgtcggtggtggtcgcgaaagtcattttttcgccgatggcatttttcaggtgcgccaagcattttgaaggcgttcagaccgaatcgttttgattcgtctttgacgagaattttcttcacaccaaaaaggtttgcgagatcgtccagcgcacaaagcggtgttgggcgataaccagctattttctggtggaactggcgcgccagtttggcctggctttgcgaaaagagcggtgatgtttcgccgttgaaaaatttgttatcggcgatatcaatcttcaatgcgaaacacggacatatactcatcatttggcct

SEQ ID NO: 25149 - DNA, 489 bp, Homo sapiens
  SIMILAR (223)..(2): 461254mologous to Escherichia coli glutathione transferase,accession number D38497,Smith-Waterman Score=128.
tcaccgcgtatgcccagcgcagaaccgtaaacagatagcatcagcaattgtaaatctttgcccgcagatccagtgctcatccttcaggcctcgttcacatattgcagcttcttctccagctgcgcgcgaactgtcgtttgtactcttccggtgtatcagggcgaaacagaggtgtgaaacctttagcagctcggtggcgatgtaattcagccattcgatggttttatagcgggaatactgtttaccggtgccagcaactggcggtcggggacgttgcttaaacccgcgcagcatctgcggcaggctctctttctctttcgtgcgccgcgcagttcctttggcgtaagtacccacttccatgacgtgctcaaaccgatatagatcggaatcagcgtaactcggaacggtgccgccacgcacatcgcctgaatggtcatcgacagcgtaccagttttcggatccagcaaagctccgtacgggaacgaccgc

SEQ ID NO: 25150 - DNA, 1065 bp, Homo sapiens
  SIMILAR (122)..(84): 1001254mologous to Escherichia coli K12 putative dehydratase,accession number AE000370,Smith-Waterman Score=81.
ctatgttttattaacataatacagtacaatgatcacatttttgtaaatcacgggtgcggcgcttagaactagtggatccccgaccaggttgggattttggtgtaaccttcccatgccgtgtctgtaccacttcccagccgtgctgctgcgcgtgtgcatggtcaggcgaacggtatcgtcatagttcatatccgtgacgatgcactcggcaccgaggttcagaatggcgtcaacgcgttcctgagcagaacctttcggcatgtaaatcaccgcattctgtccgagttgctgtgctgcccacgccacaccgcgcccgtggttgccgtcggtggtggtcgcgaaagtcattttttcgccgatggcatttttcaggtgctcaaatgacagcgtttcgatatcaagatgatatttttcacacaataattgagcgatggcgtacgcaccgccaagcattttgaaggcgttcagaccgaatcgtttggattcgtctttgacgagaattttcttcacaccaaaaaggtttgcgagatcgtccagcgcacaaagcggtgttgggcgataaccagctattttctggtggaactggcgcgccagtttggcctggccaagtgagaacgtagtgcctgttgatccaactgatgaaaaggttgccggatgatgtgaatcatccggcactggattattactggcgattgtcattcgcctgacgcaatgacacgcggctttcactctgaaacgctgtgcgtaatcgccgaaccagtgctccaccttgcggaaactgtcaataaacgcctgcttatcgccctgctccagcaactcaatcgcctcgccgaaacgcttatagtaacgtttgattaacgccagattacgctctgacgacataatgatgtcggcataaagctgcggatcctgagcaaacagtcgcccgaccatcgccagctcaaggcggtaaatcggcgaagagagcgccagaagttgctcaagctgaacattttcttcgttacccgtagctgagcgcgacgttggatttacaacgttcgtgactggtaccacagcccgatacat

SEQ ID NO: 25151 - DNA, 1716 bp, Homo sapiens; identical to SEQ ID NO: 7371
  SIMILAR (865)..(1362): 901254mologous to Escherichia coli yeiH,accession number U00007,Smith-Waterman Score=751.

SEQ ID NO: 25152 - DNA, 3036 bp, Homo sapiens
  SIMILAR (2442)..(1822): 981254mologous to Escherichia coli K12 putative dehydrogenase,accession number AE000370,Smith-Waterman Score=1063.
ttattcttcttctggctcgtcgtcaacgtccacttccggagcgatttcatcgtccccttccgcggcactgccgtcgatggtatccagatcttcctcgtcaaccggttcagcaacacgttgcagacccactacgttttcatcttccgcagtacggatgaggatcacgccctgggtgttacggcccacgatgctgatttccgaaacgcgagtacgtaccagcgtaccggcatcggtgatcatcatgatctggtcgcagtcatctacctgtaccgcgccaacaactaaaccgttacgttcggtaaccttgatggagataacccctttcgtcgcacgcgacttggttgggtattccgccactgcggtacgtttaccgtaaccgttttgcgttgcggtgaggattgcgccatcgccacgaggcacgatcagagagacgactttatcgccttcacttaccgggtacgcaacggtgactcgagaggacgtctctccggaccgtactgcgcatgaaacttccccctttttaactggcactgtgaagcgacttcgcgtgtgacactcttcgtaggatttccctgcacatcggaagtcttgcctgtccgagagggttaaggtgggataccatatgtaagcctcggggagatttcgtgaagtcaccggctggaagaagccttcaaagacgcagacatcgttatccgcagtcatgggcaccttacaaagtgatggaagagcgtactgtattgctgcgtgcgaacgatcacgaaggcttaaaagccactggaaaaacagtgtctggcacagaacgcgcaacacaaagactggcattgtactgaagagatgatggaactgacccgtgatggcgaagccctgtacatgcactgctggccagctgatatcagcggcgtatcctgtaaagaaggtgaagtgactgaaggcgtattcgaaaaataccgtatcgctacctacaaagaagccagctggaagccttatatcatcgccgcgatgatcctgtcccgtaaatacgccaaaccaggtgcactgctcgagcaactgctgaaagaagcgcaagaacgcgtgaaataacccctcgggccgatcagctggtcggccctcgcattgctggcgggctgtgctcacgattcgccctgcgttccggtttatgacgatcagggtcgtctggttcacaccaatacgggttttccaatccttgatccctgctggtgaacttctccggacaccaccgcgtgccaatctgagtttgttctgcactggcactggcgcgatatcagattcggtcccgcattgaaagttaagggtaattgtcacgctaccgccgaaatcgctgatgaagaacatatacatcaggtaatcgatcccgttcatattctgttcgataacttgcgtccccggatcctggcccgtttggggctcagccgcccggatagtttgctgaaccagaaaccgcagccggtgcaattgttggatattcgatgcagtatctgcgggggtatcggtagtggctttaacctgctctcccggacgcgctttttgcaggccgctgacaatgacttgatcgccagatttcagtccttcactaatcaaccatttatcgccaatcgcctgactggcaacgacagggcgcgcttcaacctgacttttatcgttaacaatcagcacggttgcatcaccacgcggtgtgcggctaacgcccctgttggtagcttggataagctggaggtgcttgccatactgctgccaggaatgccggggttgaatggcatcccgcatgtgggcaaaaaagcggtcctggttatgtgtgccgatcgcggcgtgcggggcgacatcttgcaggacagattcgctgatagcttccagcgtttgcaggtttaatggcgcattttgtgcagtctgttcggcatgttggcagcgaatcggcgttggcgcggcaacaccaaatgccaggcgtaattcgctgaaattgccgttatccagtcggcaatgtgcggcgcagccaatcgttgaaatatccattgcgtcgcgcatggcatatttaaaatgcgcgctgcccgcgtgttctttcggctgtggcggaaaatgaaaggcgacgaggatttcgtcatgctcaagagacactttgcccggcccggtgtgaaagccattaatcgggacgaaacgaacaccgcgcggggagtggatctccagtttcgcgtcataaattagcgttggcgtggcagaatctgcgctggtggcaccgttgcaaatatttccaccgtaggtagcgacgttacggatctgcggtccagcaatggacgtggccgcagcacataacgccgggagatgacgttgagttataggatcttctattagctgggtaaatgtcgttgcagagccgatacgtagcgagccatcttccgccagcgtaattccccgcagctccgccagattaccatcggagagtggcgcattccacgaaatacccatatttgcaccgcaggccaataacaaacgttcatcggtggcgcgcaggctagcggtattttcccgcacgagattattcatcgcactaccgcgctggcgacgcagggtatgaatgttgcgggccagtggctcgatttgcgcattttgctgtaaagaaaagaccaccgtcgccgcctgagcggtacgggcttcattgaacaggacttcgttattgttgaacagttgccagtgttccgatagcggcggcgcaccttccagtacagcaacattactcagaatgcgtttttcgtcgctgcgtggttggatctccgcctcttcgctttgaactaatgtccagataccattttgttgctgaacgctaagctgctgacgggcgctgacccctttttcgttgcaccagaaggcaatatccagcaaatgttggtcaccctgaaaacgcaaactggcaagaccaaaaagtgaacggtattcctcaagcaacaatgaaaattgtttatcgttattattttcgggattaattaccaaaagcgaacaatggtttaacctgctccatttattcat

SEQ ID NO: 25153 - DNA, 3345 bp, Homo sapiens
  SIMILAR (948)..(253): 991254mologous to Escherichia coli K12 putative dehydratase,accession number AE000370,Smith-Waterman Score=1207.
ctacagcgtgttgccttcccagacaacttcgcggtagtgcttcacgtcggtgtcgccttcagtgctgataaccagcaccacggcatctttgttcagcgccagtttttccatcaggctttgacgttgcgggtgataatgaaccgctgcgagaacgcccaaaccgacagcgccggattcaccggagatgatgcgcgggtcgttgccgtacggattacccagcacgcgcatacctaatgcggcaacgcgccaacggttgacgatgtcgcctttgacgccggagcgataaatacagtcagctttgtcaggttcaacaataatgctgtgcagattttgcgggctatagacgtcgaccagataacccagcacaccaccggccattgctccgacaccggcttgcagcagaacgtgcgtcggggttacgcccatttcacgcatttgctcgacggcttcatctgccagggttgcgtagccttgcatgatccaggttgggattttggtgtaaccttcccatgccgtgtcctgtaccacttcccagccgtgctgctgcgcgtgttgcatggtcaggcgaacggtatcgtcatagttcatatccgtgacgatgcactcggcaccgaggttcagaatggcgtcaacgcgttcctgagcagaacctttcggcatgtaaatcaccgcattctgtccgagttgctgtgctgcccacgccacaccgcgcccgtggttgccgtcggtggtggtcgcgaaagtcattttttcgccgatggcatttttcaggtgctcaaatgacagcgtttcgatatcaagatgatatttttcacacaataattgagcgatggcgtacgcaccgccaagcattttgaaggcgttcagaccgaatcgttttgattcgtctttgacgagaattttcttcacaccaaaaaggtttgcgagatcgtccagcgcataaagcggtaatacctggcccggccatacatgaatcatgaaagccagcatccgggccaggttggagcacccatttcgcatcatcaagcgacagttcggcttcgtgaaagccagatacaaggggttgctgaaaaacgataaccaactggcgatgttattcacgctggccaacgcttcgagatacttaacgccaaacaccagcgaaatgagcggcttgccgacgatcaacaccgcgagcgccaccagaataccgattccgcccgccagtaaaccggacttcacacctaacaaccacggtctggtggtgcgcggatctaaacgcatcacctctgggtaaaaacttttacccagcaaacccgctggcgttccggcggcgtcgaagaatgtcatggcgattttaaataacccggcggcagcgggtcctaacacgatccccaccaacactgtgctgcacgagttacgcgccgaccagatggagtgggcaatgttggttgaccagacaaaactccacgcgcctttaatgtatcgggcagactcaaacagattcaatttgaaggcgttatggatatttcggcggcgtaattcgcgcgcggcaaaccaccagtacatggtgccgccaaccagattcgacacgtaccaggcaataacaaaacccgcaaaaccaaagtcaaaataccaggctacgacgctccccgctgcgcgcagaacaggtttcgtcgcctgctgtacagcaattaaatcgaagcgatctaccggacgccaaatgccgtcggcgtggaggaagccttgaaggattgacgggcataaagggtgcagccaaaattggtctccgaccatgacgggcaggatggggtagggaggcccgaaatgccccggccgtaaaattccggaacggaccatctcgttctgttgctgtgtgccagagatacagcgccgcttcgtcggcttcgccggtacgaatacgaatgacgcgttgcaattcagcgacgaagatttgccgtcgccaatttttccggtgtaagccgcttttggcaggaaattgacgctgtattccgccccccggtacagctcggcatgccctttctgacgcccgaaacctttcacttcggtgacggtcaggccctgaataccaatggaagataacgcttcacgaacgtcttccagcttgaatggtttgattatcacggtcaccagcttcatagatcccctccggtcagaattcggtaatggttgcacgctggctgccagctcttcgcccgcaagttgcagttgatacatctgccagtagcgtccctgggccgccagcagttgctggtgagtgccctgctccacggcttgcccacgatgaagcaccagaatggtgtcggcatcacaatggtcgataagcggtgagcaatcacgccgcagagcatgttgaatcgcctgttcagtaccggagtcaatgctggcggttgcctcatcaaggatcaggatttgcggcgtctcgaccagcacgcgcgccagtgccagcagttgcttttgcccaactgagagattattcccctgctcgcccagcggcgtgtaaataccgtcgctcatgctacgcgccagctccgccagttgcacggtttccagcgcctgccagacgcgttcttcggagatatcccgacccagcgtcacgttggcgaggaaggtatccgccagcaccaccggatcttgctgcaccattgccacgccctggcgcagcgcgctgtgacttagcgaacttaatggacgaccatcaaggcgaatctcaccttccgttagcgggtaatagcccatcaataaactggcgagggtgcttttgccactgccggtatgcccgaccagcgccacaaaattgcgcgaaggcacagagagattaatgttctttaacaccagatagtcatcgcgataagcaaatgacacgttatcgacttcgatggtgccactctggtactgtggctgattaaggccgatgaccgggcgctgacggtggcatgaacatttttcatccatcaggtgcattggagaggtataccaggcataaggtgctgtttgttcatccagcagtcggataaggccgaacctaccagcggtgggggaccagttgtcccacggcgccacaacagcaatatcagccgcaaaatctgcctgctgcatgagctgttccagcccgtccatccggtgtgtgctgtgtcggtccgtcgtattatatactgaggattggcccatcagagaagcgggcgtaccaagatcgaccagcatatcgatgcgtaaacctaaggtgtacggcagctcgttacgacgggagatcatacaccccgcaggcttgacatcgacatcccagttcggctcgcatcccctcaaaggttctctcctattaacagcctcatgtgtccaggtcat

SEQ ID NO: 25154 - DNA, 3810 bp, Homo sapiens; identical to SEQ ID NO: 18337
  SIMILAR (766)..(1479): 911254mologous to Escherichia coli K12 putative cellulose synthase,accession number AE000430,Smith-Waterman Score=1146.

SEQ ID NO: 25155 - DNA, 2196 bp, Homo sapiens; identical to SEQ ID NO: 18338
  SIMILAR (88)..(1263): 991254mologous to Escherichia coli K12 putative cellulose synthase,accession number AE000430,Smith-Waterman Score=2104.

SEQ ID NO: 25156 - DNA, 1878 bp, Homo sapiens; identical to SEQ ID NO: 18339
  SIMILAR (1710)..(757): 991254mologous to Escherichia coli outer pore protein E precursor,accession number U70214,Smith-Waterman Score=1662.

SEQ ID NO: 25157 - DNA, 3122 bp, Homo sapiens
  SIMILAR (2100)..(2801): 841254mologous to Escherichia coli O157:H7 putative carbamoyl transferase,accession number AE005517,Smith-Waterman Score=993.
atgggcattgtggcatctgcatctgtacaggctgcagaaatatataataaagacggtaataaactggatgtctatggcaaagttaaagccatgcattatatgagtgataacgccagtaaagatggcgaccagagttatatccgttttggtttcaaaggcgaaacacaaattaacgatcaactgactggttatggtcgttgggaagcagagtttgccgcctggaccgatatgttcccggaatttggtggcgattcctcggcgcagaccgacaactttatgaccaaacgcgccagcggtctggcgacgtatcggaaaacgacttcttcggcgtatcgatggcctgaacttaacctgcaatatcacagatgcacatctgcggcgcgcgccatgctgctctccgggcgaccggtgatgcagattaacgagaggacagcagtgcgccgacagatgactgtgtatctgcgcgtagagcggatccacgagatagatccgttagtatctttgtcacacagcatgagtgtgatccccatagatgtggagcggccaatcgccgccgccccctgcacccccgggctctggcgaacaaaaacgccgctgcgcgtgccctcgacttatcccttacggctaccgggtcgggcgcgagtagtgtgtcatcgcacatttcgacttcatctttgcaaggactgggttttcatgttttctgggctgttaatcattctggttccactgattgtgggttacctcattccgcttcgccaacaagctgcgttaaaagttattaatcagctattaagctggatggtttaccttattctcttttttatgggtatcagtctggcgtttctcgataaccctcggccatatcttgccgacagcgtccccgaccgccagttgctggcaccggtaaacagtatttcccgctataaaaccatcgaatggctgaattacatcgccaccgagctgcataaaggtttcacacctctgtttcgccctgatacaccggaagagtacaaaccgacagttcgcgcgcactcggagaagaagctgcaatatgtgaacgaggcactgaaggatgagcactggatctgcgggcaaagatttacaattgctgatgcctatctgtttacggttctgcgctgggcatacgcggtgaaactgaatctggaagggttagagcacattgcagcatttatgcaacgtatggctgaacgtccggaagtacaagacgcgctgtcagcggaaggcttaaaaggatcccgtcatttgagtgccggggcgcggcggttgatcctcggtatcatcgtcaccttctcgctgattctggcgttaatctgcgttactcagccgtttaacccgctggcgcagtttatcttcctgatgctgctgtggggggtagcgctgatcgtacggcggatgccggggcgcttctcggcgctaatgttgattgtgctgtcgctgaccgtttcttgccgttatatctggtggcgttacacctctacgctgaactgggacgatccggtcagcctggtgtgcgggcttattctgctcttcgctgaaacgtacgcgtggattgtgctggtgctcggctacttccaggtagtatggccgctgaatcgtcagccggtgccattgccgaaagatatgtcgctgtggccgtcggtggatatctttgtcccgacttacaacgaagatctcaacgtgacgccagatgaactgaaacaagtactggacgttgccgcagcattaaaagcactgcgtgctgaaaacatctcaaccaaagtctttaatagtggattaggtatttccgtattccgcgacaactccacccgtacccgcttctcttatgcttccgcgcttaacctgctcggccttgcacaacaagatctcgacgaaggcaaatcacaaatcgctcacggcgaaaccgtgcgtgaaaccgccaatatgatctccttctgcgccgacgctattggtattcgcgacgatatgtatctgggcgcaggcaacgcctatatgcgtgaagttggcgctgcacttgatgacggttacaagcagggtgtactggcacaacggcccggctttagtgaacctgcaatggcggaattgaccacccgactcagtcaatggctgacctcgcgtggttacgtgaacactttggttcactggaaaacctgaaaggtaaaaaaatcgccatgacctgggcctactctccaagctatggcaaaccgctctctgtaccacaaggcatcatcggtctgatgactcgcttcggtatggatgtcaccctggcccattccggaaggctacgacctgatcccggatgtggttgaagtggcgaaaaacaatgctgaaagcctccggtggtagcttccgtcaggtcaccagcatggaagaagccttcaaagacgcagtacatcgtttatccgaagtcatgggcaccttacaaagtgatggaagagcgtactgaattgctgcgtgcgaacgatcacgaaggcttaaaagcactggaaaaacagtgtctggcacagaacgcgcaacacaaagactggcattgtactgaagagatgatggaactgacccgtgatggcgaagccctgtacatgcactgcctgccagctgatatcagcggcgtatcctgtaaagaaggtgaagtgactgaaggcgtattcgaaaaataccgtatcgctacctacaaagaagccagctggaagccttatatcatcgccgcgatgatcctgtcccgtaaatacgccaaaccaggtgcactgctcgagcaactgctgaaagaagcgcaagaacgcattgatatcgccgataacaaatttttcaacggcgaaacatcaccgctcttttcgcaaagccaggccaaactggcgcgccagttccaccagaaaatagctggttatcgcccaacaccgctttgtgcgctggacgatctcgcaaacctttttggtgtgaagaaaattctcgtcaaagacgaatcaaaacgattcggtctgaacgccttcaaaatgcttggcggtgcgtacgccatcgctcaattattgtgtgaaaaatatcatcttgatatcgaaacgctgtcatttgagcacctgaaaaatgccatcggcagaaaaggaggataa

SEQ ID NO: 25158 - DNA, 409 bp, Homo sapiens
  SIMILAR (395)..(201): 571254mologous to Escherichia coli glycogen phosphorylase (AA 1 - 790),accession number X16931,Smith-Waterman Score=142.
atgttcagcatcgcttttgcggtccaccttcctgaagctcgtagagttcatcgactttatcctgacaatcgacatactgcgataatccgccagtacctgtatcacgcggtttgtagccctgacgacgcagttcttccacttcttccgctggttaccaaaaataaagatattgtcagcaccgacatgatccagcatctcgcattcgcaccgtccaacgtaccgatagtcagcgcaccgttaagcgcaaattcatgttactggtgccggaagcttccgtccctgccagcgaaatctgttagacagatctgccgccggaatgatcaactgcgccaggctaacgctgtagtcgggatgaacacgactttcagcttatcgccaatctgcggatcgttgttatcactttcgctac

SEQ ID NO: 25159 - DNA, 473 bp, Homo sapiens
  SIMILAR (196)..(2): 551254mologous to Escherichia coli alpha-glucan phosphorylase (EC 2.4.1.1),accession number J03966,Smith-Waterman Score=125.
tatcacgcggtttgtagccctgacgacgcagttcttccacttcttccgctggttaccaaaaataaagatattgtcagcaccgacatgatccagcatctcgcattcgcaccgtccaacgtaccgatagtcagcgcaccgttaagcgcaaattcatgttactggtgccggaagcttccgtccctgccagcgaaatctgttagacagatctgccgccggaatgatcaactgcgccaggctaacgctgtagtcgggatgaacacgactttcagcttatcgccaatctgcggatcgttgttatcactttcgctaccttcgcctgatgcacagcgtgattaccattgggaaatcacagtgttgttgcagctcattaagcaggctaaggtggtgcgccagttacggcccaggtgttcgtccagcacggctgaaagcgatggttcgctaccgccagccagcgacgcggcgtcacaccgttg

SEQ ID NO: 25160 - DNA, 1428 bp, Homo sapiens
  SIMILAR (1)..(438): 971254mologous to Escherichia coli alpha-glucan phosphorylase,accession number U18997,Smith-Waterman Score=751.
atggtgcaatcgttgtttgccgactttgcgaaaatcttcccgggtcgtttcaccaacgtcaccaacggtgtgacgccgcgtcgctggctggcggtagcgaacccatcgctttcagccgtgctggacgaacacctgggccgtaactggcgcaccgaccttagcctgcttaatgagctgcaacaacactgtgatttcccaatggttaatcacgctgtgcatcaggcgaactcggagaacaaaaagcgtctggcagagtatatcgcccagcagctgaatgtggtggtgaatccaaaggcgttgttcgatgtacaaatcaaacgtattcacgaatacaaacgtcaattgatgaatgtgttgcatgtgattacccgctataaccgcatcaaggccgacccggatgcgaagtgggtaccgcgcgtgaatatttttggcgcgaaagtgatcaacaacgatccgcagattggcgataagctgaaagtcgtgttcatcccgaactacagcgttaccctggcgcagttgatcattccggcggcagatctgtctgaacagatttcgctgggcaggacggaagcttccggcaccagtaacatgaagtttgcgcttaacggtgcgctgactatcggtacgttggaacgtgcgaatgtcgagatgctggatcatgtcggtgctgacaatatcttatttttggttacacagcgggagagtgaagactgcgtcaaaaaaggcatcgaggttccacaaacccagcaaggggacattggcgcgaaagatatcccctcctggcggcggatatgcaaagttttactcaataacgattactggtgtcgggcattatcatttagccccacaaaatcgaagaactatcagcgttataacgaacggataaaaggaaaacgtcaggatttaacgcaatttctcgccagcttgccggaagatgatcgcatcaaagcgattaatgaaatccgcatggcgatccatcaggttagcccctttcgtgaagagccagtggattgcgttctgtgggttaaaaacagccaacttatgcctaatgattacaacccaaacaacgtggcaccacccgaaaaaaaactgctgcaaaaatccattgaaatagatggttttacccaacccattgtggtcacacatacggataaaaatgccatggaaatcgtggatggttttcaccgccatgaaattggtaaaggctcatcatcattaaaattacgcttaaaaggttatttgccggtgacctgtctggaaggtacgcgtaatcaacgcatcgccgcgactattcgtcataatcgcgctcgtggacgccatcaaatcaccgccatgtcggaaatcgtccgtgaacttagccagttgggatgggacgataataaaattggcaaagagctgggaatggacagcgacgaatgctgcgcctga

SEQ ID NO: 25161 - DNA, 3159 bp, Homo sapiens
  SIMILAR (3099)..(2401): 991254mologous to Escherichia coli Glucose-resistance amylase regulator (Catabolite control protein),accession number D90770,Smith-Waterman Score=1167.
ttaggagatggagtctcgctctatcagccaggccacacagttcttgccgtcagggctgagctcgaagcctgcattgcagacacactggaagctgccctctgtgttgacacagcggcccaggtgacaaaggccaccactgacaatgcactcgtccacatccacgcatgcctgcctggtgggcgtggcctggaagcccgggtagcaccggcagtggtaggtgccggggatgttgacgcagtcaccgtggtggcaggggctgctggtgcattcgtctacatcaatgcactcgccgcgcacgtcctgggtgtagcccacgttacactcgcagcggtagctggaaggcgtgggcaggcagcggccattcagacacaggttggtgaagtgtcggcagatgtcaatggttgtccaccaaaggacaccaaaagctttgttgcaaaagcccctgttaaaaaattgggcggaatgggtaattagcaatgctatgtacgcgtagagggttgtgaggtggacaaatgcaaaaagtgggtcaaatgaatgggtaataatgacgttcggataacctgaaacaagcacctgggtgaaacgtgtgccgcaaagggcaaaccctgttttggcgggagggacgcaaggcaacgttaagacacacttgagcaccaggagcgtcaagatcagcctgggcagtatagggacatccccatctgtggcgctgcgacggccacccagactgtcccgactccagcgacgagctcggctgtggtatgcacctgcggggctggggtggactcgtgggtagatggggacacccactgcctgctggggcgtggccaggctgggggcgtggacacatgcctttgcccgtgcctgcatcccagccccgtaatcctgtgtaatgatatctatataccacggccgattggaccgtcttaccagcgctgtttctcttggcgtccctctatttggtctttcggtgtctctcctctggcgcctttcattcactccgtcttcctgtttgcactctgtgacggattgattgaccccctctgtgagatgttcctgcgtctgtgatgatagtcgcagtgacttgatacacgcacgctctgtcgacgctggcaagcctcgattgacccacgcctggacgcacgcgcccaagccgcggatacacgagtcacgacgcacggcaagccgcaggatacaagtggaggccgccttggccttttggatcgaggcgacgcagatttcctcgttcatcacatgcggcgccagacagaccacgcccttcacatccggcgcgggggtgccgccggcatggatcagggagatcgaggcgccgtcggaatggccgaccaacaccacccggacccagtcttgagatcgttttcccctgttagggccaaacacaggggaaacatgcgaccagcaattgggaaatacaaacacggggggtgcaagcacagcccggaacagagcccacgcggccactagtttccggcacagcccgacaccaatgagcaggacggccagactcgttccggtcttgactgcacccgttgcattcatccaccattctgtaggcgcgcctgcggtgaaggcttctgctcccagccctacctgtgcacctgtgcggatgggactctggctcccagcatcgcaggtgacacccgtcatccgggcaaagccccgggcacaggcagggtctgcaactgggagaacaagagtgaagagaggagtcattttctcatgccagcccaaggggggacccgccccatggagggcttttcccatgggtgcctgggaggcctcaaggaggatactaccgatctcgcagcgttcgcaggggctcccccaggctgccccgagggtggcgcagcactcagaccgcaggctggctccctgaaggttcacctcacagcggctctcctggatcttcagccagcaggtgcccttggtgctgtctagacagaaggtaccagaggggtccagccggctgccagggccacatttgcaggtgtaggagccggccaggttccgacagacgccactcacacacgggctggacaggcattcgtcgacatcttcacatgcggcgctgctgtcactgagccggtgtccaactggacagcggcaatggaaggagcccaccatgttgacgcagctgcctccctggcacaggcctggcacagcctggcactcatccacatcttggcaggcccccgtgtggatattggggatgaagccgcggcggcaggggtgtggctgtgcagggcaaagttcacatggaaggccccaggcacggcccacagtggcacagcaaagtgcatagtgcacgcggtaccgatccagctcgagctcccaaagcacacacagacaagcagaccacgacacagcaacagacaacgacactgactggcttaataattgccgtgctgcttttaatgcagtttcatgggtataaccgccatcaacaatccattcatcacgcactgcaatattatgcgcacccaggctctgcttataaccattaacgcgatcaaccgaaacatggacatcaagcggagcatgcaggcaggcaatattttgatgcccactttcaattaatgcatcggtcaacgcaatgctgtcgccaaaattatcggtatcgacagaataaacatgggcatattgaccttcaactttgccaatcaccaccaccggaatatcatatttatcgagttgggcaaaaaatgactcatccgctggcgaactgagcataataatgcctttaatcattttctgcttaattttgctttcgcatttttgcagatcttctgccggattgtgcgacgtttgtaatatcacgtcgaaaccttcttcttcagctttggcggtgatggcatgcaaaacttcagagaaaaacggattacccgccgtagttttggtcgaacgggtagaaatcaccataatggcatcaaaacccgaagaggtcagcgcgcgggccagcttgtttggctgatactgtaattcttcaatggcccgtaacactttttcgcgcgcttccggggagatattagtttgcttattcagcacgcgtgatacggtggattttgatacgcctgcaacccttctgccgtgagtaaaagctccttgaggcttccccagaagctgggcagatgctggagccat

SEQ ID NO: 25162 - DNA, 1553 bp, Homo sapiens
  SIMILAR (1553)..(267): 991254mologous to Escherichia coli thiC,accession number M88701,Smith-Waterman Score=2225.
ttgctagtggcaaatggcgataaggcatatgtgacaccttgtgtcccgatcgatatattaccacacgatcgtagactgtggaacaaccctgtgctgttacccacactataatacgcacttgtcagacaacaatccacacgcagtattatcaagacacaaagaacatgggacagataacatacgctgacagacggcccgacacacgagtcggcccgttcaccaacagattgcagcagaccatggaagtagtgcagcataggactgcactgcacgtcatattcccaggcaattttggtcagttcgcccagcgtatgcagctcggcaaactgcgcttcatcgttggcgtcctgaatagaaccggggcgcagaccgtcgcccagcgacagcgaaacgtcataagcggcacagatttcacaaatttcgcggaagtgttgatagaggaaattttcctgatgatgggagaggcaccatttcgccataatcgaaccgccgcgagagacgataccggtcaggcgtttcgcggtcatcggcacatagcgcagcagtacgcccgcatggatagtgaagtaatccacaccttgctcggcctgttccagcagcgtgtcgcggaacgcttcccaggtaagatcttcggcgatcccgttaaccttctccagcgcctggtagatcggcactgtaccgatcggcaccgggctgttacgcaaaatccactcgcgggtttcgtgaatatagcgaccggtggagagatccatcaccgtatccgctccccagcgcgtggaccataccagcttttccacttcttcttcgatggaagaggtgaccgccgagttgccgatattggcgttaacttttaccaggaaattgcgaacaataatcatcggctccgattccggatgattaatgttggccgggataatcgcacgtccggcagcaacttcatcacggacaaattccgcagtgatattttccggcagatgtgcgccaaagctcattcccggatgctggtggcgtaaaacctcgctacggatgcgctcgcggcccatattctcgcggatggcgatgaattccatttccggcgtgatgatgccctggcgggcgtagtgcagttgggtgacacggcgtcctgctttggcgcgttttggtgttagtacgccgctaaaacgcagttcgtcgaggccatcatctgccagccgcgctttagtgtaatcggaactgcgcacggtaagttcttcggtatcgccgcgcgcatcgatccacggctggcgtagttttgccagcccttgctgcacgttaatggcaatctgcggatcaccatacgggccggaggtgtcgtagaccggaatcgcttcgttttcttcgtactgcggctgttctttgctaccgccaattagcgtcgggctaagctggatctcacgcatcggcacgcgcacgccggggtgtgtgccagtgatataaatgcgttttgagttgggaaaggcggtgccttccagggtgtcgataaaatgttgggcccgggcgcgttgttcgcggcgggtcagttttgttgcagacat

SEQ ID NO: 25163 - DNA, 3900 bp, Homo sapiens
  SIMILAR (3868)..(3710): 671254mologous to Escherichia coli K12 probable ornithine aminotransferase,accession number AE000389,Smith-Waterman Score= 157.
ttatcgcattatgcccatgaagccatgtacgcccatatacacaccgactaagccaatcaacagactggaaaaatagggggcgcgtttagcgagagtgttaaatccgctccagcgttttgcgacctgctgaacgctgattgctgcgccaacgcctacggtgacaagcgttaacgccaggccaatgctgaaactgacgaccagtgttgcgcccagtgtcagggctttcaactgaatgcatatcaacagcacggtaattgctgccgggcaggggataaggccaccggttaagccaaataacaaaatttgccagttggtgacctctctaccatcaaagcgtcgtttaatgtcattggcatgggctcgtgcatgggcatcctgatactcgccatgttcgtgatggtgatgatgtccatggtcgtggtgatgttcgtgatcgtgatgatgatgctcataatcatgcccgtgcatattctccagccagttgcgtacgacgcgccaggtacgccagaacatccagaacgcggggctaataatgatccgtgcggaaatccagtggagccagggtttggaattactgttgttttcgaactgctgcgttaagtagctgctggtgctgtttaacgaggtcattaaaacgtccagttgggtaaattgttctttgtagcgagcgacctgcgcatcaatgcgatcgctggcggcgttgtagtctttagttaatttattcagggtcttactaacgccatcggtagcggctttaataatgcccgttgtcgaaagccaactggtcaggttgctgccgatggtggtcgtgatgccggtttttttaccatcgccaacaatcaatgcacctacgccgctggcatcttttttcagtgcagcggtgagtttgtcggcatccagttccagtttgccatcgctgggatcggtcgtgataccaatctgcgccaacgttttatagctggaagaactgacggtattactcagcatcgatttcaactgcgtctgaatcgtccgcagcgtggagtcgccgagcagtgcaccattgctagaactctggctatcagctcccgcatggcggtgtatttggtcaggctgctgaaggtatctattagcgagttgtagcgcattcacccagtctttaatcgccgtttgcgctttggaggtgtcctgagtgatggttagcgtctggttgcccgtggtgacctccttcacgttcaggctgatgtttccagcgcgtcgctgatggtttgctgctgtctcgatggcgagttgttgactgtagttggcatgttggcagctctccgataacatggtgtatacggagaagcacatccgtatcatcagtgtgacgactgcggcggccatccatccagtcatcggttcgtctgagaatgacgtgcaatccccatccccgggcaataagggcgcgtgcgctatccacttttttgcccgtccatattcaacggcttctttgaggagttcattttccatcgttttcttgccgagcaggcgctggagttctttaatctgcttcatggcggcagcaagttcagaggcaggaacaacctgttctccggcggcgacagcagtaagacttccttcctggtattgcttacgccagagaaataactggctggctgctacaccatgttgccgggcaacgagggagaccgtcatccccggttcaaagctctgctgaacaattgcgatcttttcctgtgtggtacgccgtctgcgtttctccggccctaagacatcaatcatcgttcccgcattgccgagcagcagctcgctgttgctgccgtaagtgcgagcgtaatgacgcgccagcgattcagtcaggaacggatagcggcggcgcaggcgagcggcataatcgtcgcggtcgccttcaatggcgccacccggtagcacactctctttcgtccatgccgggccaataccctgataatacggcgttagtttttccagcgcatgttccgccagttttcggtaggtggtcagcttaccgccgaataccgacagcagcggtgctttgccattttcatcatgaatatcaagggtgtaatcacgggtaatagcctgcggcgagtcggactcatcatcacacagcggacgcacaccggagtaggtccagacgatatcgtcacggcttaactgctttttaaagtgcgtgttacaaaaaatagtggcacgtgcacgctgccctgccctgttttggtcgaccttgccgctggtggctgtatcgagatgcaccaccgggttttcggcgaatagatagcggtcggcattgaactcgaagtcgtcgctggtttcgttaaataacatgatcttggtgttttccagatgctgccacattgccagcttagcagcatgaggatctttgcgaatcagcgccttgaggatttgatcgtggtcatcacaccagttatcgacggtacgggaatcactgtgttcgtgccgttttttccccagtacgggtttatgaattacgcccttctctgctgctctggccgcagtagtcttcagctttgccttcccttctaccctgcatttatccagtagcgcgggtgatatttcgccgccgtcaggcattgtcgaagtgatgcgcgggacagcaaagaacaagaaaaacaggaacaccgaataacacatcatcagcgaccatgggcgacaaagagcgggaagaaaatcacaataatggtcgcggctttcaccctgcgggaagtaaccgttgatcacggtgacattacccagcagtgaggggatttccgccataataatccgccgctgcgcctcttcgtcgtcaccgggaaagccgcgacgcacggcaatcggcgtctctttggtcagcagcgccacgccataatggcctttctgcccgtgataaaacacgttgtagccgagcttcgccacctcttcgagcggaaacatatcgtcatgaacttttgtctcctgcaggccaatcacatccggttggtgcttttcgacgatggcttcaagctggtgaggtatatcgcctttttgctcagcctgagccggtaagttctgctccagcaacacattgatggtcgccagcgccgccgcacaggccagcgggttgccgccaaaggtggtggtatgcaggaatgggttgtcgaacagaactgaaaacacctcttcagtggcgatggtcgcgccaatcggcatcacgccgccgccgagcgctttggcaaggcagaggatatccggctgtacgttctcatgctcgcaggcgaacatcttgcccgtgcgccccatgcccgtttgtacttcatcgaggatcatcagtgcgccgaactcatcgcatagcttacgtacggcggtgagatagcccggcggcggcagaattacgccaccttcaccctgaatcggttcgaggatcaccgcagccacatcatcaccggtttttttgcactcgttaagagccgtgcgcatggcttcgatattgccaaacggcacatgacggaagcccggcagtaacggcataaacggtttgcggaaggtcgatttcgccgtggccgacagcgcgccaagtgatttaccgtggaacgcgccgctggtggcaataaaagtaaacttgccgcgcggtgactggtaagctttcgccagcttcagcgctgcttcaacggactcggtgccgctattacagaagaagctgtatttcagtttaccgggcgttagcgcagccaagggttttcgccaacatcgcccgtaacggatcgagcagctcctggctgtgcagcggatgtttcgcaagtggattctgtacggcgggagacacaagtggattacgggtgcccacggttgaaaattccaaaacttcccggccggcgataaactccgggcccgggttgtaccgagcgattttaaattccgcat

SEQ ID NO: 25164 - DNA, 1769 bp, Homo sapiens
  SIMILAR (346)..(984): 891254mologous to Escherichia coli similar to Neurospora crassa phosphate-repressible phosphate permease,accession number U00006,Smith-Waterman Score=995.
atggcaattaaattagaaattaaaaatctttataaaatatttggcgagcatccacagcgagcgttcaaatatatcgaacaaggactttcaaaagaacaaattctggaaaaaactgggctatcgcttggcgtaaaagacgccagtctggccattgaagaaggcgagatatttgtcatcatgggattatccggctcgggtaaatccacaatggtacgccttctcaatcgcctgattgaacccacccgcgggcaagtgctgattgatggtgtggatatggccaaaatatccgacgccgaactccgtgaggtgcgcagaaaaaagattgcgatggtcttccagtcctttgacttaatggcgcatatgaccgtgctggacaatactgcgttcgctcgcaccgctaccgaaacgcggattgaaagagaggcgctggcgctacaaaaactcaatgtcttttgcctcgcggacgatgccaactggcgaactcaaaacgcatggtggcaaagctgcgtggcaacggtaacctacatttactcgacgctgaatcgctacgatcccacctcttttgctgattctcaggcaattattgaattccgacaaaaattagcttcagaaatcaacaagctgcagcatgccgttgctgaaggtcagtgctggcaaagcgactggcggatcagtgaaagtgaagcgatggcggcacgggaatgtaacctggagaatatctgccagacgttgttacaactgggtcagatggacccgaatacgccgccaacgcccgcagccaaaccgccatcaatggccgccgatgcttttaccaatccagactatatgcgctacgcggtaaaaacgctgctcgcctgtttgatctgttacaccttttacagcggcgtggactgggaaggcattcacacctgtatgctgacatgcgtgatcgtcgctaacccaaatgtcgaagatggtgctgcgttttggcggggccttttgcggcgcgattctggcgctgttattcacgctactggtcatgccctggctggacaatattgtcgaattgctgtttgtactggcaccgattttactgttgggcgcatggattgccaccagctctgaacgctcttcttatatcggcacacagatggtggtcaccttcgcgctcgccacgctcgaaaacgtttttggcccagtgtacgacctggtggaaattcgcgatcgcaccctgggtatcatcattggtaccgtggtgtccgcagtgatttacacctttgtctggcctgaaagtgaagcgcgcacactgccgcaaaaactggctggcacgctgggtatgttaagtaaagtaatgcggatcccacgccagcaggaagtcacggctctgcgcacttatctgcaaattcgtatcggtctgcatgcagcgtttaatgcctgtaaagagatgtgccaacgcgtggcgctggagcgtcaactggacagcgaagaacgcgcattacttgttgaacgttcgcaaacagttattcgtcagggccgcgatcttcttcacgcctgggattgccacctggaactcggcgcaggcgctggataacgcactacagccggacagagcaggtcagtttgccgacgccctggagaaatacgctgccggtctggcaaccgcactcagccgttctcctcaaataacgcttgaagagacacccgcctctcaggccatcctggccaccttattaaacaggagcacacgtctggcacttttcgccgcttgcaaactggaagcccgggattaa

SEQ ID NO: 25165 - DNA, 5823 bp, Homo sapiens
  SIMILAR (1123)..(2475): 841254mologous to Escherichia coli NADH DEHYDROGENASE I CHAIN G (EC 1.6.5.3) (NADH-UBIQUINONE OXIDOREDUCTASE CHAIN 7) (NUO7) (FRAGMENT),accession number D90859,Smith-Waterman Score=1930.
atgaaagatgacattttctttcgcacgtccggcggcggcgtcacgctttctggcggcgaagtgttaatgcaggcggagtttgctacccgttttttacagcgactgcggctgtggggtgtgtcatgcgccattgaaactgccggagacgcaccagccagcaagctattaccgctggcgaaattgtgcgatgaagtgttgttcgatttaaaaattatggacgcgactcaggcgcgggatgtggtgaagatgaacctgccacgcgtgctggagaatctgcgtttgctggtgagtgagggcgtcaacgtgatcccgcgtttaccgctgatccctggtttcacgctcagccgggagaatatgcagcaggcgctggatgtactgatcccgctgaatatcaggcagatccatctgttaccgtttcatcagtacggcgaaccgaaataccgcctgctggggaaaacatggtcgatgaaagaggtgcctgcgccgtcgtcagctgatgtggcaacgatgcgcgaaatggcagaacgggccggacttcaggttaccgtgggagagaagtggggagtcagcattgaaactcagggcgcgctgggaacggagaatcgtttagcggatgaggatatccgccgggcggatgttgctctgttgattacggatatcgagcttgccggtgccgagcgatttgaacattgccgctatgtgcaatgcagcatctacgcattcctgcgtgagccgcagcgggtaatgagcgcggtgcgagaggtaatttggcgaaatataaaacgcctgtgcaacagattcgcgggtgctgcgctgccggtgaataaagcggtggtgactaccgccacctggaaagacaacgacgttattaaggcgctgggtgaactaccgaatcagctaatcggtgaactgccaaatattcaggtttattggcgcacttattactgctgggcggtctggtggcgtggccgatggtgtcgaatatcgaaatcagttatttacgtctgccgctcaatccccaacatcgagtcaacgtttgtaggggtgagcaactatgtgcgtatcctctccgatccccgcttctggcattcgctgtggattaccgtctggtattaccgggctgatgaggagacagatgatatcgcggcgtggacttaccgcgcaccggttgaagatcaggcgcgtttaggttttgccatcgcccatgcgctggataactctgcaccagcggttgacggtatcgaacctgagctgcaaagcaaaatcgacgtcatcgtgcaggcactggcaggtgcgaagaaaccgttgattatctccgggacgaacgccggtagcttagaggtgattcaggcggcggctaacgtcgcgaaagccctgaaaggtcgcggcgctgacgtcggtatcaccatgattgcccgttccgtcaacagcatggggctgggcattatgggtggcggttcgcttgaagaagcgttaaccgaactggaaaccggacgcgccgacgcggtggtggtgttggaaaacgatctgcatcgtcacgcttctgctatccgcgtgaatgctgcgctggctaaagcaccgctggtgatggtggttgatcatcaacgcacagcgattatggaaaacgcccatctggtactttctgctgccagctttgctgaaagcgacggtacggtgatcaacaacgaaggccgcgcccaacgtttcttccaggtttacgatcctgcttattacgacagcaaaactgtcatgctggaaagctggcgctggttacactcgctgcacagcaccctgctgagccgtgaagtggactggacgcagctcgaccatgtgattgacgctgttgtggcgaaaatcccggaactggcaggtatcaaagatgctgcgccggatgcgacattccgtattcgtgggcagaaactggcccgtgaaccgcaccgttacagcggtcgtaccgccatgcgcgccaatatcagcgttcatgagccgcgtcagccgcaggatattgacaccatgttcaccttctcgatggaaggtaacaaccagccgactgcgcaccgttcgcaagtgccgtttgcctgggcgccgggctggaactccccgcaggcgtggaacaaattccaggacgaagtgggcggcaaactgcgctttggcgatccgggcgtgcgtctgtttgaaaccagcgaaaatggtctggattacttcaccagcgtaccggcacgcttccagccgcaggacgggaaatggcagccgtatgccgcagccgacatcaaactcaacccaacgatatcttcaccaaaagcgcgaatgcaacaaatgcgagctgccggcatttcagtgcatgcatcattttccggcaacggccacacaagtctatctctggtcattctcatgggcgggctgggcgcgctggtgctggcgttacgtaacccagatgaatatgtcagcgtctcggcgttttcgcccattgtctccccatcgcaagtgccgtggggacagcaagcctttgctgcatatcttgctgaaaataaagatgcctggttggattacgacccgcacgactgccggatgcggcgtgaacgccttatccggcctacacttcgcccgcactttgaagtcggcatacgggtcgtcttcatcctgctcttcggcgctgagcgcgctgtgcaacactatactgctggcatcgcgctgagcaattttatcggcaacgctggcgggaataatggcgtattcaccttcgctattgttatcgaccaacaagcgggcaatcgccagacgaccattaatcaactgcgcctgtgtgagcttatcgacaaaaatcttcttaatcagattgccgtcagtgaagttaaaaccaatatcgccattggcaatggtgattcgcttgctgcttcagtcgactctagaggatcccgtggtgtcgcggtgattacacctttgtctggcctgaaagtgaagcgcgcacactgccgcaaaaactggctggcacgctgggaagtcacggctctgcgcacttatctgcaaattcgtatcggtctgcatgcggcgtttaatgcctgtgaagagatgtgccaacgcgtggcgctggagcgtcaactggacagcgaagaacgcgcattactgattgaacgttcgcaaacggttattcgtcagggccgcgatcttcttcacgcctgggatgccacctggaactcggcgcaggcgctggataacgcactacagccggacagagcaggtcagtttgccgacgccctggagaaatacgctgccggagcaacacgtctgccagcttttcgcccgcttgccagactggacagccccggcattaacgcccgccacggaacaggcacaaggagccacgcaatgatcaatcgtcaactttcacgtctgctgttgtgcagcattctcggcagcacgacgctgatttccggctgtgccctggtacgtaaggattctgcacctcatcaacagctcaaaccggaacaaatcaaactggccgacgatattcatcttgccagctccggctggccgcaggcgcagtggtggaaacaactcaatgacccgcagctggatgcgctgatccaacggacgctaagtggttcacacaccctcgccgaagcgaaactgcgggaagaaaaagcgcagtcccaggccgatttgttagatgccggttcacaattacaggtcgcagcgttagggatgctcaaccgccaacgtgtctcggcgaacggctttttaagcccttattcaatggatgcgccagcactgggtggacgggccgtactacggaagccacacatgttgtttgtgcctggtgccaatgccgcgatggtcagcaactccttcatctacccggctgatgccctgatgtttgacctcgaagactccgtagcattgcgtgaaaaagacaccgcccgccgcatggtttaccacgcgctgcaacatccgctgtatcgcgatattgaaaccattgtgcgtgtcaacgcgctggattccgaatggggtgttaacgacctggaagccgtcgttcgcggtggtgcggacgttgtgcgtctgccgaaaaccgataccgctcaggatgttctggatattgaaaaagagatcctgcgtatcgaaaaagcctgtggtcgtgaacccggcagcaccggcctgctggcggcgattgaatctccgctggggattacccgcgcagtggaaatcgctcacgcttccgagcgtttgatcggtatcgccctcggtgcagaagactatgtgcgcaacctgcgtacagaacgctccccggaaggaactgaactgctgttcgcacgctgttccattttgcaggccgcgcgctctgcgggtattcaggcgttcgataccgtctattccgacgctaacaacgaagccggatttctgcaagaagccggccacatcaaacagctgggctttgacggcaaatcgctgatcaacccgcgtcagattgatctgctgcacaacctctacgcaccgacccagaaagaacgcgatatcgccagccgcctgaacgctcagggtcgccctattccgctcatcgctgaaagcggcggcatgaacgcgatgattgtcgattcttcagcactgaccgaacaggtcgtcgtggatgtactggcctcggcgttcgacagtgcgggtcagcgttgttcggcgctgcgcgtgctgtgcctgcaagatgagattgccgaccacacgttgaaaatgctgcgcggcgcaatggccgaatgccggatgggtaatccgggtcgcctgaccaccgatatcggtccagtgattgatagcgaagcgaaagccaatattgagcgccatattcagaccatgcgtagcaaaggccgtccggtgttccaggcggtgcgggaaaacagcgaagatgcccgtgaatggcaaagcggcacctttgtcgccccgacgctgatcgaactggatgactttgccgaattgcaaaaagaggtctttggtccggtgctgcatgtggtgcgttacaaccgtaaccagctaccagagctgatcgagcagattaacgcttccggttatggtctgacgcttggcgtccatacgcgcattgatgaaccatcgcgcagtcactggctcggcccatgttgtaacctgtatgtaccgtatatggtggcgcagtgttgtggcaccgttcgcggcgaaggtgtccgtaccgcggagccgcgtccgctctatctctacctctgctggcgaatcgcccggaaagatgcaaagtatccggtcgatgcgcagttgaaagccgcattgactcagccgctaaatgcactgcgggaatgggcagcaaatcgtccagaattgcaggcgttatgtacgcaatatggcgagctggcgcaggcaggaacacaacgattgctgccggggccgacgggtgaacgcaacacctggacgctgctgccgcgtgagcgcgtgttgtgtattgccgatgatgagcaggatgcgctgactcagctcgccgccgtgctggcggtgggcagccaggtactgtggccggatgacgcgctgcatcgtcagttagtgaaggcattgccatcggcagtcagcgaacgtattcaactggcgaaagcggaaaatataaccgctcaaccgtttgatgcggtgatcttccacggtgattcggatcagcttcgcgcattgtgtgaagcagttgccgcgcgggatggcacaattgtttcggtgcagggttttgcccgtggcgaaagcaatatccttctggaacggctgtatatcgagcgttcgctgagtgtgaataccgctgccgctggcggtaacgccagcttaatgactataggttaa

SEQ ID NO: 25166 - DNA, 5095 bp, Homo sapiens
  SIMILAR (3248)..(3340): 351254mologous to Escherichia coli polyphosphate kinase (EC 2.7.4.1),accession number D90878,Smith-Waterman Score=40.
atgatttctttttcttttgccagagcaagaaaagaaaagaagagcaagtgcggtcagcgtccggctgttcgcgtcaaacttaacgctcaggcgattgccgccctcggcctgaccagcgaaaccgtgcgcaccgccattaccggcgctaacgttaactcggcaaaaggtagcctcgacggcccttcccgtgcggtcacgctttccgcgaacgaccagatgcaatccgccgaagagtatcgccagctaatcatcgcctaccagaacggcgcgccaattcgtctgggcgatgtcgcaactgtagagcaaggtgcagaaaacagctggctcggcgcgtgggcgaacaaagaacaggccattgtgatgaatgttcagcgccagcccggtgctaacattatctccaccgccgacagcattcggcagatgctgccacagctcactgagagtctgccgaaatcggtgaaggtgacagtgctttccgatcgcaccaccaatatccgcgcatccgtcgatgatactcagtttgaattgatgatggctatcgcgctggtagtcatgattatctacctgtttttgcgcaatattccggcgaccatcattcccggtgttgctgtaccgctgtcgttaatcggcactttcgcggttatggtgtttctcgatttttcaatcaataacctgacactgatggcgttaactatcgccaccggattcgtggtcgatgacgccatcgtggtgatcgaaaacatttcccgctatatcgaaaaaggggaaaaaccgttggcggggggctcaaggggccgtccagcaggctgcgctcagctcgcacttacgggccagccagataccgtgtccgccttgggtctgggctcggcccccggttggtccaggctgctgcgatgggtcttcctcgacttgggtttgttcggggcccatggtcccaaagttggactcgaccgtgtggccaaaacggtaacatggtgtgagaagaagagagagatgcaatatgaattaagagcatctggtcccacctgctactctgtccagagactaacccatgttgctccccagcgacgtcgagcacaagtaatatatacccaaaggcacagtgcgattgactatgtccacgacactcactacttcggcgcgacggaacacaacggaggctccaaacccctctggagtcagtttcccgtcaatcaacaaaactggctgcgtcattattttaaccagtatctgcgtcagcacataacgccgattttaatcaatcctgacactgacttagtgcagttcctgaaagatgattacacctatctggcggtggaaattatccgtggcgataccatccgttacgcgctgctggagatcccatcagataaagtgccgcgctttgtgaatttaccgccagaagcgccgcgtcgacgcaagccgatgattcttctggataacattctgcgttactgccttgatgatattttcaaaggcttctttgattatgacgcgctgaatgcctattcaatgaagatgacccgcgatgccgaatacgatttagtgcatgagatggaagccagcctgatggagttgatgtcttccagtctcaagcagcgtttaactgctgagccggtgcgttttgtttatcagcgcgatatgcccaatgcgctggttgaagtgttacgcgaaaaactgactatttcccgctacgactccatcgtccccggcggtcgttatcataattttaaagactttattaatttccccaatgtcggcaaagccaatctggtgaacaaaccactgccgcgtttacgccatatttggtttgataaagcccagttccgcaatggttttgatgccattcgcgaacgcgatgtgttgctctattatccttatcacacctttgagcatgtgctggaactgctgcgtcaggcttcgttcgacccgagcgtactggcgattaaaattaacatttaccgcgtggcgaaagattcacgcatcatcgactcgatgatccacgccgcacataacggtaagaaagtcaccgtggtggttgagttacaggcgcgtttcgacgaagaagccaacattcactgggcgaagcgcctgaccgaagcaggcgtgcacgttatcttctctgcgccggggctgaaaattcacgccaaactgttcctgatttcacgtaaagaaaacggtgaagtggtgcgttatgcacacatcgggaccgggaactttaacgaaaaaaccgcgcgtctttatactgactattcgttgctgaccgccgatgcgcgcatcaccaacgaagtacggcgggtatttaactttattgaaaacccataccgtccggtgacatttgattatttcatgccaaagcatgaacagcaacagcggttacagcgcccgttacgagtagtagtgatgactatgttacagttggacaagcacgagcaccgcagatattacaaggccgggcgcgaccgaagttatacgcatcagaaaaagtcctcttgtgcgcctattctgtggcagagatattataatcaacaagaacacgtcaatttcttcaggggtccagttctacaacagaacaagcctcattccgttatcccgatggccacaactcccaagagatgtcaagggatccgacgatgtgggatgcgtagcatgtcgaaacaactccgaggttggcaatttgtcgctcagatcccccgttttgttcaccgttcagcggcgttgtggtggcagaaacgaagatccaataagttgtacgagaacgctgttcgaaccggttttacacaatacggatgtggatatataactctcattggcagagtggaaatgcctgaacccttcacagagggctttgtacagggaagtgatgttggagaactacaggaacctggaggctgtgggccagctgcagccgcagtcgactcagaggatcccctaaggccgcatttgcaatggggaccgtctgaccagccagaaaggtctcgacctggatgctggaagccttaccgggtcttctggcagcagggcgggcagctggcgctactcggcgcgggcgatccggtgctgcaggaaggtttccttgcggcggcagcggaataccccggtcaggtgggcgttcagattggctatcacgaagcattttcgcatcgcattatgggcggcgcggacgtcattctggtgcccaaccgttttgaaccgtgcggcttaacgcaactttatggattgaagtacggtacgctgccgttagtgcggcgcaccggtgggcttgctgatacggtttctgactgttctcttgagaaccttgcagatggcgtcgccagtgggtttgtctttgaagatagtaatgcctggtcgctgttacgggctattcgacgtgcttttgtactgtggtcccgtccttcactgtggcggtttgtgcaacgtcaggctatggcaatggattttagctggcagggtcgcggcgaagtcgtaccgtgagctttactatcgcttgaaatagttttcaggaaacgcctatatgaatgctccgtttacatattcatcgcccacgcttagcgtagaagctcttaagcactctatcgcttacaagctgatgtttacgattggaaaggacccggtcgtcgccaataaacatgaatggctgaacgcaacgttatcttgctgggcgcgatcggctctggaccgcgggaaaggcgtgaaaaacgcgtcaaccgtatcggaagatactgcgtcgaatcaagagccgacgcttcatcgcggattacataaccgtcatattcaactgattgcgttgggtggcgcaattggtactggtctgtttcttggcattggcccggcgattcagatggcgggtccggctgtattgctgggctacggcgtcgccgggatcatcgctttcctgattatgcgccagcttggcgaaatggtggttgaggagccggtatccggttcatttgcccactttgcctataaatactggggaccgtttgcgggcttcctctctggctggaactactgggtaatgttcgtgctggtgggaatggcagagctgaccgctgcgggcatctatatgcagtactggttcccggatgttccaacgtggatttgggctgccgccttctttattatcatcaacgccgttaacctggtgaacgtgcgcttatatggcgaaaccgagttctggtttgcgttgattaaagtgctggcaatcatcggtatgatcggctttggcctgtggctgctgttttctggtcacggcggcgagaaagccagtatcgacaacctctggcgctacggtggtttcttcgccaccggctggaatgggctgattttgtcgctggcggtaattatgttctccttcggcggtctggagctgattgggattactgccgctgaagcgcgcgatccggaaaaaagcattccaaaagcggtaaatcaggtggtgtatcgcatcctgctgttttacatcggttcactggtggttttactggcgctctatccgtgggtggaagtgaaatccaacagtagcccgtttgtgatgattttccataatctcgacagcaacgtggtagcttctgcgctgaacttcgtcattctggtagcatcgctgtcagtgtataacagcggggtttactctaacagccgcatgctgtttggcctttctgtgcagggtaatgcgccgaagtttttgactcgcgtcagccgtcgcgcgaacacatgtaacgaacaccgccacaacaaaccgagcgacgagccaaaacccgacaacgaaaccacacaagagagaacagacaccaccacaagagacagaatacacagcccaccaccaattcgactcctgcaggagtcaacaaccaacaccccgccgaacacaaagcgaagacaaccgtccccggcgcttctgcccctgggacgtgggatccccacggacctggaaattctcgcctgtcttcccttcacccagagcaaattgagacgtcccgctccaccccctggaaaatgcgcttctacgggatgcaggcgtcttactccaaacccgcctgtgattactccaaacccgcctgggccaaagggatcaggagatagagagagggactga

SEQ ID NO: 25167 - DNA, 2176 bp, Homo sapiens
  SIMILAR (1283)..(1618): 941254mologous to Escherichia coli alpha-glucan phosphorylase,accession number U18997,Smith-Waterman Score=544.
atgcctgcaggtcacatcgccagcttcatcttttctggtaagccaggaaccggcaaaaaccatctggcggcggcaatctgcaacgagctgctgctacgcggtaaatccgtattgatcatcaccgtggccgatattatgtcggcgatgaaagataccttcaggaatagcggtaccagcgaagaacaactgcttaacgatctgagcaacgttgatctgctggtgatcgatgagatcggcgtgcagaccgaatcgaaatacgaaaaagtgatcatcaaccagatcgtcgatcgccgctcttcttccaaacgcccaaccgggatgctgaccaacagtaatatggaagagatgaccaagttgctgggcgaacgcgtgatggaccgtatgcgcctgggtaacagtttgtgggtgatcttcaactgggatagctaccgtagccgggtaacagacgcgggcatatcttttgaggtcatgattacaagatcaacgttggacaacaggggagaaatccgtcttctcctgccgatgaattgtcagaatttttaccccgcctcattggtgaaaggttctctgtatacaccccatgttattaagggggggcttgggactacaaaaattcctgtttactcggggtcccgtgtatcggaactgcactctaatctgatggtgcaatcgttgtttgccgactttgcgaaaatcttcccgggtcgtttcaccaacgtcaccaacggtgtgacgccgcgtcgctggctggcggtagcgaacccatcgctttcagccgtgctggacgaacacctgggccgtaactggcgcaccgaccttagcctgcttaatgagctgcaacaacactgtgatttcccaatggttaatcacgctgtgcatcaggcgaagctggagaacaaaaagcgtctggcagagtatatcgcccagcagctgaatgtggtggtgaatccaaaggcgttgttcgatgtacaaatcaaacgtattcacgaatacaaacgtcaattgatgaatgtgttgcatgtgattacccgctataaccgcatcaaggccgacccggatgcgaagtgggtaccgcgcgtgaatatttttggcggtaaggcggcttcggcctattacatggcgaagcacattattcatttgatcaatgacgtagcgaaagtgatcaacaacgatccgcagattggcgataagctgaaagtcgtgttcatcccgaactacagcgttagcctggcgcagttgatcattccggcggcagatctgtctgaacagatttcgctggcagggaacgggagcttccggcaacagtaacatgaaatttgcgcttaacggtgcgctgactatcggtacgttggacggtgcgaatgtcgagatgctggatcatgtcggtgctgacaatatctttatttttggtaacacagcggaagaagtggaagaactgcgtcgtcagggctacaaaccgcgtgaatactacgagaaagatgaggagctgcatcaggtgctgacgcaaatcggcagcggtgtattcagtccggaagatccgggtcgctatcgcgatctggttgattcgctgatcaacttcggcgatcactaccaggtactgcggatatcaagctatgtcgcacagccgagcacggtaatcaactggcggaaatttgccgccagcccaagccccgccggaccaaatgacaccgccagcaacttaccgaccagtaacccggcaccaatcttgaccagtgtactggccgccgtccacaaggacgcttttgccaacgacatatcaggaaaagtagttcaacaaagtcgcaattaccgtacgctgattgacgggcgacaggttgtagaacagcggcaggcgcagcaggcgctcgctctctttggtgtagttttgccacagcgccagacgttgctggttgatacgatccgctgcttccagttgcgcccacaggtatgcagcttgcagatcggacatcaaatagctggagccaatatcgcgccaggccacacccgcgtaatggaccggcacgataacgcgcgttttgtcggtgatcgccgcttcaatcagcgtttcgtcgatgttcatggtgtccgggcgaacatccaccaaaacggattttctgccggccaacgccagccaccgaaaggccattgcgccggtcggaagacaaaaaggttgtag

SEQ ID NO: 25168 - DNA, 2011 bp, Homo sapiens
  SIMILAR (956)..(1648): 991254mologous to Escherichia coli O157:H7 thiamin biosynthesis, pyrimidine moiety,accession number AE005631,Smith- Waterman Score=1244.
atgaaagatttattcgaagatgtgcgcgcggtggcggaaccgtgtggcgcgctggcgctggcgggaatgaaaaaatatatcgccctgcacaacattcgcggcgaacggctggcgcatattctttccggtgccaacgtgaacttccacggcctgcgctacgtctcagaacgctgcgaactgggcgaacagcgtgaagcgttgttggcggtgaccattccggaagaaaaaggcagcttcctcaaattctgccaactgcttggcgggcgttcggtcaccgagttcaactaccgttttgccgatgccaaaaacgcctgcatctttgtcgagcgcaaagaaattttgcagatgctcaacgacggcggctacagcgtggttgatctctccgacgacgaaatggcgaagctacacgtgcgctatatgttcgggcggcttcctgagcgaaccaacaagctttgtcgaagatcagatggtcctaggggaataattttgacaactgtgctcgacccgctgagtgaaacccctggagcgtacctcgacatcgtgcgtgagctgcgtgaacgtactgaattgccgattggcgcgtatcaggtgagcggtgagtatgcgatgattaagttcgccgcgctggcgggggctatagatgaagagaaagtcgtgctcgaaagcttaggttcgattaagcgtgcggggggcgaggggaccgtccactctcgtattaccccgcccgataaaacggtttatccccaaggatcgtcgcccgatgcattatccgtcgctgtggcagctcggtacccgtcgttagatgagttacgggtgaaacgagatatcgcgatggctgaagcgggtattccgcgcggagccggaatgggcatgggctacggcggctgcggtggtggcggtcatatggctcggtaccccgaagatcttacctgggaagcgttccgcgacacgctggctggaacaggccgagcaaggtgtggattacttcactatccatgcgggcgtactgctgcgctatgtgccgatgaccgcgaaacgcctgaccggtatcgtctctcgcggcggttcgattatggcgaaatggtgcctctcccatcatcaggaaaatttcctctatcaacacttccgcgaaatttgtgaaatctgtgccgcttatgacgtttcgctgtcgctgggcgacggtctgcgccccggttctattcaggacgccaacgatgaagcgcagtttgccgagctgcatacgctgggcgaactgaccaaaattgcctgggaatatgacgtgcaggtgatgattgaaggcccaggccacgtgccgatgcagatgatccgccgcaatatgaccgaggagttagagcactgccacgaagcgccgttttacactctggggccgctaactaccgatattgcgccgggctatgaccacttcacgtcggggattggtgcggcgatgattggctggtttggctgcgcgatgctctgttacgtaacgccaaaagagcatctgggtctgcccaataaagaagatgttaagcaggggcttatcacctataagattgctgcccacgccgctgacctggcgaaagggcatccgggcgcgcaaattcgcgataacgccatgtcgaaagcccgcttcgaatttcgctgggatagaccagtttaatctggccctcgacccgtttaccgcccgcgcttatcacgatgaatccctgccgcaagagtcaggtaaagtcgcccatttttgctccatgtgtgggccgggattctgctcgatgagaatcagccaggaagtgcgtgattacgccgcctcgcaaactattgaaatggaaatgccgtgtatgtcggagaacgtccgtgccagaggcggagccctttacctgcgtaaggagggagcatattgtatcgtgcgaatggatcctcattcgccttctgattctggcctgtaacagatggttattaacggcctaggagttctttaagagtcggggtccagtcacccaagcttacgactacc

SEQ ID NO: 25169 - DNA, 2826 bp, Homo sapiens
  SIMILAR (1306)..(2559): 911254mologous to Escherichia coli glycerophosphate dehydrogenase,accession number M55989,Smith-Waterman Score=1999.
atgcgcgacaccatttactcgcgccaccagcgcgtggtggtcggtgtgcgtctgctacaggttgccggacgcgatcgtaaagtggatatcaagccgtttgccattcagggactgccgatgtcggtgcagccgacacagctggtgaccgaaaccctgaacgtacgccaggcgcgcgtgctgccgcttaacttcaactccattactgattaccactcgctgatgttcgatctgggcatcatcgcgcgtcgtctgcgctccgcatctgaccgtagcagattctatcgtctgatcgaagcttcgctgtatggcgggatctccagtgccattacccgttctctgcgcgactacctgttgccagaaaacagcggcgtgcgtaaagcgttccaggacatggaagcggcgctgcgtgaaaaccgtatgacgctggaagcgattcgtgtcacccagtcggaccgcgacctgtttaagcatctgatcagcgaagccaccaactacgtggcgccggactacatgcgtcacgccaacgagcgccgtgtccatctcgacaaagcctggagtttcgtcgcgagctacatacttcgccaactggcggctgagcagtacaaacacgtcgatatggcgcgtgagctggcagagcacaacggtgccgaaggcgatctggaagcggattatcaggcggccagtgatcacctgaacctggtgcaaaccgcactgcgtcagcaggagaagatcgaacgctacgaagcggatctcgatgagctgcagatccgtctggaagagcaaaatgaagtggtggcagaagccatcgaacgccagcaagagaatgaggctcgtgcggaagctgccgaactggaagtggacgagctgaaaagccagcttgctgactaccagcaggcgctggacgtccagcaaacgcgcgcgatccagtataaccaggcgattgctgcgcttaatcgtgccaaagaactgtgccatctgccggacttaaccgccgactgcgccgccgaatggctggaaaccttccaggcgaaagagctggaagcgactgaaaaaatgctctctcttgagcagaaaatgagcatggcgcaaaccgcgcacagccagtttgaccaggcttatcagctggtggtgccaatcaacggcccactggcgcgtaacgaggcgtgggatgtcgctcgcgaactattgcgcgaaggggtcgatcagcgtcacctggcagagcaggttcagccgctgcggatgcgattaagcgaactggaacagcgtctacgcgagcagcaagaagctgagcgtatgctgccaggttcaaaactcattcacggtggcctgcgctaccttgagcactatgaattccgcctggtcagcaaggcgctggctgaacgtgaagtgctgctgaaaatggccccgcatatcgccttcccgatgcgttttcgcctgccacatcgtccgcatctgcgcccggcgtggatgattcgcattggtctgtttatgtacgatcatctgggtaaacgcaccagcttgccgggatcaactggtttgcgttttggcgcaaattcagtgttaaaaccggaaattaagcgcggattcgaatattctgactgttgggtagacgacgcccgtctggtactcgccaacgcccagatggtggtgcgtaaaggcggcgaagtgcttactcggactcgcgccacctctgctcgccgcgaaaacggcctgtggattgtggaagcggaagatatcgataccggcaaaaaatatagctggcaagcgcgcggcttggttaacgccaccggcccgtgggtgaaacagttcttcgacgacgggatgcatctgccttcgccttatggcattcgcctgatcaaaggcagccatattgtggtgccgcgcgtgcatacccagaagcaagcctacattctgcaaaacgaagataaacgtatagtgttcgtgatcccgtggatggacgagttttccatcatcggcactaccgatgtcgagtacaaaggcgatccgaaagcggtgaagattgaagagagtgaaatcaattacctgctgaatgtgtataacacgcactttaaaaagcagttaagccgtgacgatatcgtctggacctactccggtgtgcgtccgctgtgtgatgatgagtccgactcgccggaggctattacccgtgattacacccttgatattcatgatgaaaatggcacagcaacggtggtgtcggtattcggcggtaacgctgaccacctaccgaaaactggcggaacatgcgctggaaaaactaacgccgtattatcacgggtattggcccggacatggacgaaagagagtgtgctaccgggtggcgccattgaaggcgaccgcgacgattatgccgctcgcctgcgccgacgctatccgttcctgactgaatcgctggcgcgtcattacgctcgcacttacggcagcaacagcgagctgctgctcggcaatgcgggaacggtaagcgatctcggggaagatttcggtcatgagttctacgaagcggagctgaaatacctggtgggatccacgacatgggtccgcacgcgccgacagacgccctgtggcgtcgcacaaaacaaggcatgtggctaaatgcggatcaacaatctcgtcccgctatccagcgcaacgacgctggcgcgtttgcccggtttaagcgatcccagaacaccatcaacacccagcattcgcgccggatgcagcgacgccatatggatggcttccgcaggcgttacgcccgtcaactcgaccatattgcgcactgccgcatcaacagacagcgtactgcccgccagcccaccagacgcg

SEQ ID NO: 25170 - DNA, 4917 bp, Homo sapiens
  SIMILAR (2056)..(2538): 981254mologous to Escherichia coli glycogen synthase,accession number U18997,Smith-Waterman Score=801.
gatctcggggaagatttcggtcatgagttctacttagcggagctgaaatacctggtggatcacgaatgggtccgccgcgccgacgacgccctgtggcgtcgcacaaaacaaggcatgtggctaaatgcggatcaacaagtctcgtgtgaatcagtggctggtggagtatacgcagcagaggttatcgctggcgtcgtaaattaacgtaaggtgatcaggtcagatttcaatctggcctgagactgatgacaaacacaaaactgcctgatgcgctacgcttatcaggcctacgtggtttatgcaatatattgaatttgcatggtcttgtaggccagataagacgttcacgtcgcatccggcatgaacaaagcgcacttttgccaaaaatctaccctacttttaaattcagggaattacccgcaaagcccacgccatcatacccaacgtaacaaaactcaggcacgttccccactcgccccgagaaaaatagcattaatgcgcccagcgccagcataaaaattttgagcagaaaaggtaaattgttggcgtgataaggatattacaaacttcaataataccggcaagtccgacacccagcatggcaataaccaccgccaaaaattgcgccagtatggggatgccgaaaaaagtcattaccagcgaggtcaaaatccattttctgttttgcattattctttccattctttttgaatggggaaattatactccccgagtccccttgccccttctggacacttttccgaaatgatggcggaaaaaaacgggaccctttggcccccgtctatttattggggaaacttacaatctcaccgggaccgatatgcccagatatgatcggcgtactctttgatagtacggtcagaagagaagtagcccatattggcaatgttcagcatcgcttttgcggtccactcttcctgaagctcgtagagttcatcgactttatcctgacaatcgacatagctgcgataatccgtcagtacctggtagtgatctgcgaagttgatcagcggatcaaccagatcgcgatagcgacccggatctttcggactggatacaccgctgccgatttgcgtcagcacctgatgcagctcctcatctttctcgtagtattcacgcggtttgtagccctgacgacgcagttcttccacttcttccgctgtgttaccaaaaataaagatattgtcagcaccgacatgatccagcatctcgacattcgcaccgtccaacgtaccgatagtcagcgcaccgttaagcgcaaacttcatgttactggtgccggaagcttccgtccctgccagcgaaatctgttcagacagatctgccgccggaatgatcaactgcgccaggctaacgctgtagttcgggatgaacacgactttcagcttatcgccaatctgcggatcgttgttgatcactttcgctacgtcattgatcaaatgaataatgtgcttcgccatgtaataggccgaagccgccttaccgccaaaaatattcacgcgcggtacccacttcgcatccgggtcggccttgatgcggttatagcggaaatggccagcgggcttgacccattctggcgtcctgatgtggtgcatgcgcacgactggcatgcaggccttgcgcctgcgtatctggcggcgcgcgggcgtccggcgaagtcggagtttactgtgcacaacctggcctatcaaggcatgttttatgcacatcacatgaatgacatccaattgccatggtcattctttaatattcatgggctggaattcaacggacaaatctctttcctgaaggccggtctgtactatgccgatcacattacggcggtcagtccaacctacgctcgcgagatcaccgaaccgcagtttgcctacggtatggaaggtctgttgcaacagcgtcaccgtgaaaggcgtcttttcggcgtactgaacggcgtggacgagaaaatctggagtccagagacggacttactgttggcctcgcgttacacccgcgatacgttggaagataaagcggaaaataagcgccagttacaaaatgcaaatggggctaaaggttgacgataaagtgccgctttttgcagtggtgagccgtctgaccagccagaaaggtctcgacctggtgctggaagccttaccgggtcttctggagcagggcgggcagctggcgctactcggcgcgggcgatccggtgctgcaggaaggtttccttgcggcggcagcggaataccccggtcaggtgggcgttcagattggctatcacgaagcattttcgcatcgcattatgggcggcgcggacgtcattctggtgcccagccgttttgaaccgtgcggcttaacgcaactttatggattgaagtacggtacgctgccgttagtgcggcgcaccggtgggcttgctgatacggtttctgactgttctcttgagaaccttgcagatggcgtcgccagtgggtttgtctttgaagatagtaatgcctggtcgctgttacgggctattcgacgtgcttttgtactgtgtcaaggacagtttcatcatcggactaccgatgtcgagtacaaaggcgatccgaaagcggtgaagattgaagagagtgaaatcaattacctgctgaatgtgtataacacgcactttaaaaagcagttaagccgtgacgatatcgtctggacctactccggtgtgcgtccgctgtgtgatgatgagtccgactcgccgcaggctattacccgtgattacacccttgatattcatgatgaaaatggcaaagcaccgctgctgtcggtattcggcggtaagctgaccacctaccgaaaactggcggaacatgcgctggaaaaactaacgccgtattatcagggtattggcccggcatggacgaaagagagtgtgctaccgggtggcgccattgaaggcgaccgcgacgattatgccgctcgcctgcgccgccgctatccgttcctgactgaatcgctggcgcgtcattacgctcgcacttacggcagcaaccagcgagctgcgtgctcggcaatgcgggaacgtgaagcgcgcacactgccgcaaaaactggctggcacgctgggtatgttaagtaaagtaatgcggatcccacgccagcaggaagtcacggctctgcgcacttatctgcaaattcgtatcggtctgcatgcggcgtttaatgcctgtgaagagatgtgccaacgcgtggcgctggagcgtcaactggacagcgaagaacgcgcattactgattgaacgttcgcaaacggttattcgtcagggccgcgatcttcttcacgcctgggatgccacctggaactcggcgcaggcgctggataacgcactacagccggacagagcaggtcagtttgccgacgccctggagaaatacgctgccgatgagtcattttttgcccaactcgataaatatgatattccggtggtggtgattggcaaagttgaaggtcaatatgcccatgtttattctgtcgataccgataattttggcgacagcattgcgttgaccgatgcattaattgaaagtgggcatcaaaatattgcctgcctgcatgctccgcttgatgtccatgtttcggttgatcgcgttaatggttataagcagagcctggctgcgcataatattgcagtgcgtgatgaatggattgttgatggcggttatacccatgaaactgcattaaaagcagcacggcaattattaagccagtcaccgttgcctgaggcggtgtttgccactgacagcctgaaattaatgagcatttatcgtgcggcagcagagaaaaatattggctattccgcagcagttagcggtgcgcatcttattcgggctacatttatagatcgtattaagtactcgggccggattcggcaatttagcccattattaggacgaccccttgaatcatcgctactgtgctctaaagagcacgcaatactgacggcttgccatgccagcaccaacaggggcagcagaatcagcaaaaatgccagcattaccagttgtcgtaatgagcggggaaaaacgggccagcgtttcaaggtgttactctcgtcagacgcgaatagcctgatgctaaccgaggggaagttcagatacaacaaagccgggaattacccggctttgttatggaataaggcggtgcctaactcgacgtttcgcccgatggttgatatagctacgctgatatcagaagttggacggcaggcaccttgttgtgcgtcattcgtattttatgtagcacgtcccgaaggggctgacataataaaggaagatcttacctgggaagcgttccgcgacacgctgctggaacaggccgagcaaggtgtggattacttcactatccatgcgggcgtactgctgcgctatgtgccgatgaccgcgaaacgcctgaccggaatcgtctctcgcggcggttcgattatggcgaaatggtgcctctcccatcatcaggaaaatttcctctatcaacacttccgcgaaatttgtgaaatctgtgccgcttatgacgtttcgctgtcgctgggcgacggtctgcgccccggttctattcaggacgccaacgatgaagcgcagtttgccgagctgcatacgctgggcgaactgaccaaaattgcctgggaatatgacgtgcaggtgatgattgaaggcccaggccacgtgccgatgcagatgatccgccgcaatatgaccgaggagttagagcactgccacgaagcgccggtttacactctggggccgctaactaccgatattgcgccgggctatgaccacttcacgtcggggattggtgcggcgatgattggctggtttggctgcgcgatgctctgttacgtaacgccaaaagagcatatgggtcctgcccccccccaaaaatatttttaa

SEQ ID NO: 25171 - DNA, 1650 bp, Homo sapiens
  SIMILAR (839)..(789): 411254mologous to Escherichia coli Exoribonuclease II (EC 3.1.13.1) (Ribonuclease II) (RNase II),accession number D90766,Smith-Waterman Score=40.
ctaaacaggctcgttatcaaccaaacgaacacgcatgccgccacggctgatatcgacaatttccgctgcgaaacgggtgtcggtcccggctttgtctttcaggaagcgtgcgtataaccagtcaccaacatcacgttctgccatccggttgagacggcgacgctcggccatttggacagtgatttcatcctgtgggcgcgtcgcagtttcgcctttgataaccgctttcagcagacggtggttgatcatgtcgccatatttacggatcggcgaagtccaggtggcgtatgcttccagaccgaggccaaagtgaggaccgggttcagtgctaatttcagcaaatgactggaagcgacgaatgcggctgtcgaggaaaccagttggttgcgcgtccagttcacgacgcagtttgcagaaaccgtccagcgtgagcacttcttcggcatcgacatgcagaccgtgcgttttcagcaacgctgccagcgcgtcggcattcgccggatcaaagcccatatgcacgttatagatgccaaaaccgagcttatcgcgcagtacgcgggccgcacaaatgttagcggcaatcatcgcttcttcgacgatacggttggcaatgcgacgaggctcggcgacgatatccagcacttcacctttttcaccgagaataaagcggtaatccgggcgatctttaaacaccagtgcgtggttatgacgccactcgccgcggcgttggcaaatttgcgctagcaaacggacttgttcggcaattgctccactttcaggctgccagtcaccggtattttccagccagtcagaaacctggtcatacaccgagctttgctttggattcgatggtggcggcaaagaattcgatatttgagtatagagtaaatttacgaggaaacgaagtttcggagataatctgctgcagatctttcgattcgatgtggcaacgaagataaagttcggcagcagtttgccgtcgttcgcatacaccgggaagtatttctggtcacctttcatggtgtaaaccagcgcttcagccggcaccgcgaggaatttctcttcgaattttgcggtcagaacgaccggccactccaccagcgaagccacttcttccagcaggctttcgcttaagtcagcgttaccgccaatcttacgcgctgcttcttcggcatcggctttaatgttcttcgtaatcggcgatgactttcccacgtcacgcagaatttccggatactgatcggcgttatcgatggtgaattccggctcgcccataaagcggtggccgcgaatcacgcgatcggactgaatgcccagaatggttgccggaatgactttgtcgcccagcagcagggtcacggtgtgcaccggacgcacgaagtgcacgtcgttgcgccccaacgcatcagtttcgggatcggcagtttcgccagagaagtcgcaaccatattcggcagcagtgcttcggtgtttcgccggtaataccgcaaccacgcgcccaaccttctgacgctttgctcggtttgccttcagcgtcgaacgcctgggcaatcgccgggccgcgtttttcgatttcacgatccggttgcgttccgccaggttagctactttcagcgccagacgcccattgcctgatactgacgggttcat

SEQ ID NO: 25172 - DNA, 339 bp, Homo sapiens
  SIMILAR (145)..(336): 931254mologous to Escherichia coli 4-aminobutyrate aminotransferase (EC 2.6.1.19) (Gamma-amino-N-butyrate transaminase) (GABA transaminase) (Glutamate:succinic semialdehyde transaminase),accession number D90768,Smith-Waterman Score=294.
atgagtaagaagattgaatcagtaatcaaaaaactcccagaaaagaaatgtgtaggacctgatggcttcactgcccagaacgcctttcatttcgccttcagcagcagctttaacggcagctttgatctgctcggttcgtccacatttaacgatccgcaaacgggcgagcggtcaccggcgattgcacagaaatcccagcaacgcgcgctggcgcaggggctgctcttgctgacctgtggcgcatacggcaacgtgattcgcttcctgtatccgctgaccatccgggatgcgcaattcgatgcggcaatgaaaattttgcaggatgcgctgagcgattaa

SEQ ID NO: 25173 - DNA, 2337 bp, Homo sapiens
  SIMILAR (1638)..(1069): 971254mologous to Escherichia coli glycine-tRNA synthetase, beta subunit,accession number U00039,Smith-Waterman Score=958.
atggagctgaaaaacacagcacgagaacttcgtgaagcatacacaagtatcgatagccgaattgatcaagcagaagaaaaaatatcagagattgaagatcaacttaatgaaataaagcgtgaagagaagattagagaagaaagaatgaaaaggaatgaacaaagcctccaagaaatacgggactatgtgaaaagaccaaacctacatttgactggtgtacctgaaagtgactgggagaatggaaccaatttggaaaacacaattcaggatattatccaggagaacttccccaacatagcaagacaggccaacattcaaattcagaaaattcggagaacatcacaaagacacttcttgagaagagcaagacacataatcatcagattcaccaaggttgaaatgaaggaaaaaatgttaagggcagccagaaagaaagagcttcagggtgaagtccaggcggatggacacccatacgccatcgccgatccacgccagttgccgcacctggctctcccgccgcgggggttccgccgactcttcctcaaggacaacggcctcgtgggcattgaggagcagagcctgtgggggctggcggagctgctggagctcgacctgacctccaaccagctcacgcacctgccccaccgcctcttccagggcctgggcaagctggagtacctgctgctctcccgcaaccgcctggcagagctgccggcggacgccctgggccccctgcagcgggccttctggctggacgtctcgcacaaccgcctggaggcattgcccaacagcctcttggcaccactggggcggctgcgctacctcagcctcaggaacaactcactgcggaccttcacgccgcagcccccgggcctggagcgcctgtggctggagggtaacccctgggactgtggctgccctctcaaggcgctgcgggacttcgccctgcagaaccccagtgctgtgccccgcttcgtccaggccatctgtgagggggacgattgccagccgcccgcgtacacctacaacaacatcacctgtgccagcccgcccgagggcgtgccaatcatcgaaatcagccggacgagtcggacgacgcgccagtaccgcctggatggtgtcaacggtataaccttcgtcctgataccaggcgcggaagcgaccgagcataaagtcgataacatcatcaactacgttggcattagtcagcttatcgccatacagacgcaccgcttcttcggtcagcgtttgcagatcaaggttgaggttcttctcaacgataattcgcagcacgccaagcgcggcacgacgcagcgcaaacgggtctttgtcgcctttcggatgctgaccgataccgaagatacccgccagggtatccatcttgtcagcaatcgccagcgcacaagctactgggttggacggcaggtcatcaccagcaaaacgcggctgatactgctcattcagcgccaccgcgacatcttccgcttcgccatcgtgacgcgcatagtgcatccccataacgccctgggtgtcggtgaactcgaagaccatgttggtcatcaggtcgcacttagacagcagacccgcacgggtagcgtggttaacgtcagcgccaatcttgttcagcaatccagccagccagcgcctggatgcgataatctgctgcggatctttcgattcgatgttggcaacgaagataaagttcggcagcagtttgccgtcgttcgcatacaccgggaagtatttctggtcacctttcatggtgtaaaccagcgcttcagccggcaccgcgaggaatttctcttcgaattttgcgtcagcgttaccgccaatcttacgcgctgcttcttcggcatcggctttaatcttcgccttacgttcttcgtaatcggcgatgactttcccacgctcacgcagaatttccggatactgatcggcgttatcgatggtgaattccggctcgcccataaagcggtggccgcgaatcacgcgatcggactgaatgcccagaatggttgccggaatgactttgtcgcccagcagcagggtcacggtgtgcaccggacgcacgaagtgcacgtcgcttgcgccccaacgcatcagtttcgggatcggcagtttcgccagagaagtcgcaaccaggcgaccgtacagagatataaaagaagggttttcgcaaagagaggctgctctgctgccacagtcactgagggttccacagaccgggacctggagtgccgccggggcacaggcatgaccagcgactccctgctggacagacgcctgaaacggctccttgctgcagaggccaccgtggagcccagcacagccccctga

SEQ ID NO: 25174 - DNA, 735 bp, Homo sapiens
  SIMILAR (438)..(632): 541254mologous to Escherichia coli 4-aminobutyrate aminotransferase (EC 2.6.1.19) (Gamma-amino-N-butyrate transaminase) (GABA transaminase) (Glutamate:succinic semialdehyde transaminase),accession number D90768,Smith-Waterman Score=149.
atgcactgccggaccatcgcacctgattggtcgcggcggtggagcagcaactgcaacagtttacccacaccgcgtacagatgtgccgtatgaaagctacgtcaccctggcggagaaaatcaacgccttgccccggaattttaccacggcaattttcaacaaaggactccctcgacgcatcgaacgcttgtttaaatcagacatcgaagcgaagcaggtggcggcgttattttcgaaccggtgcagggcgagggcggtttcaacgttgcgccaaagagctggttgccgctattcgccgcctgtgcgacgagcacggtattgtgagattgctgatgaagtgcaaagcggctttgcgcgtaccgccggatttaatgacgatggcgaaaagctcgcgggcgggatgccgctttcgggcgtggtcggtaacgcgaatattaggacgcacccgcgccgggcgggcttggcggcacctacgccggtaacccgtggcggtggctgccgcgcacgcggtgctcaacattatcgacaaagaatcctctgcgaacgcgcgaatcaactgggccagcgtctcaaaaacacgttgatgatgccaaagaaagcgttccggccattgctgcggtacgcggcctggggcgatgattgcggggctgctccgctgacctgtggcgcatacggcaacgtgattcgcttcctgtatccgctgccatcccggatgcgcaattcgatgcggcaatga

SEQ ID NO: 25175 - DNA, 2466 bp, Homo sapiens; identical to SEQ ID NO: 14856
  SIMILAR (1)..(516): 991254mologous to Escherichia coli UDP-MurNAc-Tripeptide:D- Ala-D-Ala-Adding Enzyme,accession number U67893,Smith-Waterman Score=865.

SEQ ID NO: 25176 - DNA, 1972 bp, Homo sapiens
  SIMILAR (839)..(789): 411254mologous to Escherichia coli Exoribonuclease II (EC 3.1.13.1) (Ribonuclease II) (RNase II),accession number D90766,Smith-Waterman Score=40.
ctaaacaggctcgttatcaaccaaacgaacacgcatgccgccacggctgatatcgacaatttccgctgcgaaacgggtgtcggtcccggctttgtctttcaggaagcgtgcgtataaccagtcaccaacatcacgttctgccatccggttgagacggcgacgctcggccatttggacagtgatttcatcctgtgggcgcgtcgcagtttcgcctttgataaccgctttcagcagacggtggttgatcatgtcgccatatttacggatcggcgaagtccaggtggcgtatgcttccagaccgaggccaaagtgaggaccgggttcagtgctaatttcagcaaatgactggaagcgacgaatgcggctgtcgaggaaaccagttggttgcgcgtccagttcacgacgcagtttgcagaaaccgtccagcgtgagcacttcttcggcatcgacatgcagaccgtgcgttttcagcaacgctgccagcgcgtcggcattcgccggatcaaagcccatatgcacgttatagatgccaaaaccgagcttatcgcgcagtacgcgggccgcacaaatgttagcggcaatcatcgcttcttcgacgatacggttggcaatgcgacgaggctcggcgacgatatccagcacttcacctttttcaccgagaataaagcggtaatccgggcgatctttaaacaccagtgcgtggttatgacgccactcgccgcggcgttggcaaatttgcgctagcaaacggacttgttcggcaattgctccactttcaggctgccagtcaccggtattttccagccagtcagaaacctggtcatacaccgagctttgctttggattcgatggtggcggcaaagaattcgatatttgagtatagagtaaatttacgaggaaacgaagtttcggagataatctgctgcggatctttcgattcgatgttggcaacgaagataaagttcggcagcagtttgccgtcgttcgcatacaccgggaagtatttctggtcacctttcatggtgtaaaccagcgcttcagccggcaccgcgaggaatttctcttcgaattttgcggtcagaacgaccggccactccaccagcgaagccacttcttccagcaggctttcgcttaagtcagcgttaccgccaatcttacgcgctgcttcttcggcatcggctttaatcttcgccttacgttcttcgtaatcggcgatgactttcccacgctcacgcagaatttccggatactgatcggcgttatcgatggtgaattccggctcgcccataaagcggtggccgcgaatcacgcgatcggactgaatgcccagaatggttgccggaatgactttgtcgcccagcagcagggtcacggtgtgcaccggacgcacgaagtgcacgtcgcttgcgccccaacgcatcagtttcgggatcggcagtttcgccagagaagtcgcaaccatattcggcagcagtgcttcggtgctttcgcccttcacatgggcgcgatacagcagccattcgcctttatcggtagtcagacgctcagcctggtcaacggtaataccgcaaccacgcgcccaaccttctgccgctttgctcggtttgccttcagcgtcgaacgcctgggcaatcgccgggccgcgtttttcgatttcacgatccggttgcgcttccgccaggttagctactttcagcgccagacgacgcggagcaagcaaaccattgaacggttgcctgttgcgagccacgttatccagtcccgataaattccagcaaggatctaccggtggcatgctttggggcgtccttaggcattccccaaaattttcaattacggccgatggtcgcgaatttacgctacactggccgaatacgggtgcgatgaccggttgtgccacgcctggcgaatacgtctggtattcgactttcgacaacacccaacggaaatacccacacccttgggaattaat

SEQ ID NO: 25177 - DNA, 1524 bp, Homo sapiens
  SIMILAR (394)..(1521): 831254mologous to Escherichia coli 4-aminobutyrate aminotransferase (EC 2.6.1.19) (Gamma-amino-N-butyrate transaminase) (GABA transaminase) (Glutamate:succinic semialdehyde transaminase),accession number D90768,Smith-Waterman Score=1487.
atggagacacagcaccggctcatgaggaccttccagcctaggcagcaggactggacatacgcactttggggtggagttaaacttcggtggttgtttttctttctgtggggattatttctgtttgctggggaagaagaactcggcatccgccagacgcggacgaacgactttctcgttaccggagataatctgctgcggatctttcgattcgatgttggcaacgaagataaagttcggcagcagtttgccgtcgttcgcatacaccgggaagtatttctggtcacctttcatggtgtaaaccagcgcttcagccggcaccgcgaggaatttctcttcgaattttgcgttacccccaaacttaatgaggggactacacaaagaacgaataacagaggcattgcggtgctgaataccggacatcgccaccctgatctggtcgcggcggtggagcagcaactgcaacagtttacccacaccgcgtatcagattgtgccgtatgaaagctacgtcaccctggcggagaaaatcaacgcccttgccccggtgagcgggcaggccaaaaccgcggttttttcaccccggttcggaaacggggggaaaacggggtgaaaatggttcgcgcccataccgggacgcccggggtggattgcgtttaggggcggcctttcacggtcgtacgtatatgaccatggcgctgaccggaaaagttgccccgtacaaaatcggcttcggcccgttcccctggttcggtgtatcacgtaccttatccgtcagatttacacggcatttcaacacaggactccctcgcacgccatcgaacgcttgtttaaatcagacatcgaagcgaagcaggtggcggcgattattttcgaaccggtgcagggcgagggcggtttcaacgttgcgccaaaagagctggttgccgctattcgccgcctgtgcgacgagcacggtattgtgatgattgctgatgaagtgcaaagcggctttgcgcgtaccggtaagctgtttgccatggatcattacgccgataagccggatttaatgacgatggcgaaaagcctcgcgggcgggatgccgctttcgggcgtggtcggtaacgcgaatattatggacgcacccgcgccgggcgggcttggcggcacctacgccggtaacccgctggcggtggctgccgcgcacgcggtgctcaacattatcgacaaagaatcactctgcgaacgcgcgaatcaactgggccagcgtctcaaaaacacgttgattgatgccaaagaaagcgttccggccattgctgcggtacgcggcctggggtcgatgattgcggtagagtttaacgatccgcaaacgggcgagccgtcagcggcgattgcacagaaaatccagcaacgcgcgctggcgcaggggctgctcctgctgacctgtggcgcatacggcaacgtgattcgcttcctgtatccgctgaccatcccggatgcgcaattcgatgcggcaatgaaaattttgcaggatgcgctgagcgattaa

SEQ ID NO: 25178 - DNA, 187 bp, Homo sapiens; identical to SEQ ID NO: 24269
  SIMILAR (98)..(30): 471254mologous to Amycolatopsis orientalis putative phosphoenolpyruvate phosphomutase,accession number AL078635,Smith- Waterman Score=44.

SEQ ID NO: 25179 - DNA, 350 bp, Homo sapiens
  SIMILAR (144)..(350): 1001254mologous to Escherichia coli Arginine/ornithine antiporter,accession number D90803,Smith-Waterman Score=330.
acacttttagacacaaagttccccgcgaccattgcatgcagacacatatcttcgtaaatcccgcgcttcagtggcaaactccatttttatgcgttctgccctaatatttattcttcttatcacgttttaatcactggatatcgatggaaaagaaactgggactgagcgcactcaccgcgctggtattaagctcaatgctgggcgcgggtgttttcagtctgccgcaaaatatggcggcagttgccagcccggcagcactgctcatcggctggggtattactggcgctggcattttattgctggcctttgccatgctgatcctcacgcgcattcgtcccgaacttgacggg

SEQ ID NO: 25180 - DNA, 593 bp, Homo sapiens; identical to SEQ ID NO: 15848

SEQ ID NO: 25181 - DNA, 729 bp, Homo sapiens
  SIMILAR (199)..(729): 981254mologous to Escherichia coli K12 putative enzyme of polynucleotide modification,accession number AE000169,Smith- Waterman Score=909.
atgggcgtacttaataactggttgagcgaagaagaaagtctatggatccagtcgcgcattcatctacgggctctacgttattatagtaactggcggcaatactttgccggttatacctttggtcggcaatattggcagtctcccgaagatgatcatctgcctttattacgcgaattcttagcgcgatatgagcgacctatgaaaaattgctggaagatcctcgatatagaggaaacgactgacgtcgatattatccgccgcgcttatctggcgctgttaccgtcctttcatccagaaaccgatccgcaggattttaaacaacttcgtcaggcgtatgaggaggcgctacggattgcgcagtcgcctgctaaatctgtttggcaaccagaagaatatgaggtagcagaacatgaaattctgctcgcctttcgtgcgttacttgcctctgatagtgaacgttttctgccctccgcctggcagcgattcattcagcaattaaattattgctcgatggaggagattgatgaattacgctggtcgctgtgcacaatcgccatgaacactgcccatttatccttcgagtgcgtggtgttattagcagaaagattgcggtggttacaggaggaaaataccggggaaatagacgaagaagaactgggatcctttttatatgccattgcgaaggggaatgtttttaacttccagaccattctgcatctgcccgttgcc

SEQ ID NO: 25182 - DNA, 1008 bp, Homo sapiens
  SIMILAR (697)..(1005): 1001254mologous to Escherichia coli K12 putative kinase,accession number AE000361,Smith-Waterman Score=531.
atgcttgctatagcagattcaacagcagaaaatcagggtaaaattacactggattctatgtgggtagatgcaaatgacactaccgcaatgcgagatatagctagcaacagcgccattgacttcggtacagccacggagctttccgcgattcatggtcactcaacgtcgcaatatcgccttggagaattttatcttcatggtagcgacggtaaaccactggattatacacaggcgagatactggtatgagcaatcagcggaacaggaaaatccacgcgcgcaaagtaaactggggtggatctacctcaaaggtctgggggtcaaacccgacacccgtaaagcaattctctggtataaggaagcagctgaacaagggtatgctcatgctcaatatactttaggtttgatctacagaaatggctcaggtacatgcttttttgacctttcttcctcatggggaattgatgaccgtgatgacctgctgcgcacaattcaccgaatgatcgataacggtcatgccgctcggttggcagggttttatcaccgctggtttcgttattcgccatgtgaatggcgtgactatcttgctgaactaaatgagcaaggtcaggcttatgcgcaatttgaggatgccagggcgcaggatctttcaccggaagatttactcaacaaaaaagcttcttgtgtgccgccactgatttttgccgacgtgttcaaccttccggcacgacgtaacgccattaacggttgtgcaagcctgggggcagcgattaatacagcggtaggtctggggctatacccggattacgcaacggctgtcgataacatggttcgcgtgaaagatatctttataccgattgagagcaatgccaaacgctacgacgcgatgaataaaggcattttcaaagacctaaccaaacatactgatgtgatcctgaaaaaatcgtatgaagtgatgcatggggaattggggaatgtggattcgatccagagctggtcgaatgcgtaa

SEQ ID NO: 25183 - DNA, 1361 bp, Homo sapiens; identical to SEQ ID NO: 15850
  SIMILAR (616)..(1359): 941254mologous to Escherichia coli leucyl-tRNA synthetase,accession number X06331,Smith-Waterman Score=1244.

SEQ ID NO: 25184 - DNA, 2793 bp, Homo sapiens; identical to SEQ ID NO: 24272
  SIMILAR (1012)..(2064): 961254mologous to Escherichia coli glutamate synthase, large subunit,accession number U18997,Smith-Waterman Score=1723.

SEQ ID NO: 25185 - DNA, 853 bp, Homo sapiens
  SIMILAR (548)..(772): 961254mologous to Escherichia coli histidine-tRNA synthetase,accession number M11843,Smith-Waterman Score=402.
ttagtcaccggcccagatctcactgagctttatcaccaggccaatcacttatgtcgccctcggtgacgaaaacgcgcattagctgcgcttcattcagaccgctgacgacctggcgatgcagggcctcaatcgcgctcgatgcaccaattttatgtgcggaaggggcgattttttccagcaatcgcaaggtatcttccgttagcggtcgacgatctccagtgtgcggatcggtgatgacgccttcaagcccatagcgacaggcctggaaacggttgaatttatacagcaggtaatctttttcctgatgtttaaacgggcgttccgtcagtaaccagtgggcggtagcctgaattaatcccgccatatttactgcgtggctaagggttaacggggtatccatcacccgaacctccaccgtgccaaaatgaggactggggcgaatatcccagtgcagatctttaatgctgtcgatcatcgtggtgtaactcagacagcgaaacagggcttcaaattgttgccagttactttgaggatcgcaatggcgacagctgtagctctgcgccctgaagggacggcgggctgtgtacgcgccggcatcgagcatggtcttctgtacaatcaggaacagcgtctgtggtatatcgggccgatgttccgtcacgagcgtccgcagaaagggcgttatcgtcagttccatcagttgggctgcgaagttttcggtctgcaaggtccggatatcgacgctgaactgattatgctcactgcccgctgggtggcgcgcgctgggtatttccgagcacgtaactcttgagctgaactctatcggttcgatgatggccgtgctcgcgaccat

SEQ ID NO: 25186 - DNA, 1780 bp, Homo sapiens
tagccttgcatcgccttttcagcacgttgatatctctcttttgataaatatccagccacttggcgggaaatcattatcctttctctatggttccgataaaacacatataattttatgtggttcccatttgggagagccctttttttgcggagtatgtcggggccaaaaaatataaaaataccagcccccgcaatggcggaaaattctctttaaaggaatattaaaggataatttatatgcacatggagtcgcaaaaaatatggtttgccctttccactccgatggaaatacgcaatgaatgctgtttaccttcgcattcatcacccaaaatgtatttaggtgcctgcctttttgcccctttcttcctcatggggaattgatgaccgtgatgacctgctgcgcacaattcaccgaatgatcgataacggtcatgccgctcggttggcagggttttatcaccgctggtttcgttattcgccatgtgaatggcgtgactatcttgctgaactaaatgagcaaggtcaggcttatgcgcaatttgtcgccagcaccgccgaatgctgtggcgaagggggaatcaaagcctgggattatgtccggatgggttttttaagccgaatgggcgtacttaataactggttgagcgaagaagaaagtctatggatccagtcgcgcattcatctacgggctctacgttattatagtaactggcggcaatactttgccggttatacctttggtcggcaatattggcagtctcccgaagatgatcatctgcctttattacgcgaattcttagcgcaggaaacgactgacgtcgatattatccgccgcgcttatctggcgctgttaccgtcctttcatacagaaaccgatccgcagggttttaaacaacttcgtcatgcgtatgatgatgcgctaccgattgcgcagtcgcctgctaaatctgttttgcaaccagaagaatatgagtgggaagcgttgctggtggaaatgctcggcctgttgcatcgtattgcgatggtacaactttcgcctgctgcacttggcaacgacatggccgccatcgagctgcggatgcgtgaactggcgcgcaccataccgccgacggatattcagctttactatcagacgctgttgattggtcgcaaagaattaccgtatcgaacctgccaacttcatgcctgcacgtctgcagacacacctcttcgtaaaatcccgcgcttcagtggcaaactccatttttatgcgttttgccctaatatttattcttcttatcactctgccgcaaaatatggcggcagttgccagcccggcagcactgctcatcggctggggtattactggcgctggcattttattgctggcctttgccatgctgatcctcacgcgcattcgtcccgaacttgacggcggtatctttacctatgcccgcgaagggtttggcgagctaatcggcttttgttccgcattcagctcggaaaaagattacctgctgtataaattcaaccgtttccaggcctgtcgctatgggcttgaaggcgtcatcaccgatccgcacactggagatcgtcgaccgctaacggaagataccttgcgattgctggaaaaaatcgccccttccgcacataaaattggtgcatcgagcgcgattgaggccctgcatcgccaggtcgtcagcggtctgaatgaagcgcagctaatgcgcgatttcgtcgccgatggcggctcgctgattgggctggtgaaaaagcattgtgagatctgggccggtgactaa

SEQ ID NO: 25187 - DNA, 517 bp, Homo sapiens; identical to SEQ ID NO: 25140
  SIMILAR (96)..(458): 211254mologous to Xenopus laevis apical protein,accession number Z14997,Smith-Waterman Score=89.

SEQ ID NO: 25188 - DNA, 1463 bp, Homo sapiens; identical to SEQ ID NO: 25141
  SIMILAR (903)..(736): 961254mologous to Homo sapiens KB07 protein,accession number AF064606,Smith-Waterman Score=325.

SEQ ID NO: 25189 - DNA, 1221 bp, Homo sapiens; identical to SEQ ID NO: 25143
  SIMILAR (1212)..(103): 851254mologous to Escherichia coli ORF_f848,accession number U28377,Smith-Waterman Score=1641.

SEQ ID NO: 25190 - DNA, 1624 bp, Homo sapiens; identical to SEQ ID NO: 25144
  SIMILAR (1)..(822): 1001254mologous to Methylomonas aminofaciens transposase,accession number AB026428,Smith-Waterman Score=1460.

SEQ ID NO: 25191 - DNA, 894 bp, Homo sapiens; identical to SEQ ID NO: 25145
  SIMILAR (435)..(1): 1001254mologous to Escherichia coli OUTER MEMBRANE USHER PROTEIN PAPC PRECURSOR,accession number D90864,Smith-Waterman Score =744.

SEQ ID NO: 25192 - DNA, 2063 bp, Homo sapiens; identical to SEQ ID NO: 25146
  SIMILAR (1478)..(1627): 921254mologous to Escherichia coli malY,accession number M60722,Smith-Waterman Score=235.

SEQ ID NO: 25193 - DNA, 1958 bp, Homo sapiens
  SIMILAR (80)..(208): 1001254mologous to Escherichia coli Ribonuclease H (EC 3.1.26.4) II,accession number D83536,Smith-Waterman Score=208.
gttcttactgctcctgtgggaaatcagaaagagcagccagcagacaacaccaactgagatgaatgcagctgaaatggcacagctggttgcgggtgtggatgaagtcggacgcgggccgttagttggcgcggtcgtcaccgctgcggtgatccttgacccggcgcgcccgattgccgggctgaatgattccaaaaagctgagcgaaaaaccgccgtctggcgctctatgaagagatcaaagagaaagcgttgagctggagtctgggccgcgcggaaccccccgaaatcgacgagctgaacattcttcatgcgaccatgctggcgatgcagcgtgccgtcgttgggctgcatattgcgccggaatatgtgttgattgatggtaaccgctgcccgaaattaccgatgcctgcgatggctgtggtgaaaggcgatagccgcgtaccggaaatcagtgccgcgtctatcctggcgaaagtgacgcgtgacgccgaaatggcggcgctggatattgttttcccgcaatatggttttgcccaacacaaagggtacccaaccgcttttcatctggaaaaactggctgaacacggcgcgaccgaacaccatcggcgcagctttgggcctgtcaaacgcgcactgggacttgcgtcctgattcttgtgtcgagattaagtaaaccggaatctgaagatgtcttgtgacaggggtatatgctacatgtaacattattaaagtctgaacatctaagtttatgaactcctgttgaagctgctgcaaatttggtgaaccagtaacaattggaacgtgatttggagttgggtcgcagacagctggaggtggggatctttgttgccagaattgcaagggttgaaatggaataatccctttcctctctatcctaagggacacagccaacacccctgactcctgctgtgtatgggattcagctacacccaggggccagtcagcagcttccctagtcacctgtcccaggagggttttgttgttaatggccttttgaagaagcacttcatagcgaacatctttctctagcaccgtcataaatagatttctaacaagttctagaggacagattctagtaaggtcggggaattctctacagaggattactgggccgtggggccccctgtcccccaacttctgcatgtcactttttcctcctgggcttctgggcctgtgatggaagcggctgccatgagaaccactgacatgccctggtgacattttttcctttgtcttggtgataaacatccagctcctcattacacagatttttgcagccagcttgactttcttctcagaaaattggtttttcttttctatctcattgtcaggctgcaaattttctgaacttttatgctctgcttcccttataaaactgaatgcttttaacagcatccaggtcacctcttgaatgctctgctgcttagaaatttctttcactatattccctaaatcatctctcacaagttcaaagctccacaaatctctagggcagggacaaaatgccaccaatctctttgctaaaacataacaagagtcacctttgctccacttctcaacaagttcctcatctccatctgagactatctcagtctggattttattgtccatatcattatcagcattttggtcaaagccattcaacaagtctctaggaaattccgaactttcccatattttctgttttcttctgagccctccaaactgttccaacctctgcctgttacccagttccaaagttgcttccacattttcaggtaccttttcagcagtgtcccattcatcaaaggttggggctcctgtggttggcaagctagtcacaaagtaaattgattgatgttggatggcccattcagtctcagggggagtatccttgtggtgaggtgtactgtgagagcacagcacagcccatccctgtggtctttccattttggacat

SEQ ID NO: 25194 - DNA, 392 bp, Homo sapiens
  SIMILAR (179)..(3): 1001254mologous to Escherichia coli genF peptide,accession number M27058,Smith-Waterman Score=319.
atcgcggcgaagatccagccgaagacgcacgatacgctcacaccaatcaaccccggcagaataaagctgtggttgatgacgaagcgaccgatgtgggtggtgccggaacggtcaaactgaatcgctgccagatcgctcggataagtcggcaggatgtaataaccgtagcaagccggtgcgaacatggtttctgccatccatgcgataccgtacaccgccacgatggcgatcataccggaacggaagacttcgttttttgagatagacgcgggattggttttggtcaggataataatcagcgccccggtcagcagcataaacatctgaataaccagtaccatcgacagcggtttgccgccgaaggatgacgcagtttcctcaatggggcacat

SEQ ID NO: 25195 - DNA, 679 bp, Homo sapiens
  SIMILAR (679)..(185): 1001254mologous to Escherichia coli K12 putative nucleotide- binding protein,accession number AE000375,Smith-Waterman Score=858.
actcggtgcgcgcaaaatgatacagcgaatttccggccggttgagatcgcttaacgcctgcataagatcatcaataaagactttacttaaggcattaagttttcggccatagttaaactcaatgaccgccactttgttgatagtgacaacgttaacatactgataagacataaaaattcctttaatcaaaatattgcgtctggataaattcactgagctgccgcaggccggtgcgcggtgagagcgtattgtttttgaccgctaaaagcgtctggcggtaatagcgatcgaaatcttcattcgcgaacaggtgattcagtacttcttcttcggtctgcttacgcagccattccaccgattgttgttgccgcacttgttgtaaacgaccactggcagttagcgcggttttgaagtcgatgatggcgtgccagatctcatcgattccacgtttttccagtgcgctacaagtcagaacccgtggctgccattcgtcgtatttacgtcgcagaatatgcagggcactctcgtacatatgccgggcaatggcgacattggtatggttatcgccatcgtctttgttgataacgatcagatcagccacttccatcagcccttttttaatgccctgcagatcatcgccgccaccggcaatttgcaacgagataaaacagtccaccat

SEQ ID NO: 25196 - DNA, 706 bp, Homo sapiens; identical to SEQ ID NO: 21576
  SIMILAR (642)..(4): 1001254mologous to Escherichia coli genF peptide,accession number M27058,Smith-Waterman Score=1081.

SEQ ID NO: 25197 - DNA, 2186 bp, Homo sapiens; identical to SEQ ID NO: 13186
  SIMILAR (1242)..(679): 981254mologous to Escherichia coli genF peptide,accession number M27058,Smith-Waterman Score=935.

SEQ ID NO: 25198 - DNA, 4376 bp, Homo sapiens
  SIMILAR (3255)..(4361): 961254mologous to Escherichia coli RhsB core protein with unique extension,accession number U00039,Smith-Waterman Score=1925.
  misc_feature (1)...(4376): n = a,t,c or g
atgaacgaacaatattccgcattgcgtagtaatgtcagtatgctcggcaaagtgctgggagaaaccatcaaggatgcgttgggagaacacattcttgaacgcgtagaaactatccgtaagttgtcgaaatcttcacgcgctggcaatgatgctaaccgccaggagttgctcaccaccttacaaaatttgtcgaacgacgagctgctgcccgttgcgcgtgcgtttagtcagttcctgaacctggccaacaccgccgagcaataccacagcatttcgccgaaaggcgaagctgccagcaacccggaagtgatcgcccgcaccctgcgtaaactgaaaaaccagccggaactgagcgaagacaccatcaaaaaagcagtggaatcgctgtcgctggaactggtcctcacggctcacccaaccgaaattacccgtcgtacactgatccacaaaatggtggaagtgaacgcctgtttaaaacagctcgataacaaagatatcgctgactacgaacacaaccagctgatgcgtcgcctgcgccagttgatcgcccagtcatggcataccgatgaaatccgtaagctgcgtccaagcccggtagatgaagccaaatgggggctttgccgtaatgggaaaacagcctgtggcaaggcgtaccaaattacctgggccgaactgaacaaacaactggaagagaaacctcggctacaaacttgcccgtcgaaatttggttccggtccgttttacttctagtgggcgaatctggctgcggtaaatcgaccctcggtcggttgctgacgatgattgaaatgcccaccggtggcgagctgtattaccaggggcaggatctgcttaagcacgatccgcaggcgcagaagctgcgtcggcagaaaatccagatcgtcttccagaacccttacggttcgctgaatccgcgtaaaaaagtcgggcaaattcttgaagagccgctgctgatcaacaccagcttaagcaaagaacagcgtcgggaaaaagccctgtcgatgatggcgaaagtcggcctgaaaaccgagcactatgaccgctatccgcatatgttctccggcggtcagcgtcacgtnatcgccatcgcccgtggtctgatgctcgacccggatgtggtgattgccgatgaaccggtttccgcgctggatgtttcagtgcgcgcgcaggtgctgaatctgatgatggatttgcagcaggagttggggctgtcttatgtctttatctcccacgacctgtcggtggtggagcacattgctgatgaagtgatggacgatatctcggactatgtggcctctaacgttaaagatacgcttagccgtctgaatggcgtcggtgacgtacagcttttcggcgcacagtatgcgatgcgtatctggctggatgccgatctgctaaacaaatataaactgacaccggttgatgtgattaaccagttgaaggtacagaacgatcagatcgctgccggacagttgggcggaacgccagcgttaccagggcaacaattgaacgcctcgattattgctcagacgcggtttaaaaatccggaagaattcggcaaagtgaccctgcgcgtaaacagtgacggctcggtggtacgcctgaaagatgtcgcacgggttgaacttggcggtgaaaactataacgttatcgctcgtatcaacggaaaaccggcggcgggcctggggattaagctggcaaccggcgcgaatgctctcgataccgcgaaagccattaaggcaaaactggcggaattacagccattcttcccgcagggaatgaaggttctctacccttatgacaccacgccattcgtccagctttctattcacgaagtggtaaaaacgctgttcgaagccattatgctggtgttcctggtgatgtatctgttcttgcagaatatgcgagcaacgctgatccccaccattgcggtacccgtggtgttgttagggacgtttgccatcctcgccgcttttggttactccatcaacacactaacgatgttcgggatggtgcttgccatcgggctgctcgtcgatgatgcgatagtggtggtggagaacgtcgagcgcgtgatgatggaggataagctcccgccaaaagaagcgacggaaaaatcgatgtcgcaaattcagggcgcactggtgggtatcgcgatggtgctgtcagcggtatttattccgatggcattcttcggcggttctactggggcaatttatcgccagttctctatcaccatcgtttcggcaatggcgctttctgttctggtggcattgattcttacccctgcgttatgtgaacgctgcttaaacccgtctctgctgagcatcacgaaaataagggcggtttcttcggacactaacagcatcctgtttattgatgagatccacaccattatcggtgcgggtgcagcgtctggtggtcaggtcgatgcggctaacctaatcaaaccgttgctctccagcggtaaaattcgtgtaattggttcgacaacctatcaggagttcagcaacattttcgagaaagaccgtgctctggcgcgtcgcttccagaaaattgatattactgaaccgtcgatcgaagaaactgttcaaatcatcaatggcctgaaaccgaagtatgaagcgcaccacgacgtgcgttataccgcaaaagcggtgcgtgcggcggtagagctggcggtgaaatacattaacgatcgtcatctgccggataaagccattgatgttatcgacgaagcgggcgctcgcgcacgcctgatgccggtaagcaaacgcaagaaaaccgttaatgtggcggatattgagtccgtggtggcccgtattgcacgcattccagagaagagtgtttctcagagtgatcgtgataccctgaaaaacctcggcgatcgcttgaaaatgctggtcttcggtcaggataaagccattgaggcgctgactgaagccattaagatggcgcgtgcaggtttaggtcacgaacataaaccggttggttcgttcctgtttgccggccctaccggggtcgggaaaacagaggtgacggtacagctttcgaaagctttgggcattgagcttctgcgctttgatatgtccgagtatatggaacgccataccgtcagccgtcttattgctgctactcttttggagccactgagaatagatttaggttccaatgccaacctgtttttgaactccccacacctgtctttgatatgcccactggtgaaaagctctcggatccagtctacacaacttgacggcgatatcacccgctaccgttatgataatcacacagttgacttaccctgcgcacgggaagatgccaccggcagccggaaaaccatgacgtggagccgttacggtcagttgctgagcttaacagactgttccggttatgtaacccgttatgaccatgaccgcttcgggcagatgacggcggtgcaccgcgaggaagggctgagtcagtaccgcgcatacgacagccctggacagttaattgccgtgaaagacacgcagggccatgaaacgcggtatgaatacaacatcgccggtgacctgaccgccgtcattgccccggacggcagcagaaacgggacacagtacgatgcgtggggaaaggccgtccgtaccacgcagggcgggctgacgcgcagtatggaatacgatgctgccggacgggtcatccgcctgaccagtgaaaacggcagccacaccaccttccgttacgatgtacttgaccggctgatacaggaaaccggctttgacggccgcacacagcgttatcaccacgacctgaccggcaaacttatccgcagcgaggatgagggtctggtcacccactggcactatgacgaagcagaccgcctcacgcaccgcaccgtgaagggtgaaaccgcagagcggtggcagtatgacgaacgtggctggctgacagacatcagccatatcagcgaagggcaccgggtggcggtgcattacaggtatgatgagaaaggccggctgaccggtgagcgtcagacggtgcatcacccgcagacggaagcactgctctggcagcatgagaccagacatgcgtacaacgcgcaggggctggcgaaccgctgtataccggacagcctgcccgccgtggaatggctgacctacggcagcggttacctggcaggcatgaaactcggcgacacaccgctggtggagtacacccgcgaccgcctgcaccgggaaacgctgcgcagcttcggccgttatgaacttaccaccgcttatacccctggcgggcagttacagagccagcacctgaacaggctgctgtctggacgcgattacacctggaacgacaacggcgaaactcaatcgcattaa

SEQ ID NO: 25199 - DNA, 1640 bp, Homo sapiens
  SIMILAR (1397)..(1347): 1001254mologous to Escherichia coli similar to P. putida sugar metabolism enzymes,accession number L10328,Smith-Waterman Score=87.
ctaagaaccctctggctgccctaaaaagttaaaagaaagggactgtgcaccaatgtgtttaaaactgaccagaattctcaagactgctggtaagactttgtacttcttccttccatatgcaggatgtaacattcggcgggcaaatttaaccagtggctttagcccggactgggcaaactcaatgaccttgatcccttcggcatcaaaatgatgtccgcactgacgcgccagttcattgataacccaggtttccgtttccccttccaccagcaaccagcagcgtgcaaacagcgatgacggacggttaaaacgaatgtgaaaggatatgcgtcggctatcttcggtactcaagccactcggccccagacgccaggcggcaacgcgcgaggactcacgtaccagtcggcaaacatgctctaccggcgttaacgaaagcaactcacccgagttggtggtggcaatgcgctgcaatggcagaagattcaacagatgccaggcaactgaaagcataatggggtgtaaacgggtttctggatcttcgatcagcaacaatggacgggcgtctttatccagtcgcaatgtgccttttgcctgcaacaaagtagcaaataggccgagcaaaataacccgatacgagcgcccaccaggtcggtcaatcatccggttgatgatatccagatagcgccagcttcgttgctcattgctggctcgccgccgcattaaacgatatcgcgcctgtccggccccctgctcagagaaataatgctcaagcagctgtaccattgcggaaagtccctgacgaatctgcccatcagagagattttgcggatgtgaggataactcacgggcgaggaaatcgagctggcgcgcggtgacttccacattagggactgcgtctatccactgcgccaggttttctggcgtcacgccgccaacggcaaagactgcgatgtccgatggcaataccgcttttaacgctttgatgtattgcggaccaaaagccgatgacggaaatattttcagcgcctgcgcgcccgcttcgagcgcggtaaaggcttcggtcgccgtcgcgcagccggggcagacggtcatgccgtagcccaccgcacggcggatcacttcactatggatattgggcgtaacgatgagctgacagcccatcctggcgagcgcatcgacctgttcaggtttcagtaccgtacctgcgccaatcaacgccttgtcgccgtacgcatcaacgatggcgggaatgctttgctcccattgtggggaattcagcgggatttcaaccgcgtcgaacccggcgtcaatcaccgcgccaacatgcgccagcgcctcgtcggagaagtaataccgcgcaaaatggcgatcagcgggagtttagtttgccactgcatgagcgatgctccagcctgaaatgccgtgtcgcccggcaacggcgtcacgtcgcaacccatcgcctgaaaggcttgctggtagcgcgcggtcagcgatgttccggcgcacacggtgatggcgtgttcgtttccgtgaaagtgccggacccgaaattctcctcccagaccaaagacaaactggtttcttctgaggtgaaatcggcggttgaacagcagatgaacgaactgctggcagacatacct

SEQ ID NO: 25200 - DNA, 3289 bp, Homo sapiens
  SIMILAR (2005)..(2241): 981254mologous to Escherichia coli chromosome arginine transport ATPase,accession number U65074,Smith-Waterman Score=389.
atgccgatcacattacggcggtcagtggaaaaagagcagctgattgaaatagccaatacgataatgccgtttggcaaatacaaagggcgtcgcttaatcgacctgccggaggagtatctgctgtggtttgcccgcaaagatgagttcccggcagaagctcgctacacccacatcgacttgcacgtaccagccccacttctcgtcatgttcacgctagacacgcgccagagcgcctgtgaccggaacccgcatttgcccatacacgtctgcagtagctggacatcgccgaaatgcgcccctcgattgtggacacgcgctctacttccacgcacacggacgccgccatacgccacgggcacgaccatcgggtcaagagcatcctggtttgtaacgtttcctgatgcgtcgttttaccgccggaaagcgccccgccaagaatttcacacatcgctgcaagggcgtagcctttatgttcggcaaaggtcaacagcgaacccaaccgaaattacccgtcgtacactgatccacaaaatggtggaagtgaacgcctgtttaaaacagctcgataacaaagatatcgctgactacgaacacaaccagctgatgcgtcgcctgcgccagttgatcgcccagtcatggcataccgatgaaatccgtaagctgcgtccaagcccggaagccataatgacggaacaagaaaaaacctccgccgtggttgaagagaccagggaggccgtggacaccacgtcacaacctgtcgcaacagaaaaaaagagtaagaacaataccgcattgattctcagcgcggtggctatcgctattgctctggcggcgggcatcggtttgtatggctgggacagaaatatattgaaaacgagggtgtggcaaactaaactcccgctgatcgccattttgcgcggtattacgcccgacgaggcgctggcgcatgttggcgcggtgattgacgccgggttcgacgcggttgaaatcccgctgaattccccacaatgggagcaaagcattcccgccatcgttgatgcgtacggcgacaaggcgttgattggcgcagttgggcgggcagcgagagttgcgagaggaatgctttactgtaatgcggcagcgaattatcgtagttacgtgatcgacacaatgcaccagctgagtcctggttattcagatgtttatgctgctgaccggggcgctgattattatcctgaccaaaaccaatcccgcgtctatctcaaaaaacgaagtcttccgttccggtatgatcgccatcgtggcggtgtacggtatcgcatggatggcagaaaccatgttcgcgaagcgattcgcgtggtgctggcgattatcgcctttgcctccatcatcttcggtaacctgatggcgctgagccagaccaatatcaaacgtctgctcggttactcatctatctctcacctcggctatctgctggtagcgctgattcgctgcaaaccggcgagatgtcgatggaagcgcagcctcggcgcgttcggcgtggtcagcctgatgtccagcccgtatcgtggcccggatgctgattccctgttctcttaccgcgtgatgacggtgatgatgctgtctctggccggtaacccgatgaagcttatttatcgaacagttatacgtgctagcggtcgatgtctagacacacttgtagacgcacagactttcgcggctaatgcagcaaactatgatacctggacttatatcgataatcccgttacagcacttgattgggatcatatggataaggcaggcactgtagatggcaactatgtaaactatagtggttttgtctattacaacaacaccaatggtgattccgatcagtcctttagcggcgacaaggacatgatttttgccatcctgaagcagcacgcaaagagtggcgaagatatctttggtgatggcgtacttgatgtaatgcaggatggctttggtttcctccgctccgcagacagctcctacctcgccggtcctgagggattaaaggtcgcggttattgcggtcgatcccagcagcccggtcactggcggtagcattctcggggataaaacccgcatgaatgacctggcgcgtgccgaagcggcgtttattcgcccggtaccatcctccggtcatatgggcggtgccagtcagcgagcgcgggaattaatgctgttatgcgaagcagcgggttatgacgtagtgattgtcgaaacggttggcgtcgggcaagtcggaaacagaagtcgcccgcatggtggactgttttatctcgttgcaaattgccgggggggcggatgatctgcagggcattaaaaaagggctgatggaagtggctgatctgatcgttatcaacaaagacgatggcgataaccataccaatgtcgccattgcccggcatatgtacgagagtgccctgcatattctgcgacgtaaatacgacgaatggcagccacgggttctgacttgtagcgcactggaaaaacgtggaatcgatgagatctgggacctgcaggcatgcaagaacaaactgaaaaacccgccacaaagcctgaaagaactggttgagagcgatcaaaactggcgggtgatttatcaggatccgcgcaccagtacaccggggctgggtctgttgctatggatgcaaaaagtctatggcgatgacgccccacaagcctggcagaaactggcgaagaaaacggtcacggtcaccaaaggctggagcgaagcctacggcctgtttttaaaaggtgaaagcgatctggtactgagttacaccacctctccggcttatcacattctcgaagagaagaaagataactacgccgccgcgaacttcagcgaaggtcactatctgcaagtggaagtcgccgcccgcaccgctgccagcaagcagccggagctggcgcaaaaattcctccagtttatggttctccggtttccagaatgcgactgccagccatcgtggcgactcgataaaacaaaatccatcgcgttctggattgacctgcagagcaagagcatcatgctggaactactttttgtgattggcttttttgtcatgctgatggtcaccggcgtttcgttgctgggcattatcgccgcgctggttgtggcgacggccattatgttcctcggcggtatgctggcattgatgataaagttgctgccgtggcaactactggcgattgcggtggtaaggtcccgggtccggaggggaaacttacccccccgggtcgaagaaccccaaggaaagtatttcgggttacggcaaccgtaa

SEQ ID NO: 25201 - DNA, 1428 bp, Homo sapiens; identical to SEQ ID NO: 25160
  SIMILAR (1)..(438): 971254mologous to Escherichia coli alpha-glucan phosphorylase,accession number U18997,Smith-Waterman Score=751.
